United States Patent Application Publication US 2024/0327476 A1 - sequence listing, part 17

SEQ ID NO: 19007 - DNA, 16862 bp, Homo sapiens
  source 1..16862: mol_type = unassigned DNA
gaggtgcgcgcgcccgcgccgatgtgtgtgagtgcgtgtcctgctcgctccatgttgccgcctctcccggtacctgctgctgctcccggggctgcgggaaatgcgagaggctgagccggggaggaggaacccgagcagcagcggcggcggcggcggccgcggcggcgggagccccccaggaggaggaccgggatccatgtgtctttcctggtgactaggatgtcgtcggaggaggacaagagcgtggagcagccgcagccgccgccaccaccccccgaggagcctggagccccggccccgagccccgcagccgcagacaaaagacctcggggccggcctcgcaaagatggcgcttcccctttccagagagccagaaagaaacctcgaagtagggggaaaactgcagtggaagatgaggacagcatggatgggctggagacaacagaaacagaaacgattgtggaaacagaaatcaaagaacaatctgcagaagaggatgctgaagcagaagtggataacagcaaacagctaattccaactcttcagcgatctgtgtctgaggaatcggcaaactccctggtctctgttggtgtagaagccaaaatcagtgaacagctctgcgctttttgttactgtggggaaaaaagttccttaggacaaggagacttaaaacaattcagaataacgcctggatttatcttgccatggagaaaccaaccttctaacaagaaggacattgatgacaacagcaatggaacctatgagaaaatgcaaaactcagcaccacgaaaacaaagaggacagagaaaagaacgatctcctcagcagaatatagtatcttgtgtaagtgtaagcacccagacagcttcagatgatcaagctggtaaactgtgggatgaactcagtctggttgggcttccagatgccattgatatccaagccttatttgattctacaggcacttgttgggctcatcaccgttgtgtggagtggtcactaggagtatgccagatggaagaaccattgttagtgaacgtggacaaagctgttgtctcagggagcacagaacgatgtgcattttgtaagcaccttggagccactatcaaatgctgtgaagagaaatgtacccagatgtatcattatccttgtgctgcaggagccggcacctttcaggatttcagtcacatcttcctgctttgtccagaacacattgaccaagctcctgaaagatcgaaggaagatgcaaactgtgcagtgtgcgacagcccgggagacctcttagatcagttcttttgtactacttgtggtcagcactatcatggaatgtgcctggatatagcggttactccattaaaacgtgcaggttggcaatgtcctgagtgcaaagtgtgccagaactgcaaacaatcgggagaagatagcaagatgctagtgtgtgatacgtgtgacaaagggtatcatactttttgtcttcaaccagttatgaaatcagtaccaaccaatggctggaaatgcaaaaattgcagaatatgtatagagtgtggcacacggtctagttctcagtggcaccacaattgcctgatatgtgacaattgttaccaacagcaggataacttatgtcccttctgtgggaagtgttatcatccagaattgcagaaagacatgcttcattgtaatatgtgcaaaaggtgggttcacctagagtgtgacaaaccaacagatcatgaactggatactcagctcaaagaagagtatatctgcatgtattgtaaacacctgggagctgagatggatcgtttacagccaggtgaggaagtggagatagctgagctcactacagattataacaatgaaatggaagttgaaggccctgaagatcaaatggtattctcagagcaggcagctaataaagatgtcaacggtcaggagtccactcctggaattgttccagatgcggttcaagtccacactgaagagcaacagaagagtcatccctcagaaagtcttgacacagatagtcttcttattgctgtatcatcccaacatacagtgaatactgaattggaaaaacagatttctaatgaagttgatagtgaagacctgaaaatgtcttctgaagtgaagcatatttgtggcgaagatcaaattgaagataaaatggaagtgacagaaaacattgaagtcgttacacaccagatcactgtgcagcaagaacaactgcagttgttagaggaacctgaaacagtggtatccagagaagaatcaaggcctccaaaattagtcatggaatctgtcactcttccactagaaaccttagtgtccccacatgaggaaagtatttcattatgtcctgaggaacagttggttatagaaaggctacaaggagaaaaggaacagaaagaaaattctgaactttctactggattgatggactctgaaatgactcctacaattgagggttgtgtgaaagatgtttcataccaaggaggcaaatctataaagttatcatctgagacagagtcatcattttcatcatcagcagacataagcaaggcagatgtgtcttcctccccaacaccttcttcagacttgccttcgcatgacatgctgcataattacccttcagctcttagttcctctgctggaaacatcatgccaacaacttacatctcagtcactccaaaaattggcatgggtaaaccagctattactaagagaaaattttctcctggtagacctcggtccaaacagggggcttggagtacccataatacagtgagcccaccttcctggtccccagacatttcagaaggtcgggaaatttttaaacccaggcagcttcctggcagtgccatttggagcatcaaagtgggccgtgggtctggatttccaggaaagcggagacctcgaggtgcaggactgtcggggcgaggtggccgaggcaggtcaaagctgaaaagtggaatcggagctgttgtattacctggggtgtctactgcagatatttcatcaaataaggatgatgaagaaaactctatgcacaatacagttgtgttgttttctagcagtgacaagttcactttgaatcaggatatgtgtgtagtttgtggcagttttggccaaggagcagaaggaagattacttgcctgttctcagtgtggtcagtgttaccatccatactgtgtcagtattaagatcactaaagtggttcttagcaaaggttggaggtgtcttgagtgcactgtgtgtgaggcctgtgggaaggcaactgacccaggaagactcctgctgtgtgatgactgtgacataagttatcacacctactgcctagaccctccattgcagacagttcccaaaggaggctggaagtgcaaatggtgtgtttggtgcagacactgtggagcaacatctgcaggtctaagatgtgaatggcagaacaattacacacagtgcgctccttgtgcaagcttatcttcctgtccagtctgctatcgaaactatagagaagaagatcttattctgcaatgtagacaatgtgatagatggatgcatgcagtttgtcagaacttaaatactgaggaagaagtggaaaatgtagcagacattggttttgattgtagcatgtgcagaccctatatgcctgcgtctaatgtgccttcctcagactgctgtgaatcttcacttgtagcacaaattgtcacaaaagtaaaagagctagacccacccaagacttatacccaggatggtgtgtgtttgactgaatcagggatgactcagttacagagcctcacagttacagttccaagaagaaaacggtcaaaaccaaaattgaaattgaagattataaatcagaatagcgtggccgtccttcagacccctccagacatccaatcagagcattcaagggatggtgaaatggatgatagtcgagaaggagaacttatggattgtgatggaaaatcagaatctagtcctgagcgggaagctgtggatgatgaaactaagggagtggaaggaacagatggtgtcaaaaagagaaaaaggaaaccatacagaccaggtattggtggatttatggtgcggcaaagaagtcgaactgggcaagggaaaaccaaaagatctgtgatcagaaaagattcctcaggctctatttccgagcagttaccttgcagagatgatggctggagtgagcagttaccagatactttagttgatgaatctgtttctgttactgaaagcactgaaaaaataaagaagagataccgaaaaaggaaaaataagcttgaagaaactttccctgcctatttacaagaagctttctttggaaaagatcttctagatacaagtagacaaagcaagataagtttagataatctgtcagaagatggagctcagcttttatataaaacaaacatgaacacaggtttcttggatccttccttagatccactacttagttcatcctcggctccaacaaaatctggaactcacggtcctgctgatgacccattagctgatatttctgaagttttaaacacagatgatgacattcttggaataatttcagatgatctagcaaaatcagttgatcattcagatattggtcctgtcactgatgatccttcctctttgcctcagccaaatgtcaatcagagttcacgaccattaagtgaagaacagctagatgggatcctcagtcctgaactagacaaaatggtcacagatggagcaattcttggaaaattatataaaattccagagcttggcggaaaagatgttgaagacttatttacagctgtacttagtcctgcgaacactcagccaactccattgccacagcctcccccaccaacacagctgttgccaatacacaatcaggatgctttttcacggatgcctctcatgaatggccttattggatccagtcctcatctcccacataattctttgccacctggaagcggactgggaactttctctgcaattgcacaatcctcttatcctgatgccagggataaaaattcagcctttaatccaatggcaagtgatcctaacaactcttggacatcatcagctcccactgtggaaggagaaaatgacacaatgtcgaatgcccagagaagcacgcttaagtgggagaaagaggaggctctgggtgaaatggcaactgttgccccagttctctacaccaatattaatttccccaacttaaaggaagaattccctgattggactactagagtgaagcaaattgccaaattgtggagaaaagcaagctcacaagaaagagcaccatatgtgcaaaaagccagagataacagagctgctttacgcattaataaagtacagatgtcaaatgattccatgaaaaggcagcaacagcaagatagcattgatcccagctctcgtattgattcggagctttttaaagatcctttaaagcaaagagaatcagaacatgaacaggaatggaaatttagacagcaaatgcgtcagaaaagtaagcagcaagctaaaattgaagccacacagaaacttgaacaggtgaaaaatgagcagcagcagcagcaacaacagcaatttggttctcagcatcttctggtgcagtctggttcagatacaccaagtagtgggatacagagtcccttgacacctcagcctggcaatggaaatatgtctcctgcacagtcattccataaagaactgtttacaaaacagccacccagtacccctacgtctacatcttcagatgatgtgtttgtaaagccacaagctccacctcctcctccagccccatcccggattcccatccaggatagtctttctcaggctcagacttctcagccaccctcaccgcaagtgttttcacctgggtcctctaactcacgaccaccatctccaatggatccatatgcaaaaatggttggtacccctcgaccacctcctgtgggccatagtttttccagaagaaattctgctgcaccagtggaaaactgtacacctttatcatcggtatctaggccccttcaaatgaatgagacaacagcaaataggccatcccctgtcagagatttatgttcttcttccacgacaaataatgacccctatgcaaaacctccagacacacctaggcctgtgatgacagatcaatttcccaaatccttgggcctatcccggtctcctgtagtttcagaacaaactgcaaaaggccctatagcagctggaaccagtgatcactttactaaaccatctcctagggcagatgtgtttcaaagacaaaggatacctgactcatatgcacgacccttgttgacacctgcacctcttgatagtggtcctggaccttttaagactccaatgcaacctcctccatcctctcaggatccttatggatcagtgtcacaggcatcaaggcgattgtctgttgacccttatgaaaggcctgctttgacaccaagacctatagataatttttctcataatcagtcaaatgatccatatagtcagcctccccttaccccacatccagcagtgaatgaatcttttgcccatccttcaagggctttttcccagcctggaaccatatcaaggccaacatctcaggacccatactcccaacccccaggaactccacgacctgttgtagattcttattcccaatcttcaggaacagctaggtccaatacagacccttactctcaacctcctggaactccccggcctactactgttgacccatatagtcagcagccccaaaccccaagaccatctacacaaactgacttgtttgttacacctgtaacaaatcagaggcattctgatccatatgctcatcctcctggaacaccaagacctggaatttctgtcccttactctcagccaccagcaacaccaaggccaaggatttcagagggttttactaggtcctcaatgacaagaccagtcctcatgccaaatcaggatcctttcctgcaagcagcacaaaaccgaggaccagctttacctggcccgttggtaaggccacctgatacatgttcccagacacctaggccccctggacctggtctttcagacacatttagccgtgtttccccatctgctgcccgtgatccctatgatcagtctccaatgactccaagatctcagtctgactcttttggaacaagtcaaactgcccatgatgttgctgatcagccaaggcctggatcagaggggagcttctgtgcatcttcaaactctccaatgcactcccaaggccagcagttctctggtgtctcccaacttcctggacctgtgccaacttcaggagtaactgatacacagaatactgtaaatatggcccaagcagatacagagaaattgagacagcggcagaagttacgtgaaatcattctccagcagcaacagcagaagaagattgcaggtcgacaggagaaggggtcacaggactcacccgcagtgcctcatccagggcctcttcaacactggcaaccagagaatgttaaccaggctttcaccagacccccacctccctatcctgggaacattaggtctcctgttgcccctcctttaggacctagatatgctgttttcccaaaagatcagcgtggaccctatcctcctgatgttgctagtatggggatgagacctcatggatttagatttggatttccaggaggtagtcatggtaccatgccgagtcaagagcgcttccttgtgcctcctcagcaaatacagggatctggagtttctccacagctaagaagatcagtatctgtagatatgcctaggcctttaaataactcacaaatgaataatccagttggacttcctcagcatttttcaccacagagcttgccagttcagcagcacaacatactgggccaagcatatattgaactgagacatagggctcctgacggaaggcaacggctgcctttcagtgctccacctggcagcgttgtagaggcatcttctaatctgagacatggaaacttcattccccggccagactttccgggccctagacacacagaccccatgcgacgacctccccagggtctacctaatcagctacctgtgcacccagatttggaacaagtgccaccatctcaacaagagcaaggtcattctgtccattcatcttctatggtcatgaggactctgaaccatccactaggtggtgaattttcagaagctcctttgtcaacatctgtaccgtctgaaacaacgtctgataatttacagataaccacccagccttctgatggtctagaggaaaaacttgattctgatgacccttctgtgaaggaactggatgttaaagaccttgagggggttgaagtcaaagacttagatgatgaagatcttgaaaacttaaatttagatacagaggatggcaaggtagttgaattggatactttagataatttggaaactaatgatcccaacctggatgacctcttaaggtcaggagagtttgatatcattgcatatacagatccagaacttgacatgggagataagaaaagcatgtttaatgaggaactagaccttccaattgatgataagttagataatcagtgtgtatctgttgaaccaaaaaaaaaggaacaagaaaacaaaactctggttctctctgataaacattcaccacagaaaaaatccactgttaccaatgaggtaaaaacggaagtactgtctccaaattctaaggtggaatccaaatgtgaaactgaaaaaaatgatgagaataaagataatgttgacactccttgctcacaggcttctgctcactcagacctaaatgatggagaaaagacttctttgcatccttgtgatccagatctatttgagaaaagaaccaatcgagaaactgctggccccagtgcaaatgtcattcaggcatccactcaactacctgctcaagatgtaataaactcttgtggcataactggatcaactccagttctctcaagtttacttgctaatgagaaatctgataattcagacattaggccatcggggtctccaccaccaccaactctgccggcctccccatccaatcatgtgtcaagtttgcctcctttcatagcaccgcctggccgtgttttggataatgccatgaattctaatgtgacagtagtctctagggtaaaccatgttttttctcagggtgtgcaggtaaacccagggctcattccaggtcaatcaacagttaaccacagtctggggacaggaaaacctgcaactcaaactgggcctcaaacaagtcagtctggtaccagtagcatgtctggaccccaacagctaatgattcctcaaacattagcacagcagaatagagagaggccccttcttctagaagaacagcctctacttctacaggatcttttggatcaagaaaggcaagaacagcagcagcaaagacagatgcaagccatgattcgtcagcgatcagaaccgttcttccctaatattgattttgatgcaattacagatcctataatgaaagccaaaatggtggcccttaaaggtataaataaagtgatggcacaaaacaatctgggcatgccaccaatggtgatgagcaggttcccttttatgggccaggtggtaactggaacacagaacagtgaaggacagaaccttggaccacaggccattcctcaggatggcagtataacacatcagatttctaggcctaatcctccaaattttggtccaggctttgtcaatgattcacagcgtaagcagtatgaagagtggctccaggagacccaacagctgcttcaaatgcagcagaagtatcttgaagaacaaattggtgctcacagaaaatctaagaaggccctttcagctaaacaacgtactgccaagaaagctgggcgtgaatttccagaggaagatgcagaacaactcaagcatgttactgaacagcaaagcatggttcagaaacagctagaacagattcgtaaacaacagaaagaacatgctgaattgattgaagattatcggatcaaacagcagcagcaatgtgcaatggccccacctaccatgatgcccagtgtccagccccagccacccctaattccaggtgccactccacccaccatgagccaacccacctttcccatggtgccacagcagcttcagcaccagcagcacacaacagttatttctggccatactagccctgttagaatgcccagtttacctggatggcaacccaacagtgctcctgcccacctgcccctcaatcctcctagaattcagcccccaattgcccagttaccaataaaaacttgtacaccagccccagggacagtctcaaatgcaaatccacagagtggaccaccacctcgggtagaatttgatgacaacaatccctttagtgaaagttttcaagaacgggaacgtaaggaacgtttacgagaacagcaagagagacaacggatccaactcatgcaggaggtagatagacaaagagctttgcagcagaggatggaaatggagcagcatggtatggtgggctctgagataagtagtagtaggacatctgtgtcccagattcccttctacagttccgacttaccttgtgattttatgcaacctctaggaccccttcagcagtctccacaacaccaacagcaaatggggcaggttttacagcagcagaatatacaacaaggatcaattaattcaccctccacccaaactttcatgcagactaatgagcgaaggcaggtaggccctccttcatttgttcctgattcaccatcaatccctgttggaagcccaaatttttcttctgtgaagcagggacatggaaatctttctgggaccagcttccagcagtccccagtgaggccttcttttacacctgctttaccagcagcacctccagtagctaatagcagtctcccatgtggccaagattctactataacccatggacacagttatccgggatcaacccaatcgctcattcagttgtattctgatataatcccagaggaaaaagggaaaaagaaaagaacaagaaagaagaaaagagatgatgatgcagaatccaccaaggctccatcaactccccattcagatataactgccccaccgactccaggcatctcagaaactacctctactcctgcagtgagcacacccagtgagcttcctcaacaagccgaccaagagtcggtggaaccagtcggcccatccactcccaatatggcagcaggccagctatgtacagaattagagaacaaactgcccaatagtgatttctcacaagcaactccaaatcaacagacgtatgcaaattcagaagtagacaagctctccatggaaacccctgccaaaacagaagagataaaactggaaaaggctgagacagagtcctgcccaggccaagaggagcctaaattggaggaacagaatggtagtaaggtagaaggaaacgctgtagcctgtcctgtctcctcagcacagagtcctccccattctgctggggcccctgctgccaaaggagactcagggaatgaacttctgaaacacttgttgaaaaataaaaagtcatcttctcttttgaatcaaaaacctgagggcagtatttgttcagaagatgactgtacaaaggataataaactagttgagaagcagaacccagctgaaggactgcaaactttgggggctcaaatgcaaggtggttttggatgtggcaaccagttgccaaaaacagatggaggaagtgaaaccaagaaacagcgaagcaaacggactcagaggacgggtgagaaagcagcacctcgctcaaagaaaaggaaaaaggacgaagaggagaaacaagctatgtactctagcactgacacgtttacccacttgaaacagcagaataatttaagtaatcctccaacaccccctgcctctcttcctcctacaccacctcctatggcttgtcagaagatggccaatggttttgcaacaactgaagaacttgctggaaaagccggagtgttagtgagccatgaagttaccaaaactctaggacctaaaccatttcagctgcccttcagaccccaggacgacttgttggcccgagctcttgctcagggccccaagacagttgatgtgccagcctccctcccaacaccacctcataacaatcaggaagaattaaggatacaggatcactgtggtgatcgagatactcctgacagttttgttccctcatcctctcctgagagtgtggttggggtagaagtgagcaggtatccagatctgtcattggtcaaggaggagcctccagaaccggtgccgtcccccatcattccaattcttcctagcactgctgggaaaagttcagaatcaagaaggaatgacatcaaaactgagccaggcactttatattttgcgtcaccttttggtccttccccaaatggtcccagatcaggtcttatatctgtagcaattactctgcatcctacagctgctgagaacattagcagtgttgtggctgcattttccgaccttcttcacgtccgaatccctaacagctatgaggttagcagtgctccagatgtcccatccatgggtttggtcagtagccacagaatcaacccgggtttggagtatcgacagcatttacttctccgtgggcctccgccaggatctgcaaaccctcccagattagtgagctcttaccggctgaagcagcctaatgtaccatttcctccaacaagcaatggtctttctggatataaggattctagtcatggtattgcagaaagcgcagcactcagaccacagtggtgttgtcattgtaaagtggttattcttggaagtggtgtgcggaaatctttcaaagatctgacccttttgaacaaggattcccgagaaagcaccaagagggtagagaaggacattgtcttctgtagtaataactgctttattctttattcatcaactgcacaagcgaaaaactcagaaaacaaggaatccattccttcattgccacaatcacctatgagagaaacgccttccaaagcatttcatcagtacagcaacaacatctccactttggatgtgcactgtctcccccagctcccagagaaagcttctccccctgcctcaccacccatcgccttccctcctgcttttgaagcagcccaagtcgaggccaagccagatgagctgaaggtgacagtcaagctgaagcctcggctaagagctgtccatggtgggtttgaagattgcaggccgctcaataaaaaatggagaggaatgaaatggaagaagtggagcattcatattgtaatccctaaggggacatttaaaccaccttgtgaggatgaaatagatgaatttctaaagaaattgggcacttcccttaaacctgatcctgtgcccaaagactatcggaaatgttgcttttgtcatgaagaaggtgatggattgacagatggaccagcaaggctactcaaccttgacttggatctgtgggtccacttgaactgcgctctgtggtccacggaggtctatgagactcaggctggtgccttaataaatgtggagctagctctgaggagaggcctacaaatgaaatgtgtcttctgtcacaagacgggtgccactagtggatgccacagatttcgatgcaccaacatttatcacttcacttgcgccattaaagcacaatgcatgttttttaaggacaaaactatgctttgccccatgcacaaaccaaagggaattcatgagcaagaattaagttactttgcagtcttcaggagggtctatgttcagcgtgatgaggtgcgacagattgctagcatcgtgcaacgaggagaacgggaccatacctttcgcgtgggtagcctcatcttccacacaattggtcagctgcttccacagcagatgcaagcattccattctcctaaagcactcttccctgtgggctatgaagccagccggctgtactggagcactcgctatgccaataggcgctgccgctacctgtgctccattgaggagaaggatgggcgcccagtgtttgtcatcaggattgtggaacaaggccatgaagacctggttctaagtgacatctcacctaaaggtgtctgggataagattttggagcctgtggcatgtgtgagaaaaaagtctgaaatgctccagcttttcccagcgtatttaaaaggagaggatctgtttggcctgaccgtctctgcagtggcacgcatagcggaatcacttcctggggttgaggcatgtgaaaattataccttccgatacggccgaaatcctctcatggaacttcctcttgccgttaaccccacaggttgtgcccgttctgaacctaaaatgagtgcccatgtcaagaggtttgtgttaaggcctcacaccttaaacagcaccagcacctcaaagtcatttcagagcacagtcactggagaactgaacgcaccttatagtaaacagtttgttcactccaagtcatcgcagtaccggaagatgaaaactgaatggaaatccaatgtgtatctggcacggtctcggattcaggggctgggcctgtatgctgctcgagacattgagaaacacaccatggtcattgagtacatcgggactatcattcgaaacgaagtagccaacaggaaagagaagctttatgagtctcagaaccgtggtgtgtacatgttccgcatggataacgaccatgtgattgacgcgacgctcacaggagggcccgcaaggtatatcaaccattcgtgtgcacctaattgtgtggctgaagtggtgacttttgagagaggacacaaaattatcatcagctccagtcggagaatccagaaaggagaagagctctgctatgactataagtttgactttgaagatgaccagcacaagattccgtgtcactgtggagctgtgaactgccggaagtggatgaactgaaatgcattccttgctagctcagcgggcggcttgtccctaggaagaggcgattcaacacaccattggaattttgcagacagaaagagatttttgttttctgttttatgactttttgaaaaagcttctgggagttctgatttcctcagtcctttaggttaaagcagcgccaggaggaagctgacagaagcagcgttcctgaagtggccgaggttaaacggaatcacagaatggtccagcacttttgcttttttttcttttccttttcttttttttttgtttgttttttgttttgtttttcccttgtgggtgggtttcattgttttggttttctagtctcactaaggagaaacttttactggggcaaagagccgatggctgccctgccccgggcaggggccttcctatgaatgtaagactgaaatcaccagcgagggggacagagagtgctggccacggccttattaaaaaggggcaggccctctaacttcaaaatgtttttaaataaagtagacaccactgaacaaggaatgtactgaaatgacttccttagggatagagctaagggataataacttgcactaaatacatttaaatacttgattccatgagtcagtttattgtagtttttgatttctgtaaaataagagaaacttttgtatttattattgaataagtgaatgaagctatttttaaataaagttagaagaaagccaagctgctgctgttacctgcagaactaacaaaccctgttactttgtacagatatgtaaatattttgagaaaaaatacagtataaaaatagttattgaccaaatgctaccaggctctgcagcagctcgggggcttataaaatgttcatagggatgttacaatataattttgtgttataaaatatgccattataattatgtaataaccaaaatttcaacctagagtgttgggggttttttggaaaccgcagtctattagtactcaatggttttatacaccttacttctgacagagcggggcgtatgctacgactacaacttttatagctgttttggtaatttaaactaattttttcatattatattgttgcatccctacttcttcagtcaggtttttttgtgcttacaatttgtgataactgtgaataactgcttaaaaatacacccaaatggaggctgaattttttcttcagcaaaagtagttttgattagaactttgtttcagccacagagaatcatgtaaacgtaataggatcatgtagcagaaacttaaatctaaccctttagccttctatttaacacaaaaatttgaaaaagttaaaaaaaaaaaggagatgtgattatgcttacagctgcaggactctggcaatagggtttttggaagatgtaattttaaaatgtgtttgtatgaactgtttgtttacatttctttaataaaaaaaacactgttttgtgtttgcttgtagaaacttaatcagcattttgaaccaggttagctttttattttgtacttaaaattctggtactgacacttcacaggctaagtataaaatgaagttttgtgtgcacaattcaagtggactgtaaactgttggtatattcagtgatgcagttctgaacttgtatatggcatgatgtatttttatcttacagaataaatcaattgtatatatttttctcttgataaatagctgtatgaaatttgtttcctgaatatttttcttctcttgtacaatatcctgacatcctaccagtatttgtcctaccgggtttttgttgttttctgttctgtataatagtatctaatgttggcaaaaattgaattttttgaagtatacagagtgttatgggttttggaatttgtggacacagatttagaagatcaccatttacaaataaaatattttacatctataa

SEQ ID NO: 19008 - DNA, 17029 bp, Homo sapiens
  source 1..17029: mol_type = unassigned DNA
gaggtgcgcgcgcccgcgccgatgtgtgtgagtgcgtgtcctgctcgctccatgttgccgcctctcccggtacctgctgctgctcccggggctgcgggaaatgcgagaggctgagccggggaggaggaacccgagcagcagcggcggcggcggcggccgcggcggcgggagccccccaggaggaggaccgggatccatgtgtctttcctggtgactaggatgtcgtcggaggaggacaagagcgtggagcagccgcagccgccgccaccaccccccgaggagcctggagccccggccccgagccccgcagccgcagacaaaagacctcggggccggcctcgcaaagatggcgcttcccctttccagagagccagaaagaaacctcgaagtagggggaaaactgcagtggaagatgaggacagcatggatgggctggagacaacagaaacagaaacgattgtggaaacagaaatcaaagaacaatctgcagaagaggatgctgaagcagaagtggataacagcaaacagctaattccaactcttcagcgatctgtgtctgaggaatcggcaaactccctggtctctgttggtgtagaagccaaaatcagtgaacagctctgcgctttttgttactgtggggaaaaaagttccttaggacaaggagacttaaaacaattcagaataacgcctggatttatcttgccatggagaaaccaaccttctaacaagaaggacattgatgacaacagcaatggaacctatgagaaaatgcaaaactcagcaccacgaaaacaaagaggacagagaaaagaacgatctcctcagcagaatatagtatcttgtgtaagtgtaagcacccagacagcttcagatgatcaagctggtaaactgtgggatgaactcagtctggttgggcttccagatgccattgatatccaagccttatttgattctacaggcacttgttgggctcatcaccgttgtgtggagtggtcactaggagtatgccagatggaagaaccattgttagtgaacgtggacaaagctgttgtctcagggagcacagaacgatgtgcattttgtaagcaccttggagccactatcaaatgctgtgaagagaaatgtacccagatgtatcattatccttgtgctgcaggagccggcacctttcaggatttcagtcacatcttcctgctttgtccagaacacattgaccaagctcctgaaagatcgaaggaagatgcaaactgtgcagtgtgcgacagcccgggagacctcttagatcagttcttttgtactacttgtggtcagcactatcatggaatgtgcctggatatagcggttactccattaaaacgtgcaggttggcaatgtcctgagtgcaaagtgtgccagaactgcaaacaatcgggagaagatagcaagatgctagtgtgtgatacgtgtgacaaagggtatcatactttttgtcttcaaccagttatgaaatcagtaccaaccaatggctggaaatgcaaaaattgcagaatatgtatagagtgtggcacacggtctagttctcagtggcaccacaattgcctgatatgtgacaattgttaccaacagcaggataacttatgtcccttctgtgggaagtgttatcatccagaattgcagaaagacatgcttcattgtaatatgtgcaaaaggtgggttcacctagagtgtgacaaaccaacagatcatgaactggatactcagctcaaagaagagtatatctgcatgtattgtaaacacctgggagctgagatggatcgtttacagccaggtgaggaagtggagatagctgagctcactacagattataacaatgaaatggaagttgaaggccctgaagatcaaatggtattctcagagcaggcagctaataaagatgtcaacggtcaggagtccactcctggaattgttccagatgcggttcaagtccacactgaagagcaacagaagagtcatccctcagaaagtcttgacacagatagtcttcttattgctgtatcatcccaacatacagtgaatactgaattggaaaaacagatttctaatgaagttgatagtgaagacctgaaaatgtcttctgaagtgaagcatatttgtggcgaagatcaaattgaagataaaatggaagtgacagaaaacattgaagtcgttacacaccagatcactgtgcagcaagaacaactgcagttgttagaggaacctgaaacagtggtatccagagaagaatcaaggcctccaaaattagtcatggaatctgtcactcttccactagaaaccttagtgtccccacatgaggaaagtatttcattatgtcctgaggaacagttggttatagaaaggctacaaggagaaaaggaacagaaagaaaattctgaactttctactggattgatggactctgaaatgactcctacaattgagggttgtgtgaaagatgtttcataccaaggaggcaaatctataaagttatcatctgagacagagtcatcattttcatcatcagcagacataagcaaggcagatgtgtcttcctccccaacaccttcttcagacttgccttcgcatgacatgctgcataattacccttcagctcttagttcctctgctggaaacatcatgccaacaacttacatctcagtcactccaaaaattggcatgggtaaaccagctattactaagagaaaattttctcctggtagacctcggtccaaacagggggcttggagtacccataatacagtgagcccaccttcctggtccccagacatttcagaaggtcgggaaatttttaaacccaggcagcttcctggcagtgccatttggagcatcaaagtgggccgtgggtctggatttccaggaaagcggagacctcgaggtgcaggactgtcggggcgaggtggccgaggcaggtcaaagctgaaaagtggaatcggagctgttgtattacctggggtgtctactgcagatatttcatcaaataaggatgatgaagaaaactctatgcacaatacagttgtgttgttttctagcagtgacaagttcactttgaatcaggatatgtgtgtagtttgtggcagttttggccaaggagcagaaggaagattacttgcctgttctcagtgtggtcagtgttaccatccatactgtgtcagtattaagatcactaaagtggttcttagcaaaggttggaggtgtcttgagtgcactgtgtgtgaggcctgtgggaaggcaactgacccaggaagactcctgctgtgtgatgactgtgacataagttatcacacctactgcctagaccctccattgcagacagttcccaaaggaggctggaagtgcaaatggtgtgtttggtgcagacactgtggagcaacatctgcaggtctaagatgtgaatggcagaacaattacacacagtgcgctccttgtgcaagcttatcttcctgtccagtctgctatcgaaactatagagaagaagatcttattctgcaatgtagacaatgtgatagatggatgcatgcagtttgtcagaacttaaatactgaggaagaagtggaaaatgtagcagacattggttttgattgtagcatgtgcagaccctatatgcctgcgtctaatgtgccttcctcagactgctgtgaatcttcacttgtagcacaaattgtcacaaaagtaaaagagctagacccacccaagacttatacccaggatggtgtgtgtttgactgaatcagggatgactcagttacagagcctcacagttacagttccaagaagaaaacggtcaaaaccaaaattgaaattgaagattataaatcagaatagcgtggccgtccttcagacccctccagacatccaatcagagcattcaagggatggtgaaatggatgatagtcgagaaggagaacttatggattgtgatggaaaatcagaatctagtcctgagcgggaagctgtggatgatgaaactaagggagtggaaggaacagatggtgtcaaaaagagaaaaaggaaaccatacagaccaggtattggtggatttatggtgcggcaaagaagtcgaactgggcaagggaaaaccaaaagatctgtgatcagaaaagattcctcaggctctatttccgagcagttaccttgcagagatgatggctggagtgagcagttaccagatactttagttgatgaatctgtttctgttactgaaagcactgaaaaaataaagaagagataccgaaaaaggaaaaataagcttgaagaaactttccctgcctatttacaagaagctttctttggaaaagatcttctagatacaagtagacaaagcaagataagtttagataatctgtcagaagatggagctcagcttttatataaaacaaacatgaacacaggtttcttggatccttccttagatccactacttagttcatcctcggctccaacaaaatctggaactcacggtcctgctgatgacccattagctgatatttctgaagttttaaacacagatgatgacattcttggaataatttcagatgatctagcaaaatcagttgatcattcagatattggtcctgtcactgatgatccttcctctttgcctcagccaaatgtcaatcagagttcacgaccattaagtgaagaacagctagatgggatcctcagtcctgaactagacaaaatggtcacagatggagcaattcttggaaaattatataaaattccagagcttggcggaaaagatgttgaagacttatttacagctgtacttagtcctgcgaacactcagccaactccattgccacagcctcccccaccaacacagctgttgccaatacacaatcaggatgctttttcacggatgcctctcatgaatggccttattggatccagtcctcatctcccacataattctttgccacctggaagcggactgggaactttctctgcaattgcacaatcctcttatcctgatgccagggataaaaattcagcctttaatccaatggcaagtgatcctaacaactcttggacatcatcagctcccactgtggaaggagaaaatgacacaatgtcgaatgcccagagaagcacgcttaagtgggagaaagaggaggctctgggtgaaatggcaactgttgccccagttctctacaccaatattaatttccccaacttaaaggaagaattccctgattggactactagagtgaagcaaattgccaaattgtggagaaaagcaagctcacaagaaagagcaccatatgtgcaaaaagccagagataacagagctgctttacgcattaataaagtacagatgtcaaatgattccatgaaaaggcagcaacagcaagatagcattgatcccagctctcgtattgattcggagctttttaaagatcctttaaagcaaagagaatcagaacatgaacaggaatggaaatttagacagcaaatgcgtcagaaaagtaagcagcaagctaaaattgaagccacacagaaacttgaacaggtgaaaaatgagcagcagcagcagcaacaacagcaatttggttctcagcatcttctggtgcagtctggttcagatacaccaagtagtgggatacagagtcccttgacacctcagcctggcaatggaaatatgtctcctgcacagtcattccataaagaactgtttacaaaacagccacccagtacccctacgtctacatcttcagatgatgtgtttgtaaagccacaagctccacctcctcctccagccccatcccggattcccatccaggatagtctttctcaggctcagacttctcagccaccctcaccgcaagtgttttcacctgggtcctctaactcacgaccaccatctccaatggatccatatgcaaaaatggttggtacccctcgaccacctcctgtgggccatagtttttccagaagaaattctgctgcaccagtggaaaactgtacacctttatcatcggtatctaggccccttcaaatgaatgagacaacagcaaataggccatcccctgtcagagatttatgttcttcttccacgacaaataatgacccctatgcaaaacctccagacacacctaggcctgtgatgacagatcaatttcccaaatccttgggcctatcccggtctcctgtagtttcagaacaaactgcaaaaggccctatagcagctggaaccagtgatcactttactaaaccatctcctagggcagatgtgtttcaaagacaaaggatacctgactcatatgcacgacccttgttgacacctgcacctcttgatagtggtcctggaccttttaagactccaatgcaacctcctccatcctctcaggatccttatggatcagtgtcacaggcatcaaggcgattgtctgttgacccttatgaaaggcctgctttgacaccaagacctatagataatttttctcataatcagtcaaatgatccatatagtcagcctccccttaccccacatccagcagtgaatgaatcttttgcccatccttcaagggctttttcccagcctggaaccatatcaaggccaacatctcaggacccatactcccaacccccaggaactccacgacctgttgtagattcttattcccaatcttcaggaacagctaggtccaatacagacccttactctcaacctcctggaactccccggcctactactgttgacccatatagtcagcagccccaaaccccaagaccatctacacaaactgacttgtttgttacacctgtaacaaatcagaggcattctgatccatatgctcatcctcctggaacaccaagacctggaatttctgtcccttactctcagccaccagcaacaccaaggccaaggatttcagagggttttactaggtcctcaatgacaagaccagtcctcatgccaaatcaggatcctttcctgcaagcagcacaaaaccgaggaccagctttacctggcccgttggtaaggccacctgatacatgttcccagacacctaggccccctggacctggtctttcagacacatttagccgtgtttccccatctgctgcccgtgatccctatgatcagtctccaatgactccaagatctcagtctgactcttttggaacaagtcaaactgcccatgatgttgctgatcagccaaggcctggatcagaggggagcttctgtgcatcttcaaactctccaatgcactcccaaggccagcagttctctggtgtctcccaacttcctggacctgtgccaacttcaggagtaactgatacacagaatactgtaaatatggcccaagcagatacagagaaattgagacagcggcagaagttacgtgaaatcattctccagcagcaacagcagaagaagattgcaggtcgacaggagaaggggtcacaggactcacccgcagtgcctcatccagggcctcttcaacactggcaaccagagaatgttaaccaggctttcaccagacccccacctccctatcctgggaacattaggtctcctgttgcccctcctttaggacctagatatgctgttttcccaaaagatcagcgtggaccctatcctcctgatgttgctagtatggggatgagacctcatggatttagatttggatttccaggaggtagtcatggtaccatgccgagtcaagagcgcttccttgtgcctcctcagcaaatacagggatctggagtttctccacagctaagaagatcagtatctgtagatatgcctaggcctttaaataactcacaaatgaataatccagttggacttcctcagcatttttcaccacagagcttgccagttcagcagcacaacatactgggccaagcatatattgaactgagacatagggctcctgacggaaggcaacggctgcctttcagtgctccacctggcagcgttgtagaggcatcttctaatctgagacatggaaacttcattccccggccagactttccgggccctagacacacagaccccatgcgacgacctccccagggtctacctaatcagctacctgtgcacccagatttggaacaagtgccaccatctcaacaagagcaaggtcattctgtccattcatcttctatggtcatgaggactctgaaccatccactaggtggtgaattttcagaagctcctttgtcaacatctgtaccgtctgaaacaacgtctgataatttacagataaccacccagccttctgatggtctagaggaaaaacttgattctgatgacccttctgtgaaggaactggatgttaaagaccttgagggggttgaagtcaaagacttagatgatgaagatcttgaaaacttaaatttagatacagaggatggcaaggtagttgaattggatactttagataatttggaaactaatgatcccaacctggatgacctcttaaggtcaggagagtttgatatcattgcatatacagatccagaacttgacatgggagataagaaaagcatgtttaatgaggaactagaccttccaattgatgataagttagataatcagtgtgtatctgttgaaccaaaaaaaaaggaacaagaaaacaaaactctggttctctctgataaacattcaccacagaaaaaatccactgttaccaatgaggtaaaaacggaagtactgtctccaaattctaaggtggaatccaaatgtgaaactgaaaaaaatgatgagaataaagataatgttgacactccttgctcacaggcttctgctcactcagacctaaatgatggagaaaagacttctttgcatccttgtgatccagatctatttgagaaaagaaccaatcgagaaactgctggccccagtgcaaatgtcattcaggcatccactcaactacctgctcaagatgtaataaactcttgtggcataactggatcaactccagttctctcaagtttacttgctaatgagaaatctgataattcagacattaggccatcggggtctccaccaccaccaactctgccggcctccccatccaatcatgtgtcaagtttgcctcctttcatagcaccgcctggccgtgttttggataatgccatgaattctaatgtgacagtagtctctagggtaaaccatgttttttctcagggtgtgcaggtaaacccagggctcattccaggtcaatcaacagttaaccacagtctggggacaggaaaacctgcaactcaaactgggcctcaaacaagtcagtctggtaccagtagcatgtctggaccccaacagctaatgattcctcaaacattagcacagcagaatagagagaggccccttcttctagaagaacagcctctacttctacaggatcttttggatcaagaaaggcaagaacagcagcagcaaagacagatgcaagccatgattcgtcagcgatcagaaccgttcttccctaatattgattttgatgcaattacagatcctataatgaaagccaaaatggtggcccttaaaggtataaataaagtgatggcacaaaacaatctgggcatgccaccaatggtgatgagcaggttcccttttatgggccaggtggtaactggaacacagaacagtgaaggacagaaccttggaccacaggccattcctcaggatggcagtataacacatcagatttctaggcctaatcctccaaattttggtccaggctttgtcaatgattcacagcgtaagcagtatgaagagtggctccaggagacccaacagctgcttcaaatgcagcagaagtatcttgaagaacaaattggtgctcacagaaaatctaagaaggccctttcagctaaacaacgtactgccaagaaagctgggcgtgaatttccagaggaagatgcagaacaactcaagcatgttactgaacagcaaagcatggttcagaaacagctagaacagattcgtaaacaacagaaagaacatgctgaattgattgaagattatcggatcaaacagcagcagcaatgtgcaatggccccacctaccatgatgcccagtgtccagccccagccacccctaattccaggtgccactccacccaccatgagccaacccacctttcccatggtgccacagcagcttcagcaccagcagcacacaacagttatttctggccatactagccctgttagaatgcccagtttacctggatggcaacccaacagtgctcctgcccacctgcccctcaatcctcctagaattcagcccccaattgcccagttaccaataaaaacttgtacaccagccccagggacagtctcaaatgcaaatccacagagtggaccaccacctcgggtagaatttgatgacaacaatccctttagtgaaagttttcaagaacgggaacgtaaggaacgtttacgagaacagcaagagagacaacggatccaactcatgcaggaggtagatagacaaagagctttgcagcagaggatggaaatggagcagcatggtatggtgggctctgagataagtagtagtaggacatctgtgtcccagattcccttctacagttccgacttaccttgtgattttatgcaacctctaggaccccttcagcagtctccacaacaccaacagcaaatggggcaggttttacagcagcagaatatacaacaaggatcaattaattcaccctccacccaaactttcatgcagactaatgagcgaaggcaggtaggccctccttcatttgttcctgattcaccatcaatccctgttggaagcccaaatttttcttctgtgaagcagggacatggaaatctttctgggaccagcttccagcagtccccagtgaggccttcttttacacctgctttaccagcagcacctccagtagctaatagcagtctcccatgtggccaagattctactataacccatggacacagttatccgggatcaacccaatcgctcattcagttgtattctgatataatcccagaggaaaaagggaaaaagaaaagaacaagaaagaagaaaagagatgatgatgcagaatccaccaaggctccatcaactccccattcagatataactgccccaccgactccaggcatctcagaaactacctctactcctgcagtgagcacacccagtgagcttcctcaacaagccgaccaagagtcggtggaaccagtcggcccatccactcccaatatggcagcaggccagctatgtacagaattagagaacaaactgcccaatagtgatttctcacaagcaactccaaatcaacagacgtatgcaaattcagaagtagacaagctctccatggaaacccctgccaaaacagaagagataaaactggaaaaggctgagacagagtcctgcccaggccaagaggagcctaaattggaggaacagaatggtagtaaggtagaaggaaacgctgtagcctgtcctgtctcctcagcacagagtcctccccattctgctggggcccctgctgccaaaggagactcagggaatgaacttctgaaacacttgttgaaaaataaaaagtcatcttctcttttgaatcaaaaacctgagggcagtatttgttcagaagatgactgtacaaaggataataaactagttgagaagcagaacccagctgaaggactgcaaactttgggggctcaaatgcaaggtggttttggatgtggcaaccagttgccaaaaacagatggaggaagtgaaaccaagaaacagcgaagcaaacggactcagaggacgggtgagaaagcagcacctcgctcaaagaaaaggaaaaaggacgaagaggagaaacaagctatgtactctagcactgacacgtttacccacttgaaacaggtgaggcagctctctctgctccctctaatggaaccaatcattggagtgaactttgcgcactttcttccttatggcagtggccaatttaatagtgggaatcgacttctaggaacttttggcagtgctaccctggaaggggtttcggactactattctcagttgatctacaagcagaataatttaagtaatcctccaacaccccctgcctctcttcctcctacaccacctcctatggcttgtcagaagatggccaatggttttgcaacaactgaagaacttgctggaaaagccggagtgttagtgagccatgaagttaccaaaactctaggacctaaaccatttcagctgcccttcagaccccaggacgacttgttggcccgagctcttgctcagggccccaagacagttgatgtgccagcctccctcccaacaccacctcataacaatcaggaagaattaaggatacaggatcactgtggtgatcgagatactcctgacagttttgttccctcatcctctcctgagagtgtggttggggtagaagtgagcaggtatccagatctgtcattggtcaaggaggagcctccagaaccggtgccgtcccccatcattccaattcttcctagcactgctgggaaaagttcagaatcaagaaggaatgacatcaaaactgagccaggcactttatattttgcgtcaccttttggtccttccccaaatggtcccagatcaggtcttatatctgtagcaattactctgcatcctacagctgctgagaacattagcagtgttgtggctgcattttccgaccttcttcacgtccgaatccctaacagctatgaggttagcagtgctccagatgtcccatccatgggtttggtcagtagccacagaatcaacccgggtttggagtatcgacagcatttacttctccgtgggcctccgccaggatctgcaaaccctcccagattagtgagctcttaccggctgaagcagcctaatgtaccatttcctccaacaagcaatggtctttctggatataaggattctagtcatggtattgcagaaagcgcagcactcagaccacagtggtgttgtcattgtaaagtggttattcttggaagtggtgtgcggaaatctttcaaagatctgacccttttgaacaaggattcccgagaaagcaccaagagggtagagaaggacattgtcttctgtagtaataactgctttattctttattcatcaactgcacaagcgaaaaactcagaaaacaaggaatccattccttcattgccacaatcacctatgagagaaacgccttccaaagcatttcatcagtacagcaacaacatctccactttggatgtgcactgtctcccccagctcccagagaaagcttctccccctgcctcaccacccatcgccttccctcctgcttttgaagcagcccaagtcgaggccaagccagatgagctgaaggtgacagtcaagctgaagcctcggctaagagctgtccatggtgggtttgaagattgcaggccgctcaataaaaaatggagaggaatgaaatggaagaagtggagcattcatattgtaatccctaaggggacatttaaaccaccttgtgaggatgaaatagatgaatttctaaagaaattgggcacttcccttaaacctgatcctgtgcccaaagactatcggaaatgttgcttttgtcatgaagaaggtgatggattgacagatggaccagcaaggctactcaaccttgacttggatctgtgggtccacttgaactgcgctctgtggtccacggaggtctatgagactcaggctggtgccttaataaatgtggagctagctctgaggagaggcctacaaatgaaatgtgtcttctgtcacaagacgggtgccactagtggatgccacagatttcgatgcaccaacatttatcacttcacttgcgccattaaagcacaatgcatgttttttaaggacaaaactatgctttgccccatgcacaaaccaaagggaattcatgagcaagaattaagttactttgcagtcttcaggagggtctatgttcagcgtgatgaggtgcgacagattgctagcatcgtgcaacgaggagaacgggaccatacctttcgcgtgggtagcctcatcttccacacaattggtcagctgcttccacagcagatgcaagcattccattctcctaaagcactcttccctgtgggctatgaagccagccggctgtactggagcactcgctatgccaataggcgctgccgctacctgtgctccattgaggagaaggatgggcgcccagtgtttgtcatcaggattgtggaacaaggccatgaagacctggttctaagtgacatctcacctaaaggtgtctgggataagattttggagcctgtggcatgtgtgagaaaaaagtctgaaatgctccagcttttcccagcgtatttaaaaggagaggatctgtttggcctgaccgtctctgcagtggcacgcatagcggaatcacttcctggggttgaggcatgtgaaaattataccttccgatacggccgaaatcctctcatggaacttcctcttgccgttaaccccacaggttgtgcccgttctgaacctaaaatgagtgcccatgtcaagaggtttgtgttaaggcctcacaccttaaacagcaccagcacctcaaagtcatttcagagcacagtcactggagaactgaacgcaccttatagtaaacagtttgttcactccaagtcatcgcagtaccggaagatgaaaactgaatggaaatccaatgtgtatctggcacggtctcggattcaggggctgggcctgtatgctgctcgagacattgagaaacacaccatggtcattgagtacatcgggactatcattcgaaacgaagtagccaacaggaaagagaagctttatgagtctcagaaccgtggtgtgtacatgttccgcatggataacgaccatgtgattgacgcgacgctcacaggagggcccgcaaggtatatcaaccattcgtgtgcacctaattgtgtggctgaagtggtgacttttgagagaggacacaaaattatcatcagctccagtcggagaatccagaaaggagaagagctctgctatgactataagtttgactttgaagatgaccagcacaagattccgtgtcactgtggagctgtgaactgccggaagtggatgaactgaaatgcattccttgctagctcagcgggcggcttgtccctaggaagaggcgattcaacacaccattggaattttgcagacagaaagagatttttgttttctgttttatgactttttgaaaaagcttctgggagttctgatttcctcagtcctttaggttaaagcagcgccaggaggaagctgacagaagcagcgttcctgaagtggccgaggttaaacggaatcacagaatggtccagcacttttgcttttttttcttttccttttcttttttttttgtttgttttttgttttgtttttcccttgtgggtgggtttcattgttttggttttctagtctcactaaggagaaacttttactggggcaaagagccgatggctgccctgccccgggcaggggccttcctatgaatgtaagactgaaatcaccagcgagggggacagagagtgctggccacggccttattaaaaaggggcaggccctctaacttcaaaatgtttttaaataaagtagacaccactgaacaaggaatgtactgaaatgacttccttagggatagagctaagggataataacttgcactaaatacatttaaatacttgattccatgagtcagtttattgtagtttttgatttctgtaaaataagagaaacttttgtatttattattgaataagtgaatgaagctatttttaaataaagttagaagaaagccaagctgctgctgttacctgcagaactaacaaaccctgttactttgtacagatatgtaaatattttgagaaaaaatacagtataaaaatagttattgaccaaatgctaccaggctctgcagcagctcgggggcttataaaatgttcatagggatgttacaatataattttgtgttataaaatatgccattataattatgtaataaccaaaatttcaacctagagtgttgggggttttttggaaaccgcagtctattagtactcaatggttttatacaccttacttctgacagagcggggcgtatgctacgactacaacttttatagctgttttggtaatttaaactaattttttcatattatattgttgcatccctacttcttcagtcaggtttttttgtgcttacaatttgtgataactgtgaataactgcttaaaaatacacccaaatggaggctgaattttttcttcagcaaaagtagttttgattagaactttgtttcagccacagagaatcatgtaaacgtaataggatcatgtagcagaaacttaaatctaaccctttagccttctatttaacacaaaaatttgaaaaagttaaaaaaaaaaaggagatgtgattatgcttacagctgcaggactctggcaatagggtttttggaagatgtaattttaaaatgtgtttgtatgaactgtttgtttacatttctttaataaaaaaaacactgttttgtgtttgcttgtagaaacttaatcagcattttgaaccaggttagctttttattttgtacttaaaattctggtactgacacttcacaggctaagtataaaatgaagttttgtgtgcacaattcaagtggactgtaaactgttggtatattcagtgatgcagttctgaacttgtatatggcatgatgtatttttatcttacagaataaatcaattgtatatatttttctcttgataaatagctgtatgaaatttgtttcctgaatatttttcttctcttgtacaatatcctgacatcctaccagtatttgtcctaccgggtttttgttgttttctgttctgtataatagtatctaatgttggcaaaaattgaattttttgaagtatacagagtgttatgggttttggaatttgtggacacagatttagaagatcaccatttacaaataaaatattttacatct

SEQ ID NO: 19009 - DNA, 5874 bp, Homo sapiens
  source 1..5874: mol_type = unassigned DNA
ctcatgcaggaggtagatagacaaagagctttgcagcagaggatggaaatggagcagcatggtatggtgggctctgagataagtagtagtaggacatctgtgtcccagattcccttctacagttccgacttaccttgtgattttatgcaacctctaggaccccttcagcagtctccacaacaccaacagcaaatggggcaggttttacagcagcagaatatacaacaaggatcaattaattcaccctccacccaaactttcatgcagactaatgagcgaaggcaggtaggccctccttcatttgttcctgattcaccatcaatccctgttggaagcccaaatttttcttctgtgaagcagggacatggaaatctttctgggaccagcttccagcagtccccagtgaggccttcttttacacctgctttaccagcagcacctccagtagctaatagcagtctcccatgtggccaagattctactataacccatggacacagttatccgggatcaacccaatcgctcattcagttgtattctgatataatcccagaggaaaaagggaaaaagaaaagaacaagaaagaagaaaagagatgatgatgcagaatccaccaaggctccatcaactccccattcagatataactgccccaccgactccaggcatctcagaaactacctctactcctgcagtgagcacacccagtgagcttcctcaacaagccgaccaagagtcggtggaaccagtcggcccatccactcccaatatggcagcaggccagctatgtacagaattagagaacaaactgcccaatagtgatttctcacaagcaactccaaatcaacagacgtatgcaaattcagaagtagacaagctctccatggaaacccctgccaaaacagaagagataaaactggaaaaggctgagacagagtcctgcccaggccaagaggagcctaaattggaggaacagaatggtagtaaggtagaaggaaacgctgtagcctgtcctgtctcctcagcacagagtcctccccattctgctggggcccctgctgccaaaggagactcagggaatgaacttctgaaacacttgttgaaaaataaaaagtcatcttctcttttgaatcaaaaacctgagggcagtatttgttcagaagatgactgtacaaaggataataaactagttgagaagcagaacccagctgaaggactgcaaactttgggggctcaaatgcaaggtggttttggatgtggcaaccagttgccaaaaacagatggaggaagtgaaaccaagaaacagcgaagcaaacggactcagaggacgggtgagaaagcagcacctcgctcaaagaaaaggaaaaaggacgaagaggagaaacaagctatgtactctagcactgacacgtttacccacttgaaacagcagctctctctgctccctctaatggaaccaatcattggagtgaactttgcgcactttcttccttatggcagtggccaatttaatagtgggaatcgacttctaggaacttttggcagtgctaccctggaaggggtttcggactactattctcagttgatctacaagaagatggccaatggttttgcaacaactgaagaacttgctggaaaagccggagtgttagtgagccatgaagttaccaaaactctaggacctaaaccatttcagctgcccttcagaccccaggacgacttgttggcccgagctcttgctcagggccccaagacagttgatgtgccagcctccctcccaacaccacctcataacaatcaggaagaattaaggatacaggatcactgtggtgatcgagatactcctgacagttttgttccctcatcctctcctgagagtgtggttggggtagaagtgagcaggtatccagatctgtcattggtcaaggaggagcctccagaaccggtgccgtcccccatcattccaattcttcctagcactgctgggaaaagttcagaatcaagaaggaatgacatcaaaactgagccaggcactttatattttgcgtcaccttttggtccttccccaaatggtcccagatcaggtcttatatctgtagcaattactctgcatcctacagctgctgagaacattagcagtgttgtggctgcattttccgaccttcttcacgtccgaatccctaacagctatgaggttagcagtgctccagatgtcccatccatgggtttggtcagtagccacagaatcaacccgggtttggagtatcgacagcatttacttctccgtgggcctccgccaggatctgcaaaccctcccagattagtgagctcttaccggctgaagcagcctaatgtaccatttcctccaacaagcaatggtctttctggatataaggattctagtcatggtattgcagaaagcgcagcactcagaccacagtggtgttgtcattgtaaagtggttattcttggaagtggtgtgcggaaatctttcaaagatctgacccttttgaacaaggattcccgagaaagcaccaagagggtagagaaggacattgtcttctgtagtaataactgctttattctttattcatcaactgcacaagcgaaaaactcagaaaacaaggaatccattccttcattgccacaatcacctatgagagaaacgccttccaaagcatttcatcagtacagcaacaacatctccactttggatgtgcactgtctcccccagctcccagagaaagcttctccccctgcctcaccacccatcgccttccctcctgcttttgaagcagcccaagtcgaggccaagccagatgagctgaaggtgacagtcaagctgaagcctcggctaagagctgtccatggtgggtttgaagattgcaggccgctcaataaaaaatggagaggaatgaaatggaagaagtggagcattcatattgtaatccctaaggggacatttaaaccaccttgtgaggatgaaatagatgaatttctaaagaaattgggcacttcccttaaacctgatcctgtgcccaaagactatcggaaatgttgcttttgtcatgaagaaggtgatggattgacagatggaccagcaaggctactcaaccttgacttggatctgtgggtccacttgaactgcgctctgtggtccacggaggtctatgagactcaggctggtgccttaataaatgtggagctagctctgaggagaggcctacaaatgaaatgtgtcttctgtcacaagacgggtgccactagtggatgccacagatttcgatgcaccaacatttatcacttcacttgcgccattaaagcacaatgcatgttttttaaggacaaaactatgctttgccccatgcacaaaccaaagggaattcatgagcaagaattaagttactttgcagtcttcaggagggtctatgttcagcgtgatgaggtgcgacagattgctagcatcgtgcaacgaggagaacgggaccatacctttcgcgtgggtagcctcatcttccacacaattggtcagctgcttccacagcagatgcaagcattccattctcctaaagcactcttccctgtgggctatgaagccagccggctgtactggagcactcgctatgccaataggcgctgccgctacctgtgctccattgaggagaaggatgggcgcccagtgtttgtcatcaggattgtggaacaaggccatgaagacctggttctaagtgacatctcacctaaaggtgtctgggataagattttggagcctgtggcatgtgtgagaaaaaagtctgaaatgctccagcttttcccagcgtatttaaaaggagaggatctgtttggcctgaccgtctctgcagtggcacgcatagcggaatcacttcctggggttgaggcatgtgaaaattataccttccgatacggccgaaatcctctcatggaacttcctcttgccgttaaccccacaggttgtgcccgttctgaacctaaaatgagtgcccatgtcaagaggcctcacaccttaaacagcaccagcacctcaaagtcatttcagagcacagtcactggagaactgaacgcaccttatagtaaacagtttgttcactccaagtcatcgcagtaccggaagatgaaaactgaatggaaatccaatgtgtatctggcacggtctcggattcaggggctgggcctgtatgctgctcgagacattgagaaacacaccatggtcattgagtacatcgggactatcattcgaaacgaagtagccaacaggaaagagaagctttatgagtctcagaaccgtggtgtgtacatgttccgcatggataacgaccatgtgattgacgcgacgctcacaggagggcccgcaaggtatatcaaccattcgtgtgcacctaattgtgtggctgaagtggtgacttttgagagaggacacaaaattatcatcagctccagtcggagaatccagaaaggagaagagctctgctatgactataagtttgactttgaagatgaccagcacaagattccgtgtcactgtggagctgtgaactgccggaagtggatgaactgaaatgcattccttgctagctcagcgggcggcttgtccctaggaagaggcgattcaacacaccattggaattttgcagacagaaagagatttttgttttctgttttatgactttttgaaaaagcttctgggagttctgatttcctcagtcctttaggttaaagcagcgccaggaggaagctgacagaagcagcgttcctgaagtggccgaggttaaacggaatcacagaatggtccagcacttttgcttttttttcttttccttttcttttttttttgtttgttttttgttttgtttttcccttgtgggtgggtttcattgttttggttttctagtctcactaaggagaaacttttactggggcaaagagccgatggctgccctgccccgggcaggggccttcctatgaatgtaagactgaaatcaccagcgagggggacagagagtgctggccacggccttattaaaaaggggcaggccctctaacttcaaaatgtttttaaataaagtagacaccactgaacaaggaatgtactgaaatgacttccttagggatagagctaagggataataacttgcactaaatacatttaaatacttgattccatgagtcagtttattgtagtttttgatttctgtaaaataagagaaacttttgtatttattattgaataagtgaatgaagctatttttaaataaagttagaagaaagccaagctgctgctgttacctgcagaactaacaaaccctgttactttgtacagatatgtaaatattttgagaaaaaatacagtataaaaatagttattgaccaaatgctaccaggctctgcagcagctcgggggcttataaaatgttcatagggatgttacaatataattttgtgttataaaatatgccattataattatgtaataaccaaaatttcaacctagagtgttgggggttttttggaaaccgcagtctattagtactcaatggttttatacaccttacttctgacagagcggggcgtatgctacgactacaacttttatagctgttttggtaatttaaactaattttttcatattatattgttgcatccctacttcttcagtcaggtttttttgtgcttacaatttgtgataactgtgaataactgcttaaaaatacacccaaatggaggctgaattttttcttcagcaaaagtagttttgattagaactttgtttcagccacagagaatcatgtaaacgtaataggatcatgtagcagaaacttaaatctaaccctttagccttctatttaacacaaaaatt

SEQ ID NO: 19010 - DNA, 4835 bp, Homo sapiens
  source 1..4835: mol_type = unassigned DNA
taatcagaggtccctctcgatcaactgacgtagcttcatttcattcttttgaatggttacctgatgttccatagtgttgatgaactgcagttaaaccattgcattactgatgagtgtgtatttgatttataatttttctcataacaaacagtgttgctatatcttgtacaaatatcacaatgaattaatagtttcactcctatggggtatattcccaaacgtgaggtttctgtgtaaaagcgtgtgtacttttcatttaaatagatattgccagttttctaaaaagtctcttactgcacacttcttcctgcagcatgtgagactgttttcttgtttcccatttgtagctggtgttactatttttttgtttagttggtctgataaatatagactgatgttaccttaattgaataggcagcttttcatgtccgccatttggatttgctttcataggaattgcgtattcatatcctttgtccatttttcaatttttagcagtttacactattcagaattttcccctacaaaatatcctttgcctaccagcaagtgtgacatcttttttcttgtaaaagttactgtttatataaacaaacatacataattttctgttgcatctagtcttggtcaagaccctagattatatacggattctagaggttttcttgcataacatttttaaaatacaatttcgctttcttccattggataaccagttgttgaagggccatttagaagtaacccactcatttttaactgattttctttcttcttctttgagacagggtctcactgtgtcgcccaggctggagtgcggtggcacaatctcagctcactgcagcttcgatctcctgggctcaagcgatcctcttacctcagcctcctgagtagccagggctacaggcgcatgccacaatacttggctaatttttaaaaatatttatttagagatgaggttttgccatgttgtccaggctggtcttgaacttctgaactcaagcaattcacctgcctcggcctcccaaagtgctgggattacaggcatgagcccccgtggctggcatgaattttttttttttttttttttgagacagagtcttcctctgtcacccaggctggagtgcagtggcacgatctcggctcactgcaacctctgcctcccaggttcaagcgattcttctgcctcagcctcccaagtaactgggactacaggtgtgtactaccatgcccggctaattttttttttttttttaagtagagatgggatttcaccatattggccaggctggtcttgaactcctgacctcaagggatctgcctgccttggcttcccaaagtggtgggattataggcatgagtcaccacgcctggcccatttggaatctcttcatttccactgatcttgtttattcttaaaccacactctattgatctccatacatactttttgtgtgttctggttcattcacttgtgagttgtatctggagtagaacagataatcaaagatgcttgttcagaggataaatcagttcacatactaaagtctctcacatggcccttcccaccatgtgctcccggatgtgcttcatgaggatgcagctggggcagcacatggtcctcctagtaattccgactagaatgcagttgatttctgcattctagaattcagttcaattctagaattgcattctagtctagtacttctgattcagttgcatctagtctagtacttttgcattcagttgccttctagtcagaattaagtgcaaaaacccaaaattgggacaagaaaatacaactatttatggcaaagacccatattttgttagtatgtttctctacaagttgtgctaccaacctgaatagtgcacctggcaggccaccagcacgggagtacaagctgcgcagtgagagctgcttccatttcagcccgttcaaacttctttcccagcctcagaattttgtattagtgaaaaatttaccttccccaagagcttcatttgtttccaacattcctgatatttacagcagagtgacgtttcctgtgtctgctctttgccctggctgctgggaaactcagagccaagtctgaaccctgtttacagtatcagtgattggttatagttagcctgatttctatgttattgaatttattatgtcttttttgaaatagtattggggtaaaataaacaccacaagtcaataagcttatttagttggtgggaactcagctatctcatctggaaggttagatagcctaatacataagacagccaagccacagtactactttatacatagactctaagaatttagtgctaaaaaagatgtaggaataagctagtgatggcatagttttaagtagtaaaaatgtccaatttttaaaatttcagaaaatagcatattcaaaaatgatttgagttcaagtgaaacttaagtatggcttctaataagacccgagggtgaaacctttgtatgaaaaacagaaaaaagacttgttgtcacataaattggaagtatgtacacacttttttttaggggctgggcctgtatgctgctcgagacattgagaaacacaccatggtcattgagtacatcgggactatcattcgaaacgaagtagccaacaggaaagagaagctttatgagtctcagaaccgtggtgtgtacatgttccgcatggataacgaccatgtgattgacgcgacgctcacaggagggcccgcaaggtatatcaaccattcgtgtgcacctaattgtgtggctgaagtggtgacttttgagagaggacacaaaattatcatcagctccagtcggagaatccagaaaggagaagagctctgctatgactataagtttgactttgaagatgaccagcacaagattccgtgtcactgtggagctgtgaactgccggaagtggatgaactgaaatgcattccttgctagctcagcgggcggcttgtccctaggaagaggcgattcaacacaccattggaattttgcagacagaaagagatttttgttttctgttttatgactttttgaaaaagcttctgggagttctgatttcctcagtcctttaggttaaagcagcgccaggaggaagctgacagaagcagcgttcctgaagtggccgaggttaaacggaatcacagaatggtccagcacttttgcttttttttcttttccttttcttttttttttgtttgttttttgttttgtttttcccttgtgggtgggtttcattgttttggttttctagtctcactaaggagaaacttttactggggcaaagagccgatggctgccctgccccgggcaggggccttcctatgaatgtaagactgaaatcaccagcgagggggacagagagtgctggccacggccttattaaaaaggggcaggccctctaacttcaaaatgtttttaaataaagtagacaccactgaacaaggaatgtactgaaatgacttccttagggatagagctaagggataataacttgcactaaatacatttaaatacttgattccatgagtcagtttattgtagtttttgatttctgtaaaataagagaaacttttgtatttattattgaataagtgaatgaagctatttttaaataaagttagaagaaagccaagctgctgctgttacctgcagaactaacaaaccctgttactttgtacagatatgtaaatattttgagaaaaaatacagtataaaaatagttattgaccaaatgctaccaggctctgcagcagctcgggggcttataaaatgttcatagggatgttacaatataattttgtgttataaaatatgccattataattatgtaataaccaaaatttcaacctagagtgttgggggttttttggaaaccgcagtctattagtactcaatggttttatacaccttacttctgacagagcggggcgtatgctacgactacaacttttatagctgttttggtaatttaaactaattttttcatattatattgttgcatccctacttcttcagtcaggtttttttgtgcttacaatttgtgataactgtgaataactgcttaaaaatacacccaaatggaggctgaattttttcttcagcaaaagtagttttgattagaactttgtttcagccacagagaatcatgtaaacgtaataggatcatgtagcagaaacttaaatctaaccctttagccttctatttaacacaaaaatttgaaaaagttaaaaaaaaaaaggagatgtgattatgcttacagctgcaggactctggcaatagggtttttggaagatgtaattttaaaatgtgtttgtatgaactgtttgtttacatttctttaataaaaaaaacactgttttgtgtttgcttgtagaaacttaatcagcattttgaaccaggttagctttttattttgtacttaaaattctggtactgacacttcacaggctaagtataaaatgaagttttgtgtgcacaattcaagtggactgtaaactgttggtatattcagtgatgcagttctgaacttgtatatggcatgatgtatttttatcttacagaataaatcaattgtatatatttttctcttgataaatagctgtatgaaatttgtttcctgaatatttttcttctcttgtacaatatcctgacatcctaccagtatttgtcctaccgggtttttgttgttttctgttctgtataatagtatctaatgttggcaaaaattgaattttttgaagtatacagagtgttatgggttttggaatttgtggacacagatttagaagatcaccatttacaaataaaatattttacatct

SEQ ID NO: 19011 - DNA, 6714 bp, Homo sapiens
  source 1..6714: mol_type = unassigned DNA
cgccgccattttcccagagcgagaggcagtgacactgagcgggcgcagggggccgagtcggagaccgtgccggagttcgggagcggcaacagagtgggcatagacactccgagcagcctcgccgtcgtctctgcgttcctgttgactgcctggctgccccctcccctactcctcggttcctggtgaagaggctgcgcgctgctgtttggggagggggtgtgtggagccgggtcctgtgtccgcagtggctgctgtcggggggtcgcctgttcgcggaggtgcggagagactccttgggggtcgagcactgtggctggcatgccccagtgttttggataccaatgcataggactccatagtaatcgaatttaccagaggcgaacgtcatgagcatagtgatcccattgggggttgatacagcagagacgtcatacttggaaatggctgcaggttcagaaccagaatccgtagaagctagccctgtggtagttgagaaatccaacagttatccccaccagttatataccagcagctcacatcattcacacagttacattggtttgccctatgcggaccataattatggtgctcgtcctcctccgacacctccggcttcccctcctccatcagtccttattagcaaaaatgaagtaggcatatttaccactcctaattttgatgaaacttccagtgctactacaatcagcacatctgaggatggaagttatggtactgatgtaaccaggtgcatatgtggttttacacatgatgatggatacatgatctgttgtgacaaatgcagcgtttggcaacatattgactgcatggggattgataggcagcatattcctgatacatatctatgtgaacgttgtcagcctaggaatttggataaagagagggcagtgctactacaacgccggaaaagggaaaatatgtcagatggtgataccagtgcaactgagagtggtgatgaggttcctgtggaattatatactgcatttcagcatactccaacatcaattactttaactgcttcaagagtttccaaagttaatgataaaagaaggaaaaaaagcggggagaaagaacaacacatttcaaaatgtaaaaaggcatttcgtgaaggatctaggaagtcatcaagagttaagggttcagctccagagattgatccttcatctgatggttcaaattttggatgggagacaaagatcaaagcatggatggatcgatatgaagaagcaaataacaaccagtacagtgagggtgttcagagggaggcacaaagaatagctctgagattaggcaatggaaatgacaaaaaagagatgaataaatccgatttgaataccaacaatttgctcttcaaacctcctgtagagagccatatacaaaagaataagaaaattcttaaatctgcaaaagatttgcctcctgatgcacttatcattgaatacagagggaagtttatgctgagagaacagtttgaagcaaatgggtatttctttaaaagaccatacccttttgtgttattctactctaaatttcatgggctagaaatgtgtgttgatgcaaggacttttgggaatgaggctcgattcatcaggcggtcttgtacacccaatgcagaggtgaggcatgaaattcaagatggaaccatacatctttatatttattctatacacagtattccaaagggaactgaaattactattgcctttgattttgactatggaaattgtaagtacaaggtggactgtgcatgcctcaaagaaaacccagagtgccctgttctaaaacgtagttctgaatccatggaaaatatcaatagtggttatgagaccagacggaaaaaaggaaaaaaagacaaagatatttcaaaagaaaaagatacacaaaatcagaatattactttggattgtgaaggaacgaccaacaaaatgaagagcccagaaactaaacaaagaaagctttctccactgagactatcagtatcaaataatcaggaaccagattttattgatgatatagaagaaaaaactcctattagtaatgaagtagaaatggaatcagaggagcagattgcagaaaggaaaaggaagatgacaagagaagaaagaaaaatggaagcaattttgcaagcttttgccagacttgaaaagagagagaaaagaagagaacaagctttggaaaggatcagcacagccaaaactgaagttaaaactgaatgtaaagatacacagattgtcagtgatgctgaagttattcaggaacaagcaaaagaagaaaatgctagcaagccaacccctgccaaagtaaatagaactaaacagagaaaaagtttttctcggagtaggactcacattggacagcagcgtcggagacacagaactgtcagcatgtgttcagatatccagccatcttctcctgatatagaagttacttcacaacaaaatgatattgaaaatactgtacttacaatagaaccagaaactgaaactgcactagcagaaataattactgaaactgaagttccagcacttaataaatgtcctaccaagtaccccaaaacaaagaagcacttggttaatgaatggttaagtgagaagaatgagaagacaggaaaaccttcagatggcctttcagaaaggcctctacgcataactacagatcctgaagtgttagctacacaactcaattctttaccaggtctcacttacagcccccatgtatactccactcctaagcattatattagatttacttcaccattcctttcagaaaaaaggagaagaaaagaacctactgaaaacatttctggttcatgcaagaagcgatggttgaaacaagctctggaagaagaaaattcagcaattttacatagatttaattcaccctgtcaagaaagatccagaagtcctgcagtcaatggtgaaaataaaagtccactactattaaatgacagctgttcccttccagatttaactacaccactaaaaaaacgaagattttatcagttgctagattcggtttactcagaaacctccacacctactccttccccgtatgctacaccaactcacaccgatattactcctatggacccatcttttgccacgcctccacggataaaatcagatgatgaaacttgtagaaatggttataaacccatatattcaccagttaccccagtaactcctggtacaccaggaaataccatgcactttgagaatatttcttccccagaaagttctccagaaataaagagacgcacttatagtcaagagggatatgacagatcttcaaccatgttaacattggggccttttagaaattctaatttaactgaactgggtctgcaagaaataaagactattggttatacgagccctaggagtaggactgaagtcaacaggcagtgtcctggagaaaaggaacctgtgtcagaccttcagctaggactcgatgcagttgagccaactgccctacataaaaccctggaaacgcctgcacatgacagggctgagcccaacagccaactggactcgactcactctggacggggcacaatgtattcttcctgggtaaagagccctgacagaacaggagttaacttctcagtgaactccaacttgagggacctgacaccctcgcatcagttggaggttggaggaggcttccgaataagtgagtcaaagtgcctgatgcaggatgatactagaggcatgtttatggaaacaactgtgttttgtacttccgaagatgggcttgtatctggtttcggacggactgttaatgacaatttgatcgacgggaattgcacaccccagaatccaccacaaaagaaaaaggtttctctattagaataccgtaagagacaacgtgaagctaggaaaagtggctctaagacagagaactttccactcattagtgtatcaccccatgcaagtggaagcttgagcaacaatggtgatggctgtgccagcagtaatgacaatggggagcaggtggaccacactgctagcctacctttaccaacaccagctacagtttataatgccacttctgaagaaactagcaataactgccctgttaaggatgctactgctagtgagaagaatgaaccagaagttcaatggactgcctcaacttcagtggaacaagtcagagaaaggagttatcagagagctttacttctcagtgatcaccgaaaagataaagatagtgggggagaatcaccatgtgtctcatgttcaccgagtcatgttcagtcttcaccttcatctcattcaaatcacataccccagttgcaagctaagggcccagtcccttctttcagtgaacttatggaagaccctgatcctgaaaatccagaacccacaactacgaatgaatgtccatccccagatacttctcaaaatacttgtaaaagtcctccaaaaatgagcaagcctggttcacctggatctgtaattcctgctcaagcacacgggaaaatattcacaaaaccagatccccaatgggactccacagttagtgcatccgaagctgaaaatggtgttcacctaaaaacagagctccaacaaaaacagctatcaaataacaaccaagcactttcaaagaatcatcctcctcagacacacgttcgtaattcatctgagcaactttcacaaaagctgccttctgtgccaacaaagttgcactgtcctccatcacctcacctagaaaatcctccaaagtcatccacgcctcacacacctgtacagcatggttatctttcaccaaagcctccttcacagcagttaggatctccctacaggcctcatcattcacagtcacctcaagttggaacacctcagcgagagcctcaaagaaacttttatccagcagcacagaaccttccagccaatactcagcaggcaacttctggaacattatttacacagacaccctcaggacaatcttcagcaacatacagtcagtttaaccaacaaagtctgaacagcacggcaccaccccctccacctcctccacctccttcttcgtcttactatcaaaaccagcagccctctgcaaactttcagaattataatcagctcaaaggtagtctttctcaacaaactgtgtttacatcaggaccaaatcaagcacttcctggcaccacaagccagcaaacagttccaggacaccacgtgactccagggcattttttgccctctcagaaccctaccattcaccatcaaactgctgctgccgtagtcccccctcctcctccaccaccacctgctccaggaccgcaccttgtacaacagccgaattcccatcagcaacactctgtagcacatgtagtagggcctgttcatgcggtcacccctgggtcgcatattcattctcaaactgctggacaccacttacccccacccccaccccctcctggtcctgcccctcatcaccatccaccaccccatccatccacaggactccaaggtctacaagcacaacaccagcatgttgtaaattcagcacccccaccaccccctccgccgccaccttccagtgttttggcttctgggcatcataccacatcagctcaagccttacaccacccacctcatcaaggacctccactttttccttcgagtgctcatccaactgtaccaccgtatccctcacaagctacacatcataccactttgggaccgggaccccagcaccagccttctggaacagggccacattgtccattacctgtcacaggtcctcatctccagccccaaggaccaaacagtattccaacacctactgcttcagggttctgtcctcatcctggctctgtggccctgccacatggggttcaaggacctcagcaggcatctccagtgcctggacagattccaattcacagagcacaggtgccaccaacatttcaaaacaattaccatgggtcagggtggcattaaaatggactccaaaaacatttttttaaatgttctgtaagataaactgtatatttcatatgtacctgttaaggtactttttaaagcttgtacatgaacctttgtataaaaaacaccagtgctctttcgttgtatttttctcatttttgctttttaaaattcctttaaaaaatgtgctgttaagccagtattaggtatctttattttgtaagtgaacattccagctgtttttttctggcagatctgatgctgatttgatgctgtatgatcttttttttttttttagttaaattcatttagtgaatgttctattattttatacatacacattaagtactcagctaagtaatggcactatgaggattttttttttctttcctgtcagcagcagttctgtgaatgcatcttaggtataaaaatgcaatacagatttttatattttggtgtggacatggctcattttgttttaccagttatttgcaagcaaaatgtaatttaatgtatagatgatttctaatgtctcctgacaaactgtaaatactgcatttcttttgcgtatataattgcttacagcttttctcatttgatatatagcattgtacatatgacaagtcttttgcaaaactgtgtgatctttgtgaaagtagtacagtatatgacctttaatttcttttttattttaaatatactgtcacactgaagcactggttgggcattttaattcatgttaataaatcacaattatgtcagtttt

SEQ ID NO: 19012 - DNA, 6874 bp, Homo sapiens
  source 1..6874: mol_type = unassigned DNA
gccgccgccgccgccgccattttcccagagcgagaggcagtgacactgagcgggcgcagggggccgagtcggagaccgtgccggagttcgggagcggcaacagagtgggcatagacactccgagcagcctcgccgtcgtctctgcgttcctgttgactgcctggctgccccctcccctactcctcggttcctggtgaagaggctgcgcgctgctgtttggggagggggtgtgtggagccgggtcctgtgtccgcagtggctgctgtcggggggtcgcctgttcgcggaggtgcggagagactccttgggggtcgagcacataacggggttcgggtgtctcgtgtgtgaacatcacaggtctattctggataagcaggttttgtgaagacatttattctttcttggacctcagatttaccagacatctcatgggtttgtggatgcacttagatgtttgcaatgagcactgtggctggcatgccccagtgttttggataccaatgcataggactccatagtaatcgaatttaccagaggcgaacgtcatgagcatagtgatcccattgggggttgatacagcagagacgtcatacttggaaatggctgcaggttcagaaccagaatccgtagaagctagccctgtggtagttgagaaatccaacagttatccccaccagttatataccagcagctcacatcattcacacagttacattggtttgccctatgcggaccataattatggtgctcgtcctcctccgacacctccggcttcccctcctccatcagtccttattagcaaaaatgaagtaggcatatttaccactcctaattttgatgaaacttccagtgctactacaatcagcacatctgaggatggaagttatggtactgatgtaaccaggtgcatatgtggttttacacatgatgatggatacatgatctgttgtgacaaatgcagcgtttggcaacatattgactgcatggggattgataggcagcatattcctgatacatatctatgtgaacgttgtcagcctaggaatttggataaagagagggcagtgctactacaacgccggaaaagggaaaatatgtcagatggtgataccagtgcaactgagagtggtgatgaggttcctgtggaattatatactgcatttcagcatactccaacatcaattactttaactgcttcaagagtttccaaagttaatgataaaagaaggaaaaaaagcggggagaaagaacaacacatttcaaaatgtaaaaaggcatttcgtgaaggatctaggaagtcatcaagagttaagggttcagctccagagattgatccttcatctgatggttcaaattttggatgggagacaaagatcaaagcatggatggatcgatatgaagaagcaaataacaaccagtacagtgagggtgttcagagggaggcacaaagaatagctctgagattaggcaatggaaatgacaaaaaagagatgaataaatccgatttgaataccaacaatttgctcttcaaacctcctgtagagagccatatacaaaagaataagaaaattcttaaatctgcaaaagatttgcctcctgatgcacttatcattgaatacagagggaagtttatgctgagagaacagtttgaagcaaatgggtatttctttaaaagaccatacccttttgtgttattctactctaaatttcatgggctagaaatgtgtgttgatgcaaggacttttgggaatgaggctcgattcatcaggcggtcttgtacacccaatgcagaggtgaggcatgaaattcaagatggaaccatacatctttatatttattctatacacagtattccaaagggaactgaaattactattgcctttgattttgactatggaaattgtaagtacaaggtggactgtgcatgcctcaaagaaaacccagagtgccctgttctaaaacgtagttctgaatccatggaaaatatcaatagtggttatgagaccagacggaaaaaaggaaaaaaagacaaagatatttcaaaagaaaaagatacacaaaatcagaatattactttggattgtgaaggaacgaccaacaaaatgaagagcccagaaactaaacaaagaaagctttctccactgagactatcagtatcaaataatcaggaaccagattttattgatgatatagaagaaaaaactcctattagtaatgaagtagaaatggaatcagaggagcagattgcagaaaggaaaaggaagatgacaagagaagaaagaaaaatggaagcaattttgcaagcttttgccagacttgaaaagagagagaaaagaagagaacaagctttggaaaggatcagcacagccaaaactgaagttaaaactgaatgtaaagatacacagattgtcagtgatgctgaagttattcaggaacaagcaaaagaagaaaatgctagcaagccaacccctgccaaagtaaatagaactaaacagagaaaaagtttttctcggagtaggactcacattggacagcagcgtcggagacacagaactgtcagcatgtgttcagatatccagccatcttctcctgatatagaagttacttcacaacaaaatgatattgaaaatactgtacttacaatagaaccagaaactgaaactgcactagcagaaataattactgaaactgaagttccagcacttaataaatgtcctaccaagtaccccaaaacaaagaagcacttggttaatgaatggttaagtgagaagaatgagaagacaggaaaaccttcagatggcctttcagaaaggcctctacgcataactacagatcctgaagtgttagctacacaactcaattctttaccaggtctcacttacagcccccatgtatactccactcctaagcattatattagatttacttcaccattcctttcagaaaaaaggagaagaaaagaacctactgaaaacatttctggttcatgcaagaagcgatggttgaaacaagctctggaagaagaaaattcagcaattttacatagatttaattcaccctgtcaagaaagatccagaagtcctgcagtcaatggtgaaaataaaagtccactactattaaatgacagctgttcccttccagatttaactacaccactaaaaaaacgaagattttatcagttgctagattcggtttactcagaaacctccacacctactccttccccgtatgctacaccaactcacaccgatattactcctatggacccatcttttgccacgcctccacggataaaatcagatgatgaaacttgtagaaatggttataaacccatatattcaccagttaccccagtaactcctggtacaccaggaaataccatgcactttgagaatatttcttccccagaaagttctccagaaataaagagacgcacttatagtcaagagggatatgacagatcttcaaccatgttaacattggggccttttagaaattctaatttaactgaactgggtctgcaagaaataaagactattggttatacgagccctaggagtaggactgaagtcaacaggcagtgtcctggagaaaaggaacctgtgtcagaccttcagctaggactcgatgcagttgagccaactgccctacataaaaccctggaaacgcctgcacatgacagggctgagcccaacagccaactggactcgactcactctggacggggcacaatgtattcttcctgggtaaagagccctgacagaacaggagttaacttctcagtgaactccaacttgagggacctgacaccctcgcatcagttggaggttggaggaggcttccgaataagtgagtcaaagtgcctgatgcaggatgatactagaggcatgtttatggaaacaactgtgttttgtacttccgaagatgggcttgtatctggtttcggacggactgttaatgacaatttgatcgacgggaattgcacaccccagaatccaccacaaaagaaaaaggtttctctattagaataccgtaagagacaacgtgaagctaggaaaagtggctctaagacagagaactttccactcattagtgtatcaccccatgcaagtggaagcttgagcaacaatggtgatggctgtgccagcagtaatgacaatggggagcaggtggaccacactgctagcctacctttaccaacaccagctacagtttataatgccacttctgaagaaactagcaataactgccctgttaaggatgctactgctagtgagaagaatgaaccagaagttcaatggactgcctcaacttcagtggaacaagtcagagaaaggagttatcagagagctttacttctcagtgatcaccgaaaagataaagatagtgggggagaatcaccatgtgtctcatgttcaccgagtcatgttcagtcttcaccttcatctcattcaaatcacataccccagttgcaagctaagggcccagtcccttctttcagtgaacttatggaagaccctgatcctgaaaatccagaacccacaactacgaatgaatgtccatccccagatacttctcaaaatacttgtaaaagtcctccaaaaatgagcaagcctggttcacctggatctgtaattcctgctcaagcacacgggaaaatattcacaaaaccagatccccaatgggactccacagttagtgcatccgaagctgaaaatggtgttcacctaaaaacagagctccaacaaaaacagctatcaaataacaaccaagcactttcaaagaatcatcctcctcagacacacgttcgtaattcatctgagcaactttcacaaaagctgccttctgtgccaacaaagttgcactgtcctccatcacctcacctagaaaatcctccaaagtcatccacgcctcacacacctgtacagcatggttatctttcaccaaagcctccttcacagcagttaggatctccctacaggcctcatcattcacagtcacctcaagttggaacacctcagcgagagcctcaaagaaacttttatccagcagcacagaaccttccagccaatactcagcaggcaacttctggaacattatttacacagacaccctcaggacaatcttcagcaacatacagtcagtttaaccaacaaagtctgaacagcacggcaccaccccctccacctcctccacctccttcttcgtcttactatcaaaaccagcagccctctgcaaactttcagaattataatcagctcaaaggtagtctttctcaacaaactgtgtttacatcaggaccaaatcaagcacttcctggcaccacaagccagcaaacagttccaggacaccacgtgactccagggcattttttgccctctcagaaccctaccattcaccatcaaactgctgctgccgtagtcccccctcctcctccaccaccacctgctccaggaccgcaccttgtacaacagccgaattcccatcagcaacactctgtagcacatgtagtagggcctgttcatgcggtcacccctgggtcgcatattcattctcaaactgctggacaccacttacccccacccccaccccctcctggtcctgcccctcatcaccatccaccaccccatccatccacaggactccaaggtctacaagcacaacaccagcatgttgtaaattcagcacccccaccaccccctccgccgccaccttccagtgttttggcttctgggcatcataccacatcagctcaagccttacaccacccacctcatcaaggacctccactttttccttcgagtgctcatccaactgtaccaccgtatccctcacaagctacacatcataccactttgggaccgggaccccagcaccagccttctggaacagggccacattgtccattacctgtcacaggtcctcatctccagccccaaggaccaaacagtattccaacacctactgcttcagggttctgtcctcatcctggctctgtggccctgccacatggggttcaaggacctcagcaggcatctccagtgcctggacagattccaattcacagagcacaggtgccaccaacatttcaaaacaattaccatgggtcagggtggcattaaaatggactccaaaaacatttttttaaatgttctgtaagataaactgtatatttcatatgtacctgttaaggtactttttaaagcttgtacatgaacctttgtataaaaaacaccagtgctctttcgttgtatttttctcatttttgctttttaaaattcctttaaaaaatgtgctgttaagccagtattaggtatctttattttgtaagtgaacattccagctgtttttttctggcagatctgatgctgatttgatgctgtatgatcttttttttttttttagttaaattcatttagtgaatgttctattattttatacatacacattaagtactcagctaagtaatggcactatgaggattttttttttctttcctgtcagcagcagttctgtgaatgcatcttaggtataaaaatgcaatacagatttttatattttggtgtggacatggctcattttgttttaccagttatttgcaagcaaaatgtaatttaatgtatagatgatttctaatgtctcctgacaaactgtaaatactgcatttcttttgcgtatataattgcttacagcttttctcatttgatatatagcattgtacatatgacaagtcttttgcaaaactgtgtgatctttgtgaaagtagtacagtatatgacctttaatttcttttttattttaaatatactgtcacactgaagcactggttgggcattttaattcatgttaataaatcacaattatgtcagtttta

SEQ ID NO: 19013 - DNA, 7013 bp, Homo sapiens
  source 1..7013: mol_type = unassigned DNA
cgccgccattttcccagagcgagaggcagtgacactgagcgggcgcagggggccgagtcggagaccgtgccggagttcgggagcggcaacagagtgggcatagacactccgagcagcctcgccgtcgtctctgcgttcctgttgactgcctggctgccccctcccctactcctcggttcctggtgaagaggctgcgcgctgctgtttggggagggggtgtgtggagccgggtcctgtgtccgcagtggctgctgtcggggggtcgcctgttcgcggaggtgcggagagactccttgggggtcgagcacataacggggttcgggtgtctcgtgtgtgaacatcacaggtctattctggataagcaggttttgtgaagacatttattctttcttggacctcagatttaccagacatctcatgggtttgtggatgcacttagatgtttgcaatgagcactgtggctggcatgccccagtgttttggataccaatgcataggactccatagtaatcgaatttaccagaggcgaacgtcatgagcatagtgatcccattgggggttgatacagcagagacgtcatacttggaaatggctgcaggttcagaaccagaatccgtagaagctagccctgtggtagttgagaaatccaacagttatccccaccagttatataccagcagctcacatcattcacacagttacattggtttgccctatgcggaccataattatggtgctcgtcctcctccgacacctccggcttcccctcctccatcagtccttattagcaaaaatgaagtaggcatatttaccactcctaattttgatgaaacttccagtgctactacaatcagcacatctgaggatggaagttatggtactgatgtaaccaggtgcatatgtggttttacacatgatgatggatacatgatctgttgtgacaaatgcagcgtttggcaacatattgactgcatggggattgataggcagcatattcctgatacatatctatgtgaacgttgtcagcctaggaatttggataaagagagggcagtgctactacaacgccggaaaagggaaaatatgtcagatggtgataccagtgcaactgagagtggtgatgaggttcctgtggaattatatactgcatttcagcatactccaacatcaattactttaactgcttcaagagtttccaaagttaatgataaaagaaggaaaaaaagcggggagaaagaacaacacatttcaaaatgtaaaaaggcatttcgtgaaggatctaggaagtcatcaagagttaagggttcagctccagagattgatccttcatctgatggttcaaattttggatgggagacaaagatcaaagcatggatggatcgatatgaagaagcaaataacaaccagtacagtgagggtgttcagagggaggcacaaagaatagctctgagattaggcaatggaaatgacaaaaaagagatgaataaatccgatttgaataccaacaatttgctcttcaaacctcctgtagagagccatatacaaaagaataagaaaattcttaaatctgcaaaagatttgcctcctgatgcacttatcattgaatacagagggaagtttatgctgagagaacagtttgaagcaaatgggtatttctttaaaagaccatacccttttgtgttattctactctaaatttcatgggctagaaatgtgtgttgatgcaaggacttttgggaatgaggctcgattcatcaggcggtcttgtacacccaatgcagaggtgaggcatgaaattcaagatggaaccatacatctttatatttattctatacacagtattccaaagggaactgaaattactattgcctttgattttgactatggaaattgtaagtacaaggtggactgtgcatgcctcaaagaaaacccagagtgccctgttctaaaacgtagttctgaatccatggaaaatatcaatagtggttatgagaccagacggaaaaaaggaaaaaaagacaaagatatttcaaaagaaaaagatacacaaaatcagaatattactttggattgtgaaggaacgaccaacaaaatgaagagcccagaaactaaacaaagaaagctttctccactgagactatcagtatcaaataatcaggaaccagattttattgatgatatagaagaaaaaactcctattagtaatgaagtagaaatggaatcagaggagcagattgcagaaaggaaaaggaagatgacaagagaagaaagaaaaatggaagcaattttgcaagcttttgccagacttgaaaagagagagaaaagaagagaacaagctttggaaaggatcagcacagccaaaactgaagttaaaactgaatgtaaagatacacagattgtcagtgatgctgaagttattcaggaacaagcaaaagaagaaaatgctagcaagccaacccctgccaaagtaaatagaactaaacagagaaaaagtttttctcggagtaggactcacattggacagcagcgtcggagacacagaactgtcagcatgtgttcagatatccagccatcttctcctgatatagaagttacttcacaacaaaatgatattgaaaatactgtacttacaatagaaccagaaactgaaactgcactagcagaaataattactgaaactgaagttccagcacttaataaatgtcctaccaagtaccccaaaacaaagaagcacttggttaatgaatggttaagtgagaagaatgagaagacaggaaaaccttcagatggcctttcagaaaggcctctacgcataactacagatcctgaagtgttagctacacaactcaattctttaccaggtctcacttacagcccccatgtatactccactcctaagcattatattagatttacttcaccattcctttcagaaaaaaggagaagaaaagaacctactgaaaacatttctggttcatgcaagaagcgatggttgaaacaagctctggaagaagaaaattcagcaattttacatagatttaattcaccctgtcaagaaagatccagaagtcctgcagtcaatggtgaaaataaaagtccactactattaaatgacagctgttcccttccagatttaactacaccactaaaaaaacgaagattttatcagttgctagattcggtttactcagaaacctccacacctactccttccccgtatgctacaccaactcacaccgatattactcctatggacccatcttttgccacgcctccacggataaaatcagatgatgaaacttgtagaaatggttataaacccatatattcaccagttaccccagtaactcctggtacaccaggaaataccatgcactttgagaatatttcttccccagaaagttctccagaaataaagagacgcacttatagtcaagagggatatgacagatcttcaaccatgttaacattggggccttttagaaattctaatttaactgaactgggtctgcaagaaataaagactattggttatacgagccctaggagtaggactgaagtcaacaggcagtgtcctggagaaaaggaacctgtgtcagaccttcagctaggactcgatgcagttgagccaactgccctacataaaaccctggaaacgcctgcacatgacagggctgagcccaacagccaactggactcgactcactctggacggggcacaatgtattcttcctgggtaaagagccctgacagaacaggagttaacttctcagtgaactccaacttgagggacctgacaccctcgcatcagttggaggttggaggaggcttccgaataagtgagtcaaagtgcctgatgcaggatgatactagaggcatgtttatggaaacaactgtgttttgtacttccgaagatgggcttgtatctggtttcggacggactgttaatgacaatttgatcgacgggaattgcacaccccagaatccaccacaaaagaaaaaggtttctctattagaataccgtaagagacaacgtgaagctaggaaaagtggctctaagacagagaactttccactcattagtgtatcaccccatgcaagtggaagcttgagcaacaatggtgatggctgtgccagcagtaatgacaatggggagcaggtggaccacactgctagcctacctttaccaacaccagctacagtttataatgccacttctgaagaaactagcaataactgccctgttaaggatgctactgctagtgagaagaatgaaccagaagttcaatggactgcctcaacttcagtggaacaagtcagagaaaggagttatcagagagctttacttctcagtgatcaccgaaaagataaagatagtgaccctgatcctgaaaatccagaacccacaactacgaatgaatgtccatccccagatacttctcaaaatacttgtaaaagtcctccaaaaatgagcaagcctggttcacctggatctgtaattcctgctcaagcacacgggaaaatattcacaaaaccagatccccaatgggactccacagttagtgcatccgaagctgaaaatggtgttcacctaaaaacagagctccaacaaaaacagctatcaaataacaaccaagcactttcaaagaatcatcctcctcagacacacgttcgtaattcatctgagcaactttcacaaaagctgccttctgtgccaacaaagttgcactgtcctccatcacctcacctagaaaatcctccaaagtcatccacgcctcacacacctgtacagcatggttatctttcaccaaagcctccttcacagcagttaggatctccctacaggcctcatcattcacagtcacctcaagttggaacacctcagcgagagcctcaaagaaacttttatccagcagcacagaaccttccagccaatactcagcaggcaacttctggaacattatttacacagacaccctcaggacaatcttcagcaacatacagtcagtttaaccaacaaagtctgaacagcacggcaccaccccctccacctcctccacctccttcttcgtcttactatcaaaaccagcagccctctgcaaactttcagaattataatcagctcaaaggtagtctttctcaacaaactgtgtttacatcaggaccaaatcaagcacttcctggcaccacaagccagcaaacagttccaggacaccacgtgactccagggcattttttgccctctcagaaccctaccattcaccatcaaactgctgctgccgtagtcccccctcctcctccaccaccacctgctccaggaccgcaccttgtacaacagccgaattcccatcagcaacactctgtagcacatgtagtagggcctgttcatgcggtcacccctgggtcgcatattcattctcaaactgctggacaccacttacccccacccccaccccctcctggtcctgcccctcatcaccatccaccaccccatccatccacaggactccaaggtctacaagcacaacaccagcatgttgtaaattcagcacccccaccaccccctccgccgccaccttccagtgttttggcttctgggcatcataccacatcagctcaagccttacaccacccacctcatcaaggacctccactttttccttcgagtgctcatccaactgtaccaccgtatccctcacaagctacacatcataccactttgggaccgggaccccagcaccagccttctggaacagggccacattgtccattacctgtcacaggtcctcatctccagccccaaggaccaaacagtattccaacacctactgcttcagggttctgtcctcatcctggctctgtggccctgccacatggggttcaaggacctcagcaggcatctccagtgcctggacagattccaattcacagagcacaggtgccaccaacatttcaaaacaattaccatgggtcagggtggcattaaaatggactccaaaaacatttttttaaatgttctgtaagataaactgtatatttcatatgtacctgttaaggtactttttaaagcttgtacatgaacctttgtataaaaaacaccagtgctctttcgttgtatttttctcatttttgctttttaaaattcctttaaaaaatgtgctgttaagccagtattaggtatctttattttgtaagtgaacattccagctgtttttttctggcagatctgatgctgatttgatgctgtatgatcttttttttttttttagttaaattcatttagtgaatgttctattattttatacatacacattaagtactcagctaagtaatggcactatgaggattttttttttctttcctgtcagcagcagttctgtgaatgcatcttaggtataaaaatgcaatacagatttttatattttggtgtggacatggctcattttgttttaccagttatttgcaagcaaaatgtaatttaatgtatagatgatttctaatgtctcctgacaaactgtaaatactgcatttcttttgcgtatataattgcttacagcttttctcatttgatatatagcattgtacatatgacaagtcttttgcaaaactgtgtgatctttgtgaaagtagtacagtatatgacctttaatttcttttttattttaaatatactgtcacactgaagcactggttgggcattttaattcatgttaataaatcacaattatgtcagttttaccagattgtcctgtacaacttctaagatcgggatctgtgtgtttctacagaagttctagttttcaaatatagattgtaaggagccttcaattttctttagcgactactacctcagcaacaggaggcagcaaggggctgttcctgtggtggtttctgtttgcatttttgcaggagccataggaaactactgaaatgattgtgctgggtaaattaaggatctggcatcatacaaaatgaagccagaccactaatgcattacagtagttcttgaataca

SEQ ID NO: 19014 - DNA, 5139 bp, Homo sapiens
  source 1..5139: mol_type = unassigned DNA
cgccgccattttcccagagcgagaggcagtgacactgagcgggcgcagggggccgagtcggagaccgtgccggagttcgggagcggcaacagagtgggcatagacactccgagcagcctcgccgtcgtctctgcgttcctgttgactgcctggctgccccctcccctactcctcggttcctggtgaagaggctgcgcgctgctgtttggggagggggtgtgtggagccgggtcctgtgtccgcagtggctgctgtcggggggtcgcctgttcgcggaggtgcggagagactccttgggggtcgagcacataacggggttcgggtgtctcgtgtgtgaacatcacaggtctattctggataagcaggttttgtgaagacatttattctttcttggacctcagatttaccagacatctcatgggtttgtggatgcacttagatgtttgcaatgagcactgtggctggcatgccccagtgttttggataccaatgcataggactccatagtaatcgaatttaccagaggcgaacgtcatgagcatagtgatcccattgggggttgatacagcagagacgtcatacttggaaatggctgcaggttcagaaccagaatccgtagaagctagccctgtggtagttgagaaatccaacagttatccccaccagttatataccagcagctcacatcattcacacagttacattggtttgccctatgcggaccataattatggtgctcgtcctcctccgacacctccggcttcccctcctccatcagtccttattagcaaaaatgaagtaggcatatttaccactcctaattttgatgaaacttccagtgctactacaatcagcacatctgaggatggaagttatggtactgatgtaaccaggtgcatatgtggttttacacatgatgatggatacatgatctgttgtgacaaatgcagcgtttggcaacatattgactgcatggggattgataggcagcatattcctgatacatatctatgtgaacgttgtcagcctaggaatttggataaagagagggcagtgctactacaacgccggaaaagggaaaatatgtcagatggtgataccagtgcaactgagagtggtgatgaggttcctgtggaattatatactgcatttcagcatactccaacatcaattactttaactgcttcaagagtttccaaagttaatgataaaagaaggaaaaaaagcggggagaaagaacaacacatttcaaaatgtaaaaaggcatttcgtgaaggatctaggaagtcatcaagagttaagggttcagctccagagattgatccttcatctgatggttcaaattttggatgggagacaaagatcaaagcatggatggatcgatatgaagaagcaaataacaaccagtacagtgagggtgttcagagggaggcacaaagaatagctctgagattaggcaatggaaatgacaaaaaagagatgaataaatccgatttgaataccaacaatttgctcttcaaacctcctgtagagagccatatacaaaagaataagaaaattcttaaatctgcaaaagatttgcctcctgatgcacttatcattgaatacagagggaagtttatgctgagagaacagtttgaagcaaatgggtatttctttaaaagaccatacccttttgtgttattctactctaaatttcatgggctagaaatgtgtgttgatgcaaggacttttgggaatgaggctcgattcatcaggcggtcttgtacacccaatgcagaggtgaggcatgaaattcaagatggaaccatacatctttatatttattctatacacagtattccaaagggaactgaaattactattgcctttgattttgactatggaaattgtaagtacaaggtggactgtgcatgcctcaaagaaaacccagagtgccctgttctaaaacgtagttctgaatccatggaaaatatcaatagtggttatgagaccagacggaaaaaaggaaaaaaagacaaagatatttcaaaagaaaaagatacacaaaatcagaatattactttggattgtgaaggaacgaccaacaaaatgaagagcccagaaactaaacaaagaaagctttctccactgagactatcagtatcaaataatcaggaaccagattttattgatgatatagaagaaaaaactcctattagtaatgaagtagaaatggaatcagaggagcagattgcagaaaggaaaaggaagatgacaagagaagaaagaaaaatggaagcaattttgcaagcttttgccagacttgaaaagagagagaaaagaagagaacaagctttggaaaggatcagcacagccaaaactgaagttaaaactgaatgtaaagatacacagattgtcagtgatgctgaagttattcaggaacaagcaaaagaagaaaatgctagcaagccaacccctgccaaagtaaatagaactaaacagagaaaaagtttttctcggagtaggactcacattggacagcagcgtcggagacacagaactgtcagcatgtgttcagatatccagccatcttctcctgatatagaagttacttcacaacaaaatgatattgaaaatactgtacttacaatagaaccagaaactgaaactgcactagcagaaataattactgaaactgaagttccagcacttaataaatgtcctaccaagtaccccaaaacaaagaagcacttggttaatgaatggttaagtgagaagaatgagaagacaggaaaaccttcagatggcctttcagaaaggcctctacgcataactacagatcctgaagtgttagctacacaactcaattctttaccaggtctcacttacagcccccatgtatactccactcctaagcattatattagatttacttcaccattcctttcagaaaaaaggagaagaaaagaacctactgaaaacatttctggttcatgcaagaagcgatggttgaaacaagctctggaagaagaaaattcagcaattttacatagatttaattcaccctgtcaagaaagatccagaagtcctgcagtcaatggtgaaaataaaagtccactactattaaatgacagctgttcccttccagatttaactacaccactaaaaaaacgaagattttatcagttgctagattcggtttactcagaaacctccacacctactccttccccgtatgctacaccaactcacaccgatattactcctatggacccatcttttgccacgcctccacggataaaatcagatgatgaaacttgtagaaatggttataaacccatatattcaccagttaccccagtaactcctggtacaccaggaaataccatgcactttgagaatatttcttccccagaaagttctccagaaataaagagacgcacttatagtcaagagggatatgacagatcttcaaccatgttaacattggggccttttagaaattctaatttaactgaactgggtctgcaagaaataaagactattggttatacgagccctaggagtaggactgaagtcaacaggcagtgtcctggagaaaaggaacctgtgtcagaccttcagctaggactcgatgcagttgagccaactgccctacataaaaccctggaaacgcctgcacatgacagggctgagcccaacagccaactggactcgactcactctggacggggcacaatgtattcttcctgggtaaagagccctgacagaacaggagttaacttctcagtgaactccaacttgagggacctgacaccctcgcatcagttggaggttggaggaggcttccgaataagtgagtcaaagtgcctgatgcaggatgatactagaggcatgtttatggaaacaactgtgttttgtacttccgaagatgggcttgtatctggtttcggacggactgttaatgacaatttgatcgacgggaattgcacaccccagaatccaccacaaaagaaaaaggtttctctattagaataccgtaagagacaacgtgaagctaggaaaagtggctctaagacagagaactttccactcattagtgtatcaccccatgcaagtggaagcttgagcaacaatggtgatggctgtgccagcagtaatgacaatggggagcaggtggaccacactgctagcctacctttaccaacaccagctacagtttataatgccacttctgaagaaactagcaataactgccctgttaaggatgctactgctagtgagaagaatgaaccagaagttcaatggactgcctcaacttcagtggaacaagtcagagaaaggagttatcagagagctttacttctcagtgatcaccgaaaagataaagatagtgggggagaatcaccatgtgtctcatgttcaccgagtcatgttcagtcttcaccttcatctcattcaaatcacataccccagttgcaagctaagggcccagtcccttctttcagtgaacttatggaagaccctgatcctgaaaatccagaacccacaactacgaatgaatgtccatccccagatacttctcaaaatacttgtaaaagtcctccaaaaatgagcaagcctggttcacctggatctgtaattcctgctcaagcacacgggaaaatattcacaaaaccagatccccaatgggactccacagttagtgcatccgaagctgaaaatggtgttcacctaaaaacagagctccaacaaaaacagctatcaaataacaaccaagcactttcaaagaatcatcctcctcagacacacgttcgtaattcatctgagcaactttcacaaaagctgccttctgtgccaacaaagttgcactgtcctccatcacctcacctagaaaatcctccaaagtcatccacgcctcacacacctgtacagcatggttatctttcaccaaagcctccttcacagcagttaggatctccctacaggcctcatcattcacagtcacctcaagttggaacacctcagcgagagcctcaaagaaacttttatccagcagcacagaaccttccagccaatactcagcaggcaacttctggaacattatttacacagacaccctcaggacaatcttcagcaacatacactcaaaggtag

SEQ ID NO: 19015 - DNA, 6899 bp, Homo sapiens
  source 1..6899: mol_type = unassigned DNA
cgccgccattttcccagagcgagaggcagtgacactgagcgggcgcagggggccgagtcggagaccgtgccggagttcgggagcggcaacagagtgggcatagacactccgagcagcctcgccgtcgtctctgcgttcctgttgactgcctggctgccccctcccctactcctcggttcctggtgaagaggctgcgcgctgctgtttggggagggggtgtgtggagccgggtcctgtgtccgcagtggctgctgtcggggggtcgcctgttcgcggaggtgcggagagactccttgggggtcgagcacataacggggttcgggtgtctcgtgtgtgaacatcacaggtctattctggataagcaggttttgtgaagacatttattctttcttggacctcagatttaccagacatctcatgggtttgtggatgcacttagatgtttgcaatgagcactgtggctggcatgccccagtgttttggataccaatgcataggactccatagtaatcgaatttaccagaggcgaacgtcatgagcatagtgatcccattgggggttgatacagcagagacgtcatacttggaaatggctgcaggttcagaaccagaatccgtagaagctagccctgtggtagttgagaaatccaacagttatccccaccagttatataccagcagctcacatcattcacacagttacattggtttgccctatgcggaccataattatggtgctcgtcctcctccgacacctccggcttcccctcctccatcagtccttattagcaaaaatgaagtaggcatatttaccactcctaattttgatgaaacttccagtgctactacaatcagcacatctgaggatggaagttatggtactgatgtaaccaggtgcatatgtggttttacacatgatgatggatacatgatctgttgtgacaaatgcagcgtttggcaacatattgactgcatggggattgataggcagcatattcctgatacatatctatgtgaacgttgtcagcctaggaatttggataaagagagggcagtgctactacaacgccggaaaagggaaaatatgtcagatggtgataccagtgcaactgagagtggtgatgaggttcctgtggaattatatactgcatttcagcatactccaacatcaattactttaactgcttcaagagtttccaaagttaatgataaaagaaggaaaaaaagcggggagaaagaacaacacatttcaaaatgtaaaaaggcatttcgtgaaggatctaggaagtcatcaagagttaagggttcagctccagagattgatccttcatctgatggttcaaattttggatgggagacaaagatcaaagcatggatggatcgatatgaagaagcaaataacaaccagtacagtgagggtgttcagagggaggcacaaagaatagctctgagattaggcaatggaaatgacaaaaaagagatgaataaatccgatttgaataccaacaatttgctcttcaaacctcctgtagagagccatatacaaaagaataagaaaattcttaaatctgcaaaagatttgcctcctgatgcacttatcattgaatacagagggaagtttatgctgagagaacagtttgaagcaaatgggtatttctttaaaagaccatacccttttgtgttattctactctaaatttcatgggctagaaatgtgtgttgatgcaaggacttttgggaatgaggctcgattcatcaggcggtcttgtacacccaatgcagaggtgaggcatgaaattcaagatggaaccatacatctttatatttattctatacacagtattccaaagggaactgaaattactattgcctttgattttgactatggaaattgtaagtacaaggtggactgtgcatgcctcaaagaaaacccagagtgccctgttctaaaacgtagttctgaatccatggaaaatatcaatagtggttatgagaccagacggaaaaaaggaaaaaaaacaagagaagaaagaaaaatggaagcaattttgcaagcttttgccagacttgaaaagagagagaaaagaagagaacaagctttggaaaggatcagcacagccaaaactgaagttaaaactgaatgtaaagatacacagattgtcagtgatgctgaagttattcaggaacaagcaaaagaagaaaatgctagcaagccaacccctgccaaagtaaatagaactaaacagagaaaaagtttttctcggagtaggactcacattggacagcagcgtcggagacacagaactgtcagcatgtgttcagatatccagccatcttctcctgatatagaagttacttcacaacaaaatgatattgaaaatactgtacttacaatagaaccagaaactgaaactgcactagcagaaataattactgaaactgaagttccagcacttaataaatgtcctaccaagtaccccaaaacaaagaagcacttggttaatgaatggttaagtgagaagaatgagaagacaggaaaaccttcagatggcctttcagaaaggcctctacgcataactacagatcctgaagtgttagctacacaactcaattctttaccaggtctcacttacagcccccatgtatactccactcctaagcattatattagatttacttcaccattcctttcagaaaaaaggagaagaaaagaacctactgaaaacatttctggttcatgcaagaagcgatggttgaaacaagctctggaagaagaaaattcagcaattttacatagatttaattcaccctgtcaagaaagatccagaagtcctgcagtcaatggtgaaaataaaagtccactactattaaatgacagctgttcccttccagatttaactacaccactaaaaaaacgaagattttatcagttgctagattcggtttactcagaaacctccacacctactccttccccgtatgctacaccaactcacaccgatattactcctatggacccatcttttgccacgcctccacggataaaatcagatgatgaaacttgtagaaatggttataaacccatatattcaccagttaccccagtaactcctggtacaccaggaaataccatgcactttgagaatatttcttccccagaaagttctccagaaataaagagacgcacttatagtcaagagggatatgacagatcttcaaccatgttaacattggggccttttagaaattctaatttaactgaactgggtctgcaagaaataaagactattggttatacgagccctaggagtaggactgaagtcaacaggcagtgtcctggagaaaaggaacctgtgtcagaccttcagctaggactcgatgcagttgagccaactgccctacataaaaccctggaaacgcctgcacatgacagggctgagcccaacagccaactggactcgactcactctggacggggcacaatgtattcttcctgggtaaagagccctgacagaacaggagttaacttctcagtgaactccaacttgagggacctgacaccctcgcatcagttggaggttggaggaggcttccgaataagtgagtcaaagtgcctgatgcaggatgatactagaggcatgtttatggaaacaactgtgttttgtacttccgaagatgggcttgtatctggtttcggacggactgttaatgacaatttgatcgacgggaattgcacaccccagaatccaccacaaaagaaaaaggtttctctattagaataccgtaagagacaacgtgaagctaggaaaagtggctctaagacagagaactttccactcattagtgtatcaccccatgcaagtggaagcttgagcaacaatggtgatggctgtgccagcagtaatgacaatggggagcaggtggaccacactgctagcctacctttaccaacaccagctacagtttataatgccacttctgaagaaactagcaataactgccctgttaaggatgctactgctagtgagaagaatgaaccagaagttcaatggactgcctcaacttcagtggaacaagtcagagaaaggagttatcagagagctttacttctcagtgatcaccgaaaagataaagatagtgggggagaatcaccatgtgtctcatgttcaccgagtcatgttcagtcttcaccttcatctcattcaaatcacataccccagttgcaagctaagggcccagtcccttctttcagtgaacttatggaagaccctgatcctgaaaatccagaacccacaactacgaatgaatgtccatccccagatacttctcaaaatacttgtaaaagtcctccaaaaatgagcaagcctggttcacctggatctgtaattcctgctcaagcacacgggaaaatattcacaaaaccagatccccaatgggactccacagttagtgcatccgaagctgaaaatggtgttcacctaaaaacagagctccaacaaaaacagctatcaaataacaaccaagcactttcaaagaatcatcctcctcagacacacgttcgtaattcatctgagcaactttcacaaaagctgccttctgtgccaacaaagttgcactgtcctccatcacctcacctagaaaatcctccaaagtcatccacgcctcacacacctgtacagcatggttatctttcaccaaagcctccttcacagcagttaggatctccctacaggcctcatcattcacagtcacctcaagttggaacacctcagcgagagcctcaaagaaacttttatccagcagcacagaaccttccagccaatactcagcaggcaacttctggaacattatttacacagacaccctcaggacaatcttcagcaacatacagtcagtttaaccaacaaagtctgaacagcacggcaccaccccctccacctcctccacctccttcttcgtcttactatcaaaaccagcagccctctgcaaactttcagaattataatcagctcaaaggtagtctttctcaacaaactgtgtttacatcaggaccaaatcaagcacttcctggcaccacaagccagcaaacagttccaggacaccacgtgactccagggcattttttgccctctcagaaccctaccattcaccatcaaactgctgctgccgtagtcccccctcctcctccaccaccacctgctccaggaccgcaccttgtacaacagccgaattcccatcagcaacactctgtagcacatgtagtagggcctgttcatgcggtcacccctgggtcgcatattcattctcaaactgctggacaccacttacccccacccccaccccctcctggtcctgcccctcatcaccatccaccaccccatccatccacaggactccaaggtctacaagcacaacaccagcatgttgtaaattcagcacccccaccaccccctccgccgccaccttccagtgttttggcttctgggcatcataccacatcagctcaagccttacaccacccacctcatcaaggacctccactttttccttcgagtgctcatccaactgtaccaccgtatccctcacaagctacacatcataccactttgggaccgggaccccagcaccagccttctggaacagggccacattgtccattacctgtcacaggtcctcatctccagccccaaggaccaaacagtattccaacacctactgcttcagggttctgtcctcatcctggctctgtggccctgccacatggggttcaaggacctcagcaggcatctccagtgcctggacagattccaattcacagagcacaggtgccaccaacatttcaaaacaattaccatgggtcagggtggcattaaaatggactccaaaaacatttttttaaatgttctgtaagataaactgtatatttcatatgtacctgttaaggtactttttaaagcttgtacatgaacctttgtataaaaaacaccagtgctctttcgttgtatttttctcatttttgctttttaaaattcctttaaaaaatgtgctgttaagccagtattaggtatctttattttgtaagtgaacattccagctgtttttttctggcagatctgatgctgatttgatgctgtatgatcttttttttttttttagttaaattcatttagtgaatgttctattattttatacatacacattaagtactcagctaagtaatggcactatgaggattttttttttctttcctgtcagcagcagttctgtgaatgcatcttaggtataaaaatgcaatacagatttttatattttggtgtggacatggctcattttgttttaccagttatttgcaagcaaaatgtaatttaatgtatagatgatttctaatgtctcctgacaaactgtaaatactgcatttcttttgcgtatataattgcttacagcttttctcatttgatatatagcattgtacatatgacaagtcttttgcaaaactgtgtgatctttgtgaaagtagtacagtatatgacctttaatttcttttttattttaaatatactgtcacactgaagcactggttgggcattttaattcatgttaataaatcacaattatgtcagttttaccagattgtcctgtacaacttctaagatcgggatctgtgtgtttctacagaagttctagttttcaaatatagattgtaaggagccttcaattttctttagcgactactacctcagcaacaggaggcagcaaggggctgttcctgtggtggtttctgtttgcatttttgcaggagccataggaaactactgaaatgattgtgctgggtaaattaaggatctggcatcatacaaaatgaagccagaccactaatgcattacagtagttcttgaataca

SEQ ID NO: 19016 - DNA, 5496 bp, Homo sapiens
  source 1..5496: mol_type = unassigned DNA
cgccgccattttcccagagcgagaggcagtgacactgagcgggcgcagggggccgagtcggagaccgtgccggagttcgggagcggcaacagagtgggcatagacactccgagcagcctcgccgtcgtctctgcgttcctgttgactgcctggctgccccctcccctactcctcggttcctggtgaagaggctgcgcgctgctgtttggggagggggtgtgtggagccgggtcctgtgtccgcagtggctgctgtcggggggtcgcctgttcgcggaggtgcggagagactccttgggggtcgagcacataacggggttcgggtgtctcgtgtgtgaacatcacaggtctattctggataagcaggttttgtgaagacatttattctttcttggacctcagatttaccagacatctcatgggtttgtggatgcacttagatgtttgcaatgagcactgtggctggcatgccccagtgttttggataccaatgcataggactccatagtaatcgaatttaccagaggcgaacgtcatgagcatagtgatcccattgggggttgatacagcagagacgtcatacttggaaatggctgcaggttcagaaccagaatccgtagaagctagccctgtggtagttgagaaatccaacagttatccccaccagttatataccagcagctcacatcattcacacagttacattggtttgccctatgcggaccataattatggtgctcgtcctcctccgacacctccggcttcccctcctccatcagtccttattagcaaaaatgaagtaggcatatttaccactcctaattttgatgaaacttccagtgctactacaatcagcacatctgaggatggaagttatggtactgatgtaaccaggtgcatatgtggttttacacatgatgatggatacatgatctgttgtgacaaatgcagcgtttggcaacatattgactgcatggggattgataggcagcatattcctgatacatatctatgtgaacgttgtcagcctaggaatttggataaagagagggcagtgctactacaacgccggaaaagggaaaatatgtcagatggtgataccagtgcaactgagagtggtgatgaggttcctgtggaattatatactgcatttcagcatactccaacatcaattactttaactgcttcaagagtttccaaagttaatgataaaagaaggaaaaaaagcggggagaaagaacaacacatttcaaaatgtaaaaaggcatttcgtgaaggatctaggaagtcatcaagagttaagggttcagctccagagattgatccttcatctgatggttcaaattttggatgggagacaaagatcaaagcatggatggatcgatatgaagaagcaaataacaaccagtacagtgagggtgttcagagggaggcacaaagaatagctctgagattaggcaatggaaatgacaaaaaagagatgaataaatccgatttgaataccaacaatttgctcttcaaacctcctgtagagagccatatacaaaagaataagaaaattcttaaatctgcaaaagatttgcctcctgatgcacttatcattgaatacagagggaagtttatgctgagagaacagtttgaagcaaatgggtatttctttaaaagaccatacccttttgtgttattctactctaaatttcatgggctagaaatgtgtgttgatgcaaggacttttgggaatgaggctcgattcatcaggcggtcttgtacacccaatgcagaggtgaggcatgaaattcaagatggaaccatacatctttatatttattctatacacagtattccaaagggaactgaaattactattgcctttgattttgactatggaaattgtaagtacaaggtggactgtgcatgcctcaaagaaaacccagagtgccctgttctaaaacgtagttctgaatccatggaaaatatcaatagtggttatgagaccagacggaaaaaaggaaaaaaagacaaagatatttcaaaagaaaaagatacacaaaatcagaatattactttggattgtgaaggaacgaccaacaaaatgaagagcccagaaactaaacaaagaaagctttctccactgagactatcagtatcaaataatcaggaaccagattttattgatgatatagaagaaaaaactcctattagtaatgaagtagaaatggaatcagaggagcagattgcagaaaggaaaaggaagatgacaagagaagaaagaaaaatggaagcaattttgcaagcttttgccagacttgaaaagagagagaaaagaagagaacaagctttggaaaggatcagcacagccaaaactgaagttaaaactgaatgtaaagatacacagattgtcagtgatgctgaagttattcaggaacaagcaaaagaagaaaatgctagcaagccaacccctgccaaagtaaatagaactaaacagagaaaaagtttttctcggagtaggactcacattggacagcagcgtcggagacacagaactgtcagcatgtgttcagatatccagccatcttctcctgatatagaagttacttcacaacaaaatgatattgaaaatactgtacttacaatagaaccagaaactgaaactgcactagcagaaataattactgaaactgaagttccagcacttaataaatgtcctaccaagtaccccaaaacaaagaagcacttggttaatgaatggttaagtgagaagaatgagaagacaggaaaaccttcagatggcctttcagaaaggcctctacgcataactacagatcctgaagtgttagctacacaactcaattctttaccaggtctcacttacagcccccatgtatactccactcctaagcattatattagatttacttcaccattcctttcagaaaaaaggagaagaaaagaacctactgaaaacatttctggttcatgcaagaagcgatggttgaaacaagctctggaagaagaaaattcagcaattttacatagatttaattcaccctgtcaagaaagatccagaagtcctgcagtcaatggtgaaaataaaagtccactactattaaatgacagctgttcccttccagatttaactacaccactaaaaaaacgaagattttatcagttgctagattcggtttactcagaaacctccacacctactccttccccgtatgctacaccaactcacaccgatattactcctatggacccatcttttgccacgcctccacggataaaatcagatgatgaaacttgtagaaatggttataaacccatatattcaccagttaccccagtaactcctggtacaccaggaaataccatgcactttgagaatatttcttccccagaaagttctccagaaataaagagacgcacttatagtcaagagggatatgacagatcttcaaccatgttaacattggggccttttagaaattctaatttaactgaactgggtctgcaagaaataaagactattggttatacgagccctaggagtaggactgaagtcaacaggcagtgtcctggagaaaaggaacctgtgtcagaccttcagctaggactcgatgcagttgagccaactgccctacataaaaccctggaaacgcctgcacatgacagggctgagcccaacagccaactggactcgactcactctggacggggcacaatgtattcttcctgggtaaagagccctgacagaacaggagttaacttctcagtgaactccaacttgagggacctgacaccctcgcatcagttggaggttggaggaggcttccgaataagtgagtcaaagtgcctgatgcaggatgatactagaggcatgtttatggaaacaactgtgttttgtacttccgaagatgggcttgtatctggtttcggacggactgttaatgacaatttgatcgacgggaattgcacaccccagaatccaccacaaaagaaaaaggtttctctattagaataccgtaagagacaacgtgaagctaggaaaagtggctctaagacagagaactttccactcattagtgtatcaccccatgcaagtggaagcttgagcaacaatggtgatggctgtgccagcagtaatgacaatggggagcaggtggaccacactgctagcctacctttaccaacaccagctacagtttataatgccacttctgaagaaactagcaataactgccctgttaaggatgctactgctagtgagaagaatgaaccagaagttcaatggactgcctcaacttcagtggaacaagtcagagaaaggagttatcagagagctttacttctcagtgatcaccgaaaagataaagatagtgggggagaatcaccatgtgtctcatgttcaccgagtcatgttcagtcttcaccttcatctcattcaaatcacataccccagttgcaagctaagggcccagtcccttctttcagtgaacttatggaagaccctgatcctgaaaatccagaacccacaactacgaatgaatgtccatccccagatacttctcaaaatacttgtaaaagtcctccaaaaatgagcaagcctggttcacctggatctgtaattcctgctcaagcacacgggaaaatattcacaaaaccagatccccaatgggactccacagttagtgcatccgaagctgaaaatggtgttcacctaaaaacagagctccaacaaaaacagctatcaaataacaaccaagcactttcaaagaatcatcctcctcagacacacgttcgtaattcatctgagcaactttcacaaaagctgccttctgtgccaacaaagttgcactgtcctccatcacctcacctagaaaatcctccaaagtcatccacgcctcacacacctgtacagcatggttatctttcaccaaagcctccttcacagcagttaggatctccctacaggcctcatcattcacagtcacctcaagttggaacacctcagcgagagcctcaaagaaacttttatccagcagcacagaaccttccagtgttttggcttctgggcatcataccacatcagctcaagccttacaccacccacctcatcaaggacctccactttttccttcgagtgctcatccaactgtaccaccgtatccctcacaagctacacatcataccactttgggaccgggaccccagcaccagccttctggaacagggccacattgtccattacctgtcacaggtcctcatctccagccccaaggaccaaacagtattccaacacctactgcttcagggttctgtcctcatcctggctctgtggccctgccacatggggttcaaggacctcagcaggcatctccagtgcctggacagattccaattcacagagcacaggtgccaccaacatttcaaaacaattaccatgggtcagggtggcattaaaatggactccaaaaacatttttttaaatgttctgtaa

SEQ ID NO: 19017 - DNA, 375 bp, Homo sapiens
  source 1..375: mol_type = unassigned DNA
tggaagcttgagcaacaatggtgatggctgtgccagcagtaatgacaatggggagcaggtggaccacactgctagcctacctttaccaacaccagctacagtttataatgccacttctgaagaaactagcaataactgccctgttaaggatgctactgctagtgagaagaatgaaccagaagttcaatggactgcctcaacttcagtggaacaagtcagagaaaggagttatcagagagctttacttctcagtgatcaccgaaaagataaagatagtgaccctgatcctgaaaatccagaacccacaactacgaatgaatgtccatccccagatacttctcaaaatacttgtaaaagtcctccaaaaatgagcaa

SEQ ID NO: 19018 - DNA, 617 bp, Homo sapiens
  source 1..617: mol_type = unassigned DNA
cgcggaggtgcggagagactccttgggggtcgagcacataacggggttcgggtgtctcgtgtgtgaacatcacaggtctattctggataagcaggttttgtgaagacatttattctttcttggacctcagatttaccagacatctcatgacggagtctcgctctgtcaccaggctggagtgcagtggcgcgatcgcagctcactgcagcctctgactccctagttcaagcgattctcctgcctcagcgtcctgagtagctgggattacaggcacatgccaccaagcccagggtttgtggatgcacttagatgtttgcaatgagcactgtggctggcatgccccagtgttttggataccaatgcataggactccatagtaatcgaatttaccagaggcgaacgtcatgagcatagtgatcccattgggggttgatacagcagagacgtcatacttggaaatggctgcaggttcagaaccagaatccgtagaagctagccctgtggtagttgagaaatccaacagttatccccaccagttatataccagcagctcacatcattcacacagttacattggtttgccctatgcggaccataattatggtgctcgtcctcct

SEQ ID NO: 19019 - DNA, 2520 bp, Homo sapiens
  source 1..2520: mol_type = unassigned DNA
gtgacactgagcgggcgcagggggccgagtcggagaccgtgccggagttcgggagcggcaacagagtgggcatagacactccgagcagcctcgccgtcgtctctgcgttcctgttgactgcctggctgccccctcccctactcctcggttcctggtgaagaggctgcgcgctgctgtttggggagggggtgtgtggagccgggtcctgtgtccgcagtggctgctgtcggggggtcgcctgttcgcggaggtgcggagagactccttgggggtcgagcacataacggggttcgggtgtctcgtgtgtgaacatcacaggtctattctggataagcaggttttgtgaagacatttattctttcttggacctcagatttaccagacatctcatgggtttgtggatgcacttagatgtttgcaatgagcactgtggctggcatgccccagtgttttggataccaatgcataggactccatagtaatcgaatttaccagaggcgaacgtcatgagcatagtgatcccattgggggttgatacagcagagacgtcatacttggaaatggctgcaggttcagaaccagaatccgtagaagctagccctgtggtagttgagaaatccaacagttatccccaccagttatataccagcagctcacatcattcacacagttacattggtttgccctatgcggaccataattatggtgctcgtcctcctccgacacctccggcttcccctcctccatcagtccttattagcaaaaatgaagtaggcatatttaccactcctaattttgatgaaacttccagtgctactacaatcagcacatctgaggatggaagttatggtactgatgtaaccaggtgcatatgtggttttacacatgatgatggatacatgatctgttgtgacaaatgcagcgtttggcaacatattgactgcatggggattgataggcagcatattcctgatacatatctatgtgaacgttgtcagcctaggaatttggataaagagagggcagtgctactacaacgccggaaaagggaaaatatgtcagatggtgataccagtgcaactgagagtggtgatgaggttcctgtggaattatatactgcatttcagcatactccaacatcaattactttaactgcttcaagagtttccaaagttaatgataaaagaaggaaaaaaagcggggagaaagaacaacacatttcaaaatgtaaaaaggcatttcgtgaaggatctaggaagtcatcaagagttaagggttcagctccagagattgatccttcatctgatggttcaaattttggatgggagacaaagatcaaagcatggatggatcgatatgaagaagcaaataacaaccagtacagtgagggtgttcagagggaggcacaaagaatagctctgagattaggcaatggaaatgacaaaaaagagatgaataaatccgatttgaataccaacaatttgctcttcaaacctcctgtagagagccatatacaaaagaataagaaaattcttaaatctgcaaaagatttgcctcctgatgcacttatcattgaatacagagggaagtttatgctgagagaacagtttgaagcaaatgggtatttctttaaaagaccatacccttttgtgttattctactctaaatttcatgggctagaaatgtgtgttgatgcaaggacttttgggaatgaggctcgattcatcaggcggtcttgtacacccaatgcagaggtgaggcatgaaattcaagatggaaccatacatctttatatttattctatacacagtattccaaagggaactgaaattactattgcctttgattttgactatggaaattgtaagtacaaggtggactgtgcatgcctcaaagaaaacccagagtgccctgttctaaaacgtagttctgaatccatggaaaatatcaatagtggttatgagaccagacggaaaaaaggaaaaaaagacaaagatatttcaaaagaaaaagatacacaaaatcagaatattactttggattgtgaaggaacgaccaacaaaatgaagagcccagaaactaaacaaagaaagctttctccactgagactatcagtatcaaataatcaggaaccagattttattgatgatatagaagaaaaaactcctattagtaatgaagtagaaatggaatcagaggagcagattgcagaaaggaaaaggaagatggtaagttgggaagccagtagtttgggcttagtgacagctgctctgcatatggtaattgttgctgcctttacatgggcttttacattattctttgaagttagcgaatgatgtgccattgagcatttttatttggtttggtcattgccatttaaataaattccattaatcttgtatttttattggttgttcattagagatttaagaatgtatgacatttaagaaatatgaacattttggaagtaataatattttaataatgccacactgaactattaataaattttaatgccac

SEQ ID NO: 19020 - DNA, 1133 bp, Homo sapiens
  source 1..1133: mol_type = unassigned DNA
gcgagaggcagtgacactgagcgggcgcagggggccgagtcggagaccgtgccggagttcgggagcggcaacagagtgggcatagacactccgagcagcctcgccgtcgtctctgcgttcctgttgactgcctggctgccccctcccctactcctcggttcctggtgaagaggctgcgcgctgctgtttggggagggggtgtgtggagccgggtcctgtgtccgcagtggctgctgtcggggggtcgcctgttcgcggaggtgcggagagactccttgggggtcgagcacataacggggttcgggtgtctcgtgtgtgaacatcacagggtttgtggatgcacttagatgtttgcaatgagcactgtggctggcatgccccagtgttttggataccaatgcataggactccatagtaatcgaatttaccagaggcgaacgtcatgagcatagtgatcccattgggggttgatacagcagagacgtcatacttggaaatggctgcaggttcagaaccagaatccgtagaagctagccctgtggtagttgagaaatccaacagttatccccaccagttatataccagcagctcacatcattcacacagttacattggtttgccctatgcggaccataattatggtgctcgtcctcctccgacacctccggcttcccctcctccatcagtccttattagcaaaaatgaagtaggcatatttaccactcctaattttgatgaaacttccagtgctactacaatcagcacatctgaggatggaagttatggtactgatgtaaccaggtgcatatgtggttttacacatgatgatggatacatgatctgttgtgacaaatgcagcgtttggcaacatattgactgcatggggattgataggcagcatattcctgatacatatctatgtgaacgttgtcagcctaggaatttggataaagagagggcagtgctactacaacgccggaaaagggaaaatatgtcagatggtgataccagtgcaactgagagtggtgatgaggttcctgtggaattatatactgcatttcagcatactccaacatcaattactttaactgcttcaagagtttccaaagttaatgataaaagaaggaaaaaaa

SEQ ID NO: 19021 - DNA, 1588 bp, Homo sapiens
  source 1..1588: mol_type = unassigned DNA
ggaccataattatggtgctcgtcctctccgacacctccgcttcccctcctccatcagtccttattagcaaaaatgaagtaggcatatttaccactcctaattttgatgaaacttccagtgctactacaatcagcacatctgaggatggaagttatggtactgatgtaaccaggtgcatatgtggttttacacatgatgatggatacatgatctgttgtgacaaatgcagcgtttggcaacatattgactgcatggggattgataggcagcatattcctgatacatatctatgtgaacgttgtcagcctaggaatttggataaagagagggcagtgctactacaacgccggaaaagggaaaatatgtcagatggtgataccagtgcaactgagagtggtgatgaggttcctgtggaattatatactgcatttcagcatactccaacatcaattactttaactgcttcaagagtttccaaagttaatgataaaagaaggaaaaaaagcggggagaaagaacaacacatttcaaaatgtaaaaaggcatttcgtgaaggatctaggaagtcatcaagagttaagggttcagctccagagattgatccttcatctgatggttcaaattttggatgggagacaaagatcaaagcatggatggatcgatatgaagaagcaaataacaaccagtacagtgagggtgttcagagggaggcacaaagaatagctctgagattaggcaatggaaatgacaaaaaagagatgaataaatccgatttgaataccaacaatttgctcttcaaacctcctgtagagagccatatacaaaagaataagaaaattcttaaatctgcaaaagatttgcctcctgatgcacttatcattgaatacagagggaagtttatgctgagagaacagtttgaagcaaatgggtatttctttaaaagaccatacccttttgtgttattctactctaaatttcatgggctagaaatgtgtgttgatgcaaggacttttgggaatgaggctcgattcatcaggcggtcttgtacacccaatgcagaggtgaggcatgaaattcaagatggaaccatacatctttatatttattctatacacagtattccaaagggaactgaaattactattgcctttgattttgactatggaaattgtaagtacaaggtggactgtgcatgcctcaaagaaaacccagagtgccctgttctaaaacgtagttctgaatccatggaaaatatcaatagtggttatgagaccagacggaaaaaaggaaaaaagacaaagatatttcaaaagaaaaagatacacaaaatcagaatattactttggattgtgaaggaacgaccaacaaaatgaagagcccagaaactaaacaaagaaagctttctccactgagactatcagtatcaaataatcaggaaccagattttattgatgatatagaagaaaaaactcctattagtaatgaagtagaaatggaatcagaggagcagattgcagaaaggaaaaggaagatgacaagagaagaaagaaaaatggaagcaattttgcaagcttttgccagacttgaa

SEQ ID NO: 19022 - DNA, 3047 bp, Homo sapiens
  source 1..3047: mol_type = unassigned DNA
accaggccccgcccagcggccgcagccagccaggccgcgcccgggacgactgcagagcgcggtgctcttacagcctgttccaagtgtggcttaatccgtctccaccaccagatctttctccgtggattcctctgctaagaccgctgccatgccagtgacggtaacccgcaccaccatcacaaccaccacgacgtcatcttcgggcctggggtcccccatgatcgtggggtcccctcgggccctgacacagcccctgggtctccttcgcctgctgcagctggtgtctacctgcgtggccttctcgctggtggctagcgtgggcgcctggacggggtccatgggcaactggtccatgttcacctggtgcttctgcttctccgtgaccctgatcatcctcatcgtggagctgtgcgggctccaggcccgcttccccctgtcttggcgcaacttccccatcaccttcgcctgctatgcggccctcttctgcctctcggcctccatcatctaccccaccacctatgtccagttcctgtcccacggccgttcgcgggaccacgccatcgccgccaccttcttctcctgcatcgcgtgtgtggcttacgccaccgaagtggcctggacccgggcccggcccggcgagatcactggctatatggccaccgtacccgggctgctgaaggtgctggagaccttcgttgcctgcatcatcttcgcgttcatcagcgaccccaacctgtaccagcaccagccggccctggagtggtgcgtggcggtgtacgccatctgcttcatcctagcggccatcgccatcctgctgaacctgggggagtgcaccaacgtgctacccatccccttccccagcttcctgtcggggctggccttgctgtctgtcctcctctatgccaccgcccttgttctctggcccctctaccagttcgatgagaagtatggcggccagcctcggcgctcgagagatgtaagctgcagccgcagccatgcctactacgtgtgtgcctgggaccgccgactggctgtggccatcctgacggccatcaacctactggcgtatgtggctgacctggtgcactctgcccacctggtttttgtcaaggtctaagactctcccaagaggctcccgttccctctccaacctctttgttcttcttgcccgagttttctttatggagtacttctttcctccgcctttcctctgttttcctcttcctgtctcccctccctcccacctttttctttccttcccaattccttgcactctaaccagttcttggatgcatcttcttccttccctttcctcttgctgtttccttcctgtgttgttttgttgcccacatcctgttttcacccctgagctgtttctctttttcttttcttttttttttttttttttttttaagacggattctcactctgtggcccaggctggagtgcagtggtgcgatctcgactcactgcaacccccgcctcctgggttcaagcgattctcctgccccagcctcccaagtagctgggaggacaggtgtgagctgccgcacccagcctgtttctctttttccactcttcttttttctcatctcttttctgggttgcctgtcggctttcttatctgcctgttttgcaagcaccttctcctgtgtccttgggagccctgagacttctttctctccttgcctccacccacctccaaaggtgctgagctcacatccacaccccttgcagccgtccatgccacagccccccaaggggccccattgccaaagcatgcctgcccaccctcgctgtgccttagtcagtgtgtacgtgtgtgtgtgtgtgtgtgtgtgtgtgtgtgtttggggggtggggggtgggtagctggggattgggccctctttctcccagtggaggaaggtgtgcagtgtacttcccctttaaattaaaaaacatatatatatatatatttggaggtcagtaatttccaatgggcgggaggctttaagcaccgaccctgggtccctaggccccgcctggcactcagccttgccagagattggctccagaatttttgccaggcttacagaacacccactgcctagaggccatcttaaaggaagcaggggctggatgcctttcatcccaactattctctgtggtatcaaaaagaaaaaaaaaaaaaaagaaggagtcggggccgggcgtggtggctcacgcctgtaatcccagcactttgggagaccaagtcaggcaatcatctgaagtcaggagttcaagaccagcctggccaacatggtgaaagcatgtctctattaaaaatacaaaaattagccgggcgtggtggcgggcgcctgtaatcccaggtatttggggggactgagacaggagaatcccttcaacccgggaggtggaggttgcagtaagtcaagatggcaccactgtgctccagcctgggggacagagcgagactccatctcaaaaaaaaaaaggaatcggacgaagaaccacaggatgttgaagacaactgtctgaagtatttgtgagggacagcgatgtggccctctgtgttaagaataacgtgtcctgctttggcagagagaagaaaatagccactgcccgctttcaaggcaagatcgaccttttctgttttgttttgtttttctttctttttcctggccatgaggacaaaaattactgagtggcccttaaagagggaagtttgttttcagctgttctcttttgcccgtaggtgggagggtggggattgctgcgtcctagctagaggaatggctttgcttgaatgtgtagtgcacacgcacgggtgtttctgtgtgctagttgcttcttgctgctgcttcctgcttgtctgggactcacatacataacgtgatatatatatatatatatataaatgtataaatatatattttatttttttttaaatccctggagcttctggttcctatcagttcctgttgttaatcgtagaaccgttgtcccttcccccattcccgtatccatcatgttctttttcttttaaatatcaatataaaggt

SEQ ID NO: 19023 - DNA, 1492 bp, Homo sapiens
  source 1..1492: mol_type = unassigned DNA
ccggctctggctgggccgcccgcctccacagccgccgcccagggttctcccgccactgccgcccgcacccccgcccccgcggggttaagatcacacacgcgcccacgccggcccgcggggcgtgcactttcgctgggttccgtccgccgcagcccaaacagttaactgaacggggaggggagggggcggggcttacccggggtcaccgccagggccctgctgggttccacgccacgttcctgtctccgcagggcgttcgatccctagagggaggagcctgtccaaacggacgctaacggcctacctccccctcaggtgctcttacagcctgttccaagtgtggcttaatccgtctccaccaccagatctttctccgtggattcctctgctaagaccgctgccatgccagtgacggtaacccgcaccaccatcacaaccaccacgacgtcatcttcgggcctggggtcccccatgatcgtggggtcccctcgggccctgacacagcccctgggtctccttcgcctgctgcagctggtgtctacctgcgtggccttctcgctggtggctagcgtgggcgcctggacggggtccatgggcaactggtccatgttcacctggtgcttctgcttctccgtgaccctgatcatcctcatcgtggagctgtgcgggctccaggcccgcttccccctgtcttggcgcaacttccccatcaccttcgcctgctatgcggccctcttctgcctctcggcctccatcatctaccccaccacctatgtccagttcctgtcccacggccgttcgcgggaccacgccatcgccgccaccttcttctcctgcatcgcgtgtgtggcttacgccaccgaagtggcctggacccgggcccggcccggcgagatcactggctatatggccaccgtacccgggctgctgaaggtgctggagaccttcgttgcctgcatcatcttcgcgttcatcagcgaccccaacctgtaccagcaccagccggccctggagtggtgcgtggcggtgtacgccatctgcttcatcctagcggccatcgccatcctgctgaacctgggggagtgcaccaacgtgctacccatccccttccccagcttcctgtcggggctggccttgctgtctgtcctcctctatgccaccgcccttgttctctggcccctctaccagttcgatgagaagtatggcggccagcctcggcgctcgagagatgtaagctgcagccgcagccatgcctactacgtgtgtgcctgggaccgccgactggctgtggccatcctgacggccatcaacctactggcgtatgtggctgacctggtgcactctgcccacctggtttttgtcaaggtctaagactctcccaagaggctcccgttccctctccaacctctttgttcttcttgcccgagttttctttatggagtacttctttcctccgcctttcctctgttttcctcttcctgtctcccctccc

SEQ ID NO: 19024 - DNA, 3186 bp, Homo sapiens
  source 1..3186: mol_type = unassigned DNA
gccgactcgaagcccttataaggcgcggagacaccggctctggctgggccgcccgcctccacagccgccgcccagggttctcccgccactgccgcccgcacccccgcccccgcggggttaagatcacacacgcgcccacgccggcccgcggggcgtgcactttcgctgggttccgtccgccgcagcccaaacagtgctcttacagcctgttccaagtgtggcttaatccgtctccaccaccagatctttctccgtggattcctctgctaagaccgctgccatgccagtgacggtaacccgcaccaccatcacaaccaccacgacgtcatcttcgggcctggggtcccccatgatcgtggggtcccctcgggccctgacacagcccctgggtctccttcgcctgctgcagctggtgtctacctgcgtggccttctcgctggtggctagcgtgggcgcctggacggggtccatgggcaactggtccatgttcacctggtgcttctgcttctccgtgaccctgatcatcctcatcgtggagctgtgcgggctccaggcccgcttccccctgtcttggcgcaacttccccatcaccttcgcctgctatgcggccctcttctgcctctcggcctccatcatctaccccaccacctatgtccagttcctgtcccacggccgttcgcgggaccacgccatcgccgccaccttcttctcctgcatcgcgtgtgtggcttacgccaccgaagtggcctggacccgggcccggcccggcgagatcactggctatatggccaccgtacccgggctgctgaaggtgctggagaccttcgttgcctgcatcatcttcgcgttcatcagcgaccccaacctgtaccagcaccagccggccctggagtggtgcgtggcggtgtacgccatctgcttcatcctagcggccatcgccatcctgctgaacctgggggagtgcaccaacgtgctacccatccccttccccagcttcctgtcggggctggccttgctgtctgtcctcctctatgccaccgcccttgttctctggcccctctaccagttcgatgagaagtatggcggccagcctcggcgctcgagagatgtaagctgcagccgcagccatgcctactacgtgtgtgcctgggaccgccgactggctgtggccatcctgacggccatcaacctactggcgtatgtggctgacctggtgcactctgcccacctggtttttgtcaaggtctaagactctcccaagaggctcccgttccctctccaacctctttgttcttcttgcccgagttttctttatggagtacttctttcctccgcctttcctctgttttcctcttcctgtctcccctccctcccacctttttctttccttcccaattccttgcactctaaccagttcttggatgcatcttcttccttccctttcctcttgctgtttccttcctgtgttgttttgttgcccacatcctgttttcacccctgagctgtttctctttttcttttcttttttttttttttttttttttaagacggattctcactctgtggcccaggctggagtgcagtggtgcgatctcgactcactgcaacccccgcctcctgggttcaagcgattctcctgccccagcctcccaagtagctgggaggacaggtgtgagctgccgcacccagcctgtttctctttttccactcttcttttttctcatctcttttctgggttgcctgtcggctttcttatctgcctgttttgcaagcaccttctcctgtgtccttgggagccctgagacttctttctctccttgcctccacccacctccaaaggtgctgagctcacatccacaccccttgcagccgtccatgccacagccccccaaggggccccattgccaaagcatgcctgcccaccctcgctgtgccttagtcagtgtgtacgtgtgtgtgtgtgtgtgtgtgtgtgtgtgtgtttggggggtggggggtgggtagctggggattgggccctctttctcccagtggaggaaggtgtgcagtgtacttcccctttaaattaaaaaacatatatatatatatatttggaggtcagtaatttccaatgggcgggaggctttaagcaccgaccctgggtccctaggccccgcctggcactcagccttgccagagattggctccagaatttttgccaggcttacagaacacccactgcctagaggccatcttaaaggaagcaggggctggatgcctttcatcccaactattctctgtggtatcaaaaagaaaaaaaaaaaaaaagaaggagtcggggccgggcgtggtggctcacgcctgtaatcccagcactttgggagaccaagtcaggcaatcatctgaagtcaggagttcaagaccagcctggccaacatggtgaaagcatgtctctattaaaaatacaaaaattagccgggcgtggtggcgggcgcctgtaatcccaggtatttggggggactgagacaggagaatcccttcaacccgggaggtggaggttgcagtaagtcaagatggcaccactgtgctccagcctgggggacagagcgagactccatctcaaaaaaaaaaaggaatcggacgaagaaccacaggatgttgaagacaactgtctgaagtatttgtgagggacagcgatgtggccctctgtgttaagaataacgtgtcctgctttggcagagagaagaaaatagccactgcccgctttcaaggcaagatcgaccttttctgttttgttttgtttttctttctttttcctggccatgaggacaaaaattactgagtggcccttaaagagggaagtttgttttcagctgttctcttttgcccgtaggtgggagggtggggattgctgcgtcctagctagaggaatggctttgcttgaatgtgtagtgcacacgcacgggtgtttctgtgtgctagttgcttcttgctgctgcttcctgcttgtctgggactcacatacataacgtgatatatatatatatatatataaatgtataaatatatattttatttttttttaaatccctggagcttctggttcctatcagttcctgttgttaatcgtagaaccgttgtcccttcccccattcccgtatccatcatgttctttttcttttaaatatcaatataaaggtaaaagaa

SEQ ID NO: 19025 - DNA, 3056 bp, Homo sapiens
  source 1..3056: mol_type = unassigned DNA
agacccttccagctgccgctgtcgtctttgcttcagccgcagtcgccactggctgcctgaggtgctcttacagcctgttccaagtgtggcttaatccgtctccaccaccagatctttctccgtggattcctctgctaagaccgctgccatgccagtgacggtaacccgcaccaccatcacaaccaccacgacgtcatcttcgggcctggggtcccccatgatcgtggggtcccctcgggccctgacacagcccctgggtctccttcgcctgctgcagctggtgtctacctgcgtggccttctcgctggtggctagcgtgggcgcctggacggggtccatgggcaactggtccatgttcacctggtgcttctgcttctccgtgaccctgatcatcctcatcgtggagctgtgcgggctccaggcccgcttccccctgtcttggcgcaacttccccatcaccttcgcctgctatgcggccctcttctgcctctcggcctccatcatctaccccaccacctatgtccagttcctgtcccacggccgttcgcgggaccacgccatcgccgccaccttcttctcctgcatcgcgtgtgtggcttacgccaccgaagtggcctggacccgggcccggcccggcgagatcactggctatatggccaccgtacccgggctgctgaaggtgctggagaccttcgttgcctgcatcatcttcgcgttcatcagcgaccccaacctgtaccagcaccagccggccctggagtggtgcgtggcggtgtacgccatctgcttcatcctagcggccatcgccatcctgctgaacctgggggagtgcaccaacgtgctacccatccccttccccagcttcctgtcggggctggccttgctgtctgtcctcctctatgccaccgcccttgttctctggcccctctaccagttcgatgagaagtatggcggccagcctcggcgctcgagagatgtaagctgcagccgcagccatgcctactacgtgtgtgcctgggaccgccgactggctgtggccatcctgacggccatcaacctactggcgtatgtggctgacctggtgcactctgcccacctggtttttgtcaaggtctaagactctcccaagaggctcccgttccctctccaacctctttgttcttcttgcccgagttttctttatggagtacttctttcctccgcctttcctctgttttcctcttcctgtctcccctccctcccacctttttctttccttcccaattccttgcactctaaccagttcttggatgcatcttcttccttccctttcctcttgctgtttccttcctgtgttgttttgttgcccacatcctgttttcacccctgagctgtttctctttttcttttcttttttttttttttttttttttaagacggattctcactctgtggcccaggctggagtgcagtggtgcgatctcgactcactgcaacccccgcctcctgggttcaagcgattctcctgccccagcctcccaagtagctgggaggacaggtgtgagctgccgcacccagcctgtttctctttttccactcttcttttttctcatctcttttctgggttgcctgtcggctttcttatctgcctgttttgcaagcaccttctcctgtgtccttgggagccctgagacttctttctctccttgcctccacccacctccaaaggtgctgagctcacatccacaccccttgcagccgtccatgccacagccccccaaggggccccattgccaaagcatgcctgcccaccctcgctgtgccttagtcagtgtgtacgtgtgtgtgtgtgtgtgtgtgtgtgtgtgtgtttggggggtggggggtgggtagctggggattgggccctctttctcccagtggaggaaggtgtgcagtgtacttcccctttaaattaaaaaacatatatatatatatatttggaggtcagtaatttccaatgggcgggaggctttaagcaccgaccctgggtccctaggccccgcctggcactcagccttgccagagattggctccagaatttttgccaggcttacagaacacccactgcctagaggccatcttaaaggaagcaggggctggatgcctttcatcccaactattctctgtggtatcaaaaagaaaaaaaaaaaaaaagaaggagtcggggccgggcgtggtggctcacgcctgtaatcccagcactttgggagaccaagtcaggcaatcatctgaagtcaggagttcaagaccagcctggccaacatggtgaaagcatgtctctattaaaaatacaaaaattagccgggcgtggtggcgggcgcctgtaatcccaggtatttggggggactgagacaggagaatcccttcaacccgggaggtggaggttgcagtaagtcaagatggcaccactgtgctccagcctgggggacagagcgagactccatctcaaaaaaaaaaaggaatcggacgaagaaccacaggatgttgaagacaactgtctgaagtatttgtgagggacagcgatgtggccctctgtgttaagaataacgtgtcctgctttggcagagagaagaaaatagccactgcccgctttcaaggcaagatcgaccttttctgttttgttttgtttttctttctttttcctggccatgaggacaaaaattactgagtggcccttaaagagggaagtttgttttcagctgttctcttttgcccgtaggtgggagggtggggattgctgcgtcctagctagaggaatggctttgcttgaatgtgtagtgcacacgcacgggtgtttctgtgtgctagttgcttcttgctgctgcttcctgcttgtctgggactcacatacataacgtgatatatatatatatatatataaatgtataaatatatattttatttttttttaaatccctggagcttctggttcctatcagttcctgttgttaatcgtagaaccgttgtcccttcccccattcccgtatccatcatgttctttttcttttaaatatcaatataaaggtaaaagaagg

SEQ ID NO: 19026 - DNA, 3111 bp, Homo sapiens
  source 1..3111: mol_type = unassigned DNA
agacccttccagctgccgctgtcgtctttgcttcagccgcagtcgccactggctgcctgagggcgttcgatccctagagggaggagcctgtccaaacggacgctaacggcctacctccccctcaggtgctcttacagcctgttccaagtgtggcttaatccgtctccaccaccagatctttctccgtggattcctctgctaagaccgctgccatgccagtgacggtaacccgcaccaccatcacaaccaccacgacgtcatcttcgggcctggggtcccccatgatcgtggggtcccctcgggccctgacacagcccctgggtctccttcgcctgctgcagctggtgtctacctgcgtggccttctcgctggtggctagcgtgggcgcctggacggggtccatgggcaactggtccatgttcacctggtgcttctgcttctccgtgaccctgatcatcctcatcgtggagctgtgcgggctccaggcccgcttccccctgtcttggcgcaacttccccatcaccttcgcctgctatgcggccctcttctgcctctcggcctccatcatctaccccaccacctatgtccagttcctgtcccacggccgttcgcgggaccacgccatcgccgccaccttcttctcctgcatcgcgtgtgtggcttacgccaccgaagtggcctggacccgggcccggcccggcgagatcactggctatatggccaccgtacccgggctgctgaaggtgctggagaccttcgttgcctgcatcatcttcgcgttcatcagcgaccccaacctgtaccagcaccagccggccctggagtggtgcgtggcggtgtacgccatctgcttcatcctagcggccatcgccatcctgctgaacctgggggagtgcaccaacgtgctacccatccccttccccagcttcctgtcggggctggccttgctgtctgtcctcctctatgccaccgcccttgttctctggcccctctaccagttcgatgagaagtatggcggccagcctcggcgctcgagagatgtaagctgcagccgcagccatgcctactacgtgtgtgcctgggaccgccgactggctgtggccatcctgacggccatcaacctactggcgtatgtggctgacctggtgcactctgcccacctggtttttgtcaaggtctaagactctcccaagaggctcccgttccctctccaacctctttgttcttcttgcccgagttttctttatggagtacttctttcctccgcctttcctctgttttcctcttcctgtctcccctccctcccacctttttctttccttcccaattccttgcactctaaccagttcttggatgcatcttcttccttccctttcctcttgctgtttccttcctgtgttgttttgttgcccacatcctgttttcacccctgagctgtttctctttttcttttcttttttttttttttttttttttaagacggattctcactctgtggcccaggctggagtgcagtggtgcgatctcgactcactgcaacccccgcctcctgggttcaagcgattctcctgccccagcctcccaagtagctgggaggacaggtgtgagctgccgcacccagcctgtttctctttttccactcttcttttttctcatctcttttctgggttgcctgtcggctttcttatctgcctgttttgcaagcaccttctcctgtgtccttgggagccctgagacttctttctctccttgcctccacccacctccaaaggtgctgagctcacatccacaccccttgcagccgtccatgccacagccccccaaggggccccattgccaaagcatgcctgcccaccctcgctgtgccttagtcagtgtgtacgtgtgtgtgtgtgtgtgtgtgtgtgtgtgtgtttggggggtggggggtgggtagctggggattgggccctctttctcccagtggaggaaggtgtgcagtgtacttcccctttaaattaaaaaacatatatatatatatatttggaggtcagtaatttccaatgggcgggaggctttaagcaccgaccctgggtccctaggccccgcctggcactcagccttgccagagattggctccagaatttttgccaggcttacagaacacccactgcctagaggccatcttaaaggaagcaggggctggatgcctttcatcccaactattctctgtggtatcaaaaagaaaaaaaaaaaaaaagaaggagtcggggccgggcgtggtggctcacgcctgtaatcccagcactttgggagaccaagtcaggcaatcatctgaagtcaggagttcaagaccagcctggccaacatggtgaaagcatgtctctattaaaaatacaaaaattagccgggcgtggtggcgggcgcctgtaatcccaggtatttggggggactgagacaggagaatcccttcaacccgggaggtggaggttgcagtaagtcaagatggcaccactgtgctccagcctgggggacagagcgagactccatctcaaaaaaaaaaaggaatcggacgaagaaccacaggatgttgaagacaactgtctgaagtatttgtgagggacagcgatgtggccctctgtgttaagaataacgtgtcctgctttggcagagagaagaaaatagccactgcccgctttcaaggcaagatcgaccttttctgttttgttttgtttttctttctttttcctggccatgaggacaaaaattactgagtggcccttaaagagggaagtttgttttcagctgttctcttttgcccgtaggtgggagggtggggattgctgcgtcctagctagaggaatggctttgcttgaatgtgtagtgcacacgcacgggtgtttctgtgtgctagttgcttcttgctgctgcttcctgcttgtctgggactcacatacataacgtgatatatatatatatatatataaatgtataaatatatattttatttttttttaaatccctggagcttctggttcctatcagttcctgttgttaatcgtagaaccgttgtcccttcccccattcccgtatccatcatgttctttttcttttaaatatcaatataaaggt

SEQ ID NO: 19027 - DNA, 592 bp, Homo sapiens
  source 1..592: mol_type = unassigned DNA
gcctgttccaagtgtggcttaatccgtctccaccaccagatctttctccgtggattcctctgctaagaccgctggttgcccaggctggtctccaactcctgggctcaagcaatcctcctgcctcagcctcttggagtgctgggattacagccatgccagtgacggtaacccgcaccaccatcacaaccaccacgacgtcatcttcgggcctggggtcccccatgatcgtggggtcccctcgggccctgacacagcccctgggtctccttcgcctgctgcagctggtgtctacctgcgtggccttctcgctggtggctagcgtgggcgcctggacggggtccatgggcaactggtccatgttcacctggtgcttctgcttctccgtgaccctgatcatcctcatcgtggagctgtgcgggctccaggcccgcttccccctgtcttggcgcaacttccccatcaccttcgcctgctatgcggccctcttctgcctctcggcctccatcatctaccccaccacctatgtccagttcctgtcccacggccgttcgcgggaccacgccatcgccgccaccttcttctcctgcatcgc

SEQ ID NO: 19028 - DNA, 1376 bp, Homo sapiens
  source 1..1376: mol_type = unassigned DNA
agacccttccagctgccgctgtcgtctttgcttcagccgcagtcgccactggctgcctgaggtgctcttacagcctgttccaagtgtggcttaatccgtctccaccaccagatctttctccgtggattcctctgctaagaccgctgccatgccagtgacggtaacccgcaccaccatcacaaccaccacgacgtcatcttcgggcctggggtcccccatgatcgtggggtcccctcgggccctgacacagcccctgggtctccttcgcctgctgcagctggtgtctacctgcgtggccttctcgctggtggctagcgtgggcgcctggacggggtccatgggcaactggtccatgttcacctggtgcttctgcttctccgtgaccctgatcatcctcatcgtggagctgtgcgggctccaggcccgcttccccctgtcttggcgcaacttccccatcaccttcttctcctgcatcgcgtgtgtggcttacgccaccgaagtggcctggacccgggcccggcccggcgagatcactggctatatggccaccgtacccgggctgctgaaggtgctggagaccttcgttgcctgcatcatcttcgcgttcatcagcgaccccaacctgtaccagcaccagccggccctggagtggtgcgtggcggtgtacgccatctgcttcatcctagcggccatcgccatcctgctgaacctgggggagtgcaccaacgtgctacccatccccttccccagcttcctgtcggggctggccttgctgtctgtcctcctctatgccaccgcccttgttctctggcccctctaccagttcgatgagaagtatggcggccagcctcggcgctcgagagatgtaagctgcagccgcagccatgcctactacgtgtgtgcctgggaccgccgactggctgtggccatcctgacggccatcaacctactggcgtatgtggctgacctggtgcactctgcccacctggtttttgtcaaggtctaagactctcccaagaggctcccgttccctctccaacctctttgttcttcttgcccgagttttctttatggagtacttctttcctccgcctttcctctgttttcctcttcctgtctcccctccctcccacctttttctttccttcccaattccttgcactctaaccagttcttggatgcatcttcttccttccctttcctcttgctgtttccttcctgtgttgttttgttgcccacatcctgttttcacccctgagctgtttctctttttcttttcttttttttttttttttttttttaagacggattctcactctgtggcccaggctggagtgcagtggtgcgatctcgactcactgcaacccccgcctcct

SEQ ID NO: 19029 - DNA, 1009 bp, Homo sapiens
  source 1..1009: mol_type = unassigned DNA
ccactcctggactcggcctccacccctgggcttggcctcaaagcctcctcagttgtcggccctggaaggtgcccagcggcggcagcgccagacgcgccccgttagctcagcgtcgctgagcatccgcagccgccaccaggccccgcccagcggccgcagccagccaggccgcgcccgggacgactgcagagcgcggtgctcttacagcctgttccaagtgtggcttaatccgtctccaccaccagatctttctccgtggattcctctgctaagaccgctgccatgccagtgacggtaacccgcaccaccatcacaaccaccacgacgtcatcttcgggcctggggtcccccatgatcgtggggtcccctcgggccctgacacagcccctgggtctccttcgcctgctgcagctggtgtctacctgcgtggccttctcgctggtggctagcgtgggcgcctggacggggtccatgggcaactggtccatgttcacctggtgcttctgcttctccgtgaccctgatcatcctcatcgtggagctgtgcgggctccaggcccgcttccccctgtcttggcgcaacttccccatcaccttcgcctgctatgcggccctcttctgcctctcggcctccatcatctaccccaccacctatgtccagttcctgtcccacggccgttcgcgggaccacgccatcgccgccaccttcttctcctgcatcgcgtgtgtggcttacgccaccgaagtggcctggacccgggcccggcccggcgagatcactggctatatggccaccgtacccgggctgctgaaggtgctggagaccttcgttgcctgcatcatcttcgcgttcatcagcgaccccaacctgtaccagcaccagccggccctggagtggtgcgtggcggtgtacgccatctgcttcatcctagcggccatcgccatcctgctgaacctgggggagtgcaccaacgtgctacccatccccttccccagcttcctgtcggggc

SEQ ID NO: 19030 - DNA, 841 bp, Homo sapiens
  source 1..841: mol_type = unassigned DNA
agacccttccagctgccgctgtcgtctttgcttcagccgcagtcgccactggctgcctgagccatgccagtgacggtaacccgcaccaccatcacaaccaccacgacgtcatcttcgggcctggggtcccccatgatcgtggggtcccctcgggccctgacacagcccctgggtctccttcgcctgctgcagctggtgtctacctgcgtggccttctcgctggtggctagcgtgggcgcctggacggggtccatgggcaactggtccatgttcacctggtgcttctgcttctccgtgaccctgatcatcctcatcgtggagctgtgcgggctccaggcccgcttccccctgtcttggcgcaacttccccatcaccttcgcctgctatgcggccctcttctgcctctcggcctccatcatctaccccaccacctatgtccagttcctgtcccacggccgttcgcgggaccacgccatcgccgccaccttcttctcctgcatcgcgtgtgtggcttacgccaccgaagtggcctggacccgggcccggcccggcgagatcactggctatatggccaccgtacccgggctgctgaaggtgctggagaccttcgttgcctgcatcatcttcgcgttcatcagcgaccccaacctgtaccagcaccagccggccctggagtggtgcgtggcggtgtacgccatctgcttcatcctagcggccatcgccatcctgctgaacctgggggagtgcaccaacgtgctacccatccccttccccagcttcctgtcggggctggccttgctgtctgtcctcctctatgccaccgcccttgttctctggcccc

SEQ ID NO: 19031 - DNA, 777 bp, Homo sapiens
  source 1..777: mol_type = unassigned DNA
agacccttccagctgccgctgtcgtctttgcttcagccgcagtcgccactggctgcctgagggcgttcgatccctagagggaggagcctgtccaaacggacgctaacggcctacctccccctcaggtgctcttacagcctgttccaagtgtggcttaatccgtctccaccaccagatctttctccgtggattcctctgctaagaccgctgccatgccagtgacggtaacccgcaccaccatcacaaccaccacgacgtcatcttcgggcctggggtcccccatgatcgtggggtcccctcgggccctgacacagcccctgggtctccttcgcctgctgcagctggtgtctacctgcgtggccttctcgctggtggctagcgtgggcgcctggacggggtccatgggcaactggtccatgttcacctggtgcttctgcttctccgtgaccctgatcatcctcatcgtggagctgtgcgggctccaggcccgcttccccctgtcttggcgcaacttccccatcaccttcgcctgctatgcggccctcttctgcctctcggcctccatcatctaccccaccacctatgtccagttcctgtcccacggccgttcgcgggaccacgccatcgccgccaccttcttctcctgcatcgcgtgtgtggcttacgccaccgaagtggcctggacccgggcccggcccggcgagatcactggctatatggccaccgtacccgggctgctgaaggtgctggagaccttcgttgcctgcatcatcttcg

SEQ ID NO: 19032 - DNA, 2287 bp, Homo sapiens
  source 1..2287: mol_type = unassigned DNA
gttactgtcccgcgaacccacatccctacaaagcaggaaagtatgcttgggagaggccaagtgagtggggaatcagcccaaagccaggcgtccagggtctccctcacctgaagctgactttttccccaccttggacagagggcgggagatgccatccccactgaacccagtgctttcaccagccatattagctcccactcaccccccgtcgtggaagcctcggccgtcacacctgcagggccggggcgtgcatggcctcagggatggcctgttcagctgctgggtgactcgggtccaggtgcctcaccacctgctgagctctgtgtgatttctggacacttctgctcgttgcctttgggctcagtgaagagtctggagtttatctggagtgaggtggccggttcttggtgggatctgagcaggacagcgtctggctccttccctcggctcatggccctcagaatctgcgtcacatacaccccagctctcccgataggtctctgcactcgctgttgcctctgcctggaacagtctccctcctggtgtcattgtctccgtggtgtgtccttcctgaccttccacctccaccagtctgtcccccttggggacagggactcgttgctcatgttcacccggcaggctggacacttcgtggagggctccaaagccggcagatcccggggccgcctctgtctctcccaggccctgcgtgttgcggtgagaggagcatttgtgtctctgtggtttgctgctggagctggtgaccgggagagaaacaagggagacaagggtgcccagacaggtgcggggctcagccaggaggcagaagacgtggacgtgtcccgggccaggagggtcacagatgcaccacaaggcactctgtgtggcactgggaacaggaattctgggagtcagtctgcaagggtggtgggcgttgctcacctgggagaagcctttagagtgggcgttgagcaggccattagctcgtgccctgaggaggtgcatgggcggcatgggctctccatggaaattatgtgggcgcgaatggatgtggctctgcgctcacctgggcgaggacttctggccggtgccggggcactctgcatgaccctggcagaatcgagctgccctgactatgaaaggggaagaagagcatgcctgaccctccaccggcaccccacccctcactgctccacctggggcctgcctctgcgggtggctgggtcctggctgactgttgtgactgttgaggccctgggggggtggcgcatgggagttaggaggactggccaggtggggcccactatgcacccacccccagtgtcaggtgcttctcctctcctcctccaccacctcctcctcctcctcctcatcatcatcctcacttgttgaggacgtcctgtgtgccaagtggtttatatgcccagcctcatttaatcctcagaatgactccatgaggtagctactaaaaccccccacttaacagatgaggaaactgaggcctagagaagctcaacaagttgcctaagttccaagtttcctctcccaactctcctaccctctcctcttccttctcctttctcccattcttccctgcctcttccctaactagacaattttttattgagtgtctcccaggtgcaggcatgagccaggtgctgggaaaatcatgataacccagctccttctggtcattttctcagctggttagaggctgggaggacacgcaagttcagctccagccgactggggcattggtggtagcccctggagacattgtgcaatggggctacgaggctgcatctggctccagggaagcgtgttgcaatccatgagtgatgtctgccatgcgtacaggcatggagagtgaggcgcctgtactgtctttctgtagaccctagactggtggggcctctgaaatgcatccagacactgtgctgggtgtgttgcatggccctcccaaccaattcagtatttttctccccattttccagggagaaatctaaggcgtcagaatgtaaggttcttattggaacccaggctccagggtccctggttttctgtgacatcatgctgcaggaccctgtttctctctttgctttggctgctggggagctcagaagggagctttaggcttgctctcagtcaccacattagctcaggggtttgggcatttttgtcgccgtctcctttgggctctgtctcctccctgctgtgcttcctgaggagcaggccggatgtaagttatcaactataaataaaaccaagacttccgttctggctctca

SEQ ID NO: 19033 - DNA, 1996 bp, Homo sapiens
  source 1..1996: mol_type = unassigned DNA
cttgccttgattctcctgttactgtcccgcgaacccacatccctacaaagcaggaaagtatgcttgggagaggccaagtgagtggggaatcagcccaaagccaggcgtccagggtctccctcacctgaagctgactttttccccaccttggacagagggcgggagatgccatccccactgaacccagtgctttcaccagccatattagctcccactcaccccccgtcgtggaagcctcggccgtcacacctgcagggccggggcgtgcatggcctcagggatggcctgttcagctgctgggtgactcgggtccaggtgcctcaccacctgctgagctctgtgtgatttctggacacttctgctcgttgcctttgggctcagtgaagagtctggagtttatctggagtgaggtggccggttcttggtgggatctgagcagagtccattcaggagcaggaaagttcatctcagaccctaaatccagccacgtcatgccacgcttaacacctctaacaacttcccctggcacttaggacagcgtctggctccttccctcggctcatggccctcagaatctgcgtcacatacaccccagctctcccgataggtctctgcactcgctgttgcctctgcctggaacagtctccctcctggtgtcattgtctccgtggtgtgtccttcctgaccttccacctccaccagtctgtcccccttggggacagggactcgttgctcatgttcacccggcaggctggacacttcgtggagggctccaaagccggcagatcccggggccgcctctgtctctcccaggccctgcgtgttgcggtgagaggagcatttgtgtctctgtggtttgctgctggagctggtgaccgggagagaaacaagggagacaagggtgcccagacaggtgcggggctcagccaggaggcagaagacgtggacgtgtcccgggccaggagggtcacagatgcaccacaaggcactctgtgtggcactgggaacaggaattctgggagtcagtctgcaagggtggtgggcgttgctcacctgggagaagcctttagagtgggcgttgagcaggccattagctcgtgccctgaggaggtgcatgggcggcatgggctctccatggaaattatgtgggcgcgaatggatgtggctctgcgctcacctgggcgaggacttctggccggtgccggggcactctgcatgaccctggcagaatcgagctgccctgactatgaaaggggaagaagagcatgcctgaccctccaccggcaccccacccctcactgctccacctggggcctgcctctgcgggtggctgggtcctggctgactgttgtgactgttgaggccctgggggggtggcgcatgggagttaggaggactggccaggtggggcccactatgcacccacccccagtgtcaggtgcttctcctctcctcctccaccacctcctcctcctcctcctcatcatcatcctcacttgttgaggacgtcctgtgtgccaagtggtttatatgcccagcctcatttaatcctcagaatgactccatgaggtagctactaaaaccccccacttaacagatgaggaaactgaggcctagagaagctcaacaagttgcctaagttccaagtttcctctcccaactctcctaccctctcctcttccttctcctttctcccattcttccctgcctcttccctaactagacaattttttattgagtgtctcccaggtgcaggcatgagccaggtgctgggaaaatcatgataacccagctccttctggtcattttctcagctggttagaggctgggaggacacgcaagttcagctccagccgactggggcattggtggtagcccctggagacattgtgcaatggggctacgaggctgcatctggctccagggaagcgtgttgcaatccatgagtgatgtctgccatgcgtacaggcatggagagtgaggcgcctgtactgtc

SEQ ID NO: 19034 - DNA, 3215 bp, Homo sapiens
  source 1..3215: mol_type = unassigned DNA
gacaatatcaggtgagctgtggaggtggggtccttggaagctggatgacagcagctggcaaggggataagagagcagtgagcccctccctcaaggaggtctggctttatccatagacagggccctctgaggtggggctgaggtacaaagggggattgagcagcccaggagaagagagatgggggttcccttcttctcttctctcagatgcatggtggacttaggaccttgctgggctgggggtctcactgcagagatgaagctgcttctggccctagcagggctcctggccattctggccacgccccagccctctgaaggtgctgctccagctgtcctgggggaggtggacacctcgttggtgctgagctccatggaggaggccaagcagctggtggacaaggcctacaaggagcggcgggaaagcatcaagcagcggcttcgcagcggctcagccagccccatggaactcctatcctacttcaagcagccggtggcagccaccaggacggcggtgagggccgctgactacctgcacgtggctctagacctgctggagaggaagctgcggtccctgtggcgaaggccattcaatgtcactgatgtgctgacgcccgcccagctgaatgtgttgtccaagtcaagcggctgcgcctaccaggacgtgggggtgacttgcccggagcaggacaaataccgcaccatcaccgggatgtgcaacaacagacgcagccccacgctgggggcctccaaccgtgcctttgtgcgctggctgccggcggagtatgaggacggcttctctcttccctacggctggacgcccggggtcaagcgcaacggcttcccggtggctctggctcgcgcggtctccaacgagatcgtgcgcttccccactgatcagctgactccggaccaggagcgctcactcatgttcatgcaatggggccagctgttggaccacgacctcgacttcacccctgagccggccgcccgggcctccttcgtcactggcgtcaactgcgagaccagctgcgttcagcagccgccctgcttcccgctcaagatcccgcccaatgacccccgcatcaagaaccaagccgactgcatcccgttcttccgctcctgcccggcttgccccgggagcaacatcaccatccgcaaccagatcaacgcgctcacttccttcgtggacgccagcatggtgtacggcagcgaggagcccctggccaggaacctgcgcaacatgtccaaccagctggggctgctggccgtcaaccagcgcttccaagacaacggccgggccctgctgccctttgacaacctgcacgatgacccctgtctcctcaccaaccgctcagcgcgcatcccctgcttcctggcaggggacacccgttccagtgagatgcccgagctcacctccatgcacaccctcttacttcgggagcacaaccggctggccacagagctcaagagcctgaaccctaggtgggatggggagaggctctaccaggaagcccggaagatcgtgggggccatggtccagatcatcacttaccgggactacctgcccctggtgctggggccaacggccatgaggaagtacctgcccacgtaccgttcctacaatgactcagtggacccacgcatcgccaacgtcttcaccaatgccttccgctacggccacaccctcatccaacccttcatgttccgcctggacaatcggtaccagcccatggaacccaacccccgtgtccccctcagcagggtcttttttgcctcctggagggtcgtgctggaaggtggcattgaccccatcctccggggcctcatggccacccctgccaagctgaatcgtcagaaccaaattgcagtggatgagatccgggagcgattgtttgagcaggtcatgaggattgggctggacctgcctgctctgaacatgcagcgcagcagggaccacggcctcccaggatacaatgcctggaggcgcttctgtgggctcccgcagcctgaaactgtgggccagctgggcacggtgctgaggaacctgaaattggcgaggaaactgatggagcagtatggcacgcccaacaacatcgacatctggatgggcggcgtgtccgagcctctgaagcgcaaaggccgcgtgggcccactcctcgcctgcatcatcggtacccagttcaggaagctccgggatggtgatcggttttggtgggagaacgagggtgtgttcagcatgcagcagcgacaggccctggcccagatctcattgccccggatcatctgcgacaacacaggcatcaccaccgtgtctaagaacaacatcttcatgtccaactcatatccccgggactttgtcaactgcagtacacttcctgcattgaacctggcttcctggagggaagcctcctagaggccaggtaagggggtgcagcagtgaggggtatatctgggctggccagttggaaccacggagatctccttgccctagatgagcccagccctgttctgggtgcagctgagaaaatgagtgactagacgttcatttgtgtgctcatgtatgtgcgaagtatataaattggcttttcatgcgtgtgtgttgtctgaacatggggagtgtttcatgggttatgtgtatgtgccatttatgtgagtgtgtgtttgtgctgatgagaatactgagtatgtggaaggcagcagagcggactggtgaggagcacagctcaggaactagactgcctgggttccaatcctggctctgtggcttgctagctatgtgaccttgagcaaattaccctccttaaacaagagttttcttccttgtaaattacatctgtcatggtttcttggagggcccacttgtatcctctggttcttcatttattgagcacctactacatgcaaggcactgtactaggcgtgagaagcatatagaggcaagaaagagataccaagatgccatctgtgtcctggttagcagagctggaccagtggtgccttggagggataagccagctgcagctgggctgtgtggttgacttatgggcccagccagccaggctcaggccatggctcccctttttcttcctcaccctgatttcttgcttattcactgaagttctcctgaagaggaactgggcctgttgccctttctgtaccatttatttgctcccaatgtttatgataataaaggcaccgctgatggggacctcc

SEQ ID NO: 19035 - DNA, 3311 bp, Homo sapiens
  source 1..3311: mol_type = unassigned DNA
gacaatatcaggtgagctgtggaggtggggtccttggaagctggatgacagcagctggcaaggggataagagagcagtgagcccctccctcaaggaggtctggctttatccatagacagggccctctgaggtggggctgaggtacaaagggggattgagcagcccaggagaagagagatgggggttcccttcttctcttctctcagatgcatggtggacttaggaccttgctgggctgggggtctcactgcagagatgaagctgcttctggccctagcagggctcctggccattctggccacgccccagccctctgaaggtgctgctccagctgtcctgggggaggtggacacctcgttggtgctgagctccatggaggaggccaagcagctggtggacaaggcctacaaggagcggcgggaaagcatcaagcagcggcttcgcagcggctcagccagccccatggaactcctatcctacttcaagcagccggtggcagccaccaggacggcggtgagggccgctgactacctgcacgtggctctagacctgctggagaggaagctgcggtccctgtggcgaaggccattcaatgtcactgatgtgctgacgcccgcccagctgaatgtgttgtccaagtcaagcggctgcgcctaccaggacgtgggggtgacttgcccggagcaggacaaataccgcaccatcaccgggatgtgcaacaacaggtgcggctggctgggggtggctgcaggaaccgggctcagagaggcgtcccggacgccacaagcctcccggtgtcagcgccctgtcctcccctgcagacgcagccccacgctgggggcctccaaccgtgcctttgtgcgctggctgccggcggagtatgaggacggcttctctcttccctacggctggacgcccggggtcaagcgcaacggcttcccggtggctctggctcgcgcggtctccaacgagatcgtgcgcttccccactgatcagctgactccggaccaggagcgctcactcatgttcatgcaatggggccagctgttggaccacgacctcgacttcacccctgagccggccgcccgggcctccttcgtcactggcgtcaactgcgagaccagctgcgttcagcagccgccctgcttcccgctcaagatcccgcccaatgacccccgcatcaagaaccaagccgactgcatcccgttcttccgctcctgcccggcttgccccgggagcaacatcaccatccgcaaccagatcaacgcgctcacttccttcgtggacgccagcatggtgtacggcagcgaggagcccctggccaggaacctgcgcaacatgtccaaccagctggggctgctggccgtcaaccagcgcttccaagacaacggccgggccctgctgccctttgacaacctgcacgatgacccctgtctcctcaccaaccgctcagcgcgcatcccctgcttcctggcaggggacacccgttccagtgagatgcccgagctcacctccatgcacaccctcttacttcgggagcacaaccggctggccacagagctcaagagcctgaaccctaggtgggatggggagaggctctaccaggaagcccggaagatcgtgggggccatggtccagatcatcacttaccgggactacctgcccctggtgctggggccaacggccatgaggaagtacctgcccacgtaccgttcctacaatgactcagtggacccacgcatcgccaacgtcttcaccaatgccttccgctacggccacaccctcatccaacccttcatgttccgcctggacaatcggtaccagcccatggaacccaacccccgtgtccccctcagcagggtcttttttgcctcctggagggtcgtgctggaaggtggcattgaccccatcctccggggcctcatggccacccctgccaagctgaatcgtcagaaccaaattgcagtggatgagatccgggagcgattgtttgagcaggtcatgaggattgggctggacctgcctgctctgaacatgcagcgcagcagggaccacggcctcccaggatacaatgcctggaggcgcttctgtgggctcccgcagcctgaaactgtgggccagctgggcacggtgctgaggaacctgaaattggcgaggaaactgatggagcagtatggcacgcccaacaacatcgacatctggatgggcggcgtgtccgagcctctgaagcgcaaaggccgcgtgggcccactcctcgcctgcatcatcggtacccagttcaggaagctccgggatggtgatcggttttggtgggagaacgagggtgtgttcagcatgcagcagcgacaggccctggcccagatctcattgccccggatcatctgcgacaacacaggcatcaccaccgtgtctaagaacaacatcttcatgtccaactcatatccccgggactttgtcaactgcagtacacttcctgcattgaacctggcttcctggagggaagcctcctagaggccaggtaagggggtgcagcagtgaggggtatatctgggctggccagttggaaccacggagatctccttgccctagatgagcccagccctgttctgggtgcagctgagaaaatgagtgactagacgttcatttgtgtgctcatgtatgtgcgaagtatataaattggcttttcatgcgtgtgtgttgtctgaacatggggagtgtttcatgggttatgtgtatgtgccatttatgtgagtgtgtgtttgtgctgatgagaatactgagtatgtggaaggcagcagagcggactggtgaggagcacagctcaggaactagactgcctgggttccaatcctggctctgtggcttgctagctatgtgaccttgagcaaattaccctccttaaacaagagttttcttccttgtaaattacatctgtcatggtttcttggagggcccacttgtatcctctggttcttcatttattgagcacctactacatgcaaggcactgtactaggcgtgagaagcatatagaggcaagaaagagataccaagatgccatctgtgtcctggttagcagagctggaccagtggtgccttggagggataagccagctgcagctgggctgtgtggttgacttatgggcccagccagccaggctcaggccatggctcccctttttcttcctcaccctgatttcttgcttattcactgaagttctcctgaagaggaactgggcctgttgccctttctgtaccatttatttgctcccaatgtttatgataataaaggcaccgctgatggggacctcc

SEQ ID NO: 19036 - DNA, 1779 bp, Homo sapiens
  source 1..1779: mol_type = unassigned DNA
cctgaagggaggatgggctaaggcaggcacacagtggcggagaagatgccctcctgggccctcttcatggtcacctcctgcctcctcctggcccctcaaaacctggcccaagtcagcagccaagatgtctccttgctggcatcagactcagagcccctgaagtgtttctcccgaacatttgaggacctcacttgcttctgggatgaggaagaggcagcgcccagtgggacataccagctgctgtatgcctacccgcgggagaagccccgtgcttgccccctgagttcccagagcatgccccactttggaacccgatacgtgtgccagtttccagaccaggaggaagtgcgtctcttctttccgctgcacctctgggtgaagaatgtgttcctaaaccagactcggactcagcgagtcctctttgtggacagtgtaggcctgccggctccccccagtatcatcaaggccatgggtgggagccagccaggggaacttcagatcagctgggaggagccagctccagaaatcagtgatttcctgaggtacgaactccgctatggccccagagatcccaagaactccactggtcccacggtcatacagctgattgccacagaaacctgctgccctgctctgcagaggcctcactcagcctctgctctggaccagtctccatgtgctcagcccacaatgccctggcaagatggaccaaagcagacctccccaagtagagaagcttcagctctgacagcagagggtggaagctgcctcatctcaggactccagcctggcaactcctactggctgcagctgcgcagcgaacctgatgggatctccctcggtggctcctggggatcctggtccctccctgtgactgtggacctgcctggagatgcagtggcacttggactgcaatgctttaccttggacctgaagaatgttacctgtcaatggcagcaacaggaccatgctagctcccaaggcttcttctaccacagcagggcacggtgctgccccagagacaggtaccccatctgggagaactgcgaagaggaagagaaaacaaatccaggactacagaccccacagttctctcgctgccacttcaagtcacgaaatgacagcattattcacatccttgtggaggtgaccacagccccgggtactgttcacagctacctgggctcccctttctggatccaccaggctgtgcgcctccccaccccaaacttgcactggagggagatctccagtgggcatctggaattggagtggcagcacccatcgtcctgggcagcccaagagacctgttatcaactccgatacacaggagaaggccatcaggactggaaggtgctggagccgcctctcggggcccgaggagggaccctggagctgcgcccgcgatctcgctaccgtttacagctgcgcgccaggctcaacggccccacctaccaaggtccctggagctcgtggtcggacccaactagggtggagaccgccaccgagaccgcctggatctccttggtgaccgctctgcatctagtgctgggcctcagcgccgtcctgggcctgctgctgctgaggtggcagtttcctgcacactacaggtaccgcccccgccaggcaggagactggcggtggaccaggtggagccgatgtaaacaggcattcttggttcgctctgtgaccccagatctccgtccaccgcccgtgcgcacctacggcttccttcctgcacgtcacctctgggactcgccgcggctccttacactctaa

SEQ ID NO: 19037 - DNA, 1950 bp, Homo sapiens
  source 1..1950: mol_type = unassigned DNA
gaagggaggatgggctaaggcaggcacacagtggcggagaagatgccctcctgggccctcttcatggtcacctcctgcctcctcctggcccctcaaaacctggcccaagtcagcagccaagatgtctccttgctggcatcagactcagagcccctgaagtgtttctcccgaacatttgaggacctcacttgcttctgggatgaggaagaggcagcgcccagtgggacataccagctgctgtatgcctacccgcgggagaagccccgtgcttgccccctgagttcccagagcatgccccactttggaacccgatacgtgtgccagtttccagaccaggaggaagtgcgtctcttctttccgctgcacctctgggtgaagaatgtgttcctaaaccagactcggactcagcgagtcctctttgtggacagtgtaggcctgccggctccccccagtatcatcaaggccatgggtgggagccagccaggggaacttcagatcagctgggaggagccagctccagaaatcagtgatttcctgaggtacgaactccgctatggccccagagatcccaagaactccactggtcccacggtcatacagctgattgccacagaaacctgctgccctgctctgcagaggcctcactcagcctctgctctggaccagtctccatgtgctcagcccacaatgccctggcaagatggaccaaagcagacctccccaagtagagaagcttcagctctgacagcagagggtggaagctgcctcatctcaggactccagcctggcaactcctactggctgcagctgcgcagcgaacctgatgggatctccctcggtggctcctggggatcctggtccctccctgtgactgtggacctgcctggagatgcagtggcacttggactgcaatgctttaccttggacctgaagaatgttacctgtcaatggcagcaacaggaccatgctagctcccaaggcttcttctaccacagcagggcacggtgctgccccagagacaggtaccccatctgggagaactgcgaagaggaagagaaaacaaatccaggactacagaccccacagttctctcgctgccacttcaagtcacgaaatgacagcattattcacatccttgtggaggtgaccacagccccgggtactgttcacagctacctgggctcccctttctggatccaccaggctgtgcgcctccccaccccaaacttgcactggagggagatctccagtgggcatctggaattggagtggcagcacccatcgtcctgggcagcccaagagacctgttatcaactccgatacacaggagaaggccatcaggactggaaggtgctggagccgcctctcggggcccgaggagggaccctggagctgcgcccgcgatctcgctaccgtttacagctgcgcgccaggctcaacggccccacctaccaaggtccctggagctcgtggtcggacccaactagggtggagaccgccaccgagaccgcctggatctccttggtgaccgctctgcatctagtgctgggcctcagcgccgtcctgggcctgctgctgctgaggtggcagtttcctgcacactacaggagactgaggcatgccctgtggccctcacttccagacctgcaccgggtcctaggccagtaccttagggacactgcagccctgagcccgcccaaggccacagtctcagatacctgtgaagaagtggaacccagcctccttgaaatcctccccaagtcctcagagaggactcctttgcccctgtgttcctcccaggcccagatggactaccgaagattgcagccttcttgcctggggaccatgcccctgtctgtgtgcccacccatggctgagtcagggtcctgctgtaccacccacattgccaaccattcctacctaccactaagctattggcagcagccttga

SEQ ID NO: 19038 - DNA, 1743 bp, Homo sapiens
  source 1..1743: mol_type = unassigned DNA
atgccctcctgggccctcttcatggtcacctcctgcctcctcctggcccctcaaaacctggcccaagtcagcagccaagatgtctccttgctggcatcagactcagagcccctgaagtgtttctcccgaacatttgaggacctcacttgcttctgggatgaggaagaggcagcgcccagtgggacataccagctgctgtatgcctacccgcgggagaagccccgtgcttgccccctgagttcccagagcatgccccactttggaacccgatacgtgtgccagtttccagaccaggaggaagtgcgtctcttctttccgctgcacctctgggtgaagaatgtgttcctaaaccagactcggactcagcgagtcctctttgtggacagtgtaggcctgccggctccccccagtatcatcaaggccatgggtgggagccagccaggggaacttcagatcagctgggaggagccagctccagaaatcagtgatttcctgaggtacgaactccgctatggccccagagatcccaagaactccactggtcccacggtcatacagctgattgccacagaaacctgctgccctgctctgcagaggcctcactcagcctctgctctggaccagtctccatgtgctcagcccacaatgccctggcaagatggaccaaagcagacctccccaagtagagaagcttcagctctgacagcagagggtggaagctgcctcatctcaggactccagcctggcaactcctactggctgcagctgcgcagcgaacctgatgggatctccctcggtggctcctggggatcctggtccctccctgtgactgtggacctgcctggagatgcagtggcacttggactgcaatgctttaccttggacctgaagaatgttacctgtcaatggcagcaacaggaccatgctagctcccaaggcttcttctaccacagcagggcacggtgctgccccagagacaggtaccccatctgggagaactgcgaagaggaagagaaaacaaatccaggactacagaccccacagttctctcgctgccacttcaagtcacgaaatgacagcattattcacatccttgtggaggtgaccacagccccgggtactgttcacagctacctgggctcccctttctggatccaccaggctgtgcgcctccccaccccaaacttgcactggagggagatctccagtgggcatctggaattggagtggcagcacccatcgtcctgggcagcccaagagacctgttatcaactccgatacacaggagaaggccatcaggactggaaggtgctggagccgcctctcggggcccgaggagggaccctggagctgcgcccgcgatctcgctaccgtttacagctgcgcgccaggctcaacggccccacctaccaaggtccctggagctcgtggtcggacccaactagggtggagaccgccaccgagaccgcctggatctccttggtgaccgctctgcatctagtgctgggcctcagcgccgtcctgggcctgctgctgctgaggtggcagtttcctgcacactacaggtaccgcccccgccaggcaggagactggcggtggaccaggtggagccgaaggcctgtaaacaggcattcttggttcgctctgtgaccccagatctccgtccaccgcccgtgcgcacctacggcttcgccacttcctgcacgtcacctctgggactcgccgcggctccttacactctaa

SEQ ID NO: 19039 - DNA, 2817 bp, Homo sapiens
  source 1..2817: mol_type = unassigned DNA
atgacactcctggggtctgagcattccttgctgattaggagcaagttcagatcagttttacagttaagacttcaacaaagaaggacccaggaacaactggctaaccaaggcataataccaccactgaaacgtccagctgaattccatgagcaaagaaaacatttggatagtgacaaggctaaaaattccctgaagcgcaaagccagaaacaggtgcaacagtgccgacttggttaatatgcacatactccaagcttccactgcagagaggtccattccaactgctcagatgaagctgaaaagagcccgactcgccgatgatctcaatgaaaaaattgctctacgaccagggccactggagctggtggaaaaaaacattcttcctgtggattctgctgtgaaagaggccataaaaggtaaccaggtgagtttctccaaatccacggatgcttttgcctttgaagaggacagcagcagcgatgggctttctccggatcagactcgaagtgaagacccccaaaactcagcgggatccccgccagacgctaaagcctcagataccccttcgacaggttctctggggacaaaccaggatcttgcttctggctcagaaaatgacagaaatgactcagcctcacagcccagccaccagtcagatgcggggaagcaggggcttggcccccccagcacccccatagccgtgcatgctgctgtaaagtccaaatccttgggtgacagtaagaaccgccacaaaaagcccaaggaccccaagccaaaggtgaagaagcttaaatatcaccagtacattcccccagaccagaaggcagagaagtcccctccacctatggactcagcctacgctcggctgctccagcaacagcagctgttcctgcagctccaaatcctcagccagcagcagcagcagcagcaacaccgattcagctacctagggatgcaccaagctcagcttaaggaaccaaatgaacagatggtcagaaatccaaactcttcttcaacgccactgagcaatacccccttgtctcctgtcaaaaacagtttttctggacaaactggtgtctcttctttcaaaccaggcccactcccacctaacctggatgatctgaaggtctctgaattaagacaacagcttcgaattcggggcttgcctgtgtcaggcaccaaaacggctctcatggaccggcttcgacccttccaggactgctctggcaacccagtgccgaactttggggatataacgactgtcacttttcctgtcacacccaacacgctgcccaattaccagtcttcctcttctaccagtgccctgtccaacggcttctaccactttggcagcaccagctccagccccccgatctccccagcctcctctgacctgtcagtcgctgggtccctgccggacaccttcaatgatgcctccccctccttcggcctgcacccgtccccagtccacgtgtgcacggaggaaagtctcatgagcagcctgaatgggggctctgttccttctgagctggatgggctggactccgagaaggacaagatgctggtggagaagcagaaggtgatcaatgaactcacctggaaactccagcaagagcagaggcaggtggaggagctgaggatgcagcttcagaagcagaaaaggaataactgttcagagaagaagccgctgcctttcctggctgcctccatcaagcaggaagaggctgtctccagctgtccttttgcatcccaagtacctgtgaaaagacaaagcagcagctcagagtgtcacccaccggcttgtgaagctgctcaactccagcctcttggaaatgctcattgtgtggagtcctcagatcaaaccaatgtactttcttccacatttctcagcccccagtgttcccctcagcattcaccgctgggggctgtgaaaagcccacagcacatcagtttgcccccatcacccaacaaccctcactttctgccctcatcctccggggcccagggagaagggcacagggtctcctcgcccatcagcagccaggtgtgcactgcacagatggctggtttacactcttctgataaggtggggccaaagttttcaattccatccccaactttttctaagtcaagttcagcaatttcagaggtaacacagcctccatcctatgaagatgccgtaaagcagcaaatgacccggagtcagcagatggatgaactcctggacgtgcttattgaaagcggagaaatgccagcagacgctagagaggatcactcatgtcttcaaaaagtcccaaagatacccagatcttcccgaagtccaactgctgtcctcaccaagccctcggcttcctttgaacaagcctcttcaggcagccagatcccctttgatccctatgccaccgacagtgatgagcatcttgaagtcttattaaattcccagagccccctaggaaagatgagtgatgtcacccttctaaaaattgggagcgaagagcctcactttgatgggataatggatggattctctgggaaggctgcagaagacctcttcaatgcacatgagatcttgccaggccccctctctccaatgcagacacagttttcaccctcttctgtggacagcaatgggctgcagttaagcttcactgaatctccctgggaaaccatggagtggctggacctcactccgccaaattccacaccaggctttagcgccctcaccaccagcagccccagcatcttcaacatcgatttcctggatgtcactgatctcaatttgaattcttccatggaccttcacttgcagcagtggtag

SEQ ID NO: 19040 - DNA, 6821 bp, Homo sapiens
  source 1..6821: mol_type = unassigned DNA
aatcgccggcagcctatgacatcagacaggaacgcctgggatgccgcgctgctcctggccaacctccgaggaggaggagggtcccgccggctaagagttaattagccccgcacggcgaggggggaggcgccagttttctggggacactggctgccactgtactcctacccaggggagctcacggagagttggatgaattctgggttgttagctgcggtcagctgggctcccgggagcctgttgctggtggagaacagggggcgcctggccaagggaccagcggcttgctgagactcaacatgacactcctggggtctgagcattccttgctgattaggagcaagttcagatcagttttacagttaagacttcaacaaagaaggacccaggaacaactggctaaccaaggcataataccaccactgaaacgtccagctgaattccatgagcaaagaaaacatttggatagtgacaaggctaaaaattccctgaagcgcaaagccagaaacaggtgcaacagtgccgacttggttaatatgcacatactccaagcttccactgcagagaggtccattccaactgctcagatgaagctgaaaagagcccgactcgccgatgatctcaatgaaaaaattgctctacgaccagggccactggagctggtggaaaaaaacattcttcctgtggattctgctgtgaaagaggccataaaaggtaaccaggtgagtttctccaaatccacggatgcttttgcctttgaagaggacagcagcagcgatgggctttctccggatcagactcgaagtgaagacccccaaaactcagcgggatccccgccagacgctaaagcctcagataccccttcgacaggttctctggggacaaaccaggatcttgcttctggctcagaaaatgacagaaatgactcagcctcacagcccagccaccagtcagatgcggggaagcaggggcttggcccccccagcacccccatagccgtgcatgctgctgtaaagtccaaatccttgggtgacagtaagaaccgccacaaaaagcccaaggaccccaagccaaaggtgaagaagcttaaatatcaccagtacattcccccagaccagaaggcagagaagtcccctccacctatggactcagcctacgctcggctgctccagcaacagcagctgttcctgcagctccaaatcctcagccagcagcagcagcagcagcaacaccgattcagctacctagggatgcaccaagctcagcttaaggaaccaaatgaacagatggtcagaaatccaaactcttcttcaacgccactgagcaatacccccttgtctcctgtcaaaaacagtttttctggacaaactggtgtctcttctttcaaaccaggcccactcccacctaacctggatgatctgaaggtctctgaattaagacaacagcttcgaattcggggcttgcctgtgtcaggcaccaaaacggctctcatggaccggcttcgacccttccaggactgctctggcaacccagtgccgaactttggggatataacgactgtcacttttcctgtcacacccaacacgctgcccaattaccagtcttcctcttctaccagtgccctgtccaacggcttctaccactttggcagcaccagctccagccccccgatctccccagcctcctctgacctgtcagtcgctgggtccctgccggacaccttcaatgatgcctccccctccttcggcctgcacccgtccccagtccacgtgtgcacggaggaaagtctcatgagcagcctgaatgggggctctgttccttctgagctggatgggctggactccgagaaggacaagatgctggtggagaagcagaaggtgatcaatgaactcacctggaaactccagcaagagcagaggcaggtggaggagctgaggatgcagcttcagaagcagaaaaggaataactgttcagagaagaagccgctgcctttcctggctgcctccatcaagcaggaagaggctgtctccagctgtccttttgcatcccaagtacctgtgaaaagacaaagcagcagctcagagtgtcacccaccggcttgtgaagctgctcaactccagcctcttggaaatgctcattgtgtggagtcctcagatcaaaccaatgtactttcttccacatttctcagcccccagtgttcccctcagcattcaccgctgggggctgtgaaaagcccacagcacatcagtttgcccccatcacccaacaaccctcactttctgccctcatcctccggggcccagggagaagggcacagggtctcctcgcccatcagcagccaggtgtgcactgcacagaactcaggagcacacgatggccatcctccaagcttctctccccattcttccagcctccacccgcccttctctggagcccaagcagacagcagtcatggtgccgggggaaacccttgtcccaaaagcccatgtgtacagcaaaagcaaatgacccggagtcagcagatggatgaactcctggacgtgcttattgaaagcggagaaatgccagcagacgctagagaggatcactcatgtcttcaaaaagtcccaaagatacccagatcttcccgaagtccaactgctgtcctcaccaagccctcggcttcctttgaacaagcctcttcaggcagccagatcccctttgatccctatgccaccgacagtgatgagcatcttgaagtcttattaaattcccagagccccctaggaaagatgagtgatgtcacccttctaaaaattgggagcgaagagcctcactttgatgggataatggatggattctctgggaaggctgcagaagacctcttcaatgcacatgagatcttgccaggccccctctctccaatgcagacacagttttcaccctcttctgtggacagcaatgggctgcagttaagcttcactgaatctccctgggaaaccatggagtggctggacctcactccgccaaattccacaccaggctttagcgccctcaccaccagcagccccagcatcttcaacatcgatttcctggatgtcactgatctcaatttgaattcttccatggaccttcacttgcagcagtggtagaatgcccaatgcaccagtgctatggaagaccaatggagttccatgggggaaagcacacagccatacatactttactgtccaaaaacagaagaagaagaagagaattaaaaagaagcaatgatttctgtgccaatgaacaagaacaaaagtcatttttagaaatacatatactgtaatatttaccaacagtcagtaactgttaatgatttcaacaatgcattaaaagaatgtgctttctcagattaaggatgccaaaaaagatatttcactgccttttcaaagaccagtatattttctagcccataatttttctcaggcattgttggggcataagctcacactgtaagcttttctcatgaattcactagacataacgtggaaggaaaacgtagtcttttgggagtacagggaagccagcccctcaaagcttatggaagacatacctgcaatggaagctgttgcccaatgtctccattactatctttcaaaagagaagccagacccagcttcagatcaaaagttcttgagacagaggaacaaaaccaatcgatttccagggaagctaatcaactctcttttccctctaccacaaaactgccctgctggagtggttctgaacctgtacccaggactcgatgtggtcactaataacaattaacctgaactgagtccacagaactccactcggaactttcttcttttttaactagtggcccaatcattcccaccatctctgtgctgataagtacgtgtcctagatgagaaccctgaagaatgcagaccttcttcccccgaaggagatgccacaagctctccaacacagccccctttagttccaaagactagagatgaccacattggtagaagtatatctcgaggcacaggaagggagccccaccagggataattcagacaggactagagaataacatcatttcacataccctgggataaacaccctgggttcctatagaaggactattacttatgggagtccaacttctccttttgttttgttattatcagtttatctttctcccactccacttttccttcaaggtaccaatcctttcctgttcctcgtttggccatctttctttttctgcctccacattgggaggggaggacttctcagttctaacaagctgccatactcctaagaaagccatttttgaaaaatttaacaatccaggttcttctggagaactcattctccacacgcacagtttgctgcaaaaggaagttgcaagaatttcttgaggaagaaactggtgacttggtccatcagtcacgaagttctttctattctcgtttagttttcaagaaattattggtttgtgttgctctggggaaattggaaatcattacattgtaaagacaaatatggatgatatttacaagagagaatttcagatctgggtttttgaaagaaaacagaattgcgcattgaaaacgatggaaggaaaaagacaatggtctaatgtgcattcctcattacctctcgtggctttggctgggagttggaaaaagctaaaatttcagaacagtctctgtaaggctctctgtggctccagttcaccattttatattgttgcatgctgtagaaaggagctattgctgttgttttgtttttttatttaaatcactaaggcactgtttttatcttttgtaaaaaaaaaaaaaaagttgttcactgtgcacttatagaaaaaataatcaaaaatgttgggattttagaagctctctttttgataaaccaaagatttagaagtcattccattgttaacttgtaaaaatgtgtgaacacagagagtttttggtgattgctactctgaaagctgccagatcttattctgggggtgggatgtggaggaatacacatacacacacaaacatacatgtatgtataatagatatatacatatgtgtatattatatctgtgtgtgcatgtatctccaaaagcggcgttacagagttctacaccaaaagcctttaacccttaatctgctgtgaatgatacctggcctttctcactatgaatttctgattaaccaaccagactacacgttgcctctctgtgtatgactaacggctccaacccgatgactcacagctacttgcttatcgtgaacaagctcatcttggcaatgaatatggatgtgaaaagacagaacagcttcaccattagtagctggaaatggtatcacagtctcttatagaggaatatgaaaggaacaagaaaatcattttacattccttttatctgtattgtgctttaaaagatccacatggtaaattttttattttgcttttatgtcagtcatcagaaccaaaaaaatccagaagaaaaaattgccagtgtttcctttgaagatgaagctactggggaagaaaaccttattaatacactccacacatttgttcattcctcagctgttggtgttttcttggggtcttgacaaagcttgctggtcagtgcacttttcaggtgtcacgttttgctgtttgtatgttttttcttccccttacttcctttggaaaacaaactcacacagtgcccctactctgagacctgggactgagtgttaattattttttccttgggtatttctatctgagagactagacctagttaggaggcctctgtacttctccagattgtacctttttatggggatctttgaggctatgacccaggactgatagatatgccttacggaagacaaaagataaaatggttcctatatcctaatgcaaaccaacacagttaaaagagcagatctctggataactgctctcaacctgcttctacagtctccacaaaccgcattcaccctctctcttcatagctcagacatgaaatttgagggagaaaactggagataattgggagaaaattgatgaagttggctgcttccagtagatcagataatccatgaatttgtctcccattgagaattttattttaaattcttttaaactcttcgttgtgtcttttgtgatgacaaatcaggcatgactaaaagatgtacagagacttacgaagatggtcacattcaagttccctaatgctcttagaacctgaagatgaccatgtgtagttttcttaagacctctgaacccccatggtgatgaagacttgaagacatttgcagctatctgctgcagtctggtagattcatacttatctaaagaagtcaaaaaatttattcgtgcaagtgcttgcaggaagccagtgcttattagtagtgaccctgcttctatcaacgttattgagacaacacatattctattctaagggagaaagagggaggaagagagggagggagggaggaagaagagggagggagcgaggaaggaagataggagatgggtaggggggtaaagagaaaaggagggagaagggaaggaaggaaagaagagaggaaagaaaggagggaaggaaaaaagggccaaactttctgatctatgaacttctcagttcagctgtcacattatgagaagtaaatcagaatttttttaaggagaagtcattcttagcactacaataattgtaccagtaattgaggaaaccaagacaatcttcacctgaataatagagggtctgagaactgtcagccttttgccattcaaaaacatttatgtccaacctgaaaaaaaagcatcaataaaacctatcccaagcattc

SEQ ID NO: 19041 - DNA, 2344 bp, Homo sapiens
  source 1..2344: mol_type = unassigned DNA
aaaatcgattgctctctgccacaaaccggagacccttcttgggcgatccgctttctcagcatgtggaaggtttttctctctctcttctttttctactaaaccttccgctcctaaacccattcctcgtgtgtatccctgtcctgaattctttctcgaccatgacaaagaaccagcttccactgcagagaggtccattccaactgctcagatgaagctgaaaagagcccgactcgccgatgatctcaatgaaaaaattgctctacgaccagggccactggagctggtggaaaaaaacattcttcctgtggattctgctgtgaaagaggccataaaaggtaaccaggtgagtttctccaaatccacggatgcttttgcctttgaagaggacagcagcagcgatgggctttctccggatcagactcgaagtgaagacccccaaaactcagcgggatccccgccagacgctaaagcctcagataccccttcgacaggttctctggggacaaaccaggatcttgcttctggctcagaaaatgacagaaatgactcagcctcacagcccagccaccagtcagatgcggggaagcaggggcttggcccccccagcacccccatagccgtgcatgctgctgtaaagtccaaatccttgggtgacagtaagaaccgccacaaaaagcccaaggaccccaagccaaaggtgaagaagcttaaatatcaccagtacattcccccagaccagaaggcagagaagtcccctccacctatggactcagcctacgctcggctgctccagcaacagcagctgttcctgcagctccaaatcctcagccagcagcagcagcagcagcaacaccgattcagctacctagggatgcaccaagctcagcttaaggaaccaaatgaacagatggtcagaaatccaaactcttcttcaacgccactgagcaatacccccttgtctcctgtcaaaaacagtttttctggacaaactggtgtctcttctttcaaaccaggcccactcccacctaacctggatgatctgaaggtctctgaattaagacaacagcttcgaattcggggcttgcctgtgtcaggcaccaaaacggctctcatggaccggcttcgacccttccaggactgctctggcaacccagtgccgaactttggggatataacgactgtcacttttcctgtcacacccaacacgctgcccaattaccagtcttcctcttctaccagtgccctgtccaacggcttctaccactttggcagcaccagctccagccccccgatctccccagcctcctctgacctgtcagtcgctgggtccctgccggacaccttcaatgatgcctccccctccttcggcctgcacccgtccccagtccacgtgtgcacggaggaaagtctcatgagcagcctgaatgggggctctgttccttctgagctggatgggctggactccgagaaggacaagatgctggtggagaagcagaaggtgatcaatgaactcacctggaaactccagcaagagcagaggcaggtggaggagctgaggatgcagcttcagaagcagaaaaggaataactgttcagagaagaagccgctgcctttcctggctgcctccatcaagcaggaagaggctgtctccagctgtccttttgcatcccaagtacctgtgaaaagacaaagcagcagctcagagtgtcacccaccggcttgtgaagctgctcaactccagcctcttggaaatgctcattgtgtggagtcctcagatcaaaccaatgtactttcttccacatttctcagcccccagtgttcccctcagcattcaccgctgggggctgtgaaaagcccacagcacatcagtttgcccccatcacccaacaaccctcactttctgccctcatcctccggggcccagggagaagggcacagggtctcctcgcccatcagcagccaggtgtgcactgcacagaactcaggagcacacgatggccatcctccaagcttctctccccattcttccagcctccacccgcccttctctggagcccaagcagacagcagtcatggtgccgggggaaacccttgtcccaaaagcccatgtgtacagcaaaagatggctggtttacactcttctgataaggtggggccaaagttttcaattccatccccaactttttctaagtcaagttcagcaatttcagaggtaacacagcctccatcctatgaagatgccgtaaagcaggtaaccatgtgatttgttctttatggaagaatagactgactcaatgaacagacattgtttgatatgattaaacttcacgcagtttgtaaattc

SEQ ID NO: 19042 - DNA, 8466 bp, Homo sapiens
  source 1..8466: mol_type = unassigned DNA
aattagccccgcacggcgaggggggaggcgccagttttctggggacactggctgccactgtactcctacccaggggagctcacggagagttggatgaattctgggttgttagctgcggtcagctgggctcccgggagcctgttgctggtggagaacagggggcgcctggccaagggaccagcggcttgctgagactcaacatgacactcctggggtctgagcattccttgctgattaggagcaagttcagatcagttttacagttaagacttcaacaaagaaggacccaggaacaactggctaaccaaggcataataccaccactgaaacgtccagctgaattccatgagcaaagaaaacatttggatagtgacaaggctaaaaattccctgaagcgcaaagccagaaacaggtgcaacagtgccgacttggttaatatgcacatactccaagcttccactgcagagaggtccattccaactgctcagatgaagctgaaaagagcccgactcgccgatgatctcaatgaaaaaattgctctacgaccagggccactggagctggtggaaaaaaacattcttcctgtggattctgctgtgaaagaggccataaaaggtaaccaggtgagtttctccaaatccacggatgcttttgcctttgaagaggacagcagcagcgatgggctttctccggatcagactcgaagtgaagacccccaaaactcagcgggatccccgccagacgctaaagcctcagataccccttcgacaggttctctggggacaaaccaggatcttgcttctggctcagaaaatgacagaaatgactcagcctcacagcccagccaccagtcagatgcggggaagcaggggcttggcccccccagcacccccatagccgtgcatgctgctgtaaagtccaaatccttgggtgacagtaagaaccgccacaaaaagcccaaggaccccaagccaaaggtgaagaagcttaaatatcaccagtacattcccccagaccagaaggcagagaagtcccctccacctatggactcagcctacgctcggctgctccagcaacagcagctgttcctgcagctccaaatcctcagccagcagcagcagcagcagcaacaccgattcagctacctagggatgcaccaagctcagcttaaggaaccaaatgaacagatggtcagaaatccaaactcttcttcaacgccactgagcaatacccccttgtctcctgtcaaaaacagtttttctggacaaactggtgtctcttctttcaaaccaggcccactcccacctaacctggatgatctgaaggtctctgaattaagacaacagcttcgaattcggggcttgcctgtgtcaggcaccaaaacggctctcatggaccggcttcgacccttccaggactgctctggcaacccagtgccgaactttggggatataacgactgtcacttttcctgtcacacccaacacgctgcccaattaccagtcttcctcttctaccagtgccctgtccaacggcttctaccactttggcagcaccagctccagccccccgatctccccagcctcctctgacctgtcagtcgctgggtccctgccggacaccttcaatgatgcctccccctccttcggcctgcacccgtccccagtccacgtgtgcacggaggaaagtctcatgagcagcctgaatgggggctctgttccttctgagctggatgggctggactccgagaaggacaagatgctggtggagaagcagaaggtgatcaatgaactcacctggaaactccagcaagagcagaggcaggtggaggagctgaggatgcagcttcagaagcagaaaaggaataactgttcagagaagaagccgctgcctttcctggctgcctccatcaagcaggaagaggctgtctccagctgtccttttgcatcccaagtacctgtgaaaagacaaagcagcagctcagagtgtcacccaccggcttgtgaagctgctcaactccagcctcttggaaatgctcattgtgtggagtcctcagatcaaaccaatgtactttcttccacatttctcagcccccagtgttcccctcagcattcaccgctgggggctgtgaaaagcccacagcacatcagtttgcccccatcacccaacaaccctcactttctgccctcatcctccggggcccagggagaagggcacagggtctcctcgcccatcagcagccaggtgtgcactgcacagaactcaggagcacacgatggccatcctccaagcttctctccccattcttccagcctccacccgcccttctctggagcccaagcagacagcagtcatggtgccgggggaaacccttgtcccaaaagcccatgtgtacagcaaaagatggctggtttacactcttctgataaggtggggccaaagttttcaattccatccccaactttttctaagtcaagttcagcaatttcagaggtaacacagcctccatcctatgaagatgccgtaaagcagcaaatgacccggagtcagcagatggatgaactcctggacgtgcttattgaaagcggagaaatgccagcagacgctagagaggatcactcatgtcttcaaaaagtcccaaagatacccagatcttcccgaagtccaactgctgtcctcaccaagccctcggcttcctttgaacaagcctcttcaggcagccagatcccctttgatccctatgccaccgacagtgatgagcatcttgaagtcttattaaattcccagagccccctaggaaagatgagtgatgtcacccttctaaaaattgggagcgaagagcctcactttgatgggataatggatggattctctgggaaggctgcagaagacctcttcaatgcacatgagatcttgccaggccccctctctccaatgcagacacagttttcaccctcttctgtggacagcaatgggctgcagttaagcttcactgaatctccctgggaaaccatggagtggctggacctcactccgccaaattccacaccaggctttagcgccctcaccaccagcagccccagcatcttcaacatcgatttcctggatgtcactgatctcaatttgaattcttccatggaccttcacttgcagcagtggtagaatgcccaatgcaccagtgctatggaagaccaatggagttccatgggggaaagcacacagccatacatactttactgtccaaaaacagaagaagaagaagagaattaaaaagaagcaatgatttctgtgccaatgaacaagaacaaaagtcatttttagaaatacatatactgtaatatttaccaacagtcagtaactgttaatgatttcaacaatgcattaaaagaatgtgctttctcagattaaggatgccaaaaaagatatttcactgccttttcaaagaccagtatattttctagcccataatttttctcaggcattgttggggcataagctcacactgtaagcttttctcatgaattcactagacataacgtggaaggaaaacgtagtcttttgggagtacagggaagccagcccctcaaagcttatggaagacatacctgcaatggaagctgttgcccaatgtctccattactatctttcaaaagagaagccagacccagcttcagatcaaaagttcttgagacagaggaacaaaaccaatcgatttccagggaagctaatcaactctcttttccctctaccacaaaactgccctgctggagtggttctgaacctgtacccaggactcgatgtggtcactaataacaattaacctgaactgagtccacagaactccactcggaactttcttcttttttaactagtggcccaatcattcccaccatctctgtgctgataagtacgtgtcctagatgagaaccctgaagaatgcagaccttcttcccccgaaggagatgccacaagctctccaacacagccccctttagttccaaagactagagatgaccacattggtagaagtatatctcgaggcacaggaagggagccccaccagggataattcagacaggactagagaataacatcatttcacataccctgggataaacaccctgggttcctatagaaggactattacttatgggagtccaacttctccttttgttttgttattatcagtttatctttctcccactccacttttccttcaaggtaccaatcctttcctgttcctcgtttggccatctttctttttctgcctccacattgggaggggaggacttctcagttctaacaagctgccatactcctaagaaagccatttttgaaaaatttaacaatccaggttcttctggagaactcattctccacacgcacagtttgctgcaaaaggaagttgcaagaatttcttgaggaagaaactggtgacttggtccatcagtcacgaagttctttctattctcgtttagttttcaagaaattattggtttgtgttgctctggggaaattggaaatcattacattgtaaagacaaatatggatgatatttacaagagagaatttcagatctgggtttttgaaagaaaacagaattgcgcattgaaaacgatggaaggaaaaagacaatggtctaatgtgcattcctcattacctctcgtggctttggctgggagttggaaaaagctaaaatttcagaacagtctctgtaaggctctctgtggctccagttcaccattttatattgttgcatgctgtagaaaggagctattgctgttgttttgtttttttatttaaatcactaaggcactgtttttatcttttgtaaaaaaaaaaaaaaagttgttcactgtgcacttatagaaaaaataatcaaaaatgttgggattttagaagctctctttttgataaaccaaagatttagaagtcattccattgttaacttgtaaaaatgtgtgaacacagagagtttttggtgattgctactctgaaagctgccagatcttattctgggggtgggatgtggaggaatacacatacacacacaaacatacatgtatgtataatagatatatacatatgtgtatattatatctgtgtgtgcatgtatctccaaaagcggcgttacagagttctacaccaaaagcctttaacccttaatctgctgtgaatgatacctggcctttctcactatgaatttctgattaaccaaccagactacacgttgcctctctgtgtatgactaacggctccaacccgatgactcacagctacttgcttatcgtgaacaagctcatcttggcaatgaatatggatgtgaaaagacagaacagcttcaccattagtagctggaaatggtatcacagtctcttatagaggaatatgaaaggaacaagaaaatcattttacattccttttatctgtattgtgctttaaaagatccacatggtaaattttttattttgcttttatgtcagtcatcagaaccaaaaaaatccagaagaaaaaattgccagtgtttcctttgaagatgaagctactggggaagaaaaccttattaatacactccacacatttgttcattcctcagctgttggtgttttcttggggtcttgacaaagcttgctggtcagtgcacttttcaggtgtcacgttttgctgtttgtatgttttttcttccccttacttcctttggaaaacaaactcacacagtgcccctactctgagacctgggactgagtgttaattattttttccttgggtatttctatctgagagactagacctagttaggaggcctctgtacttctccagattgtacctttttatggggatctttgaggctatgacccaggactgatagatatgccttacggaagacaaaagataaaatggttcctatatcctaatgcaaaccaacacagttaaaagagcagatctctggataactgctctcaacctgcttctacagtctccacaaaccgcattcaccctctctcttcatagctcagacatgaaatttgagggagaaaactggagataattgggagaaaattgatgaagttggctgcttccagtagatcagataatccatgaatttgtctcccattgagaattttattttaaattcttttaaactcttcgttgtgtcttttgtgatgacaaatcaggcatgactaaaagatgtacagagacttacgaagatggtcacattcaagttccctaatgctcttagaacctgaagatgaccatgtgtagttttcttaagacctctgaacccccatggtgatgaagacttgaagacatttgcagctatctgctgcagtctggtagattcatacttatctaaagaagtcaaaaaatttattcgtgcaagtgcttgcaggaagccagtgcttattagtagtgaccctgcttctatcaacgttattgagacaacacatattctattctaagggagaaagagggaggaagagagggagggagggaggaagaagagggagggagcgaggaaggaagataggagatgggtaggggggtaaagagaaaaggagggagaagggaaggaaggaaagaagagaggaaagaaaggagggaaggaaaaaagggccaaactttctgatctatgaacttctcagttcagctgtcacattatgagaagtaaatcagaatttttttaaggagaagtcattcttagcactacaataattgtaccagtaattgaggaaaccaagacaatcttcacctgaataatagagggtctgagaactgtcagccttttgccattcaaaaacatttatgtccaacctgaaaaaaaagcatcaataaaacctatcccaagcattcaaaatagtcctttccaaatgttatttattttaaagtcaatcagctcttttagaaacagattctggtctggctgaaaactcccacaacaaatttactcatccagtggctaatatttaatgcccaccatgggcagagcacacaaatcttcagataaacaatactgaattgattcagcacagattgttcagatttgaatgaccagggagttgtatttgcacatgcaagaacactaagaatctcccagtcctcaaactagaaacctttcagctacgatgaaaaaaaaaaaggggtcttcatttttccaagagggggtggaggtggggatcactttttagctaaaagctatctctcacttcaaaattcttgtctttttctttgtggacaaacaccagtagtctatcacttggagatcttttaatatctcccatcatttaaaacatccacgagagtttgaagatttgtgttgattgccagatacagaagccccttgaaaataaggaaagggtggaggaagcatttttgtgtcctatccctacttatcgtagcagctctatagacaaaagggacacttactggtgagcctctggcccttaaaagaaaatcatctaagaatatgaaggcaatttgatttccccccacagccctcagctgccttcctcacagaaggaagttcccaaaattgctggtacacagtttgcaatcaaatatcagatatgagaaaacctgtagtgaagagtctgggttcttggttttctcataaatccaatataaatttgtaggttggttcagggtcaaaattgccagtgctttattagacagatgatactgatagacacacagagcccaggtcctggaacaagacaatcctgtagtgccaagatctggtcagttgcgttaaggagctgggtttgattctagagtccaggtttatagagaaaccctggctagattgagcctacccatggggagacgatttcaagacaggatgagatctgggaagaattttgttgtcatctgccagggaaattatcacaggactcattgaatgcaataacatgtgagtaagttcccttttgattctgggaatcagcgattttccctgtggattaagacaaaccaacgccagaaggtctcctgtgcttattttaaccatctgctcccatcgtgaaccctggagcatgcatttcctagaagtggtttcatagctcctgtgtgttcatggaaaaggggagtataatgatggggatgctggaagcttttttaatgttttccaaaggaaaggaacccacactgctccccagagttcctttccaatggccctgcagtaagaacggaggacaatgtattgctgggtgcttaaaatcctccctcagtgaagcacaaagagacactttgtaaagaaaaaaagagcaagcataggttctctgtgggaccttgtggagtggtgttttcacgttggtctctttggctcaattgagcataatcagaaagaaatgtgggttattgggaagagacaaaaagcagtggctaaaataccaaagttggcatgtgttcttttttaaaaaaaaaaaaaaatgcatatatttttaaataaaatgtttattttaaaaagaaa

SEQ ID NO: 19043 - DNA, 3632 bp, Homo sapiens
  source 1..3632: mol_type = unassigned DNA
ttcctgcagctccaaatcctcagccagcagcagcagcagcagcaacaccgattcagctacctagggatgcaccaagctcagcttaaggaaccaaatgaacagatggtcagaaatccaaactcttcttcaacgccactgagcaatacccccttgtctcctgtcaaaaacagtttttctggacaaactggtgtctcttctttcaaaccaggcccactcccacctaacctggatgatctgaaggtctctgaattaagacaacagcttcgaattcggggcttgcctgtgtcaggcaccaaaacggctctcatggaccggcttcgacccttccaggactgctctggcaacccagtgccgaactttggggatataacgactgtcacttttcctgtcacacccaacacgctgcccaattaccagtcttcctcttctaccagtgccctgtccaacggcttctaccactttggcagcaccagctccagccccccgatctccccagcctcctctgacctgtcagtcgctgggtccctgccggacaccttcaatgatgcctccccctccttcggcctgcacccgtccccagtccacgtgtgcacggaggaaagtctcatgagcagcctgaatgggggctctgttccttctgagctggatgggctggactccgagaaggacaagatgctggtggagaagcagaaggtgatcaatgaactcacctggaaactccagcaagagcagaggcaggtggaggagctgaggatgcagcttcagaagcagaaaaggaataactgttcagagaagaagccgctgcctttcctggctgcctccatcaagcaggaagaggctgtctccagctgtccttttgcatcccaagtacctgtgaaaagacaaagcagcagctcagagtgtcacccaccggcttgtgaagctgctcaactccagcctcttggaaatgctcattgtgtggagtcctcagatcaaaccaatgtactttcttccacatttctcagcccccagtgttcccctcagcattcaccgctgggggctgtgaaaagcccacagcacatcagtttgcccccatcacccaacaaccctcactttctgccctcatcctccggggcccagggagaagggcacagggtctcctcgcccatcagcagccaggtgtgcactgcacagaactcaggagcacacgatggccatcctccaagcttctctccccattcttccagcctccacccgcccttctctggagcccaagcagacagcagtcatggtgccgggggaaacccttgtcccaaaagcccatgtgtacagcaaaagcaaatgacccggagtcagcagatggatgaactcctggacgtgcttattgaaagcggagaaatgccagcagacgctagagaggatcactcatgtcttcaaaaagtcccaaagatacccagatcttcccgaagtccaactgctgtcctcaccaagccctcggcttcctttgaacaagcctcttcaggcagccagatcccctttgatccctatgccaccgacagtgatgagcatcttgaagtcttattaaattcccagagccccctaggaaagatgagtgatgtcacccttctaaaaattgggagcgaagagcctcactttgatgggataatggatggattctctgggaaggctgcagaagacctcttcaatgcacatgagatcttgccaggccccctctctccaatgcagacacagttttcaccctcttctgtggacagcaatgggctgcagttaagcttcactgaatctccctgggaaaccatggagtggctggacctcactccgccaaattccacaccaggctttagcgccctcaccaccagcagccccagcatcttcaacatcgatttcctggatgtcactgatctcaatttgaattcttccatggaccttcacttgcagcagtggtagaatgcccaatgcaccagtgctatggaagaccaatggagttccatgggggaaagcacacagccatacatactttactgtccaaaaacagaagaagaagaagagaattaaaaagaagcaatgatttctgtgccaatgaacaagaacaaaagtcatttttagaaatacatatactgtaatatttaccaacagtcagtaactgttaatgatttcaacaatgcattaaaagaatgtgctttctcagattaaggatgccaaaaaagatatttcactgccttttcaaagaccagtatattttctagcccataatttttctcaggcattgttggggcataagctcacactgtaagcttttctcatgaattcactagacataacgtggaaggaaaacgtagtcttttgggagtacagggaagccagcccctcaaagcttatggaagacatacctgcaatggaagctgttgcccaatgtctccattactatctttcaaaagagaagccagacccagcttcagatcaaaagttcttgagacagaggaacaaaaccaatcgatttccagggaagctaatcaactctcttttccctctaccacaaaactgccctgctggagtggttctgaacctgtacccaggactcgatgtggtcactaataacaattaacctgaactgagtccacagaactccactcggaactttcttcttttttaactagtggcccaatcattcccaccatctctgtgctgataagtacgtgtcctagatgagaaccctgaagaatgcagaccttcttcccccgaaggagatgccacaagctctccaacacagccccctttagttccaaagactagagatgaccacattggtagaagtatatctcgaggcacaggaagggagccccaccagggataattcagacaggactagagaataacatcatttcacataccctgggataaacaccctgggttcctatagaaggactattacttatgggagtccaacttctccttttgttttgttattatcagtttatctttctcccactccacttttccttcaaggtaccaatcctttcctgttcctcgtttggccatctttctttttctgcctccacattgggaggggaggacttctcagttctaacaagctgccatactcctaagaaagccatttttgaaaaatttaacaatccaggttcttctggagaactcattctccacacgcacagtttgctgcaaaaggaagttgcaagaatttcttgaggaagaaactggtgacttggtccatcagtcacgaagttctttctattctcgtttagttttcaagaaattattggtttgtgttgctctggggaaattggaaatcattacattgtaaagacaaatatggatgatatttacaagagagaatttcagatctgggtttttgaaagaaaacagaattgcgcattgaaaacgatggaaggaaaaagacaatggtctaatgtgcattcctcattacctctcgtggctttggctgggagttggaaaaagctaaaatttcagaacagtctctgtaaggctctctgtggctccagttcaccattttatattgttgcatgctgtagaaaggagctattgctgttgttttgtttttttatttaaatcactaaggcactgtttttatcttttgtaaaaaaaaaaaaaaa

SEQ ID NO: 19044 - DNA, 2083 bp, Homo sapiens
  source 1..2083: mol_type = unassigned DNA
catccaggcacctctcagcacagcagagctttccagaggaagcctcaccaagcctctgcaatgaggttcttctgtgcacgttgctgcagctttgggcctgagatgccagctgtccagctgctgcttctggcctgcctggtgtgggatgtgggggccaggacagctcagctcaggaaggccaatgaccagagtggccgatgccagtataccttcagtgtggccagtcccaatgaatccagctgcccagagcagagccaggccatgtcagtcatccataacttacagagagacagcagcacccaacgcttagacctggaggccaccaaagctcgactcagctccctggagagcctcctccaccaattgaccttggaccaggctgccaggccccaggagacccaggaggggctgcagagggagctgggcaccctgaggcgggagcgggaccagctggaaacccaaaccagagagttggagactgcctacagcaacctcctccgagacaagtcagttctggaggaagagaagaagcgactaaggcaagaaaatgagaatctggccaggaggttggaaagcagcagccaggaggtagcaaggctgagaaggggccagtgtccccagacccgagacactgctcgggctgtgccaccaggctccagagaagtttctacgtggaatttggacactttggccttccaggaactgaagtccgagctaactgaagttcctgcttcccgaattttgaaggagagcccatctggctatctcaggagtggagagggagacaccggatgtggagaactagtttgggtaggagagcctctcacgctgagaacagcagaaacaattactggcaagtatggtgtgtggatgcgagaccccaagcccacctacccctacacccaggagaccacgtggagaatcgacacagttggcacggatgtccgccaggtttttgagtatgacctcatcagccagtttatgcagggctacccttctaaggttcacatactgcctaggccactggaaagcacgggtgctgtggtgtactcggggagcctctatttccagggcgctgagtccagaactgtcataagatatgagctgaataccgagacagtgaaggctgagaaggaaatccctggagctggctaccacggacagttcccgtattcttggggtggctacacggacattgacttggctgtggatgaagcaggcctctgggtcatttacagcaccgatgaggccaaaggtgccattgtcctctccaaactgaacccagagaatctggaactcgaacaaacctgggagacaaacatccgtaagcagtcagtcgccaatgccttcatcatctgtggcaccttgtacaccgtcagcagctacacctcagcagatgctaccgtcaactttgcttatgacacaggcacaggtatcagcaagaccctgaccatcccattcaagaaccgctataagtacagcagcatgattgactacaaccccctggagaagaagctctttgcctgggacaacttgaacatggtcacttatgacatcaagctctccaagatgtgaaaagcctccaagctgtacaggcaatggcagaaggagatgctcagggctcctggggggagcaggctgaagggagagccagccagccagggcccaggcagctttgactgctttccaagttttcattaatccagaaggatgaacatggtcaccatctaactattcaggaattgtagtctgagggcgtagacaatttcatataataaatatcctttatcttctgtcagcatttatgggatgtttaatgacatagttcaagttttcttgtgatttggggcaaaagctgtaaggcataatagtttcttcctgaaaaccattgctcttgcatgttacatggttaccacaagccacaataaaaagcataacttctaaaggaagcagaatagctcctctggccagcatcgaatataagtaagatgcatttactacagttggcttctaatgcttcagatagaatacagttgggtctcacataaccctttacattgtgaaataaaattttcttacccaa

SEQ ID NO: 19045 - DNA, 1986 bp, Homo sapiens
  source 1..1986: mol_type = unassigned DNA
atatataaacctctctggagctcgggcatgagccagcaaggccacccatccaggcacctctcagcacagcagagctttccagaggaagcctcaccaagcctctgcaatgaggttcttctgtgcacgttgctgcagctttgggcctgagatgccagctgtccagctgctgcttctggcctgcctggtgtgggatgtgggggccaggacagctcagctcaggaaggccaatgaccagagtggccgatgccagtataccttcagtgtggccagtcccaatgaatccagctgcccagagcagagccaggccatgtcagtcatccataacttacagagagacagcagcacccaacgcttagacctggaggccaccaaagctcgactcagctccctggagagcctcctccgagacaagtcagttctggaggaagagaagaagcgactaaggcaagaaaatgagaatctggccaggaggttggaaagcagcagccaggaggtagcaaggctgagaaggggccagtgtccccagacccgagacactgctcgggctgtgccaccaggctccagagaagtttctacgtggaatttggacactttggccttccaggaactgaagtccgagctaactgaagttcctgcttcccgaattttgaaggagagcccatctggctatctcaggagtggagagggagacaccggatgtggagaactagtttgggtaggagagcctctcacgctgagaacagcagaaacaattactggcaagtatggtgtgtggatgcgagaccccaagcccacctacccctacacccaggagaccacgtggagaatcgacacagttggcacggatgtccgccaggtttttgagtatgacctcatcagccagtttatgcagggctacccttctaaggttcacatactgcctaggccactggaaagcacgggtgctgtggtgtactcggggagcctctatttccagggcgctgagtccagaactgtcataagatatgagctgaataccgagacagtgaaggctgagaaggaaatccctggagctggctaccacggacagttcccgtattcttggggtggctacacggacattgacttggctgtggatgaagcaggcctctgggtcatttacagcaccgatgaggccaaaggtgccattgtcctctccaaactgaacccagagaatctggaactcgaacaaacctgggagacaaacatccgtaagcagtcagtcgccaatgccttcatcatctgtggcaccttgtacaccgtcagcagctacacctcagcagatgctaccgtcaactttgcttatgacacaggcacaggtatcagcaagaccctgaccatcccattcaagaaccgctataagtacagcagcatgattgactacaaccccctggagaagaagctctttgcctgggacaacttgaacatggtcacttatgacatcaagctctccaagatgtgaaaagcctccaagctgtacaggcaatggcagaaggagatgctcagggctcctggggggagcaggctgaagggagagccagccagccagggcccaggcagctttgactgctttccaagttttcattaatccagaaggatgaacatggtcaccatctaactattcaggaattgtagtctgagggcgtagacaatttcatataataaatatcctttatcttctgtcagcatttatgggatgtttaatgacatagttcaagttttcttgtgatttggggcaaaagctgtaaggcataatagtttcttcctgaaaaccattgctcttgcatgttacatggttaccacaagccacaataaaaagcataacttctaaaggaagcagaatagctcctctggccagcatcgaatataagtaagatgcatttactacagttggcttctaatgcttcagatagaatacagttgggtctcacataaccctttacattgtgaaataaaattttcttaccc

SEQ ID NO: 19046 - DNA, 2081 bp, Homo sapiens
  source 1..2081: mol_type = unassigned DNA
catccaggcacctctcagcacagcagagctttccagaggaagcctcaccaagcctctgcaatgaggttcttctgtgcacgttgctgcagctttgggcctgagatgccagctgtccagctgctgcttctggcctgcctggtgtgggatgtgggggccaggacagctcagctcaggaaggccaatgaccagagtggccgatgccagtataccttcagtgtggccagtcccaatgaatccagctgcccagagcagagccaggccatgtcagtcatccataacttacagagagacagcagcacccaacgcttagacctggaggccaccaaagctcgactcagctccctggagagcctcctccaccaattgaccttggaccaggctgccaggccccaggagacccaggaggggctgcagagggagctgggcaccctgaggcgggagcgggaccagctggaaacccaaaccagagagttggagactgcctacagcaacctcctccgagacaagtcagttctggaggaagagaagaagcgactaaggcaagaaaatgagaatctggccaggaggttggaaagcagcagccaggaggtagcaaggctgagaaggggccagtgtccccagacccgagacactgctcgggctgtgccaccaggctccagagaagtttctacgtggaatttggacactttggccttccaggaactgaagtccgagctaactgaagttcctgcttcccgaattttgaaggagagcccatctggctatctcaggagtggagagggagacaccggatgtggagaactagtttgggtaggagagcctctcacgctgagaacagcagaaacaattactggcaagtatggtgtgtggatgcgagaccccaagcccacctacccctacacccaggagaccacgtggagaatcgacacagttggcacggatgtccgccaggtttttgagtatgacctcatcagccagtttatgcagggctacccttctaaggttcacatactgcctaggccactggaaagcacgggtgctgtggtgtactcggggagcctctatttccagggcgctgagtccagaactgtcataagatatgagctgaataccgagacagtgaaggctgagaaggaaatccctggagctggctaccacggacagttcccgtattcttggggtggctacacggacattgacttggctgtggatgaagcaggcctctgggtcatttacagcaccgatgaggccaaaggtgccattgtcctctccaaactgaacccagagaatctggaactcgaacaaacctgggagacaaacatccgtaagcagtcagtcgccaatgccttcatcatctgtggcaccttgtacaccgtcagcagctacacctcagcagatgctaccgtcaactttgcttatgacacaggcacaggtatcagcaagaccctgaccatcccattcaagaaccgctataagtacagcagcatgattgactacaaccccctggagaagaagctctttgcctgggacaacttgaacatggtcacttatgacatcaagctctccaagatgtgaaaagcctccaagctgtacaggcaatggcagaaggagatgctcagggctcctggggggagcaggctgaagggagagccagccagccagggcccaggcagctttgactgctttccaagttttcattaatccagaaggatgaacatggtcaccatctaactattcaggaattgtagtctgagggcgtagacaatttcatataataaatatcctttatcttctgtcagcatttatgggatgtttaatgacatagttcaagttttcttgtgatttggggcaaaagctgtaaggcataatagtttcttcctgaaaaccattgctcttgcatgttacatggttaccacaagccacaataaaaagcataacttctaaaggaagcagaatagctcctctggccagcatcgaatataagtaagatgcatttactacagttggcttctaatgcttcagatagaatacagttgggtctcacataaccctttacattgtgaaataaaattttcttaccc

SEQ ID NO: 19047 - DNA, 2042 bp, Homo sapiens
  source 1..2042: mol_type = unassigned DNA
gaagcctcaccaagcctctgcaatgaggttcttctgtgcacgttgctgcagctttgggcctgagatgccagctgtccagctgctgcttctggcctgcctggtgtgggatgtgggggccaggacagctcagctcaggaaggccaatgaccagagtggccgatgccagtataccttcagtgtggccagtcccaatgaatccagctgcccagagcagagccaggccatgtcagtcatccataacttacagagagacagcagcacccaacgcttagacctggaggccaccaaagctcgactcagctccctggagagcctcctccaccaattgaccttggaccaggctgccaggccccaggagacccaggaggggctgcagagggagctgggcaccctgaggcgggagcgggaccagctggaaacccaaaccagagagttggagactgcctacagcaacctcctccgagacaagtcagttctggaggaagagaagaagcgactaaggcaagaaaatgagaatctggccaggaggttggaaagcagcagccaggaggtagcaaggctgagaaggggccagtgtccccagacccgagacactgctcgggctgtgccaccaggctccagagaagtttctacgtggaatttggacactttggccttccaggaactgaagtccgagctaactgaagttcctgcttcccgaattttgaaggagagcccatctggctatctcaggagtggagagggagacaccggatgtggagaactagtttgggtaggagagcctctcacgctgagaacagcagaaacaattactggcaagtatggtgtgtggatgcgagaccccaagcccacctacccctacacccaggagaccacgtggagaatcgacacagttggcacggatgtccgccaggtttttgagtatgacctcatcagccagtttatgcagggctacccttctaaggttcacatactgcctaggccactggaaagcacgggtgctgtggtgtactcggggagcctctatttcagggcgctgagtccagaactgtcataagatatgagctgaataccgagacagtgaaggctgagaaggaaatccctggagctggctaccacggacagttcccgtattcttggggtggctacacggacattgacttggctgtggatgaagcaggcctctgggtcatttacagcaccgatgaggccaaaggtgccattgtcctctccaaactgaacccagagaatctggaactcgaacaaacctgggagacaaacatccgtaagcagtcagtcgccaatgccttcatcatctgtggcaccttgtacaccgtcagcagctacacctcagcagatgctaccgtcaactttgcttatgacacaggcacaggtatcagcaagaccctgaccatcccattcaagaaccgctataagtacagcagcatgattgactacaaccccctggagaagaagctctttgcctgggacaacttgaacatggtcacttatgacatcaagctctccaagatgtgaaaagcctccaagctgtacaggcaatggcagaaggagatgctcagggctcctggggggagcaggctgaagggagagccagccagccagggcccaggcagctttgactgctttccaagttttcattaatccagaaggatgaacatggtcaccatctaactattcaggaattgtagtctgagggcgtagacaatttcatataataaatatcctttatcttctgtcagcatttatgggatgtttaatgacatagttcaagttttcttgtgatttggggcaaaagctgtaaggcataatagtttcttcctgaaaaccattgctcttgcatgttacatggttaccacaagccacaataaaaagcataacttctaaaggaagcagaatagctcctctggccagcatcgaatataagtaagatgcatttactacagttggcttctaatgcttcagatagaatacagttgggtctcacataaccctttacattgtgaaataaaattttcttaccc

SEQ ID NO: 19048 - DNA, 5491 bp, Homo sapiens
  source 1..5491: mol_type = unassigned DNA
agaacgagttccggtctggccgaggcttgtctcctaaaaatagccccggtgtggggatccgtgcgcggatgtcccggcgagtcccgggctgaaagaggcggctccgggcggcgcgaagcgctggtggcgggcccgggctgcggcgtgtgcgcgcccgccagctgctccggagatacgatcttgtagaaaatttcagctgtagcccttggactagaagctgaaataacagaagctgtgtacgatgcattagggtattgaagaaaattaacttttgaattaaatatttggaatataaggaaataaggaaagttgactgaaaatggggcggaagaaaatacaaatcacacgcataatggatgaaaggaaccgacaggtcacttttacaaagagaaagtttggattaatgaagaaagcctatgaacttagtgtgctctgtgactgtgaaatagcactcatcattttcaacagctctaacaaactgtttcaatatgctagcactgatatggacaaagttcttctcaagtatacagaatataatgaacctcatgaaagcagaaccaactcggatattgttgagactttaagaaagaaaggccttaatggttgtgagagccctgatgctgacgattactttgagcacagtccactctcggaggacagattcagcaaactaaatgaagatagtgattttattttcaaacgaggccctcctggtctgccacctcagaacttttcaatgtctgtcacagttccagtgaccagccccaatgctttgtcctacactaacccagggagttcactggtgtccccatctttggcagccagctcaacgttaacagattcaagcatgctctctccacctcaaaccacattacatagaaatgtgtctcctggagctcctcagagaccaccaagtactggcaatgcaggtgggatgttgagcactacagacctcacagtgccaaatggagctggaagcagtccagtggggaatggatttgtaaactcaagagcttctccaaatttgattggagctactggtgcaaatagcttaggcaaagtcatgcctacaaagtctccccctccaccaggtggtggtaatcttggaatgaacagtaggaaaccagatcttcgagttgtcatccccccttcaagcaagggcatgatgcctccactatatttgaagagacaactaaatacgaacaatacccagaggatcagtagttctcaagccactcaacctcttgctaccccagtcgtgtctgtgacaaccccaagcttgcctccgcaaggacttgtgtactcagcaatgccgactgcctacaacactgattattcactgaccagcgctgacctgtcagcccttcaaggcttcaactcgccaggaatgctgtcgctgggacaggtgtcggcctggcagcagcaccacctaggacaagcagccctcagctctcttgttgctggagggcagttatctcagggttccaatttatccattaataccaaccaaaacatcagcatcaagtccgaaccgatttcacctcctcgggatcgtatgaccccatcgggcttccagcagcagcagcagcagcagcagcagcagcagccgccgccaccaccgcagccccagccacaacccccgcagccccagccccgacaggaaatggggcgctcccctgtggacagtctgagcagctctagtagctcctatgatggcagtgatcgggaggatccacggggcgacttccattctccaattgtgcttggccgacccccaaacactgaggacagagaaagcccttctgtaaagcgaatgaggatggacgcgtgggtgacctaaggcttccaagctgatgtttgtacttttgtgttactgcagtgacctgccctacatatctaaatcggtaaataaggacatgagttaaatatatttatatgtacatacatatatatatccctttacatatatatgtatgtgggtgtgagtgtgtatgtgtgggtgtgtgttacatacacagaatcaggcacttacctgcaaactccttgtaggtctgcagatgtgtgtcccatggcagacaaagcaccctgtaggcacagacaagtctggcacttccttggactacttgtttcgtaaagataaccagtttttgcagagaaacgtgtacccatatataattctcccacactagcttgcagaaacctagagggccccctacttgttttatttaactgtgcagtgactgtagttacttaagagaaaatgctttgtagaacagagcagtagaaaagcaggaaccaagaaagcaatactgtacataaaatgtcatttatattttccaacctggcatgggtgtctgttgcaaaggggtgcatgggaaagggctgttgatattaaaaacaaacaaaacaaaaaagccccacacataactgttttgcacgtgcaaaaatgtattgggtcaagaagtgatctttagctaataaagaaagagaatagaaaacacgcatgagatattcagaaaatactagcctagaaatatagagcattaacaaagtaaaattaatatattaagttataattggaatatgtcagaagtttctttttacattcatatcttaaaaattaaagaaactgattttagctcatgtatattttatatgaaagaaaacacccttatgaattgatgactatatataaaattatattcactacttttgaacacattctgctatgaattatttatataagccaaagctatatgttgtaacttttttttagagaatagctttatcttggtttaactctttagttttattttaagaggggaaaacaaaaatatcttgcaagcagaaccttggaaaaaaaaagccatgaacacttattctaaatgtaaattaaaagttgagccaaactctttgtgtatatagcatcttaaatatattatcacctttgatgtaagtacctatgtattgtatggtcaccagattaaaaagtatatttttgtggattgccgccaatctggggggaaaaggcgaggtcctttattaagtattcactgtttaatatttactattttgttaaatatactgtactttggattttaattattagcccagttttttcagaggattgtataaaggggtttctcccctcactggtggtgaatgtgtgatgttacattgtaatctttgtgctgtatgggttgagcatcattatatattttgtatgtgtacataaatagcaaagtggcaaaaaaaattggtgttaagttcatcctgcataagtataaaatgtgttgtaacagattttgtaaggcattatttaaaacttgccttttgtgaggaaaaaatgtagtagaaaaagctgacctaatttaattaatattagagaaaatggcaaaatagtagatgagcacaaaggttttataagtggtaaatgattaggggaaaataatcatggggaaagggatcttttttccttgaccctctgaaaacagaacgatgcagctggttacaaaatcctaccgttatcagctcttctgcacattgcagtgatgctttggtatgcggggagaaacactcttagggtgctggtccttggcatgactcttgccattctaattggaattagtgccaccctcagcttggattttgaacaaggccttattctttcaggaagacaactaatggatgatagcaagttcatccacttactgggcttgtgccatgagcaaaattcaaagtcctgtatatctttcattgtagatttttaaatactccttttcctaaaaaactcaagggtttaaaaattgctattttatattttaaatgatattgagcagctacctacaatttctatgtacattttgttcccccccccccaccccccccccaaattacgttccttttgacattttcctcatctgctgtttgtgacaagtcatcagccagatttcctgactgacacataggtatgatcagtgcaggagagacctgcgcaccacaggctgcaaactggaggttctgttctcatggcagtttgggcagtaacttttgagagaggccaaaaaaaggaggatgacatgctgtctcctctcttcagtatagacattaggctcttattcagaaaggatttttctttaaaaatgtacttactttactgaactacttacaggcacatttcttcataaggccacacctaatccaaacaagacagtctcccaacactgaagttccaaaataatccttaccactttgtaaaccatttatagctttgaaagtgttaagtgattccttcgttattatttatgcatgttcatgaacttctgctgtacattggaataggagttaacacattcacatttactgtctattttcttgtgtgccttatgagatggcttttctgactgtatctcaatagtctttctttctatgcaggtttataatcagtacaactactgttttctaaaatactactactcaaggctcggagtttgtatttaaattacactgaccaagtaacaatgtattccatttcaggaactgaatatttgactgttaacctttttcccatacgtccagtgtggcatggagcatatggacttgacagacatctctcacccagacgcccacgtgtgaacacacccacatccacatctctgggtggaaaccagcctagagaggggacgacgctaatggtgttgctttagaaccgtcttttcttacccttttagactcgtgttttgtatgagacaccattgcaagaaaattttatccctccagaagtattttattactaaagaacaaaagcaaaaaaagcttaaattgcactggttaaagtacagtttccaacagctgtccttcctcagtactctaatggccactccaccgcgagtggaagtcactgttgtgtgtacacaggtggtcccaatcaaaactccatcttttgagcccaattatgtccattttgttatagactaaatcaggggtttgttctacaagaacaatacatgttttaccctttcctttaactagaaggataactagtaatgcatcaacataatttctgtattaaccatcatgcgcacaagaaatacatagtaaataaggaagctgaaaactcctggcattggatcttaagctagatgattagaatgtgaaaaagattttacaaatgtaaaacttctatttctctgtagaaactttcttcactttgctgtgcaagaagacactgctttgctatatttaaaatggcttttttaaaagagatttatgtatttggtaaatgtttgtagtcaacagttcacacaagaagctgtacacggtttgatcatgtaaaaccgtttggcggcacaagctggactttgttgccatccttgagatgaaccttttaagaaaaataagttaatctcaatttttccctgaatgtgttgtttttcttcattatacaataaatataatagtgaactttttatcaaatggtgaagacaatgct

SEQ ID NO: 19049 - DNA, 5824 bp, Homo sapiens
  source 1..5824: mol_type = unassigned DNA
atagtccgcccccacgtccttgtggaatagcgcccgcttccaagcaccgtgactctctttgccctacccttgtctttcccattccaattactctagaacccaccgagaggataattcagtcctgaaaagaaactgatggggagaagcgaggaagggaacccaggagggaggggaggcagggctgcggagggacaccgaggcggcggaggtagtgcgcacgcgcagcacagaacgagttccggtctggccgaggcttgtctcctaaaaatagccccggtgtggggatccgtgcgcggatgtcccggcgagtcccgggctgaaagaggcggctccgggcggcgcgaagcgctggtggcgggcccgggctgcggcgtgtgcgcgcccgccagctgctccggagatacggaattgcattttgtgaaaaaagaacaagaattttctgcaaggatcatatctaagtgcactttttgctgatacttcatttctaatcttgtagaaaatttcagctgtagcccttggactagaagctgaaataacagaagctgtgtacgatgcattagggtattgaagaaaattaacttttgaattaaatatttggaatataaggaaataaggaaagttgactgaaaatggggcggaagaaaatacaaatcacacgcataatggatgaaaggaaccgacaggtcacttttacaaagagaaagtttggattaatgaagaaagcctatgaacttagtgtgctctgtgactgtgaaatagcactcatcattttcaacagctctaacaaactgtttcaatatgctagcactgatatggacaaagttcttctcaagtatacagaatataatgaacctcatgaaagcagaaccaactcggatattgttgaggctctgaacaagaaggaacacagagggtgcgacagcccagaccctgatacttcatatgtgctaactccacatacagaagaaaaatataaaaaaattaatgaggaatttgataatatgatgcggaatcataaaatcgcacctggtctgccacctcagaacttttcaatgtctgtcacagttccagtgaccagccccaatgctttgtcctacactaacccagggagttcactggtgtccccatctttggcagccagctcaacgttaacagattcaagcatgctctctccacctcaaaccacattacatagaaatgtgtctcctggagctcctcagagaccaccaagtactggcaatgcaggtgggatgttgagcactacagacctcacagtgccaaatggagctggaagcagtccagtggggaatggatttgtaaactcaagagcttctccaaatttgattggagctactggtgcaaatagcttaggcaaagtcatgcctacaaagtctccccctccaccaggtggtggtaatcttggaatgaacagtaggaaaccagatcttcgagttgtcatccccccttcaagcaagggcatgatgcctccactaaatacccagaggatcagtagttctcaagccactcaacctcttgctaccccagtcgtgtctgtgacaaccccaagcttgcctccgcaaggacttgtgtactcagcaatgccgactgcctacaacactgattattcactgaccagcgctgacctgtcagcccttcaaggcttcaactcgccaggaatgctgtcgctgggacaggtgtcggcctggcagcagcaccacctaggacaagcagccctcagctctcttgttgctggagggcagttatctcagggttccaatttatccattaataccaaccaaaacatcagcatcaagtccgaaccgatttcacctcctcgggatcgtatgaccccatcgggcttccagcagcagcagcagcagcagcagcagcagcagccgccgccaccaccgcagccccagccacaacccccgcagccccagccccgacaggaaatggggcgctcccctgtggacagtctgagcagctctagtagctcctatgatggcagtgatcgggaggatccacggggcgacttccattctccaattgtgcttggccgacccccaaacactgaggacagagaaagcccttctgtaaagcgaatgaggatggacgcgtgggtgacctaaggcttccaagctgatgtttgtacttttgtgttactgcagtgacctgccctacatatctaaatcggtaaataaggacatgagttaaatatatttatatgtacatacatatatatatccctttacatatatatgtatgtgggtgtgagtgtgtatgtgtgggtgtgtgttacatacacagaatcaggcacttacctgcaaactccttgtaggtctgcagatgtgtgtcccatggcagacaaagcaccctgtaggcacagacaagtctggcacttccttggactacttgtttcgtaaagataaccagtttttgcagagaaacgtgtacccatatataattctcccacactagcttgcagaaacctagagggccccctacttgttttatttaactgtgcagtgactgtagttacttaagagaaaatgctttgtagaacagagcagtagaaaagcaggaaccaagaaagcaatactgtacataaaatgtcatttatattttccaacctggcatgggtgtctgttgcaaaggggtgcatgggaaagggctgttgatattaaaaacaaacaaaacaaaaaagccccacacataactgttttgcacgtgcaaaaatgtattgggtcaagaagtgatctttagctaataaagaaagagaatagaaaacacgcatgagatattcagaaaatactagcctagaaatatagagcattaacaaagtaaaattaatatattaagttataattggaatatgtcagaagtttctttttacattcatatcttaaaaattaaagaaactgattttagctcatgtatattttatatgaaagaaaacacccttatgaattgatgactatatataaaattatattcactacttttgaacacattctgctatgaattatttatataagccaaagctatatgttgtaacttttttttagagaatagctttatcttggtttaactctttagttttattttaagaggggaaaacaaaaatatcttgcaagcagaaccttggaaaaaaaaagccatgaacacttattctaaatgtaaattaaaagttgagccaaactctttgtgtatatagcatcttaaatatattatcacctttgatgtaagtacctatgtattgtatggtcaccagattaaaaagtatatttttgtggattgccgccaatctggggggaaaaggcgaggtcctttattaagtattcactgtttaatatttactattttgttaaatatactgtactttggattttaattattagcccagttttttcagaggattgtataaaggggtttctcccctcactggtggtgaatgtgtgatgttacattgtaatctttgtgctgtatgggttgagcatcattatatattttgtatgtgtacataaatagcaaagtggcaaaaaaaattggtgttaagttcatcctgcataagtataaaatgtgttgtaacagattttgtaaggcattatttaaaacttgccttttgtgaggaaaaaatgtagtagaaaaagctgacctaatttaattaatattagagaaaatggcaaaatagtagatgagcacaaaggttttataagtggtaaatgattaggggaaaataatcatggggaaagggatcttttttccttgaccctctgaaaacagaacgatgcagctggttacaaaatcctaccgttatcagctcttctgcacattgcagtgatgctttggtatgcggggagaaacactcttagggtgctggtccttggcatgactcttgccattctaattggaattagtgccaccctcagcttggattttgaacaaggccttattctttcaggaagacaactaatggatgatagcaagttcatccacttactgggcttgtgccatgagcaaaattcaaagtcctgtatatctttcattgtagatttttaaatactccttttcctaaaaaactcaagggtttaaaaattgctattttatattttaaatgatattgagcagctacctacaatttctatgtacattttgttcccccccccccaccccccccccaaattacgttccttttgacattttcctcatctgctgtttgtgacaagtcatcagccagatttcctgactgacacataggtatgatcagtgcaggagagacctgcgcaccacaggctgcaaactggaggttctgttctcatggcagtttgggcagtaacttttgagagaggccaaaaaaaggaggatgacatgctgtctcctctcttcagtatagacattaggctcttattcagaaaggatttttctttaaaaatgtacttactttactgaactacttacaggcacatttcttcataaggccacacctaatccaaacaagacagtctcccaacactgaagttccaaaataatccttaccactttgtaaaccatttatagctttgaaagtgttaagtgattccttcgttattatttatgcatgttcatgaacttctgctgtacattggaataggagttaacacattcacatttactgtctattttcttgtgtgccttatgagatggcttttctgactgtatctcaatagtctttctttctatgcaggtttataatcagtacaactactgttttctaaaatactactactcaaggctcggagtttgtatttaaattacactgaccaagtaacaatgtattccatttcaggaactgaatatttgactgttaacctttttcccatacgtccagtgtggcatggagcatatggacttgacagacatctctcacccagacgcccacgtgtgaacacacccacatccacatctctgggtggaaaccagcctagagaggggacgacgctaatggtgttgctttagaaccgtcttttcttacccttttagactcgtgttttgtatgagacaccattgcaagaaaattttatccctccagaagtattttattactaaagaacaaaagcaaaaaaagcttaaattgcactggttaaagtacagtttccaacagctgtccttcctcagtactctaatggccactccaccgcgagtggaagtcactgttgtgtgtacacaggtggtcccaatcaaaactccatcttttgagcccaattatgtccattttgttatagactaaatcaggggtttgttctacaagaacaatacatgttttaccctttcctttaactagaaggataactagtaatgcatcaacataatttctgtattaaccatcatgcgcacaagaaatacatagtaaataaggaagctgaaaactcctggcattggatcttaagctagatgattagaatgtgaaaaagattttacaaatgtaaaacttctatttctctgtagaaactttcttcactttgctgtgcaagaagacactgctttgctatatttaaaatggcttttttaaaagagatttatgtatttggtaaatgtttgtagtcaacagttcacacaagaagctgtacacggtttgatcatgtaaaaccgtttggcggcacaagctggactttgttgccatccttgagatgaaccttttaagaaaaataagttaatctcaatttttccctgaatgtgttgtttttcttcattatacaataaatataatagtgaactttttatcaaatggtgaagacaatgctaaaggttgttgtaaactgtttgtctcccgcactcactccagtaa

SEQ ID NO: 19050 - DNA, 5182 bp, Homo sapiens
  source 1..5182: mol_type = unassigned DNA
gcgcggatgtcccggcgagtcccgggctgaaagaggcggctccgggcggcgcgaagcgctggtggcgggcccgggctgcggcgtgtgcgcgcccgccagctgctccggagatacgatcttgtagaaaatttcagctgtagcccttggactagaagctgaaataacagaagctgtgtacgatgcattagggtattgaagaaaattaacttttgaattaaatatttggaatataaggaaataaggaaagttgactgaaaatggggcggaagaaaatacaaatcacacgcataatggatgaaaggaaccgacagactttaagaaagaaaggccttaatggttgtgagagccctgatgctgacgattactttgagcacagtccactctcggaggacagattcagcaaactaaatgaagatagtgattttattttcaaacgaggccctcctggtctgccacctcagaacttttcaatgtctgtcacagttccagtgaccagccccaatgctttgtcctacactaacccagggagttcactggtgtccccatctttggcagccagctcaacgttaacagattcaagcatgctctctccacctcaaaccacattacatagaaatgtgtctcctggagctcctcagagaccaccaagtactggcaatgcaggtgggatgttgagcactacagacctcacagtgccaaatggagctggaagcagtccagtggggaatggatttgtaaactcaagagcttctccaaatttgattggagctactggtgcaaatagcttaggcaaagtcatgcctacaaagtctccccctccaccaggtggtggtaatcttggaatgaacagtaggaaaccagatcttcgagttgtcatccccccttcaagcaagggcatgatgcctccactaaatacccagaggatcagtagttctcaagccactcaacctcttgctaccccagtcgtgtctgtgacaaccccaagcttgcctccgcaaggacttgtgtactcagcaatgccgactgcctacaacactgattattcactgaccagcgctgacctgtcagcccttcaaggcttcaactcgccaggaatgctgtcgctgggacaggtgtcggcctggcagcagcaccacctaggacaagcagccctcagctctcttgttgctggagggcagttatctcagggttccaatttatccattaataccaaccaaaacatcagcatcaagtccgaaccgatttcacctcctcgggatcgtatgaccccatcgggcttccagcagcagcagcagcagcagcagcagcagcagccgccgccaccaccgcagccccagccacaacccccgcagccccagccccgacaggaaatggggcgctcccctgtggacagtctgagcagctctagtagctcctatgatggcagtgatcgggaggatccacggggcgacttccattctccaattgtgcttggccgacccccaaacactgaggacagagaaagcccttctgtaaagcgaatgaggatggacgcgtgggtgacctaaggcttccaagctgatgtttgtacttttgtgttactgcagtgacctgccctacatatctaaatcggtaaataaggacatgagttaaatatatttatatgtacatacatatatatatccctttacatatatatgtatgtgggtgtgagtgtgtatgtgtgggtgtgtgttacatacacagaatcaggcacttacctgcaaactccttgtaggtctgcagatgtgtgtcccatggcagacaaagcaccctgtaggcacagacaagtctggcacttccttggactacttgtttcgtaaagataaccagtttttgcagagaaacgtgtacccatatataattctcccacactagcttgcagaaacctagagggccccctacttgttttatttaactgtgcagtgactgtagttacttaagagaaaatgctttgtagaacagagcagtagaaaagcaggaaccaagaaagcaatactgtacataaaatgtcatttatattttccaacctggcatgggtgtctgttgcaaaggggtgcatgggaaagggctgttgatattaaaaacaaacaaaacaaaaaagccccacacataactgttttgcacgtgcaaaaatgtattgggtcaagaagtgatctttagctaataaagaaagagaatagaaaacacgcatgagatattcagaaaatactagcctagaaatatagagcattaacaaagtaaaattaatatattaagttataattggaatatgtcagaagtttctttttacattcatatcttaaaaattaaagaaactgattttagctcatgtatattttatatgaaagaaaacacccttatgaattgatgactatatataaaattatattcactacttttgaacacattctgctatgaattatttatataagccaaagctatatgttgtaacttttttttagagaatagctttatcttggtttaactctttagttttattttaagaggggaaaacaaaaatatcttgcaagcagaaccttggaaaaaaaaagccatgaacacttattctaaatgtaaattaaaagttgagccaaactctttgtgtatatagcatcttaaatatattatcacctttgatgtaagtacctatgtattgtatggtcaccagattaaaaagtatatttttgtggattgccgccaatctggggggaaaaggcgaggtcctttattaagtattcactgtttaatatttactattttgttaaatatactgtactttggattttaattattagcccagttttttcagaggattgtataaaggggtttctcccctcactggtggtgaatgtgtgatgttacattgtaatctttgtgctgtatgggttgagcatcattatatattttgtatgtgtacataaatagcaaagtggcaaaaaaaattggtgttaagttcatcctgcataagtataaaatgtgttgtaacagattttgtaaggcattatttaaaacttgccttttgtgaggaaaaaatgtagtagaaaaagctgacctaatttaattaatattagagaaaatggcaaaatagtagatgagcacaaaggttttataagtggtaaatgattaggggaaaataatcatggggaaagggatcttttttccttgaccctctgaaaacagaacgatgcagctggttacaaaatcctaccgttatcagctcttctgcacattgcagtgatgctttggtatgcggggagaaacactcttagggtgctggtccttggcatgactcttgccattctaattggaattagtgccaccctcagcttggattttgaacaaggccttattctttcaggaagacaactaatggatgatagcaagttcatccacttactgggcttgtgccatgagcaaaattcaaagtcctgtatatctttcattgtagatttttaaatactccttttcctaaaaaactcaagggtttaaaaattgctattttatattttaaatgatattgagcagctacctacaatttctatgtacattttgttcccccccccccaccccccccccaaattacgttccttttgacattttcctcatctgctgtttgtgacaagtcatcagccagatttcctgactgacacataggtatgatcagtgcaggagagacctgcgcaccacaggctgcaaactggaggttctgttctcatggcagtttgggcagtaacttttgagagaggccaaaaaaaggaggatgacatgctgtctcctctcttcagtatagacattaggctcttattcagaaaggatttttctttaaaaatgtacttactttactgaactacttacaggcacatttcttcataaggccacacctaatccaaacaagacagtctcccaacactgaagttccaaaataatccttaccactttgtaaaccatttatagctttgaaagtgttaagtgattccttcgttattatttatgcatgttcatgaacttctgctgtacattggaataggagttaacacattcacatttactgtctattttcttgtgtgccttatgagatggcttttctgactgtatctcaatagtctttctttctatgcaggtttataatcagtacaactactgttttctaaaatactactactcaaggctcggagtttgtatttaaattacactgaccaagtaacaatgtattccatttcaggaactgaatatttgactgttaacctttttcccatacgtccagtgtggcatggagcatatggacttgacagacatctctcacccagacgcccacgtgtgaacacacccacatccacatctctgggtggaaaccagcctagagaggggacgacgctaatggtgttgctttagaaccgtcttttcttacccttttagactcgtgttttgtatgagacaccattgcaagaaaattttatccctccagaagtattttattactaaagaacaaaagcaaaaaaagcttaaattgcactggttaaagtacagtttccaacagctgtccttcctcagtactctaatggccactccaccgcgagtggaagtcactgttgtgtgtacacaggtggtcccaatcaaaactccatcttttgagcccaattatgtccattttgttatagactaaatcaggggtttgttctacaagaacaatacatgttttaccctttcctttaactagaaggataactagtaatgcatcaacataatttctgtattaaccatcatgcgcacaagaaatacatagtaaataaggaagctgaaaactcctggcattggatcttaagctagatgattagaatgtgaaaaagattttacaaatgtaaaacttctatttctctgtagaaactttcttcactttgctgtgcaagaagacactgctttgctatatttaaaatggcttttttaaaagagatttatgtatttggtaaatgtttgtagtcaacagttcacacaagaagctgtacacggtttgatcatgtaaaaccgtttggcggcacaagctggactttgttgccatccttgagatgaaccttttaagaaaaataagttaatctcaatttttccctgaatgtgttgtttttcttcattatacaataaatataatagtgaactttttatcaaa

SEQ ID NO: 19051 - DNA, 5365 bp, Homo sapiens
  source 1..5365: mol_type = unassigned DNA
gccatgagtgccttggcaaggctttaaatactttgagggctctcaccagaggcctaattgctaccctttggagctcagatcttgtagaaaatttcagctgtagcccttggactagaagctgaaataacagaagctgtgtacgatgcattagggtattgaagaaaattaacttttgaattaaatatttggaatataaggaaataaggaaagttgactgaaaatggggcggaagaaaatacaaatcacacgcataatggatgaaaggaaccgacaggtcacttttacaaagagaaagtttggattaatgaagaaagcctatgaacttagtgtgctctgtgactgtgaaatagcactcatcattttcaacagctctaacaaactgtttcaatatgctagcactgatatggacaaagttcttctcaagtatacagaatataatgaacctcatgaaagcagaaccaactcggatattgttgagactttaagaaagaaaggccttaatggttgtgagagccctgatgctgacgattactttgagcacagtccactctcggaggacagattcagcaaactaaatgaagatagtgattttattttcaaacgaggccctcctggtctgccacctcagaacttttcaatgtctgtcacagttccagtgaccagccccaatgctttgtcctacactaacccagggagttcactggtgtccccatctttggcagccagctcaacgttaacagattcaagcatgctctctccacctcaaaccacattacatagaaatgtgtctcctggagctcctcagagaccaccaagtactggcaatgcaggtgggatgttgagcactacagacctcacagtgccaaatggagctggaagcagtccagtggggaatggatttgtaaactcaagagcttctccaaatttgattggagctactggtgcaaatagcttaggcaaagtcatgcctacaaagtctccccctccaccaggtggtggtaatcttggaatgaacagtaggaaaccagatcttcgagttgtcatccccccttcaagcaagggcatgatgcctccactaaatacccagaggatcagtagttctcaagccactcaacctcttgctaccccagtcgtgtctgtgacaaccccaagcttgcctccgcaaggacttgtgtactcagcaatgccgactgcctacaacactgattattcactgaccagcgctgacctgtcagcccttcaaggcttcaactcgccaggaatgctgtcgctgggacaggtgtcggcctggcagcagcaccacctaggacaagcagccctcagctctcttgttgctggagggcagttatctcagggttccaatttatccattaataccaaccaaaacatcagcatcaagtccgaaccgatttcacctcctcgggatcgtatgaccccatcgggcttccagcagcagcagcagcagcagcagcagcagcagccgccgccaccaccgcagccccagccacaacccccgcagccccagccccgacaggaaatggggcgctcccctgtggacagtctgagcagctctagtagctcctatgatggcagtgatcgggaggatccacggggcgacttccattctccaattgtgcttggccgacccccaaacactgaggacagagaaagcccttctgtaaagcgaatgaggatggacgcgtgggtgacctaaggcttccaagctgatgtttgtacttttgtgttactgcagtgacctgccctacatatctaaatcggtaaataaggacatgagttaaatatatttatatgtacatacatatatatatccctttacatatatatgtatgtgggtgtgagtgtgtatgtgtgggtgtgtgttacatacacagaatcaggcacttacctgcaaactccttgtaggtctgcagatgtgtgtcccatggcagacaaagcaccctgtaggcacagacaagtctggcacttccttggactacttgtttcgtaaagataaccagtttttgcagagaaacgtgtacccatatataattctcccacactagcttgcagaaacctagagggccccctacttgttttatttaactgtgcagtgactgtagttacttaagagaaaatgctttgtagaacagagcagtagaaaagcaggaaccaagaaagcaatactgtacataaaatgtcatttatattttccaacctggcatgggtgtctgttgcaaaggggtgcatgggaaagggctgttgatattaaaaacaaacaaaacaaaaaagccccacacataactgttttgcacgtgcaaaaatgtattgggtcaagaagtgatctttagctaataaagaaagagaatagaaaacacgcatgagatattcagaaaatactagcctagaaatatagagcattaacaaagtaaaattaatatattaagttataattggaatatgtcagaagtttctttttacattcatatcttaaaaattaaagaaactgattttagctcatgtatattttatatgaaagaaaacacccttatgaattgatgactatatataaaattatattcactacttttgaacacattctgctatgaattatttatataagccaaagctatatgttgtaacttttttttagagaatagctttatcttggtttaactctttagttttattttaagaggggaaaacaaaaatatcttgcaagcagaaccttggaaaaaaaaagccatgaacacttattctaaatgtaaattaaaagttgagccaaactctttgtgtatatagcatcttaaatatattatcacctttgatgtaagtacctatgtattgtatggtcaccagattaaaaagtatatttttgtggattgccgccaatctggggggaaaaggcgaggtcctttattaagtattcactgtttaatatttactattttgttaaatatactgtactttggattttaattattagcccagttttttcagaggattgtataaaggggtttctcccctcactggtggtgaatgtgtgatgttacattgtaatctttgtgctgtatgggttgagcatcattatatattttgtatgtgtacataaatagcaaagtggcaaaaaaaattggtgttaagttcatcctgcataagtataaaatgtgttgtaacagattttgtaaggcattatttaaaacttgccttttgtgaggaaaaaatgtagtagaaaaagctgacctaatttaattaatattagagaaaatggcaaaatagtagatgagcacaaaggttttataagtggtaaatgattaggggaaaataatcatggggaaagggatcttttttccttgaccctctgaaaacagaacgatgcagctggttacaaaatcctaccgttatcagctcttctgcacattgcagtgatgctttggtatgcggggagaaacactcttagggtgctggtccttggcatgactcttgccattctaattggaattagtgccaccctcagcttggattttgaacaaggccttattctttcaggaagacaactaatggatgatagcaagttcatccacttactgggcttgtgccatgagcaaaattcaaagtcctgtatatctttcattgtagatttttaaatactccttttcctaaaaaactcaagggtttaaaaattgctattttatattttaaatgatattgagcagctacctacaatttctatgtacattttgttcccccccccccaccccccccccaaattacgttccttttgacattttcctcatctgctgtttgtgacaagtcatcagccagatttcctgactgacacataggtatgatcagtgcaggagagacctgcgcaccacaggctgcaaactggaggttctgttctcatggcagtttgggcagtaacttttgagagaggccaaaaaaaggaggatgacatgctgtctcctctcttcagtatagacattaggctcttattcagaaaggatttttctttaaaaatgtacttactttactgaactacttacaggcacatttcttcataaggccacacctaatccaaacaagacagtctcccaacactgaagttccaaaataatccttaccactttgtaaaccatttatagctttgaaagtgttaagtgattccttcgttattatttatgcatgttcatgaacttctgctgtacattggaataggagttaacacattcacatttactgtctattttcttgtgtgccttatgagatggcttttctgactgtatctcaatagtctttctttctatgcaggtttataatcagtacaactactgttttctaaaatactactactcaaggctcggagtttgtatttaaattacactgaccaagtaacaatgtattccatttcaggaactgaatatttgactgttaacctttttcccatacgtccagtgtggcatggagcatatggacttgacagacatctctcacccagacgcccacgtgtgaacacacccacatccacatctctgggtggaaaccagcctagagaggggacgacgctaatggtgttgctttagaaccgtcttttcttacccttttagactcgtgttttgtatgagacaccattgcaagaaaattttatccctccagaagtattttattactaaagaacaaaagcaaaaaaagcttaaattgcactggttaaagtacagtttccaacagctgtccttcctcagtactctaatggccactccaccgcgagtggaagtcactgttgtgtgtacacaggtggtcccaatcaaaactccatcttttgagcccaattatgtccattttgttatagactaaatcaggggtttgttctacaagaacaatacatgttttaccctttcctttaactagaaggataactagtaatgcatcaacataatttctgtattaaccatcatgcgcacaagaaatacatagtaaataaggaagctgaaaactcctggcattggatcttaagctagatgattagaatgtgaaaaagattttacaaatgtaaaacttctatttctctgtagaaactttcttcactttgctgtgcaagaagacactgctttgctatatttaaaatggcttttttaaaagagatttatgtatttggtaaatgtttgtagtcaacagttcacacaagaagctgtacacggtttgatcatgtaaaaccgtttggcggcacaagctggactttgttgccatccttgagatgaaccttttaagaaaaataagttaatctcaatttttccctgaatgtgttgtttttcttcattatacaataaatataatagtgaactttttatcaaatggtgaagacaatgct

SEQ ID NO: 19052 - DNA, 2854 bp, Homo sapiens
  source 1..2854: mol_type = unassigned DNA
ggggatccgtgcgcggatgtcccggcgagtcccgggctgaaagaggcggctccgggcggcgcgaagcgctggtggcgggcccgggctgcggcgtgtgcgcgcccgccagctgctccggagatacggaattgcattttgtgaaaaaagaacaagaattttctgcaaggatcatatctaagtgcactttttgctgatacttcatttctaatcttgtagaaaatttcagctgtagcccttggactagaagctgaaataacagaagctgtgtacgatgcattagggtattgaagaaaattaacttttgaattaaatatttggaatataaggaaataaggaaagttgactgaaaatggggcggaagaaaatacaaatcacacgcataatggatgaaaggaaccgacaggtcacttttacaaagagaaagtttggattaatgaagaaagcctatgaacttagtgtgctctgtgactgtgaaatagcactcatcattttcaacagctctaacaaactgtttcaatatgctagcactgatatggacaaagttcttctcaagtatacagaatataatgaacctcatgaaagcagaaccaactcggatattgttgagactttaagaaagaaaggccttaatggttgtgagagccctgatgctgacgattactttgagcacagtccactctcggaggacagattcagcaaactaaatgaagatagtgattttattttcaaacgaggccctcctggtctgccacctcagaacttttcaatgtctgtcacagttccagtgaccagccccaatgctttgtcctacactaacccagggagttcactggtgtccccatctttggcagccagctcaacgttaacagattcaagcatgctctctccacctcaaaccacattacatagaaatgtgtctcctggagctcctcagagaccaccaagtactggcaatgcaggtgggatgttgagcactacagacctcacagtgccaaatggagctggaagcagtccagtggggaatggatttgtaaactcaagagcttctccaaatttgattggagctactggtgcaaatagcttaggcaaagtcatgcctacaaagtctccccctccaccaggtggtggtaatcttggaatgaacagtaggaaaccagatcttcgagttgtcatccccccttcaagcaagggcatgatgcctccactaaatacccagaggatcagtagttctcaagccactcaacctcttgctaccccagtcgtgtctgtgacaaccccaagcttgcctccgcaaggacttgtgtactcagcaatgccgactgcctacaacactgattattcactgaccagcgctgacctgtcagcccttcaaggcttcaactcgccaggaatgctgtcgctgggacaggtgtcggcctggcagcagcaccacctaggacaagcagccctcagctctcttgttgctggagggcagttatctcagggttccaatttatccattaataccaaccaaaacatcagcatcaagtccgaaccgatttcacctcctcgggatcgtatgaccccatcgggcttccagcagcagcagcagcagcagcagcagcagcagccgccgccaccaccgcagccccagccacaacccccgcagccccagccccgacaggaaatggggcgctcccctgtggacagtctgagcagctctagtagctcctatgatggcagtgatcgggaggatccacggggcgacttccattctccaattgtgcttggccgacccccaaacactgaggacagagaaagcccttctgtaaagcgaatgaggatggacgcgtgggtgacctaaggcttccaagctgatgtttgtacttttgtgttactgcagtgacctgccctacatatctaaatcggtaaataaggacatgagttaaatatatttatatgtacatacatatatatatccctttacatatatatgtatgtgggtgtgagtgtgtatgtgtgggtgtgtgttacatacacagaatcaggcacttacctgcaaactccttgtaggtctgcagatgtgtgtcccatggcagacaaagcaccctgtaggcacagacaagtctggcacttccttggactacttgtttcgtaaagataaccagtttttgcagagaaacgtgtacccatatataattctcccacactagcttgcagaaacctagagggccccctacttgttttatttaactgtgcagtgactgtagttacttaagagaaaatgctttgtagaacagagcagtagaaaagcaggaaccaagaaagcaatactgtacataaaatgtcatttatattttccaacctggcatgggtgtctgttgcaaaggggtgcatgggaaagggctgttgatattaaaaacaaacaaaacaaaaaagccccacacataactgttttgcacgtgcaaaaatgtattgggtcaagaagtgatctttagctaataaagaaagagaatagaaaacacgcatgagatattcagaaaatactagcctagaaatatagagcattaacaaagtaaaattaatatattaagttataattggaatatgtcagaagtttctttttacattcatatcttaaaaattaaagaaactgattttagctcatgtatattttatatgaaagaaaacacccttatgaattgatgactatatataaaattatattcactacttttgaacacattctgctatgaattatttatataagccaaagctatatgttgtaacttttttttagagaatagctttatcttggtttaactctttagttttattttaagaggggaaaacaaaaatatcttgcaagcagaac

SEQ ID NO: 19053 - DNA, 5413 bp, Homo sapiens
  source 1..5413: mol_type = unassigned DNA
agctgctccggagatacggaattgcattttgtgaaaaaagaacaagaattttctgcaaggatcatatctaagtgcactttttgctgatacttcatttctaatcttgtagaaaatttcagctgtagcccttggactagaagctgaaataacagaagctgtgtacgatgcattagggtattgaagaaaattaacttttgaattaaatatttggaatataaggaaataaggaaagttgactgaaaatggggcggaagaaaatacaaatcacacgcataatggatgaaaggaaccgacaggtcacttttacaaagagaaagtttggattaatgaagaaagcctatgaacttagtgtgctctgtgactgtgaaatagcactcatcattttcaacagctctaacaaactgtttcaatatgctagcactgatatggacaaagttcttctcaagtatacagaatataatgaacctcatgaaagcagaaccaactcggatattgttgagactttaagaaagaaaggccttaatggttgtgagagccctgatgctgacgattactttgagcacagtccactctcggaggacagattcagcaaactaaatgaagatagtgattttattttcaaacgaggccctcctggtctgccacctcagaacttttcaatgtctgtcacagttccagtgaccagccccaatgctttgtcctacactaacccagggagttcactggtgtccccatctttggcagccagctcaacgttaacagattcaagcatgctctctccacctcaaaccacattacatagaaatgtgtctcctggagctcctcagagaccaccaagtactggcaatgcaggtgggatgttgagcactacagacctcacagtgccaaatggagctggaagcagtccagtggggaatggatttgtaaactcaagagcttctccaaatttgattggagctactggtgcaaatagcttaggcaaagtcatgcctacaaagtctccccctccaccaggtggtggtaatcttggaatgaacagtaggaaaccagatcttcgagttgtcatccccccttcaagcaagggcatgatgcctccactatcggaggaagaggaattggagttgaatacccagaggatcagtagttctcaagccactcaacctcttgctaccccagtcgtgtctgtgacaaccccaagcttgcctccgcaaggacttgtgtactcagcaatgccgactgcctacaacactgattattcactgaccagcgctgacctgtcagcccttcaaggcttcaactcgccaggaatgctgtcgctgggacaggtgtcggcctggcagcagcaccacctaggacaagcagccctcagctctcttgttgctggagggcagttatctcagggttccaatttatccattaataccaaccaaaacatcagcatcaagtccgaaccgatttcacctcctcgggatcgtatgaccccatcgggcttccagcagcagcagcagcagcagcagcagcagcagccgccgccaccaccgcagccccagccacaacccccgcagccccagccccgacaggaaatggggcgctcccctgtggacagtctgagcagctctagtagctcctatgatggcagtgatcgggaggatccacggggcgacttccattctccaattgtgcttggccgacccccaaacactgaggacagagaaagcccttctgtaaagcgaatgaggatggacgcgtgggtgacctaaggcttccaagctgatgtttgtacttttgtgttactgcagtgacctgccctacatatctaaatcggtaaataaggacatgagttaaatatatttatatgtacatacatatatatatccctttacatatatatgtatgtgggtgtgagtgtgtatgtgtgggtgtgtgttacatacacagaatcaggcacttacctgcaaactccttgtaggtctgcagatgtgtgtcccatggcagacaaagcaccctgtaggcacagacaagtctggcacttccttggactacttgtttcgtaaagataaccagtttttgcagagaaacgtgtacccatatataattctcccacactagcttgcagaaacctagagggccccctacttgttttatttaactgtgcagtgactgtagttacttaagagaaaatgctttgtagaacagagcagtagaaaagcaggaaccaagaaagcaatactgtacataaaatgtcatttatattttccaacctggcatgggtgtctgttgcaaaggggtgcatgggaaagggctgttgatattaaaaacaaacaaaacaaaaaagccccacacataactgttttgcacgtgcaaaaatgtattgggtcaagaagtgatctttagctaataaagaaagagaatagaaaacacgcatgagatattcagaaaatactagcctagaaatatagagcattaacaaagtaaaattaatatattaagttataattggaatatgtcagaagtttctttttacattcatatcttaaaaattaaagaaactgattttagctcatgtatattttatatgaaagaaaacacccttatgaattgatgactatatataaaattatattcactacttttgaacacattctgctatgaattatttatataagccaaagctatatgttgtaacttttttttagagaatagctttatcttggtttaactctttagttttattttaagaggggaaaacaaaaatatcttgcaagcagaaccttggaaaaaaaaagccatgaacacttattctaaatgtaaattaaaagttgagccaaactctttgtgtatatagcatcttaaatatattatcacctttgatgtaagtacctatgtattgtatggtcaccagattaaaaagtatatttttgtggattgccgccaatctggggggaaaaggcgaggtcctttattaagtattcactgtttaatatttactattttgttaaatatactgtactttggattttaattattagcccagttttttcagaggattgtataaaggggtttctcccctcactggtggtgaatgtgtgatgttacattgtaatctttgtgctgtatgggttgagcatcattatatattttgtatgtgtacataaatagcaaagtggcaaaaaaaattggtgttaagttcatcctgcataagtataaaatgtgttgtaacagattttgtaaggcattatttaaaacttgccttttgtgaggaaaaaatgtagtagaaaaagctgacctaatttaattaatattagagaaaatggcaaaatagtagatgagcacaaaggttttataagtggtaaatgattaggggaaaataatcatggggaaagggatcttttttccttgaccctctgaaaacagaacgatgcagctggttacaaaatcctaccgttatcagctcttctgcacattgcagtgatgctttggtatgcggggagaaacactcttagggtgctggtccttggcatgactcttgccattctaattggaattagtgccaccctcagcttggattttgaacaaggccttattctttcaggaagacaactaatggatgatagcaagttcatccacttactgggcttgtgccatgagcaaaattcaaagtcctgtatatctttcattgtagatttttaaatactccttttcctaaaaaactcaagggtttaaaaattgctattttatattttaaatgatattgagcagctacctacaatttctatgtacattttgttcccccccccccaccccccccccaaattacgttccttttgacattttcctcatctgctgtttgtgacaagtcatcagccagatttcctgactgacacataggtatgatcagtgcaggagagacctgcgcaccacaggctgcaaactggaggttctgttctcatggcagtttgggcagtaacttttgagagaggccaaaaaaaggaggatgacatgctgtctcctctcttcagtatagacattaggctcttattcagaaaggatttttctttaaaaatgtacttactttactgaactacttacaggcacatttcttcataaggccacacctaatccaaacaagacagtctcccaacactgaagttccaaaataatccttaccactttgtaaaccatttatagctttgaaagtgttaagtgattccttcgttattatttatgcatgttcatgaacttctgctgtacattggaataggagttaacacattcacatttactgtctattttcttgtgtgccttatgagatggcttttctgactgtatctcaatagtctttctttctatgcaggtttataatcagtacaactactgttttctaaaatactactactcaaggctcggagtttgtatttaaattacactgaccaagtaacaatgtattccatttcaggaactgaatatttgactgttaacctttttcccatacgtccagtgtggcatggagcatatggacttgacagacatctctcacccagacgcccacgtgtgaacacacccacatccacatctctgggtggaaaccagcctagagaggggacgacgctaatggtgttgctttagaaccgtcttttcttacccttttagactcgtgttttgtatgagacaccattgcaagaaaattttatccctccagaagtattttattactaaagaacaaaagcaaaaaaagcttaaattgcactggttaaagtacagtttccaacagctgtccttcctcagtactctaatggccactccaccgcgagtggaagtcactgttgtgtgtacacaggtggtcccaatcaaaactccatcttttgagcccaattatgtccattttgttatagactaaatcaggggtttgttctacaagaacaatacatgttttaccctttcctttaactagaaggataactagtaatgcatcaacataatttctgtattaaccatcatgcgcacaagaaatacatagtaaataaggaagctgaaaactcctggcattggatcttaagctagatgattagaatgtgaaaaagattttacaaatgtaaaacttctatttctctgtagaaactttcttcactttgctgtgcaagaagacactgctttgctatatttaaaatggcttttttaaaagagatttatgtatttggtaaatgtttgtagtcaacagttcacacaagaagctgtacacggtttgatcatgtaaaaccgtttggcggcacaagctggactttgttgccatccttgagatgaaccttttaagaaaaataagttaatctcaatttttccctgaatgtgttgtttttcttcattatacaataaatataatagtgaactttttatcaaatggtgaagacaatgctaa

SEQ ID NO: 19054 - DNA, 565 bp, Homo sapiens
  source 1..565: mol_type = unassigned DNA
cgtgcgcggatgtcccggcgagtcccgggctgaaagaggcggctccgggcggcgcgaagcgctggtggcgggcccgggctgcggcgtgtgcgcgcccgccagctgctccggagatacggctgaagtgcagtggtgtgatctcggttcactgcaacctccgcctccaggttcaagtgattctcgtacctcagcctcccgagtagctgggattacaggcgcctgccaccatgcctggctgatatttatatttttagtagagatggagtttcaccatgttggccaggctggtctcgaactctggacctcagatcttgtagaaaatttcagctgtagcccttggactagaagctgaaataacagaagctgtgtacgatgcattagggtattgaagaaaattaacttttgaattaaatatttggaatataaggaaataaggaaagttgactgaaaatggggcggaagaaaatacaaatcacacgcataatggatgaaaggaaccgacaggtcacttttacaaagagaaagtttggattaatgaagaaagcctatgaacttagtgtgctct

SEQ ID NO: 19055 - DNA, 2186 bp, Homo sapiens
  source 1..2186: mol_type = unassigned DNA
agaacgagttccggtctggccgaggcttgtctcctaaaaatagccccggtgtggggatccgtgcgcggatgtcccggcgagtcccgggctgaaagaggcggctccgggcggcgcgaagcgctggtggcgggcccgggctgcggcgtgtgcgcgcccgccagctgctccggagatacgatcttgtagaaaatttcagctgtagcccttggactagaagctgaaataacagaagctgtgtacgatgcattagggtattgaagaaaattaacttttgaattaaatatttggaatataaggaaataaggaaagttgactgaaaatggggcggaagaaaatacaaatcacacgcataatggatgaaaggaaccgacagactttaagaaagaaaggccttaatggttgtgagagccctgatgctgacgattactttgagcacagtccactctcggaggacagattcagcaaactaaatgaagatagtgattttattttcaaacgaggccctcctggtctgccacctcagaacttttcaatgtctgtcacagttccagtgaccagccccaatgctttgtcctacactaacccagggagttcactggtgtccccatctttggcagccagctcaacgttaacagattcaagcatgctctctccacctcaaaccacattacatagaaatgtgtctcctggagctcctcagagaccaccaagtactggcaatgcaggtgggatgttgagcactacagacctcacagtgccaaatggagctggaagcagtccagtggggaatggatttgtaaactcaagagcttctccaaatttgattggagctactggtgcaaatagcttaggcaaagtcatgcctacaaagtctccccctccaccaggtggtggtaatcttggaatgaacagtaggaaaccagatcttcgagttgtcatccccccttcaagcaagggcatgatgcctccactatcggaggaagaggaattggagttgaatacccagaggatcagtagttctcaagccactcaacctcttgctaccccagtcgtgtctgtgacaaccccaagcttgcctccgcaaggacttgtgtactcagcaatgccgactgcctacaacactgattattcactgaccagcgctgacctgtcagcccttcaaggcttcaactcgccaggaatgctgtcgctgggacaggtgtcggcctggcagcagcaccacctaggacaagcagccctcagctctcttgttgctggagggcagttatctcagggttccaatttatccattaataccaaccaaaacatcagcatcaagtccgaaccgatttcacctcctcgggatcgtatgaccccatcgggcttccagcagcagcagcagcagcagcagcagcagcagccgccgccaccaccgcagccccagccacaacccccgcagccccagccccgacaggaaatggggcgctcccctgtggacagtctgagcagctctagtagctcctatgatggcagtgatcgggaggatccacggggcgacttccattctccaattgtgcttggccgacccccaaacactgaggacagagaaagcccttctgtaaagcgaatgaggatggacgcgtgggtgacctaaggcttccaagctgatgtttgtacttttgtgttactgcagtgacctgccctacatatctaaatcggtaaataaggacatgagttaaatatatttatatgtacatacatatatatatccctttacatatatatgtatgtgggtgtgagtgtgtatgtgtgggtgtgtgttacatacacagaatcaggcacttacctgcaaactccttgtaggtctgcagatgtgtgtcccatggcagacaaagcaccctgtaggcacagacaagtctggcacttccttggactacttgtttcgtaaagataaccagtttttgcagagaaacgtgtacccatatataattctcccacactagcttgcagaaacctagagggccccctacttgttttatttaactgtgcagtgactgtagttacttaagagaaaatgctttgtagaacagagcagtagaaaagcaggaaccaagaaagcaatactgtacataaaatgtcatttatattttccaacctggcatgggtgtctgttgcaaaggggtgcatgggaaagggctgttgatatt

SEQ ID NO: 19056 - DNA, 574 bp, Homo sapiens
  source 1..574: mol_type = unassigned DNA
agtcgcgcgggctggtggcgagcagcctccccgggcgcgcaccccttggggccggggggcggtggtggacgtcgcctccttgaaagttgaaggagttctcgggagaccccggagaaggaattgcattttgtgaaaaaagaacaagaattttctgcaaggatcatatctaagtgcactttttgctgatacttcatttctaatcttgtagaaaatttcagctgtagcccttggactagaagctgaaataacagaagctgtgtacgatgcattagggtattgaagaaaattaacttttgaattaaatatttggaatataaggaaataaggaaagttgactgaaaatggggcggaagaaaatacaaatcacacgcataatggatgaaaggaaccgacaggtcacttttacaaagagaaagtttggattaatgaagaaagcctatgaacttagtgtgctctgtgactgtgaaatagcactcatcattttcaacagctctaacaaactgtttcaatatgctagcactgatatggacaaagttcttctcaagtatacagaatataatgaacctcatgaaag

SEQ ID NO: 19057 - DNA, 732 bp, Homo sapiens
  source 1..732: mol_type = unassigned DNA
gatttgccacgcgccgcgtcaccgggccgctcccggcctgggctcccgggggctggtcagggaggtggcggcggctgagcggcggagcgggggcggcagggcgcgacgccgccgggccgccccgccctgggaggcgcccgggccctcatcaagtgaccagtatcccttccaggggaacacggtccttcagaggaaagcgagctccaacccgcggccccggcgccaagccgccgtcatcttcttcctgtgccaggaattgcattttgtgaaaaaagaacaagaattttctgcaaggatcatatctaagtgcactttttgctgatacttcatttctaatcttgtagaaaatttcagctgtagcccttggactagaagctgaaataacagaagctgtgtacgatgcattagggtattgaagaaaattaacttttgaattaaatatttggaatataaggaaataaggaaagttgactgaaaatggggcggaagaaaatacaaatcacacgcataatggatgaaaggaaccgacaggtcacttttacaaagagaaagtttggattaatgaagaaagcctatgaacttagtgtgctctgtgactgtgaaatagcactcatcattttcaacagctctaacaaactgtttcaatatgctagcactgatatggacaaagttcttctcaagtatacagaatataatgaacctcatgaaagcagaaccaactcggatattgtt

SEQ ID NO: 19058 - DNA, 1623 bp, Homo sapiens
  source 1..1623: mol_type = unassigned DNA
gcttccggtgccgtttcccggttcgctcggccgcggtcgctatggaggagccggagatgcagctcaaggggaagaaagtcacggacaagttcactgagagcgtctacgtcctggccaacgagccatccgtggccctgtaccggctgcaggagcatgtgcgtcgctccctccccgagctggcccagcacaaggcagacatgcagcgttgggaggagcagagccagggagccatctacactgtggagtacgcctgcagcgccgtgaagaacctggtggacagcagcgtctacttccgcagcgtggagggtctgctcaaacaggccatcagcatccgggaccatatgaatgccagtgcccagggccacagcccggaggaaccacccccgccctcctcagcctgatcctggaagagactcggggccccccagcctccgccaacccagacaaagatcattccactcagcctgggacgatggggaggaaaaaaatccagatctcccgcatcctggaccaaaggaatcggcaggtgacgttcaccaagcggaagttcgggctgatgaagaaggcctatgagctgagcgtgctctgtgactgtgagatagccctcatcatcttcaacagcgccaaccgcctcttccagtatgccagcacggacatggaccgtgtgctgctgaagtacacagagtacagcgagccccacgagagccgcaccaacactgacatcctcgagacgctgaagcggaggggcattggcctcgatgggccagagctggagccggatgaagggcctgaggagccaggagagaagtttcggaggctggcaggcgaagggggtgatccggccttgccccgaccccggctgtatcctgcagctcctgctatgcccagcccagatgtggtatacggggccttaccgccaccaggctgtgaccccagtgggcttggggaagcactgcccgcccagagccgcccatctcccttccgaccagcagcccccaaagccgggcccccaggcctggtgcaccctctcttctcaccaagccacctcaccagcaagacaccacccccactgtacctgccgacggaagggcggaggtcagacctgcctggtggcctggctgggccccgagggggactaaacacctccagaagcctctacagtggcctgcagaacccctgctccactgcaactcccggacccccactggggagcttccccttcctccccggaggccccccagaatatggcctgggagaccctccaccgccccctggcttgttgcagccccccaccctggccccctggcagccctcgaggggtgatgggccccccgccgtgtcctcccagcccagtgggggccgaagcctgggcgaggagggtcccccaacccgcggcgcctccccgccgacccccccagtcagcatcaagtctgagcgcctctctccggcccccgggggccccggcgactttcctaagaccttcccctatcccttgctcctcgcccggtccctggcagagcctctgcggcctgggcccgccctgcgccggctgcccttggccgacggctggccccggtaggagatcacccggtggcaccagcccagagcgctcgccaggtacgg

SEQ ID NO: 19059 - DNA, 1683 bp, Homo sapiens
  source 1..1683: mol_type = unassigned DNA
atcttcgtgcagccgccgcgggtccgtgcgcccagcgtcccagggcccaggccgagcagacaaagatcattccactcagcctgggacgatggggaggaaaaaaatccagatctcccgcatcctggaccaaaggaatcggcaggtgacgttcaccaagcggaagttcgggctgatgaagaaggcctatgagctgagcgtgctctgtgactgtgagatagccctcatcatcttcaacagcgccaaccgcctcttccagtatgccagcacggacatggaccgtgtgctgctgaagtacacagagtacagcgagccccacgagagccgcaccaacactgacatcctcgaggtaccccagacgctgaagcggaggggcattggcctcgatgggccagagctggagccggatgaagggcctgaggagccaggagagaagtttcggaggctggcaggcgaagggggtgatccggccttgccccgaccccggctgtatcctgcagctcctgctatgcccagcccagatgtggtatacggggccttaccgccaccaggctgtgaccccagtgggcttggggaagcactgcccgcccagagccgcccatctcccttccgaccagcagcccccaaagccgggcccccaggcctggtgcaccctctcttctcaccaagccacctcaccagcaagacaccacccccactgtacctgccgacggaagggcggaggtcagacctgcctggtggcctggctgggccccgagggggactaaacacctccagaagcctctacagtggcctgcagaacccctgctccactgcaactcccggacccccactggggagcttccccttcctccccggaggccccccagaatatggcctgggagaccctccaccgccccctggcttgttgcagccccccaccctggccccctggcagccctcgaggggtgatgggccccccgccgtgtcctcccagcccaggtaagtgccctgagacgacggcaagtcccagtcctccaaagccccggccgctgctgacccctggtggccatccctggtactgcgcacacttccggtacggatgggcagctattttgaggccccaagagggaccgccaccccctcctttcccagggtcctcctgccaagcctttgcccacgctgtgccatcccctggcttccttcccttcctcgctgagctcacggcctccctctctctttccccctgcagtgggggccgaagcctgggcgaggagggtcccccaacccgcggcgcctccccgccgacccccccagtcagcatcaagtctgagcgcctctctccggcccccgggggccccggcgactttcctaagaccttcccctatcccttgctcctcgcccggtccctggcagagcctctgcggcctgggcccgccctgcgccggctgcccttggccgacggctggccccggtaggagatcacccggtggcaccagcccagagcgctcgccaggtacggcgagggcacgtggggaccccacctccctccaggcctcttcagagaagacccaacagtgacgcccccctccgcggtgggggcttggaggtgggcggctggactcaatccaccctggggggctcctttccttcttcctatttgtgtgtatatccacaaataaaacgcgcgtggcgtccgtggaccag

SEQ ID NO: 19060 - DNA, 1405 bp, Homo sapiens
  source 1..1405: mol_type = unassigned DNA
cgggtccgtgcgcccagcgtcccagggcccaggccgagcagacaaagatcattccactcagcctgggacgatggggaggaaaaaaatccagatctcccgcatcctggaccaaaggaatcggcaggtgacgttcaccaagcggaagttcgggctgatgaagaaggcctatgagctgagcgtgctctgtgactgtgagatagccctcatcatcttcaacagcgccaaccgcctcttccagtatgccagcacggacatggaccgtgtgctgctgaagtacacagagtacagcgagccccacgagagccgcaccaacactgacatcctcgagacgctgaagcggaggggcattggcctcgatgggccagagctggagccggatgaagggcctgaggagccaggagagaagtttcggaggctggcaggcgaagggggtgatccggccttgccccgaccccggctgtatcctgcagctcctgctatgcccagcccagatgtggtatacggggccttaccgccaccaggctgtgaccccagtgggcttggggaagcactgcccgcccagagccgcccatctcccttccgaccagcagcccccaaagccgggcccccaggcctggtgcaccctctcttctcaccaagccacctcaccagcaagacaccacccccactgtacctgccgacggaagggcggaggtcagacctgcctggtggcctggctgggccccgagggggactaaacacctccagaagcctctacagtggcctgcagaacccctgctccactgcaactcccggacccccactggggagcttccccttcctccccggaggccccccagaatatggcctgggagaccctccaccgccccctggcttgttgcagccccccaccctggccccctggcagccctcgaggggtgatgggccccccgccgtgtcctcccagcccagtgggggccgaagcctgggcgaggagggtcccccaacccgcggcgcctccccgccgacccccccagtcagcatcaagtctgagcgcctctctccggcccccgggggccccggcgactttcctaagaccttcccctatcccttgctcctcgcccggtccctggcagagcctctgcggcctgggcccgccctgcgccggctgcccttggccgacggctggccccggtaggagatcacccggtggcaccagcccagagcgctcgccaggtacggcgagggcacgtggggaccccacctccctccaggcctcttcagagaagacccaacagtgacgcccccctccgcggtgggggcttggaggtgggcggctggactcaatccaccctggggggctcctttccttcttcctatttgtgtgtatatccacaaataaaacgcgcgtggcgtccgtggacca

SEQ ID NO: 19061 - DNA, 1949 bp, Homo sapiens
  source 1..1949: mol_type = unassigned DNA
gtacgcggggcgtctggaacttaaaggggcagcgtaccttggccgtcccgttccacaacaaggtcccttctgcggtctcaaaggcttataagcaagggcgggggcagagggctaaagaagggagtttttgcggcccgagtgggtaatgcgtggaggactcccccaactcgtctctcaaggaaaagggggttcagaaagggagagagttcttccccctctcctgcctgggtgtcgctccaccagcctcctggccgtcgcgccccctcctcactgcgccacccccgggtgtgcctccttccctgcgtctcacacagcccctttcttgtccgcaaagactgaggagcggggagggcgggccctctgacaccggaacaggagccgtgcggcgtccggtttcagcagggaaggcttaggcgggcgtcccaacctccgggcttccggtgccgtttcccggttcgctcggccgcggtcgctatggaggagccggagatgcagctcaaggggaagaaagcgccgtgaagaacctggtggacagcagcgtctacttccgcagcgtggagggtctgctcaaacaggccatcagcatccgggaccatatgaatgccagtgcccagggccacagcccggaggaaccacccccgccctcctcagcctgatcctggaagagactcggggccccccagcctccgccaacccagacaaagatcattccactcagcctgggacgatggggaggaaaaaaatccagatctcccgcatcctggaccaaaggaatcggcaggtgacgttcaccaagcggaagttcgggctgatgaagaaggcctatgagctgagcgtgctctgtgactgtgagatagccctcatcatcttcaacagcgccaaccgcctcttccagtatgccagcacggacatggaccgtgtgctgctgaagtacacagagtacagcgagccccacgagagccgcaccaacactgacatcctcgagacgctgaagcggaggggcattggcctcgatgggccagagctggagccggatgaagggcctgaggagccaggagagaagtttcggaggctggcaggcgaagggggtgatccggccttgccccgaccccggctgtatcctgcagctcctgctatgcccagcccagatgtggtatacggggccttaccgccaccaggctgtgaccccagtgggcttggggaagcactgcccgcccagagccgcccatctcccttccgaccagcagcccccaaagccgggcccccaggcctggtgcaccctctcttctcaccaagccacctcaccagcaagacaccacccccactgtacctgccgacggaagggcggaggtcagacctgcctggtggcctggctgggccccgagggggactaaacacctccagaagcctctacagtggcctgcagaacccctgctccactgcaactcccggacccccactggggagcttccccttcctccccggaggccccccagtgggggccgaagcctgggcgaggagggtcccccaacccgcggcgcctccccgccgacccccccagtcagcatcaagtctgagcgcctctctccggcccccgggggccccggcgactttcctaagaccttcccctatcccttgctcctcgcccggtccctggcagagcctctgcggcctgggcccgccctgcgccggctgcccttggccgacggctggccccggtaggagatcacccggtggcaccagcccagagcgctcgccaggtacggcgagggcacgtggggaccccacctccctccaggcctcttcagagaagacccaacagtgacgcccccctccgcggtgggggcttggaggtgggcggctggactcaatccaccctggggggctcctttccttcttcctatttgtgtgtatatccacaaataaaacgcgcgtggcgtccgtggacc

SEQ ID NO: 19062 - DNA, 6203 bp, Homo sapiens
  source 1..6203: mol_type = unassigned DNA
aagggggcaaagcctcggtcttcatagaaaaggagaggaggcaaacgcagcccaaactggggggtttctcttcaaagccagctggtctggctttattctgcaggaatttttttacctgtcagggtttggacaacaaagccctcagcaggtgctgacgggtacaacttcctggagaagcagaaaggcactggtgccaaagaagagttgcaaactgtgaagtaacttctatgaagagatgaagtaaagaacggaaggcaaatgattgtggcagtaaagaagtgtatgtgcaggaacgaatgcaggaatttgggaactgagctgtgcaagtgctgaagaaggagatttgtttggaggaaacaggaaagagaaagaaaaggaaggaaaaaatacataatttcagggacgagagagagaagaaaaacggggactatggggagaaaaaagattcagattacgaggattatggatgaacgtaacagacaggtgacatttacaaagaggaaatttgggttgatgaagaaggcttatgagctgagcgtgctgtgtgactgtgagattgcgctgatcatcttcaacagcaccaacaagctgttccagtatgccagcaccgacatggacaaagtgcttctcaagtacacggagtacaacgagccgcatgagagccggacaaactcagacatcgtggaggcattgaacaagaaagaaaacaaaggctgtgaaagccccgatcccgactcctcttatgcactcaccccacgcactgaagaaaaatacaaaaaaattaatgaagaatttgataatatgatcaagagtcataaaattcctgctgttccacctcccaacttcgagatgccagtctccatcccagtgtccagccacaacagtttggtgtacagcaaccctgtcagctcactgggaaaccccaacctattgccactggctcacccttctctgcagaggaatagtatgtctcctggtgtaacacatcgacctccaagtgcaggtaacacaggtggtctgatgggtggagacctcacgtctggtgcaggcaccagtgcagggaacgggtatggcaatccccgaaactcaccaggtctgctggtctcacctggtaacttgaacaagaatatgcaagcaaaatctcctcccccaatgaatttaggaatgaataaccgtaaaccagatctccgagttcttattccaccaggcagcaagaatacgatgccatcagtgaatcaaaggataaataactcccagtcggctcagtcattggctaccccagtggtttccgtagcaactcctactttaccaggacaaggaatgggaggatatccatcagccatttcaacaacatatggtaccgagtactctctgagtagtgcagacctgtcatctctgtctgggtttaacaccgccagcgctcttcaccttggttcagtaactggctggcaacagcaacacctacataacatgccaccatctgccctcagtcagttgggagcttgcactagcactcatttatctcagagttcaaatctctccctgccttctactcaaagcctcaacatcaagtcagaacctgtttctcctcctagagaccgtaccaccaccccttcgagatacccacaacacacgcgccacgaggcggggagatctcctgttgacagcttgagcagctgtagcagttcgtacgacgggagcgaccgagaggatcaccggaacgaattccactcccccattggactcaccagaccttcgccggacgaaagggaaagtccctcagtcaagcgcatgcgactttctgaaggatgggcaacatgatcagattattacttactagtttttttttttttcttgcagtgtgtgtgtgtgctataccttaatggggaaggggggtcgatatgcattatatgtgccgtgtgtggaaaaaaaaaaagtcaggtactctgttttgtaaaagtacttttaaattgcctcagtgatacagtataaagataaacagaaatgctgagataagcttagcacttgagttgtacaacagaacacttgtacaaaatagattttaaggctaacttcttttcactgttgtgctcctttgcaaaatgtatgttacaatagatagtgtcatgttgcaggttcaacgttatttacatgtaaatagacaaaaggaaacatttgccaaaagcggcagatctttactgaaagagagagcagctgttatgcaacatatagaaaaatgtatagatgcttggacagacccggtaatgggtggccattggtaaatgttaggaacacaccaggtcacctgacatcccaagaatgctcacaaacctgcaggcatatcattggcgtatggcactcattaaaaaggatcagagaccattaaaagaggaccatacctattaaaaaaaaatgtggagttggagggctaacatatttaattaaataaataaataaatctgggtctgcatctcttattaaataaaaatataaaaatatgtacattacattttgcttattttcatataaaaggtaagacagagtttgcaaagcatttgtggctttttgtagtttacttaagccaaaatgtgtttttttccccttgatagcttcgctaatattttaaacagtcctgtaaaaaaccaaaaaggactttttgtatagaaagcactaccctaagccatgaagaactccatgctttgctaaccaagataactgttttctctttgtagaagttttgtttttgaaatgtgtatttctaattatataaaatattaagaatcttttaaaaaaatctgtgaaattaacatgcttgtgtatagctttctaatatatataatattatggtaatagcagaagttttgttatcttaatagcgggaggggggtatatttgtgcagttgcacatttgagtaactattttctttctgttttcttttactctgcttacattttataagtttaaggtcagctgtcaaaaggataacctgtggggttagaacatatcacattgcaacaccctaaattgtttttaatacattagcaatctattgggtcaactgacatccattgtatatactagtttctttcatgctatttttattttgttttttgcatttttatcaaatgcagggcccctttctgatctcaccatttcaccatgcatcttggaattcagtaagtgcatatcctaacttgcccatattctaaatcatctggttggttttcagcctagaatttgatacgctttttagaaatatgcccagaatagaaaagctatgttggggcacatgtcctgcaaatatggccctagaaacaagtgatatggaatttacttggtgaataagttataaattcccacagaagaaaaatgtgaaagactgggtgctagacaagaaggaagcaggtaaagggatagttgctttgtcatccgtttttaattattttaactgacccttgacaatcttgtcagcaatataggactgttgaacaatcccggtgtgtcaggacccccaaatgtcacttctgcataaagcatgtatgtcatctattttttcttcaataaagagatttaatagccatttcaagaaatcccataaagaacctctctatgtccctttttttaatttaaaaaaaatgactcttgtctaatattcgtctataagggattaattttcagaccctttaataagtgagtgccataagaaagtcaatatatattgtttaaaagatatttcagtctaggaaagattttccttctcttggaatgtgaagatctgtcgattcatctccaatcatatgcattgacatacacagcaaagaagatataggcagtaatatcaacactgctatatcatgtgtaggacatttcttatccattttttctcttttacttgcatagttgctatgtgtttctcattgtaaaaggctgccgctgggtggcagaagccaagagaccttattaactaggctatatttttcttaacttgatctgaaatccacaattagaccacaatgcacctttggttgtatccataaaggatgctagcctgccttgtactaatgttttatatattaaaaaaaaaaaatctatcaaccatttcatatatatcccactactcaaggtatccatggaacatgaaagaataacatttatgcagaggaaaaacaaaaacatccctgaaaatatacacactcatacacacacacgcacaggggaataaaataagaaaatcattttcctcaccatagacttgatcccatccttacaacccatccttctaacttgatgtgtataaaatatgcaaacatttcacaaatgttctttgtcatttcaaaatactttagtatatcaatatcagtagataccagtgggtgggaaagggtcattacatgaaaatatgaagaaatagccatattagttttttaacctgcaatttgcctcagcaacaaagaaaaagtgaatttttaatgctgaagataaagtaagctaaagtaccagcagaagccttggctatttatagcagttctgacaatagttttataagaacatgaagagaacagaatcacttgaaaatggatgccagtcatctcttgttcccactactgaattcttataaagtggtggcaagatagggaagggataatctgagaatttttaaaagatgatttaatgagaagaagcacaattttgattttgatgagtcactttctgtaaacaatcttggtctatctttacccttataccttatctgtaatttaccatttattgtatttgcaaagctagtatggtttttaatcacagtaaatcctttgtattccagactttagggcagagccctgagggagtattattttacataacccgtcctagagtaacattttaggcaacattcttcattgcaagtaaaagatccataagtggcattttacacggctgcgagtattgttatatctaatcctattttaaaagatttttggtaatatgaagcttgaatactggtaacagtgatgcaatatacgcaagctgcacaacctgtatattgtatgcattgctgcgtggaggctgtttatttcaacctttttaaaaattgtgttttttagtaaaatggcttattttttcccaaaggtggaatttagcattttgtaatgatgaatataaaaatacctgtcatccccagatcatttaaaagttaactaaagtgagaatgaaaaaacaaaattccaagacactttttaaaagaatgtctgccctcacacacttttatggatttgtttttcttacatacccatcttttaacttagagatagcattttttgccctctttattttgttgtttgtttctccagagagtaaacgctttgtagttctttctttaaaaaacattttttttaaagaagaagaagccacttgaaccctcaataaaggctgttgcctaagcatggcatacttcatctgttctcatttgtgccatctgccgtgatgtcgtcacttttatggcgttaatttcctgccactacagatcttttgaagattgctggaatactggtgtctgttagaatgcttcagactacagatgtaattaaaggcttttcttaatatgttttaaccaaagatgtggagcaatccaagccacatatcttctacatcaaatttttccattttggttattttcataatctggtattgcattttgccttccctgttcatacctcaaattgattcatacctcagtttaattcagagaggtcagttaagtgacggattctgttgtggtttgaatgcagtaccagtgttctcttcgagcaaagtagacctgggtcactgtaggcataggacttggattgcttcagatggtttgctgtatcatttttcttctttttcttttcctggggacttgtttccattaaatgagagtaattaaaatcgcttgtaaatgagggcatacaagcatttgcaacaaatattcaaatagaggctcacagcggcataagctggactttgtcgccactagatgacaagatgttataactaagttaaaccacatctgtgtatctcaagggacttaattcagctgtctgtagtgaataaaagtgggaaattttcaaaagtttctcctgctggaaataaggtataatttgtattttgcagacaattcagtaaagttactggctttcttagtgatgcagtgtccgtggtgcat

SEQ ID NO: 19063 - DNA, 4095 bp, Homo sapiens
  source 1..4095: mol_type = unassigned DNA
cgcgcgcacacacgcacacatcgtctccagctctctgctcgctctgctcgcagtcacagacacttgagcacacgcgtacacccagacatcttcgggctgctattggattgactttgaaggttctgtgtgggtcgccgtggctgcatgtttgaatcaggtggagaagcacttcaacgctggacgaagtaaagattattgttgttattttttttttctctctctctctctcttaagaaaggaaaatatcccaaggactaatctgatcgggtcttccttcatgaacgaatgcaggaatttgggaactgagctgtgcaagtgctgaagaaggagatttgtttggaggaaacaggaaagagaaagaaaaggaaggaaaaaatacataatttcagggacgagagagagaagaaaaacggggactatggggagaaaaaagattcagattacgaggattatggatgaacgtaacagacaggtgacatttacaaagaggaaatttgggttgatgaagaaggcttatgagctgagcgtgctgtgtgactgtgagattgcgctgatcatcttcaacagcaccaacaagctgttccagtatgccagcaccgacatggacaaagtgcttctcaagtacacggagtacaacgagccgcatgagagccggacaaactcagacatcgtggagacgttgagaaagaagggccttaatggctgtgacagcccagaccccgatgcggacgattccgtaggtcacagccctgagtctgaggacaagtacaggaaaattaacgaagatattgatctaatgatcagcaggcaaagattgtgtgctgttccacctcccaacttcgagatgccagtctccatcccagtgtccagccacaacagtttggtgtacagcaaccctgtcagctcactgggaaaccccaacctattgccactggctcacccttctctgcagaggaatagtatgtctcctggtgtaacacatcgacctccaagtgcaggtaacacaggtggtctgatgggtggagacctcacgtctggtgcaggcaccagtgcagggaacgggtatggcaatccccgaaactcaccaggtctgctggtctcacctggtaacttgaacaagaatatgcaagcaaaatctcctcccccaatgaatttaggaatgaataaccgtaaaccagatctccgagttcttattccaccaggcagcaagaatacgatgccatcagtgtctgaggatgtcgacctgcttttgaatcaaaggataaataactcccagtcggctcagtcattggctaccccagtggtttccgtagcaactcctactttaccaggacaaggaatgggaggatatccatcagccatttcaacaacatatggtaccgagtactctctgagtagtgcagacctgtcatctctgtctgggtttaacaccgccagcgctcttcaccttggttcagtaactggctggcaacagcaacacctacataacatgccaccatctgccctcagtcagttgggagcttgcactagcactcatttatctcagagttcaaatctctccctgccttctactcaaagcctcaacatcaagtcagaacctgtttctcctcctagagaccgtaccaccaccccttcgagatacccacaacacacgcgccacgaggcggggagatctcctgttgacagcttgagcagctgtagcagttcgtacgacgggagcgaccgagaggatcaccggaacgaattccactcccccattggactcaccagaccttcgccggacgaaagggaaagtccctcagtcaagcgcatgcgactttctgaaggatgggcaacatgatcagattattacttactagtttttttttttttcttgcagtgtgtgtgtgtgctataccttaatggggaaggggggtcgatatgcattatatgtgccgtgtgtggaaaaaaaaaaagtcaggtactctgttttgtaaaagtacttttaaattgcctcagtgatacagtataaagataaacagaaatgctgagataagcttagcacttgagttgtacaacagaacacttgtacaaaatagattttaaggctaacttcttttcactgttgtgctcctttgcaaaatgtatgttacaatagatagtgtcatgttgcaggttcaacgttatttacatgtaaatagacaaaaggaaacatttgccaaaagcggcagatctttactgaaagagagagcagctgttatgcaacatatagaaaaatgtatagatgcttggacagacccggtaatgggtggccattggtaaatgttaggaacacaccaggtcacctgacatcccaagaatgctcacaaacctgcaggcatatcattggcgtatggcactcattaaaaaggatcagagaccattaaaagaggaccatacctattaaaaaaaaatgtggagttggagggctaacatatttaattaaataaataaataaatctgggtctgcatctcttattaaataaaaatataaaaatatgtacattacattttgcttattttcatataaaaggtaagacagagtttgcaaagcatttgtggctttttgtagtttacttaagccaaaatgtgtttttttccccttgatagcttcgctaatattttaaacagtcctgtaaaaaaccaaaaaggactttttgtatagaaagcactaccctaagccatgaagaactccatgctttgctaaccaagataactgttttctctttgtagaagttttgtttttgaaatgtgtatttctaattatataaaatattaagaatcttttaaaaaaatctgtgaaattaacatgcttgtgtatagctttctaatatatataatattatggtaatagcagaagttttgttatcttaatagcgggaggggggtatatttgtgcagttgcacatttgagtaactattttctttctgttttcttttactctgcttacattttataagtttaaggtcagctgtcaaaaggataacctgtggggttagaacatatcacattgcaacaccctaaattgtttttaatacattagcaatctattgggtcaactgacatccattgtatatactagtttctttcatgctatttttattttgttttttgcatttttatcaaatgcagggcccctttctgatctcaccatttcaccatgcatcttggaattcagtaagtgcatatcctaacttgcccatattctaaatcatctggttggttttcagcctagaatttgatacgctttttagaaatatgcccagaatagaaaagctatgttggggcacatgtcctgcaaatatggccctagaaacaagtgatatggaatttacttggtgaataagttataaattcccacagaagaaaaatgtgaaagactgggtgctagacaagaaggaagcaggtaaagggatagttgctttgtcatccgtttttaattattttaactgacccttgacaatcttgtcagcaatataggactgttgaacaatcccggtgtgtcaggacccccaaatgtcacttctgcataaagcatgtatgtcatctattttttcttcaataaagagatttaatagccatttcaagaaatcccataaagaacctctctatgtccctttttttaatttaaaaaaaatgactcttgtctaatattcgtctataagggattaattttcagaccctttaataagtgagtgccataagaaagtcaatatatattgtttaaaagatatttcagtctaggaaagattttccttctcttggaatgtgaagatctgtcgattcatctccaatcatatgcattgacatacacagcaaagaagatataggcagtaatatcaacactgctatatcatgtgtaggacatttcttatccattttttctcttttacttgcatagttgctatgtgtttctcattgtaaaaggctgccgctgggtggcagaagccaagagaccttattaactaggctatatttttcttaacttgatctgaaatccacaattagaccacaatgcacctttggttgtatccataaaggatgctagcctgccttgtactaatgttttatatatt

SEQ ID NO: 19064 - DNA, 721 bp, Homo sapiens
  source 1..721: mol_type = unassigned DNA
aagggggcaaagcctcggtcttcatagaaaaggagaggaggcaaacgcagcccaaactggggggtttctcttcaaagccagctggtctggctttattctgcaggaatttttttacctgtcagggtttggacaacaaagccctcagcaggtgctgacgggtacaacttcctggagaagcagaaaggcactggtgccaaagaagagttgcaaactgtgaagtaacttctatgaagagatgaagtaaagaacggaaggcaaatgattgtggcagtaaagaagtgtatgtggaacgaatgcaggaatttgggaactgagctgtgcaagtgctgaagaaggagatttgtttggaggaaacaggaaagagaaagaaaaggaaggaaaaaatacataatttcagggacgagagagagaagaaaaacggggactatggggagaaaaaagattcagattacgaggattatggatgaacgtaacagacaggtgacatttacaaagaggaaatttgggttgatgaagaaggcttatgagctgagcgtgctgtgtgactgtgagattgcgctgatcatcttcaacagcaccaacaagctgttccagtatgccagcaccgacatggacaaagtgcttctcaagtacacggagtacaacgagccgcatgagagccggacaaactcagacatcgtggagacgttgagaaagaagggccttaatggctgtgacagcc

SEQ ID NO: 19065 - DNA, 609 bp, Homo sapiens
  source 1..609: mol_type = unassigned DNA
gaagctgcttcctcggtaaatatttccaaactgattagaaagttcatggccccgcgatgaagtcgagatctcaaatactgcaggaacgaatgcaggaatttgggaactgagctgtgcaagtgctgaagaaggagatttgtttggaggaaacaggaaagagaaagaaaaggaaggaaaaaatacataatttcagggacgagagagagaagaaaaacggggactatggggagaaaaaagattcagattacgaggattatggatgaacgtaacagacaggtgacatttacaaagaggaaatttgggttgatgaagaaggcttatgagctgagcgtgctgtgtgactgtgagattgcgctgatcatcttcaacagcaccaacaagctgttccagtatgccagcaccgacatggacaaagtgcttctcaagtacacggagtacaacgagccgcatgagagccggacaaactcagacatcgtggagacgttgagaaagaagggccttaatggctgtgacagcccagaccccgatgcggacgattccgtaggtcacagccctgagtctgaggacaagtacaggaaaattaacgaagatattgatctaatgatcagc

SEQ ID NO: 19066 - DNA, 773 bp, Homo sapiens
  source 1..773: mol_type = unassigned DNA
cacacacgcacacatcgtctccagctctctgctcgctctgctcgcagtcacagacacttgagcacacgcgtacacccagacatcttcgggctgctattggattgactttgaaggttctgtgtgggtcgccgtggctgcatgtttgaatcaggtggagaagcacttcaacgctggacgaagtaaagattattgttgttattttttttttctctctctctctctcttaagaaaggaaaatatcccaaggactaatctgatcgggtcttccttcatacttcttaggaaaggcagcattttacttcattcattaattgcaccatttacgtcctgattgctgtgcatgtggaatatattgaaagataatattaaagtgaacgaatgcaggaatttgggaactgagctgtgcaagtgctgaagaaggagatttgtttggaggaaacaggaaagagaaagaaaaggaaggaaaaaatacataatttcagggacgagagagagaagaaaaacggggactatggggagaaaaaagattcagattacgaggattatggatgaacgtaacagacaggtgacatttacaaagaggaaatttgggttgatgaagaaggcttatgagctgagcgtgctgtgtgactgtgagattgcgctgatcatcttcaacagcaccaacaagctgttccagtatgccagcaccgacatggacaaagtgcttctcaagtacacggagtacaacgagccgcatgagagccggacaaactcagacatcgtggagacgt

SEQ ID NO: 19067 - DNA, 6458 bp, Homo sapiens
  source 1..6458: mol_type = unassigned DNA
gcgatgtttcaaacgctgtgagctgttctccttttcccattcgtcttctgtcacttccttcctggacgcagttttctggacgagtctggttacttttaatccgaccggccgctgagagccactttctcctcctcctcctcctcctccttctcttcctcctccttcttcctcctcctcctcctcttccgagcggcctcggcgcgcgcgaatgcgcggccccgcgccccccccctcgcgcgcgctcccctcgcgcgcgcgcacacacgcacacatcgtctccagctctctgctcgctctgctcgcagtcacagacacttgagcacacgcgtacacccagacatcttcgggctgctattggattgactttgaaggttctgtgtgggtcgccgtggctgcatgtttgaatcaggtggagaagcacttcaacgctggacgaagtaaagattattgttgttattttttttttctctctctctctctcttaagaaaggaaaatatcccaaggactaatctgatcgggtcttccttcatcaggaacgaatgcaggaatttgggaactgagctgtgcaagtgctgaagaaggagatttgtttggaggaaacaggaaagagaaagaaaaggaaggaaaaaatacataatttcagggacgagagagagaagaaaaacggggactatggggagaaaaaagattcagattacgaggattatggatgaacgtaacagacaggtgacatttacaaagaggaaatttgggttgatgaagaaggcttatgagctgagcgtgctgtgtgactgtgagattgcgctgatcatcttcaacagcaccaacaagctgttccagtatgccagcaccgacatggacaaagtgcttctcaagtacacggagtacaacgagccgcatgagagccggacaaactcagacatcgtggagacgttgagaaagaagggccttaatggctgtgacagcccagaccccgatgcggacgattccgtaggtcacagccctgagtctgaggacaagtacaggaaaattaacgaagatattgatctaatgatcagcaggcaaagattgtgtgctgttccacctcccaacttcgagatgccagtctccatcccagtgtccagccacaacagtttggtgtacagcaaccctgtcagctcactgggaaaccccaacctattgccactggctcacccttctctgcagaggaatagtatgtctcctggtgtaacacatcgacctccaagtgcaggtaacacaggtggtctgatgggtggagacctcacgtctggtgcaggcaccagtgcagggaacgggtatggcaatccccgaaactcaccaggtctgctggtctcacctggtaacttgaacaagaatatgcaagcaaaatctcctcccccaatgaatttaggaatgaataaccgtaaaccagatctccgagttcttattccaccaggcagcaagaatacgatgccatcagtggtaatacaaaactacattttaaagaatcaaaggataaataactcccagtcggctcagtcattggctaccccagtggtttccgtagcaactcctactttaccaggacaaggaatgggaggatatccatcagccatttcaacaacatatggtaccgagtactctctgagtagtgcagacctgtcatctctgtctgggtttaacaccgccagcgctcttcaccttggttcagtaactggctggcaacagcaacacctacataacatgccaccatctgccctcagtcagttgggagcttgcactagcactcatttatctcagagttcaaatctctccctgccttctactcaaagcctcaacatcaagtcagaacctgtttctcctcctagagaccgtaccaccaccccttcgagatacccacaacacacgcgccacgaggcggggagatctcctgttgacagcttgagcagctgtagcagttcgtacgacgggagcgaccgagaggatcaccggaacgaattccactcccccattggactcaccagaccttcgccggacgaaagggaaagtccctcagtcaagcgcatgcgactttctgaaggatgggcaacatgatcagattattacttactagtttttttttttttcttgcagtgtgtgtgtgtgctataccttaatggggaaggggggtcgatatgcattatatgtgccgtgtgtggaaaaaaaaaaagtcaggtactctgttttgtaaaagtacttttaaattgcctcagtgatacagtataaagataaacagaaatgctgagataagcttagcacttgagttgtacaacagaacacttgtacaaaatagattttaaggctaacttcttttcactgttgtgctcctttgcaaaatgtatgttacaatagatagtgtcatgttgcaggttcaacgttatttacatgtaaatagacaaaaggaaacatttgccaaaagcggcagatctttactgaaagagagagcagctgttatgcaacatatagaaaaatgtatagatgcttggacagacccggtaatgggtggccattggtaaatgttaggaacacaccaggtcacctgacatcccaagaatgctcacaaacctgcaggcatatcattggcgtatggcactcattaaaaaggatcagagaccattaaaagaggaccatacctattaaaaaaaaatgtggagttggagggctaacatatttaattaaataaataaataaatctgggtctgcatctcttattaaataaaaatataaaaatatgtacattacattttgcttattttcatataaaaggtaagacagagtttgcaaagcatttgtggctttttgtagtttacttaagccaaaatgtgtttttttccccttgatagcttcgctaatattttaaacagtcctgtaaaaaaccaaaaaggactttttgtatagaaagcactaccctaagccatgaagaactccatgctttgctaaccaagataactgttttctctttgtagaagttttgtttttgaaatgtgtatttctaattatataaaatattaagaatcttttaaaaaaatctgtgaaattaacatgcttgtgtatagctttctaatatatataatattatggtaatagcagaagttttgttatcttaatagcgggaggggggtatatttgtgcagttgcacatttgagtaactattttctttctgttttcttttactctgcttacattttataagtttaaggtcagctgtcaaaaggataacctgtggggttagaacatatcacattgcaacaccctaaattgtttttaatacattagcaatctattgggtcaactgacatccattgtatatactagtttctttcatgctatttttattttgttttttgcatttttatcaaatgcagggcccctttctgatctcaccatttcaccatgcatcttggaattcagtaagtgcatatcctaacttgcccatattctaaatcatctggttggttttcagcctagaatttgatacgctttttagaaatatgcccagaatagaaaagctatgttggggcacatgtcctgcaaatatggccctagaaacaagtgatatggaatttacttggtgaataagttataaattcccacagaagaaaaatgtgaaagactgggtgctagacaagaaggaagcaggtaaagggatagttgctttgtcatccgtttttaattattttaactgacccttgacaatcttgtcagcaatataggactgttgaacaatcccggtgtgtcaggacccccaaatgtcacttctgcataaagcatgtatgtcatctattttttcttcaataaagagatttaatagccatttcaagaaatcccataaagaacctctctatgtccctttttttaatttaaaaaaaatgactcttgtctaatattcgtctataagggattaattttcagaccctttaataagtgagtgccataagaaagtcaatatatattgtttaaaagatatttcagtctaggaaagattttccttctcttggaatgtgaagatctgtcgattcatctccaatcatatgcattgacatacacagcaaagaagatataggcagtaatatcaacactgctatatcatgtgtaggacatttcttatccattttttctcttttacttgcatagttgctatgtgtttctcattgtaaaaggctgccgctgggtggcagaagccaagagaccttattaactaggctatatttttcttaacttgatctgaaatccacaattagaccacaatgcacctttggttgtatccataaaggatgctagcctgccttgtactaatgttttatatattaaaaaaaaaaaatctatcaaccatttcatatatatcccactactcaaggtatccatggaacatgaaagaataacatttatgcagaggaaaaacaaaaacatccctgaaaatatacacactcatacacacacacgcacaggggaataaaataagaaaatcattttcctcaccatagacttgatcccatccttacaacccatccttctaacttgatgtgtataaaatatgcaaacatttcacaaatgttctttgtcatttcaaaatactttagtatatcaatatcagtagataccagtgggtgggaaagggtcattacatgaaaatatgaagaaatagccatattagttttttaacctgcaatttgcctcagcaacaaagaaaaagtgaatttttaatgctgaagataaagtaagctaaagtaccagcagaagccttggctatttatagcagttctgacaatagttttataagaacatgaagagaacagaatcacttgaaaatggatgccagtcatctcttgttcccactactgaattcttataaagtggtggcaagatagggaagggataatctgagaatttttaaaagatgatttaatgagaagaagcacaattttgattttgatgagtcactttctgtaaacaatcttggtctatctttacccttataccttatctgtaatttaccatttattgtatttgcaaagctagtatggtttttaatcacagtaaatcctttgtattccagactttagggcagagccctgagggagtattattttacataacccgtcctagagtaacattttaggcaacattcttcattgcaagtaaaagatccataagtggcattttacacggctgcgagtattgttatatctaatcctattttaaaagatttttggtaatatgaagcttgaatactggtaacagtgatgcaatatacgcaagctgcacaacctgtatattgtatgcattgctgcgtggaggctgtttatttcaacctttttaaaaattgtgttttttagtaaaatggcttattttttcccaaaggtggaatttagcattttgtaatgatgaatataaaaatacctgtcatccccagatcatttaaaagttaactaaagtgagaatgaaaaaacaaaattccaagacactttttaaaagaatgtctgccctcacacacttttatggatttgtttttcttacatacccatcttttaacttagagatagcattttttgccctctttattttgttgtttgtttctccagagagtaaacgctttgtagttctttctttaaaaaacattttttttaaagaagaagaagccacttgaaccctcaataaaggctgttgcctaagcatggcatacttcatctgttctcatttgtgccatctgccgtgatgtcgtcacttttatggcgttaatttcctgccactacagatcttttgaagattgctggaatactggtgtctgttagaatgcttcagactacagatgtaattaaaggcttttcttaatatgttttaaccaaagatgtggagcaatccaagccacatatcttctacatcaaatttttccattttggttattttcataatctggtattgcattttgccttccctgttcatacctcaaattgattcatacctcagtttaattcagagaggtcagttaagtgacggattctgttgtggtttgaatgcagtaccagtgttctcttcgagcaaagtagacctgggtcactgtaggcataggacttggattgcttcagatggtttgctgtatcatttttcttctttttcttttcctggggacttgtttccattaaatgagagtaattaaaatcgcttgtaaatgagggcatacaagcatttgcaacaaatattcaaatagaggctcacagcggcataagctggactttgtcgccactagatgacaagatgttataactaagttaaaccacatctgtgtatctcaagggacttaattcagctgtctgtagtgaataaaagtgggaaattttcaaaagtttctcctgctggaaataaggtataatttgtattttgcagacaattcagtaaagttactggctttcttagtga

SEQ ID NO: 19068 - DNA, 854 bp, Homo sapiens
  source 1..854: mol_type = unassigned DNA
atgaattagctgccctacttagcatacacagcaggaacgaatgcaggaatttgggaactgagctgtgcaagtgctgaagaaggagatttgtttggaggaaacaggaaagagaaagaaaaggaaggaaaaaatacataatttcagggacgagagagagaagaaaaacggggactatggggagaaaaaagattcagattacgaggattatggatgaacgtaacagacaggtgacatttacaaagaggaaatttgggttgatgaagaaggcttatgagctgagcgtgctgtgtgactgtgagattgcgctgatcatcttcaacagcaccaacaagctgttccagtatgccagcaccgacatggacaaagtgcttctcaagtacacggagtacaacgagccgcatgagagccggacaaactcagacatcgtggaggcattgaacaagaaagaaaacaaaggctgtgaaagccccgatcccgactcctcttatgcactcaccccacgcactgaagaaaaatacaaaaaaattaatgaagaatttgataatatgatcaagagtcataaaattcctgctgttccacctcccaacttcgagatgccagtctccatcccagtgtccagccacaacagtttggtgtacagcaaccctgtcagctcactgggaaaccccaacctattgccactggctcacccttctctgcagaggaatagtatgtctcctggtgtaacacatcgacctccaagtgcaggtaacacaggtggtctgatgggtggagacctcacgtctggtgcaggcaccagtgcagggaacgggtatggcaatccccgaaactcaccaggtctgctggtctcacct

SEQ ID NO: 19069 - DNA, 623 bp, Homo sapiens
  source 1..623: mol_type = unassigned DNA
ctttagcatctgtccagaagaaattcttctcgacttgggtctcaaaccactttgccttcatctgcctgcttatgccaaactcaaaatgagcagaagcctgccataatgaagttcccctttttagaacgaatgcaggaatttgggaactgagctgtgcaagtgctgaagaaggagatttgtttggaggaaacaggaaagagaaagaaaaggaaggaaaaaatacataatttcagggacgagagagagaagaaaaacggggactatggggagaaaaaagattcagattacgaggattatggatgaacgtaacagacaggtgacatttacaaagaggaaatttgggttgatgaagaaggcttatgagctgagcgtgctgtgtgactgtgagattgcgctgatcatcttcaacagcaccaacaagctgttccagtatgccagcaccgacatggacaaagtgcttctcaagtacacggagtacaacgagccgcatgagagccggacaaactcagacatcgtggaggcattgaacaagaaagaaaacaaaggctgtgaaagccccgatcccgactcctcttatgcactcaccccacgcactgaagaaaaatacaaaaaaattaatgaag

SEQ ID NO: 19070 - DNA, 557 bp, Homo sapiens
  source 1..557: mol_type = unassigned DNA
acatttcttcccttggagaattgaagcaaatatgcagtacgaacgaatgcaggaatttgggaactgagctgtgcaagtgctgaagaaggagatttgtttggaggaaacaggaaagagaaagaaaaggaaggaaaaaatacataatttcagggacgagagagagaagaaaaacggggactatggggagaaaaaagattcagattacgaggattatggatgaacgtaacagacaggtgacatttacaaagaggaaatttgggttgatgaagaaggcttatgagctgagcgtgctgtgtgactgtgagattgcgctgatcatcttcaacagcaccaacaagctgttccagtatgccagcaccgacatggacaaagtgcttctcaagtacacggagtacaacgagccgcatgagagccggacaaactcagacatcgtggagacgttgagaaagaagggccttaatggctgtgacagcccagaccccgatgcggacgattccgtaggtcacagccctgagtctgaggacaagtacaggaaaattaacgaagatattgatcta

SEQ ID NO: 19071 - DNA, 573 bp, Homo sapiens
  source 1..573: mol_type = unassigned DNA
aatttttcataacgggtgaaattgtcacctaatttcattaaaaagattaggaaactttttacaaaaaaaaatacatttcaagtgttagtctttaaaaaagcatagtttgcatcatttaaatgacttgttaaattacttatgagatcattttaattgttaaaaaataaaactacttgatctgctcctgtctgtgatataccatatatttttaacaaaaaagttatttttattcattttattgctttagctccatatagtttatttccttgataaaattagaatatgatagttcttatgaaactgacttgctgttagagtggtatttaatttttcttttttgttcagcaggaacgaatgcaggaatttgggaactgagctgtgcaagtgctgaagaaggagatttgtttggaggaaacaggaaagagaaagaaaaggaaggaaaaaatacataatttcagggacgagagagagaagaaaaacggggactatggggagaaaaaagattcagattacgaggattatggatgaacgtaacagacaggtgacatttacaaagaggaaatttgggttgat

SEQ ID NO: 19072 - DNA, 3537 bp, Homo sapiens
  source 1..3537: mol_type = unassigned DNA
acttgagcacacgcgtacacccagacatcttcgggctgctattggattgactttgaaggttctgtgtgggtcgccgtggctgcatgtttgaatcaggtggagaagcacttcaacgctggacgaagtaaagattattgttgttattttttttttctctctctctctctcttaagaaaggaaaatatcccaaggactaatctgatcgggtcttccttcatcaggaacgaatgcaggaatttgggaactgagctgtgcaagtgctgaagaaggagatttgtttggaggaaacaggaaagagaaagaaaaggaaggaaaaaatacataatttcagggacgagagagagaagaaaaacggggactatggggagaaaaaagattcagattacgaggattatggatgaacgtaacagacaggtgacatttacaaagaggaaatttgggttgatgaagaaggcttatgagctgagcgtgctgtgtgactgtgagattgcgctgatcatcttcaacagcaccaacaagctgttccagtatgccagcaccgacatggacaaagtgcttctcaagtacacggagtacaacgagccgcatgagagccggacaaactcagacatcgtggagacgttgagaaagaagggccttaatggctgtgacagcccagaccccgatgcggacgattccgtaggtcacagccctgagtctgaggacaagtacaggaaaattaacgaagatattgatctaatgatcagcaggcaaagattgtgtgctgttccacctcccaacttcgagatgccagtctccatcccagtgtccagccacaacagtttggtgtacagcaaccctgtcagctcactgggaaaccccaacctattgccactggctcacccttctctgcagaggaatagtatgtctcctggtgtaacacatcgacctccaagtgcaggtaacacaggtggtctgatgggtggagacctcacgtctggtgcaggcaccagtgcagggaacgggtatggcaatccccgaaactcaccaggtctgctggtctcacctggtaacttgaacaagaatatgcaagcaaaatctcctcccccaatgaatttaggaatgaataaccgtaaaccagatctccgagttcttattccaccaggcagcaagaatacgatgccatcagtgaatcaaaggataaataactcccagtcggctcagtcattggctaccccagtggtttccgtagcaactcctactttaccaggacaaggaatgggaggatatccatcagccatttcaacaacatatggtaccgagtactctctgagtagtgcagacctgtcatctctgtctgggtttaacaccgccagcgctcttcaccttggttcagtaactggctggcaacagcaacacctacataacatgccaccatctgccctcagtcagttgggagcttgcactagcactcatttatctcagagttcaaatctctccctgccttctactcaaagcctcaacatcaagtcagaacctgtttctcctcctagagaccgtaccaccaccccttcgagatacccacaacacacgcgccacgaggcggggagatctcctgttgacagcttgagcagctgtagcagttcgtacgacgggagcgaccgagaggatcaccggaacgaattccactcccccattggactcaccagaccttcgccggacgaaagggaaagtccctcagtcaagcgcatgcgactttctgaaggatgggcaacatgatcagattattacttactagtttttttttttttcttgcagtgtgtgtgtgtgctataccttaatggggaaggggggtcgatatgcattatatgtgccgtgtgtggaaaaaaaaaaagtcaggtactctgttttgtaaaagtacttttaaattgcctcagtgatacagtataaagataaacagaaatgctgagataagcttagcacttgagttgtacaacagaacacttgtacaaaatagattttaaggctaacttcttttcactgttgtgctcctttgcaaaatgtatgttacaatagatagtgtcatgttgcaggttcaacgttatttacatgtaaatagacaaaaggaaacatttgccaaaagcggcagatctttactgaaagagagagcagctgttatgcaacatatagaaaaatgtatagatgcttggacagacccggtaatgggtggccattggtaaatgttaggaacacaccaggtcacctgacatcccaagaatgctcacaaacctgcaggcatatcattggcgtatggcactcattaaaaaggatcagagaccattaaaagaggaccatacctattaaaaaaaaatgtggagttggagggctaacatatttaattaaataaataaataaatctgggtctgcatctcttattaaataaaaatataaaaatatgtacattacattttgcttattttcatataaaaggtaagacagagtttgcaaagcatttgtggctttttgtagtttacttaagccaaaatgtgtttttttccccttgatagcttcgctaatattttaaacagtcctgtaaaaaaccaaaaaggactttttgtatagaaagcactaccctaagccatgaagaactccatgctttgctaaccaagataactgttttctctttgtagaagttttgtttttgaaatgtgtatttctaattatataaaatattaagaatcttttaaaaaaatctgtgaaattaacatgcttgtgtatagctttctaatatatataatattatggtaatagcagaagttttgttatcttaatagcgggaggggggtatatttgtgcagttgcacatttgagtaactattttctttctgttttcttttactctgcttacattttataagtttaaggtcagctgtcaaaaggataacctgtggggttagaacatatcacattgcaacaccctaaattgtttttaatacattagcaatctattgggtcaactgacatccattgtatatactagtttctttcatgctatttttattttgttttttgcatttttatcaaatgcagggcccctttctgatctcaccatttcaccatgcatcttggaattcagtaagtgcatatcctaacttgcccatattctaaatcatctggttggttttcagcctagaatttgatacgctttttagaaatatgcccagaatagaaaagctatgttggggcacatgtcctgcaaatatggccctagaaacaagtgatatggaatttacttggtgaataagttataaattcccacagaagaaaaatgtgaaagactgggtgctagacaagaaggaagcaggtaaagggatagttgctttgtcatccgtttttaattattttaactgacccttgacaatcttgtcagcaatataggactgttgaacaatcccggtgtgtcaggacccccaaatgtcacttctgcataaagcatgtatgtcatctattttttcttcaataaagagatttaatagccatttcaagaaatcccataaa

SEQ ID NO: 19073 - DNA, 1061 bp, Homo sapiens
  source 1..1061: mol_type = unassigned DNA
catcttcgggctgctattggattgactttgaaggttctgtgtgggtcgccgtggctgcatgtttgaatcaggtggagaagcacttcaacgctggacgaagtaaagattattgttgttattttttttttctctctctctctctcttaagaaaggaaaatatcccaaggactaatctgatcgggtcttccttcatcaggaacgaatgcaggaatttgggaactgagctgtgcaagtgctgaagaaggagatttgtttggaggaaacaggaaagagaaagaaaaggaaggaaaaaatacataatttcagggacgagagagagaagaaaaacggggactatggggagaaaaaagattcagattacgaggattatggatgaacgtaacagacaggtgacatttacaaagaggaaatttgggttgatgaagaaggcttatgagctgagcgtgctgtgtgactgtgagattgcgctgatcatcttcaacagcaccaacaagctgttccagtatgccagcaccgacatggacaaagtgcttctcaagtacacggagtacaacgagccgcatgagagccggacaaactcagacatcgtggaggcattgaacaagaaagaaaacaaaggctgtgaaagccccgatcccgactcctcttatgcactcaccccacgcactgaagaaaaatacaaaaaaattaatgaagaatttgataatatgatcaagagtcataaaattcctgctgttccacctcccaacttcgagatgccagtctccatcccagtgtccagccacaacagtttggtgtacagcaaccctgtcagctcactgggaaaccccaacctattgccactggctcacccttctctgcagaggaatagtatgtctcctggtgtaacacatcgacctccaagtgcaggtaacacaggtggtctgatgggtggagacctcacgtctggtgcaggcaccagtgcagggaacgggtatggcaatccccgaaactcaccaggtctgctggtctcacctggtaacttgaacaagaatatgcaagcaaaatctcctcccccaatg

SEQ ID NO: 19074 - DNA, 1747 bp, Homo sapiens
  source 1..1747: mol_type = unassigned DNA
acacgcacacatcgtctccagctctctgctcgctctgctcgcagtcacagacacttgagcacacgcgtacacccagacatcttcgggctgctattggattgactttgaaggttctgtgtgggtcgccgtggctgcatgtttgaatcaggtggagaagcacttcaacgctggacgaagtaaagattattgttgttattttttttttctctctctctctctcttaagaaaggaaaatatcccaaggactaatctgatcgggtcttccttcatcaggaacgaatgcaggaatttgggaactgagctgtgcaagtgctgaagaaggagatttgtttggaggaaacaggaaagagaaagaaaaggaaggaaaaaatacataatttcagggacgagagagagaagaaaaacggggactatggggagaaaaaagattcagattacgaggattatggatgaacgtaacagacaggtgacatttacaaagaggaaatttgggttgatgaagaaggcttatgagctgagcgtgctgtgtgactgtgagattgcgctgatcatcttcaacagcaccaacaagctgttccagtatgccagcaccgacatggacaaagtgcttctcaagtacacggagtacaacgagccgcatgagagccggacaaactcagacatcgtggagacgttgagaaagaagggccttaatggctgtgacagcccagaccccgatgcggacgattccgtaggtcacagccctgagtctgaggacaagtacaggaaaattaacgaagatattgatctaatgatcagcaggcaaagattgtgtgctgttccacctcccaacttcgagatgccagtctccatcccagtgtccagccacaacagtttggtgtacagcaaccctgtcagctcactgggaaaccccaacctattgccactggctcacccttctctgcagaggaatagtatgtctcctggtgtaacacatcgacctccaagtgcaggtaacacaggtggtctgatgggtggagacctcacgtctggtgcaggcaccagtgcagggaacgggtatggcaatccccgaaactcaccaggtctgctggtctcacctggtaacttgaacaagaatatgcaagcaaaatctcctcccccaatgaatttaggaatgaataaccgtaaaccagatctccgagttcttattccaccaggcagcaagaatacgatgccatcagtgtctgaggatgtcgacctgcttttgaatcaaaggataaataactcccagtcggctcagtcattggctaccccagtggtttccgtagcaactcctactttaccaggacaaggaatgggaggatatccatcagccatttcaacaacatatggtaccgagtactctctgagtagtgcagacctgtcatctctgtctgggtttaacaccgccagcgctcttcaccttggttcagtaactggctggcaacagcaacacctacataacatgccaccatctgccctcagtcagttgggagaccgtaccaccaccccttcgagatacccacaacacacgcgccacgaggcggggagatctcctgttgacagcttgagcagctgtagcagttcgtacgacgggagcgaccgagaggatcaccggaacgaattccactcccccattggactcaccagaccttcgccggacgaaagggaaagtccctcagtcaagcgcatgcgactttctgaaggatgggcaacatgatcagattat

SEQ ID NO: 19075 - DNA, 4079 bp, Homo sapiens
  source 1..4079: mol_type = unassigned DNA
atcgtctccagctctctgctcgctctgctcgcagtcacagacacttgagcacacgcgtacacccagacatcttcgggctgctattggattgactttgaaggttctgtgtgggtcgccgtggctgcatgtttgaatcaggtggagaagcacttcaacgctggacgaagtaaagattattgttgttattttttttttctctctctctctctcttaagaaaggaaaatatcccaaggactaatctgatcgggtcttccttcatcaggaacgaatgcaggaatttgggaactgagctgtgcaagtgctgaagaaggagatttgtttggaggaaacaggaaagagaaagaaaaggaaggaaaaaatacataatttcagggacgagagagagaagaaaaacggggactatggggagaaaaaagattcagattacgaggattatggatgaacgtaacagacaggtgacatttacaaagaggaaatttgggttgatgaagaaggcttatgagctgagcgtgctgtgtgactgtgagattgcgctgatcatcttcaacagcaccaacaagctgttccagtatgccagcaccgacatggacaaagtgcttctcaagtacacggagtacaacgagccgcatgagagccggacaaactcagacatcgtggagacgttgagaaagaagggccttaatggctgtgacagcccagaccccgatgcggacgattccgtaggtcacagccctgagtctgaggacaagtacaggaaaattaacgaagatattgatctaatgatcagcaggcaaagattgtgtgctgttccacctcccaacttcgagatgccagtctccatcccagtgtccagccacaacagtttggtgtacagcaaccctgtcagctcactgggaaaccccaacctattgccactggctcacccttctctgcagaggaatagtatgtctcctggtgtaacacatcgacctccaagtgcaggtaacacaggtggtctgatgggtggagacctcacgtctggtgcaggcaccagtgcagggaacgggtatggcaatccccgaaactcaccaggtctgctggtctcacctggtaacttgaacaagaatatgcaagcaaaatctcctcccccaatgaatttaggaatgaataaccgtaaaccagatctccgagttcttattccaccaggcagcaagaatacgatgccatcagtgtctgaggatgtcgacctgcttttgaatcaaaggataaataactcccagtcggctcagtcattggctaccccagtggtttccgtagcaactcctactttaccaggacaaggaatgggaggatatccatcagccatttcaacaacatatggtaccgagtactctctgagtagtgcagacctgtcatctctgtctgggtttaacaccgccagcgctcttcaccttggttcagtaactggctggcaacagcaacacctacataacatgccaccatctgccctcagtcagttgggagcttgcactagcactcatttatctcagagttcaaatctctccctgccttctactcaaagcctcaacatcaagtcagaacctgtttctcctcctagagaccgtaccaccaccccttcgagatacccacaacacacgcgccacgaggcggggagatctcctgttgacagcttgagcagctgtagcagttcgtacgacgggagcgaccgagaggatcaccggaacgaattccactcccccattggactcaccagaccttcgccggacgaaagggaaagtccctcagtcaagcgcatgcgactttctgaaggatgggcaacatgatcagattattacttactagtttttttttttttcttgcagtgtgtgtgtgtgctataccttaatggggaaggggggtcgatatgcattatatgtgccgtgtgtggaaaaaaaaaaagtcaggtactctgttttgtaaaagtacttttaaattgcctcagtgatacagtataaagataaacagaaatgctgagataagcttagcacttgagttgtacaacagaacacttgtacaaaatagattttaaggctaacttcttttcactgttgtgctcctttgcaaaatgtatgttacaatagatagtgtcatgttgcaggttcaacgttatttacatgtaaatagacaaaaggaaacatttgccaaaagcggcagatctttactgaaagagagagcagctgttatgcaacatatagaaaaatgtatagatgcttggacagacccggtaatgggtggccattggtaaatgttaggaacacaccaggtcacctgacatcccaagaatgctcacaaacctgcaggcatatcattggcgtatggcactcattaaaaaggatcagagaccattaaaagaggaccatacctattaaaaaaaaatgtggagttggagggctaacatatttaattaaataaataaataaatctgggtctgcatctcttattaaataaaaatataaaaatatgtacattacattttgcttattttcatataaaaggtaagacagagtttgcaaagcatttgtggctttttgtagtttacttaagccaaaatgtgtttttttccccttgatagcttcgctaatattttaaacagtcctgtaaaaaaccaaaaaggactttttgtatagaaagcactaccctaagccatgaagaactccatgctttgctaaccaagataactgttttctctttgtagaagttttgtttttgaaatgtgtatttctaattatataaaatattaagaatcttttaaaaaaatctgtgaaattaacatgcttgtgtatagctttctaatatatataatattatggtaatagcagaagttttgttatcttaatagcgggaggggggtatatttgtgcagttgcacatttgagtaactattttctttctgttttcttttactctgcttacattttataagtttaaggtcagctgtcaaaaggataacctgtggggttagaacatatcacattgcaacaccctaaattgtttttaatacattagcaatctattgggtcaactgacatccattgtatatactagtttctttcatgctatttttattttgttttttgcatttttatcaaatgcagggcccctttctgatctcaccatttcaccatgcatcttggaattcagtaagtgcatatcctaacttgcccatattctaaatcatctggttggttttcagcctagaatttgatacgctttttagaaatatgcccagaatagaaaagctatgttggggcacatgtcctgcaaatatggccctagaaacaagtgatatggaatttacttggtgaataagttataaattcccacagaagaaaaatgtgaaagactgggtgctagacaagaaggaagcaggtaaagggatagttgctttgtcatccgtttttaattattttaactgacccttgacaatcttgtcagcaatataggactgttgaacaatcccggtgtgtcaggacccccaaatgtcacttctgcataaagcatgtatgtcatctattttttcttcaataaagagatttaatagccatttcaagaaatcccataaagaacctctctatgtccctttttttaatttaaaaaaaatgactcttgtctaatattcgtctataagggattaattttcagaccctttaataagtgagtgccataagaaagtcaatatatattgtttaaaagatatttcagtctaggaaagattttccttctcttggaatgtgaagatctgtcgattcatctccaatcatatgcattgacatacacagcaaagaagatataggcagtaatatcaacactgctatatcatgtgtaggacatttcttatccattttttctcttttacttgcatagttgctatgtgtttctcattgtaaaaggctgccgctgggtggcagaagccaagagaccttattaactaggctatatttttcttaacttgatctgaaatccacaattagaccacaatgcacctttggttgtatccataaaggatgctagcctgccttgtactaatgttttatatatt

SEQ ID NO: 19076 - DNA, 1254 bp, Homo sapiens
  source 1..1254: mol_type = unassigned DNA
atggggagaaaaaagattcagattacgaggattatggatgaacgtaacagacaggtgacatttacaaagaggaaatttgggttgatgaagaaggcttatgagctgagcgtgctgtgtgactgtgagattgcgctgatcatcttcaacagcaccaacaagctgttccagtatgccagcaccgacatggacaaagtgcttctcaagtacacggagtacaacgagccgcatgagagccggacaaactcagacatcgtggaggctgttccacctcccaacttcgagatgccagtctccatcccagtgtccagccacaacagtttggtgtacagcaaccctgtcagctcactgggaaaccccaacctattgccactggctcacccttctctgcagaggaatagtatgtctcctggtgtaacacatcgacctccaagtgcaggtaacacaggtggtctgatgggtggagacctcacgtctggtgcaggcaccagtgcagggaacgggtatggcaatccccgaaactcaccaggtctgctggtctcacctggtaacttgaacaagaatatgcaagcaaaatctcctcccccaatgaatttaggaatgaataaccgtaaaccagatctccgagttcttattccaccaggcagcaagaatacgatgccatcagtgaatcaaaggataaataactcccagtcggctcagtcattggctaccccagtggtttccgtagcaactcctactttaccaggacaaggaatgggaggatatccatcagccatttcaacaacatatggtaccgagtactctctgagtagtgcagacctgtcatctctgtctgggtttaacaccgccagcgctcttcaccttggttcagtaactggctggcaacagcaacacctacataacatgccaccatctgccctcagtcagttgggagcttgcactagcactcatttatctcagagttcaaatctctccctgccttctactcaaagcctcaacatcaagtcagaacctgtttctcctcctagagaccgtaccaccaccccttcgagatacccacaacacacgcgccacgaggcggggagatctcctgttgacagcttgagcagctgtagcagttcgtacgacgggagcgaccgagaggatcaccggaacgaattccactcccccattggactcaccagaccttcgccggacgaaagggaaagtccctcagtcaagcgcatgcgactttctgaaggatgggcaacatga

SEQ ID NO: 19077 - DNA, 6304 bp, Homo sapiens
  source 1..6304: mol_type = unassigned DNA
atagaaaaggagaggaggcaaacgcagcccaaactggggggtttctcttcaaagccagctggtctggctttattctgcaggaatttttttacctgtcagggtttggacaacaaagccctcagcaggtgctgacgggtacaacttcctggagaagcagaaaggcactggtgccaaagaagagttgcaaactgtgaagtaacttctatgaagagatgaagtaaagaacggaaggcaaatgattgtggcagtaaagaagtgtatgtgcaggaacgaatgcaggaatttgggaactgagctgtgcaagtgctgaagaaggagatttgtttggaggaaacaggaaagagaaagaaaaggaaggaaaaaatacataatttcagggacgagagagagaagaaaaacggggactatggggagaaaaaagattcagattacgaggattatggatgaacgtaacagacaggtgacatttacaaagaggaaatttgggttgatgaagaaggcttatgagctgagcgtgctgtgtgactgtgagattgcgctgatcatcttcaacagcaccaacaagctgttccagtatgccagcaccgacatggacaaagtgcttctcaagtacacggagtacaacgagccgcatgagagccggacaaactcagacatcgtggagacgttgagaaagaagggccttaatggctgtgacagcccagaccccgatgcggacgattccgcattgaacaagaaagaaaacaaaggctgtgaaagccccgatcccgactcctcttatgcactcaccccacgcactgaagaaaaatacaaaaaaattaatgaagaatttgataatatgatcaagagtcataaaattcctgctgttccacctcccaacttcgagatgccagtctccatcccagtgtccagccacaacagtttggtgtacagcaaccctgtcagctcactgggaaaccccaacctattgccactggctcacccttctctgcagaggaatagtatgtctcctggtgtaacacatcgacctccaagtgcaggtaacacaggtggtctgatgggtggagacctcacgtctggtgcaggcaccagtgcagggaacgggtatggcaatccccgaaactcaccaggtctgctggtctcacctggtaacttgaacaagaatatgcaagcaaaatctcctcccccaatgaatttaggaatgaataaccgtaaaccagatctccgagttcttattccaccaggcagcaagaatacgatgccatcagtgaatcaaaggataaataactcccagtcggctcagtcattggctaccccagtggtttccgtagcaactcctactttaccaggacaaggaatgggaggatatccatcagccatttcaacaacatatggtaccgagtactctctgagtagtgcagacctgtcatctctgtctgggtttaacaccgccagcgctcttcaccttggttcagtaactggctggcaacagcaacacctacataacatgccaccatctgccctcagtcagttgggagcttgcactagcactcatttatctcagagttcaaatctctccctgccttctactcaaagcctcaacatcaagtcagaacctgtttctcctcctagagaccgtaccaccaccccttcgagatacccacaacacacgcgccacgaggcggggagatctcctgttgacagcttgagcagctgtagcagttcgtacgacgggagcgaccgagaggatcaccggaacgaattccactcccccattggactcaccagaccttcgccggacgaaagggaaagtccctcagtcaagcgcatgcgactttctgaaggatgggcaacatgatcagattattacttactagtttttttttttttcttgcagtgtgtgtgtgtgctataccttaatggggaaggggggtcgatatgcattatatgtgccgtgtgtggaaaaaaaaaaagtcaggtactctgttttgtaaaagtacttttaaattgcctcagtgatacagtataaagataaacagaaatgctgagataagcttagcacttgagttgtacaacagaacacttgtacaaaatagattttaaggctaacttcttttcactgttgtgctcctttgcaaaatgtatgttacaatagatagtgtcatgttgcaggttcaacgttatttacatgtaaatagacaaaaggaaacatttgccaaaagcggcagatctttactgaaagagagagcagctgttatgcaacatatagaaaaatgtatagatgcttggacagacccggtaatgggtggccattggtaaatgttaggaacacaccaggtcacctgacatcccaagaatgctcacaaacctgcaggcatatcattggcgtatggcactcattaaaaaggatcagagaccattaaaagaggaccatacctattaaaaaaaaatgtggagttggagggctaacatatttaattaaataaataaataaatctgggtctgcatctcttattaaataaaaatataaaaatatgtacattacattttgcttattttcatataaaaggtaagacagagtttgcaaagcatttgtggctttttgtagtttacttaagccaaaatgtgtttttttccccttgatagcttcgctaatattttaaacagtcctgtaaaaaaccaaaaaggactttttgtatagaaagcactaccctaagccatgaagaactccatgctttgctaaccaagataactgttttctctttgtagaagttttgtttttgaaatgtgtatttctaattatataaaatattaagaatcttttaaaaaaatctgtgaaattaacatgcttgtgtatagctttctaatatatataatattatggtaatagcagaagttttgttatcttaatagcgggaggggggtatatttgtgcagttgcacatttgagtaactattttctttctgttttcttttactctgcttacattttataagtttaaggtcagctgtcaaaaggataacctgtggggttagaacatatcacattgcaacaccctaaattgtttttaatacattagcaatctattgggtcaactgacatccattgtatatactagtttctttcatgctatttttattttgttttttgcatttttatcaaatgcagggcccctttctgatctcaccatttcaccatgcatcttggaattcagtaagtgcatatcctaacttgcccatattctaaatcatctggttggttttcagcctagaatttgatacgctttttagaaatatgcccagaatagaaaagctatgttggggcacatgtcctgcaaatatggccctagaaacaagtgatatggaatttacttggtgaataagttataaattcccacagaagaaaaatgtgaaagactgggtgctagacaagaaggaagcaggtaaagggatagttgctttgtcatccgtttttaattattttaactgacccttgacaatcttgtcagcaatataggactgttgaacaatcccggtgtgtcaggacccccaaatgtcacttctgcataaagcatgtatgtcatctattttttcttcaataaagagatttaatagccatttcaagaaatcccataaagaacctctctatgtccctttttttaatttaaaaaaaatgactcttgtctaatattcgtctataagggattaattttcagaccctttaataagtgagtgccataagaaagtcaatatatattgtttaaaagatatttcagtctaggaaagattttccttctcttggaatgtgaagatctgtcgattcatctccaatcatatgcattgacatacacagcaaagaagatataggcagtaatatcaacactgctatatcatgtgtaggacatttcttatccattttttctcttttacttgcatagttgctatgtgtttctcattgtaaaaggctgccgctgggtggcagaagccaagagaccttattaactaggctatatttttcttaacttgatctgaaatccacaattagaccacaatgcacctttggttgtatccataaaggatgctagcctgccttgtactaatgttttatatattaaaaaaaaaaaatctatcaaccatttcatatatatcccactactcaaggtatccatggaacatgaaagaataacatttatgcagaggaaaaacaaaaacatccctgaaaatatacacactcatacacacacacgcacaggggaataaaataagaaaatcattttcctcaccatagacttgatcccatccttacaacccatccttctaacttgatgtgtataaaatatgcaaacatttcacaaatgttctttgtcatttcaaaatactttagtatatcaatatcagtagataccagtgggtgggaaagggtcattacatgaaaatatgaagaaatagccatattagttttttaacctgcaatttgcctcagcaacaaagaaaaagtgaatttttaatgctgaagataaagtaagctaaagtaccagcagaagccttggctatttatagcagttctgacaatagttttataagaacatgaagagaacagaatcacttgaaaatggatgccagtcatctcttgttcccactactgaattcttataaagtggtggcaagatagggaagggataatctgagaatttttaaaagatgatttaatgagaagaagcacaattttgattttgatgagtcactttctgtaaacaatcttggtctatctttacccttataccttatctgtaatttaccatttattgtatttgcaaagctagtatggtttttaatcacagtaaatcctttgtattccagactttagggcagagccctgagggagtattattttacataacccgtcctagagtaacattttaggcaacattcttcattgcaagtaaaagatccataagtggcattttacacggctgcgagtattgttatatctaatcctattttaaaagatttttggtaatatgaagcttgaatactggtaacagtgatgcaatatacgcaagctgcacaacctgtatattgtatgcattgctgcgtggaggctgtttatttcaacctttttaaaaattgtgttttttagtaaaatggcttattttttcccaaaggtggaatttagcattttgtaatgatgaatataaaaatacctgtcatccccagatcatttaaaagttaactaaagtgagaatgaaaaaacaaaattccaagacactttttaaaagaatgtctgccctcacacacttttatggatttgtttttcttacatacccatcttttaacttagagatagcattttttgccctctttattttgttgtttgtttctccagagagtaaacgctttgtagttctttctttaaaaaacattttttttaaagaagaagaagccacttgaaccctcaataaaggctgttgcctaagcatggcatacttcatctgttctcatttgtgccatctgccgtgatgtcgtcacttttatggcgttaatttcctgccactacagatcttttgaagattgctggaatactggtgtctgttagaatgcttcagactacagatgtaattaaaggcttttcttaatatgttttaaccaaagatgtggagcaatccaagccacatatcttctacatcaaatttttccattttggttattttcataatctggtattgcattttgccttccctgttcatacctcaaattgattcatacctcagtttaattcagagaggtcagttaagtgacggattctgttgtggtttgaatgcagtaccagtgttctcttcgagcaaagtagacctgggtcactgtaggcataggacttggattgcttcagatggtttgctgtatcatttttcttctttttcttttcctggggacttgtttccattaaatgagagtaattaaaatcgcttgtaaatgagggcatacaagcatttgcaacaaatattcaaatagaggctcacagcggcataagctggactttgtcgccactagatgacaagatgttataactaagttaaaccacatctgtgtatctcaagggacttaattcagctgtctgtagtgaataaaagtgggaaattttcaaaagtttctcctgctggaaataaggtataatttgtattttgcagacaattcagtaaagttactggctttcttagtgatgcagtgtccgtggtgcatttttttaaattaatgttttgctgtttaaatttattcaattttattgtgttttttaaaaagcagc

SEQ ID NO: 19078 - DNA, 5868 bp, Homo sapiens
  source 1..5868: mol_type = unassigned DNA
atatcaacaacagccgaggcggctcaggcgctcggccccggttccccgcttgcctgccgcccgcctgctggcccccgcgcccacgacgggggcccaggcctcacggcgccgcccagggcccgcgcggacgccggcctcatttattattctccccgcccggagctgcggcttcccggtgttgaagatcccccggaccaggggcgagggctacccgctctttgccgtgacaacaccgttcccccagccgggctggaggctgtgcagaaggtatcctgcagaccatgaactgagcactgttcccagaccgttcatgagcacagtgtaaggtgtgccgagacccaccacccagcgagcccctcccctccgtagcactgaggacccccggagaagatggggaggaaaaagattcagatccagcgaatcaccgacgagcggaaccgacaggtgactttcaccaagcggaagtttggcctgatgaagaaggcgtatgagctgagcgtgctatgtgactgcgagatcgcactcatcatcttcaaccactccaacaagctgttccagtacgccagcaccgacatggacaaggtgctgctcaagtacacggagtacaatgagccacacgagagccgcaccaacgccgacatcatcgaggcgctgcacaagaagcacagggaatgtgagagccctgaggtggacgaggtgtttgccctgaccccccagacggaagagaaatataaaaagatagacgaggagtttgataaaatgatgcagagttatagactggcctcaactgtcccggcccccaactttgccatgcctgtcacggtgcccgtgtccaatcagagctcactgcagttcagcaatcccagcggctccctggtcaccccttccctggtgacatcatccctcacggacccgcggctcctgtccccccagcagccagcactacagaggaacagtgtgtctcctggcctgccccagcggccagctagtgcgggggccatgctggggggtgacctgaacagtgctaacggagcctgccccagccctgttgggaatggctacgtcagtgctcgggcttcccctggcctcctccctgtggccaatggcaacagcctaaacaaggtcatccctgccaagtctccacccccacctacccacagcacccagcttggagcccccagccgcaagcccgacctgcgagtcatcacttcccaggcaggaaaggggttaatgcatcacttgactgaggaccatttagatctgaacaatgcccagcgccttggggtctcccagtctactcattcgctcaccaccccagtggtttctgtggcaacgccgagtttactcagccagggcctccccttctcttccatgcccactgcctacaacacagattaccagttgaccagtgcagagctctcctccttaccagcctttagttcacctggggggctgtcgctaggcaatgtcactgcctggcaacagccacagcagccccagcagccgcagcagccacagcctccacagcagcagccaccgcagccacagcagccacagccacagcagcctcagcagccgcaacagccacctcagcaacagtcccacctggtccctgtatctctcagcaacctcatcccgggcagccccctgccccacgtgggtgctgccctcacagtcaccacccacccccacatcagcatcaagtcagaaccggtgtccccaagccgtgagcgcagccctgcgcctccccctccagctgtgttcccagctgcccgccctgagcctggcgatggtctcagcagcccagccgggggatcctatgagacgggagaccgggatgacggacggggggacttcgggcccacactgggcctgctgcgcccagccccagagcctgaggctgagggctcagctgtgaagaggatgcggcttgatacctggacattaaagtgacgattcccactcccctcctctcagcctccctgatgaagagttgacaatctcaccgcccgcccttccctgccccgggctcctcccgctcgacccccacttcctttcttgtgcttcgtgtcctgttgacggttacatttgtgtataattattatattattattattattattatattttttttaatttggattctcgctttggagagggggatgctctcatcccctctttctgtaccccccaccattttcactggctggggggctctctttttcgcgggaaggggggacactttgcacgttgtacacatatgctgcaggaagggggtggggggcccaataaggcctttgggaaaggacaggtgccgagccctgcatgtggagccctcccaccccacccccagatagagggaaataaccaaaaaactaccaaacaacagaaacccacactctagactgaaaccccaaagtgggcttgatgggtgggtttgtgtttcaaggggaaagtgaggcagaggttctgaaaagggtctctgtttttgtgttcatgtagccataggcacatggagcagaatacttaagcctggcccccaaatgcccctgcacacacacgtgccacacctgcgctgattcttgtgtgtgctgcacccccaaggtgtgtgggtgctggctgagctttgggccgggaaggcagcctgggaatctgaggctggagacaggggtttgaggtgggggcctctctggaagcacatttggagggaaagacaagagagccatgaggagagggctgaggagggcagaagggctaggcagggggcaaattgagcccctcccttccccagtttttctctaagatatacagtgcaatagctccccacccctcagttgacgccagccctgtaaagctggccacagtgtgcagggagaatggggagagggtcttcagtgaggtggctggggcgagagtcggcctggacttccctggggtgctccaggccagagctctttcattggggcgagtgtggtgaggggacgtccttggtcttgcacgcacactacctgggggagtcaacactgggatggtctgtggggtgggagggcctacggatgggtccgtagaggtcccacctccctcattcctccttggcccctctccctagcttctcctgttagctccttctgctcctgaccccacctccttgctcttggcgcccctattgtctctggctacctccttgtcccaccacctccaggctgcatcccaccttccctcttggctactgtaattgtaaatagcgacctttggaaaacgttagcggtgtaacagtccaggaaactgtttttttttgttgttgttgtattgatatgaaatgagattctatttttgtcaaagtatattgtaataataatgactcaaacggcccgtactgtacagacgagattcttctgctgttgttcttgctcccctcccctcctctgagtccgcccctccctgctgcctcctcagtggggcagtgggcaaggggcccaggggcagccgaagcacggggtcctgagacctcaggcaggattggagatcaaaccagagggggcaggcccccagcctgctctctaggatcaccccccgccctaaggggcctggcctggggtgacgtggccaggcagactgtctgccccactccttcacacaagcccagctcctctgcccaaggggtgcggcgcccccttggggtttcctcccagttggagagtagagttaagacaaggcccagttttgtgttagccgaccgtctttgcccacctctatgacccagcctcttgcagtattcccatacttgatgcagggaaggaaccagaagcagaggggcctctacgcaggtacacacgtgtacctgagtgtgttcatgagggcatctggtgtttatgtgtctgagtgtagctttgtatttatgtgtgtgtgtgtgtgtatgtctgattgcacgggtgtacttttgtatttatgtgtgtgtgtggttgcacgggtgtgcctctgtgtgtctctgaccctggctgggtgtgtgtgcaaatctgtgtgactggagctctaggggcatctctgtgtctgagtgtgcctggtgtgtgtttacaaagggagagttggctgctccagctccacagccctgggaccccaactcctgtcttccctgctcctttccctgtgttcaccctcagctctgacacattgaactgcagttggggggattggcagttagccctctgtgcttctccctgcagccctacctctgccaaggtctctccctccagggacctctgcttccacccacatatgtccacttagtcacccacacttgacacagttcctggagtaccctcttcccccaaccccagacctgctttcagagcaaaactcaagtccctcttcctccgtgaagcttctccctcagctgagcagtgatcacttactcactcttaaccccaatccgctgactgggtggggacagcacgtccagccttcccacctctcctgcaggcttctagacggagtttcaaaaactgatgagcctcgatccagggcttgaaagaagccagggtgtaatcttgttcatgcatgcgtccccagagcctcgcccagtgcctggcacatagtaggcactcaataaatgctgaatgggtgaatagttgaatgataggtgctcaataaatgaatgaatggccttcccttctcaggctattcccaccattagtctgcccacctttctaggctgggcttggccaccattaaacacggggtgggggtgagggcccctgcaattcacggtgcaatattcaccagttttgccctctgcctcataaaggcaaacctggcttttgattaccatgtgtggatgtttcagtgtcctttcttctctgtccctggggatggggtggtctgtgaatatgtgacatttctgcagttcagtatccgaaggtttctcttgggggtaggggctcctgggcggccagatgaatgggtccctgggaacccagacctcagatgaggacttaatgtcttcttcctctcaagccaaattcgcctccacccactccctctgaagaactgggcatttgccaaagtaaccactggagtcatctaatggccctccccctccccaggtttcccacagctttcagggacagtgggcaagaggacacccccccccaccacctcagtggaacacaccattctccccccctcaacagcacactcagtgcagcaagactgacccctgaccccctcccagccctccctaccttggacaggaaggaagtaatgcaccttctcttgctgattatttatttgtttggagagacagaaatgtaaaagtgtatctagaaatatctatatctctatatatttttaactgactctttggaatcccctggggtggggtgaggggtaagtttaggctttcgcggaggggaggagacatggagcctgggaactccttgttctcccctctgctgcctctccccaccccttaaagcagttggtagaaggaatggtatttgtatggggggagggaggctggaatggagaatctggattctctcctcttccccattctccagagggagggaggtggtgaggaagaggaagggaggggcaggatgggccatggaggtgccccacccccacacctgacaatcacccacactcctggggctcttcctgggtcctggggcagggcgagtccaagtgtgaggctgttgatttgttttcaatatttcttttcgtgctgtatggtgatgctttcttagtattctacacaataagaaaagacaaagtcctcgagattcttatgagttttgtttgaaaactctttcactatatttgttgtaaagaggtttactattaaaagaaaaagaatacacgtttctg

SEQ ID NO: 19079 - DNA, 5965 bp, Homo sapiens
  source 1..5965: mol_type = unassigned DNA
ctcaagctaggctgagctgtgcctacgtcggcctcgactcccgggggctggaggagttacctttggagcccgaaaggaggaaggaagcaaaatatcaacaacagccgaggcggctcaggcgctcggccccggttccccgcttgcctgccgcccgcctgctggcccccgcgcccacgacgggggcccaggcctcacggcgccgcccagggcccgcgcggacgccggcctcatttattattctccccgcccggagctgcggcttcccggtgttgaagatcccccggaccaggggcgagggctacccgctctttgccgtgacaacaccgttcccccagccgggctggaggctgtgcagaaggtatcctgcagaccatgaactgagcactgttcccagaccgttcatgagcacagtgtaaggtgtgccgagacccaccacccagcgagcccctcccctccgtagcactgaggacccccggagaagatggggaggaaaaagattcagatccagcgaatcaccgacgagcggaaccgacaggtgactttcaccaagcggaagtttggcctgatgaagaaggcgtatgagctgagcgtgctatgtgactgcgagatcgcactcatcatcttcaaccactccaacaagctgttccagtacgccagcaccgacatggacaaggtgctgctcaagtacacggagtacaatgagccacacgagagccgcaccaacgccgacatcatcgagaccctgaggaagaagggcttcaacggctgcgacagccccgagcccgacggggaggactcgctggaacagagccccctgctggaggacaagtaccgacgcgccagcgaggagctcgacgggctcttccggcgctatgggtcaactgtcccggcccccaactttgccatgcctgtcacggtgcccgtgtccaatcagagctcactgcagttcagcaatcccagcggctccctggtcaccccttccctggtgacatcatccctcacggacccgcggctcctgtccccccagcagccagcactacagaggaacagtgtgtctcctggcctgccccagcggccagctagtgcgggggccatgctggggggtgacctgaacagtgctaacggagcctgccccagccctgttgggaatggctacgtcagtgctcgggcttcccctggcctcctccctgtggccaatggcaacagcctaaacaaggtcatccctgccaagtctccacccccacctacccacagcacccagcttggagcccccagccgcaagcccgacctgcgagtcatcacttcccaggcaggaaaggggttaatgcatcacttgactgaggaccatttagatctgaacaatgcccagcgccttggggtctcccagtctactcattcgctcaccaccccagtggtttctgtggcaacgccgagtttactcagccagggcctccccttctcttccatgcccactgcctacaacacagattaccagttgaccagtgcagagctctcctccttaccagcctttagttcacctggggggctgtcgctaggcaatgtcactgcctggcaacagccacagcagccccagcagccgcagcagccacagcctccacagcagcagccaccgcagccacagcagccacagccacagcagcctcagcagccgcaacagccacctcagcaacagtcccacctggtccctgtatctctcagcaacctcatcccgggcagccccctgccccacgtgggtgctgccctcacagtcaccacccacccccacatcagcatcaagtcagaaccggtgtccccaagccgtgagcgcagccctgcgcctccccctccagctgtgttcccagctgcccgccctgagcctggcgatggtctcagcagcccagccgggggatcctatgagacgggagaccgggatgacggacggggggacttcgggcccacactgggcctgctgcgcccagccccagagcctgaggctgagggctcagctgtgaagaggatgcggcttgatacctggacattaaagtgacgattcccactcccctcctctcagcctccctgatgaagagttgacaatctcaccgcccgcccttccctgccccgggctcctcccgctcgacccccacttcctttcttgtgcttcgtgtcctgttgacggttacatttgtgtataattattatattattattattattattatattttttttaatttggattctcgctttggagagggggatgctctcatcccctctttctgtaccccccaccattttcactggctggggggctctctttttcgcgggaaggggggacactttgcacgttgtacacatatgctgcaggaagggggtggggggcccaataaggcctttgggaaaggacaggtgccgagccctgcatgtggagccctcccaccccacccccagatagagggaaataaccaaaaaactaccaaacaacagaaacccacactctagactgaaaccccaaagtgggcttgatgggtgggtttgtgtttcaaggggaaagtgaggcagaggttctgaaaagggtctctgtttttgtgttcatgtagccataggcacatggagcagaatacttaagcctggcccccaaatgcccctgcacacacacgtgccacacctgcgctgattcttgtgtgtgctgcacccccaaggtgtgtgggtgctggctgagctttgggccgggaaggcagcctgggaatctgaggctggagacaggggtttgaggtgggggcctctctggaagcacatttggagggaaagacaagagagccatgaggagagggctgaggagggcagaagggctaggcagggggcaaattgagcccctcccttccccagtttttctctaagatatacagtgcaatagctccccacccctcagttgacgccagccctgtaaagctggccacagtgtgcagggagaatggggagagggtcttcagtgaggtggctggggcgagagtcggcctggacttccctggggtgctccaggccagagctctttcattggggcgagtgtggtgaggggacgtccttggtcttgcacgcacactacctgggggagtcaacactgggatggtctgtggggtgggagggcctacggatgggtccgtagaggtcccacctccctcattcctccttggcccctctccctagcttctcctgttagctccttctgctcctgaccccacctccttgctcttggcgcccctattgtctctggctacctccttgtcccaccacctccaggctgcatcccaccttccctcttggctactgtaattgtaaatagcgacctttggaaaacgttagcggtgtaacagtccaggaaactgtttttttttgttgttgttgtattgatatgaaatgagattctatttttgtcaaagtatattgtaataataatgactcaaacggcccgtactgtacagacgagattcttctgctgttgttcttgctcccctcccctcctctgagtccgcccctccctgctgcctcctcagtggggcagtgggcaaggggcccaggggcagccgaagcacggggtcctgagacctcaggcaggattggagatcaaaccagagggggcaggcccccagcctgctctctaggatcaccccccgccctaaggggcctggcctggggtgacgtggccaggcagactgtctgccccactccttcacacaagcccagctcctctgcccaaggggtgcggcgcccccttggggtttcctcccagttggagagtagagttaagacaaggcccagttttgtgttagccgaccgtctttgcccacctctatgacccagcctcttgcagtattcccatacttgatgcagggaaggaaccagaagcagaggggcctctacgcaggtacacacgtgtacctgagtgtgttcatgagggcatctggtgtttatgtgtctgagtgtagctttgtatttatgtgtgtgtgtgtgtgtatgtctgattgcacgggtgtacttttgtatttatgtgtgtgtgtggttgcacgggtgtgcctctgtgtgtctctgaccctggctgggtgtgtgtgcaaatctgtgtgactggagctctaggggcatctctgtgtctgagtgtgcctggtgtgtgtttacaaagggagagttggctgctccagctccacagccctgggaccccaactcctgtcttccctgctcctttccctgtgttcaccctcagctctgacacattgaactgcagttggggggattggcagttagccctctgtgcttctccctgcagccctacctctgccaaggtctctccctccagggacctctgcttccacccacatatgtccacttagtcacccacacttgacacagttcctggagtaccctcttcccccaaccccagacctgctttcagagcaaaactcaagtccctcttcctccgtgaagcttctccctcagctgagcagtgatcacttactcactcttaaccccaatccgctgactgggtggggacagcacgtccagccttcccacctctcctgcaggcttctagacggagtttcaaaaactgatgagcctcgatccagggcttgaaagaagccagggtgtaatcttgttcatgcatgcgtccccagagcctcgcccagtgcctggcacatagtaggcactcaataaatgctgaatgggtgaatagttgaatgataggtgctcaataaatgaatgaatggccttcccttctcaggctattcccaccattagtctgcccacctttctaggctgggcttggccaccattaaacacggggtgggggtgagggcccctgcaattcacggtgcaatattcaccagttttgccctctgcctcataaaggcaaacctggcttttgattaccatgtgtggatgtttcagtgtcctttcttctctgtccctggggatggggtggtctgtgaatatgtgacatttctgcagttcagtatccgaaggtttctcttgggggtaggggctcctgggcggccagatgaatgggtccctgggaacccagacctcagatgaggacttaatgtcttcttcctctcaagccaaattcgcctccacccactccctctgaagaactgggcatttgccaaagtaaccactggagtcatctaatggccctccccctccccaggtttcccacagctttcagggacagtgggcaagaggacacccccccccaccacctcagtggaacacaccattctccccccctcaacagcacactcagtgcagcaagactgacccctgaccccctcccagccctccctaccttggacaggaaggaagtaatgcaccttctcttgctgattatttatttgtttggagagacagaaatgtaaaagtgtatctagaaatatctatatctctatatatttttaactgactctttggaatcccctggggtggggtgaggggtaagtttaggctttcgcggaggggaggagacatggagcctgggaactccttgttctcccctctgctgcctctccccaccccttaaagcagttggtagaaggaatggtatttgtatggggggagggaggctggaatggagaatctggattctctcctcttccccattctccagagggagggaggtggtgaggaagaggaagggaggggcaggatgggccatggaggtgccccacccccacacctgacaatcacccacactcctggggctcttcctgggtcctggggcagggcgagtccaagtgtgaggctgttgatttgttttcaatatttcttttcgtgctgtatggtgatgctttcttagtattctacacaataagaaaagacaaagtcctcgagattcttatgagttttgtttgaaaactctttcactatatttgttgtaaagaggtttactattaaaagaaaaagaatacacgtttctgata

SEQ ID NO: 19080 - DNA, 5733 bp, Homo sapiens
  source 1..5733: mol_type = unassigned DNA
atatcaacaacagccgaggcggctcaggcgctcggccccggttccccgcttgcctgccgcccgcctgctggcccccgcgcccacgacgggggcccaggcctcacggcgccgcccagggcccgcgcggacgccggcctcatttattattctccccgcccggagctgcggcttcccggtgttgaagatcccccggaccaggggcgagggctacccgctctttgccgtgacaacaccgttcccccagccgggctggaggctgtgcagaaggtatcctgcagaccatgaactgagcactgttcccagaccgttcatgagcacagtgtaaggtgtgccgagacccaccacccagcgagcccctcccctccgtagcactgaggacccccggagaagatggggaggaaaaagattcagatccagcgaatcaccgacgagcggaaccgacaggtgactttcaccaagcggaagtttggcctgatgaagaaggcgtatgagctgagcgtgctatgtgactgcgagatcgcactcatcatcttcaaccactccaacaagctgttccagtacgccagcaccgacatggacaaggtgctgctcaagtacacggagtacaatgagccacacgagagccgcaccaacgccgacatcatcgagtcaactgtcccggcccccaactttgccatgcctgtcacggtgcccgtgtccaatcagagctcactgcagttcagcaatcccagcggctccctggtcaccccttccctggtgacatcatccctcacggacccgcggctcctgtccccccagcagccagcactacagaggaacagtgtgtctcctggcctgccccagcggccagctagtgcgggggccatgctggggggtgacctgaacagtgctaacggagcctgccccagccctgttgggaatggctacgtcagtgctcgggcttcccctggcctcctccctgtggccaatggcaacagcctaaacaaggtcatccctgccaagtctccacccccacctacccacagcacccagcttggagcccccagccgcaagcccgacctgcgagtcatcacttcccaggcaggaaaggggttaatgcatcacttgactgaggaccatttagatctgaacaatgcccagcgccttggggtctcccagtctactcattcgctcaccaccccagtggtttctgtggcaacgccgagtttactcagccagggcctccccttctcttccatgcccactgcctacaacacagattaccagttgaccagtgcagagctctcctccttaccagcctttagttcacctggggggctgtcgctaggcaatgtcactgcctggcaacagccacagcagccccagcagccgcagcagccacagcctccacagcagcagccaccgcagccacagcagccacagccacagcagcctcagcagccgcaacagccacctcagcaacagtcccacctggtccctgtatctctcagcaacctcatcccgggcagccccctgccccacgtgggtgctgccctcacagtcaccacccacccccacatcagcatcaagtcagaaccggtgtccccaagccgtgagcgcagccctgcgcctccccctccagctgtgttcccagctgcccgccctgagcctggcgatggtctcagcagcccagccgggggatcctatgagacgggagaccgggatgacggacggggggacttcgggcccacactgggcctgctgcgcccagccccagagcctgaggctgagggctcagctgtgaagaggatgcggcttgatacctggacattaaagtgacgattcccactcccctcctctcagcctccctgatgaagagttgacaatctcaccgcccgcccttccctgccccgggctcctcccgctcgacccccacttcctttcttgtgcttcgtgtcctgttgacggttacatttgtgtataattattatattattattattattattatattttttttaatttggattctcgctttggagagggggatgctctcatcccctctttctgtaccccccaccattttcactggctggggggctctctttttcgcgggaaggggggacactttgcacgttgtacacatatgctgcaggaagggggtggggggcccaataaggcctttgggaaaggacaggtgccgagccctgcatgtggagccctcccaccccacccccagatagagggaaataaccaaaaaactaccaaacaacagaaacccacactctagactgaaaccccaaagtgggcttgatgggtgggtttgtgtttcaaggggaaagtgaggcagaggttctgaaaagggtctctgtttttgtgttcatgtagccataggcacatggagcagaatacttaagcctggcccccaaatgcccctgcacacacacgtgccacacctgcgctgattcttgtgtgtgctgcacccccaaggtgtgtgggtgctggctgagctttgggccgggaaggcagcctgggaatctgaggctggagacaggggtttgaggtgggggcctctctggaagcacatttggagggaaagacaagagagccatgaggagagggctgaggagggcagaagggctaggcagggggcaaattgagcccctcccttccccagtttttctctaagatatacagtgcaatagctccccacccctcagttgacgccagccctgtaaagctggccacagtgtgcagggagaatggggagagggtcttcagtgaggtggctggggcgagagtcggcctggacttccctggggtgctccaggccagagctctttcattggggcgagtgtggtgaggggacgtccttggtcttgcacgcacactacctgggggagtcaacactgggatggtctgtggggtgggagggcctacggatgggtccgtagaggtcccacctccctcattcctccttggcccctctccctagcttctcctgttagctccttctgctcctgaccccacctccttgctcttggcgcccctattgtctctggctacctccttgtcccaccacctccaggctgcatcccaccttccctcttggctactgtaattgtaaatagcgacctttggaaaacgttagcggtgtaacagtccaggaaactgtttttttttgttgttgttgtattgatatgaaatgagattctatttttgtcaaagtatattgtaataataatgactcaaacggcccgtactgtacagacgagattcttctgctgttgttcttgctcccctcccctcctctgagtccgcccctccctgctgcctcctcagtggggcagtgggcaaggggcccaggggcagccgaagcacggggtcctgagacctcaggcaggattggagatcaaaccagagggggcaggcccccagcctgctctctaggatcaccccccgccctaaggggcctggcctggggtgacgtggccaggcagactgtctgccccactccttcacacaagcccagctcctctgcccaaggggtgcggcgcccccttggggtttcctcccagttggagagtagagttaagacaaggcccagttttgtgttagccgaccgtctttgcccacctctatgacccagcctcttgcagtattcccatacttgatgcagggaaggaaccagaagcagaggggcctctacgcaggtacacacgtgtacctgagtgtgttcatgagggcatctggtgtttatgtgtctgagtgtagctttgtatttatgtgtgtgtgtgtgtgtatgtctgattgcacgggtgtacttttgtatttatgtgtgtgtgtggttgcacgggtgtgcctctgtgtgtctctgaccctggctgggtgtgtgtgcaaatctgtgtgactggagctctaggggcatctctgtgtctgagtgtgcctggtgtgtgtttacaaagggagagttggctgctccagctccacagccctgggaccccaactcctgtcttccctgctcctttccctgtgttcaccctcagctctgacacattgaactgcagttggggggattggcagttagccctctgtgcttctccctgcagccctacctctgccaaggtctctccctccagggacctctgcttccacccacatatgtccacttagtcacccacacttgacacagttcctggagtaccctcttcccccaaccccagacctgctttcagagcaaaactcaagtccctcttcctccgtgaagcttctccctcagctgagcagtgatcacttactcactcttaaccccaatccgctgactgggtggggacagcacgtccagccttcccacctctcctgcaggcttctagacggagtttcaaaaactgatgagcctcgatccagggcttgaaagaagccagggtgtaatcttgttcatgcatgcgtccccagagcctcgcccagtgcctggcacatagtaggcactcaataaatgctgaatgggtgaatagttgaatgataggtgctcaataaatgaatgaatggccttcccttctcaggctattcccaccattagtctgcccacctttctaggctgggcttggccaccattaaacacggggtgggggtgagggcccctgcaattcacggtgcaatattcaccagttttgccctctgcctcataaaggcaaacctggcttttgattaccatgtgtggatgtttcagtgtcctttcttctctgtccctggggatggggtggtctgtgaatatgtgacatttctgcagttcagtatccgaaggtttctcttgggggtaggggctcctgggcggccagatgaatgggtccctgggaacccagacctcagatgaggacttaatgtcttcttcctctcaagccaaattcgcctccacccactccctctgaagaactgggcatttgccaaagtaaccactggagtcatctaatggccctccccctccccaggtttcccacagctttcagggacagtgggcaagaggacacccccccccaccacctcagtggaacacaccattctccccccctcaacagcacactcagtgcagcaagactgacccctgaccccctcccagccctccctaccttggacaggaaggaagtaatgcaccttctcttgctgattatttatttgtttggagagacagaaatgtaaaagtgtatctagaaatatctatatctctatatatttttaactgactctttggaatcccctggggtggggtgaggggtaagtttaggctttcgcggaggggaggagacatggagcctgggaactccttgttctcccctctgctgcctctccccaccccttaaagcagttggtagaaggaatggtatttgtatggggggagggaggctggaatggagaatctggattctctcctcttccccattctccagagggagggaggtggtgaggaagaggaagggaggggcaggatgggccatggaggtgccccacccccacacctgacaatcacccacactcctggggctcttcctgggtcctggggcagggcgagtccaagtgtgaggctgttgatttgttttcaatatttcttttcgtgctgtatggtgatgctttcttagtattctacacaataagaaaagacaaagtcctcgagattcttatgagttttgtttgaaaactctttcactatatttgttgtaaagaggtttactattaaaagaaaaagaatacacgtttctg

SEQ ID NO: 19081 - DNA, 3194 bp, Homo sapiens
  source 1..3194: mol_type = unassigned DNA
ggggcctgagaccacccctgccctaggcccagctttcctggactgcctgcccccacaaaccaacagcccgcccccaggtccccagtcgaaggtatcctgcagaccatgaactgagcactgttcccagaccgttcatgagcacagtgtaaggtgtgccgagacccaccacccagcgagcccctcccctccgtagcactgaggacccccggagaagatggggaggaaaaagattcagatccagcgaatcaccgacgagcggaaccgacaggtgactttcaccaagcggaagtttggcctgatgaagaaggcgtatgagctgagcgtgctatgtgactgcgagatcgcactcatcatcttcaaccactccaacaagctgttccagtacgccagcaccgacatggacaaggtgctgctcaagtacacggagtacaatgagccacacgagagccgcaccaacgccgacatcatcgagaccctgaggaagaagggcttcaacggctgcgacagccccgagcccgacggggaggactcgctggaacagagccccctgctggaggacaagtaccgacgcgccagcgaggagctcgacgggctcttccggcgctatgggtcaactgtcccggcccccaactttgccatgcctgtcacggtgcccgtgtccaatcagagctcactgcagttcagcaatcccagcggctccctggtcaccccttccctggtgacatcatccctcacggacccgcggctcctgtccccccagcagccagcactacagaggaacagtgtgtctcctggcctgccccagcggccagctagtgcgggggccatgctggggggtgacctgaacagtgctaacggagcctgccccagccctgttgggaatggctacgtcagtgctcgggcttcccctggcctcctccctgtggccaatggcaacagcctaaacaaggtcatccctgccaagtctccacccccacctacccacagcacccagcttggagcccccagccgcaagcccgacctgcgagtcatcacttcccaggcaggaaaggggttaatgcatcacttgaacaatgcccagcgccttggggtctcccagtctactcattcgctcaccaccccagtggtttctgtggcaacgccgagtttactcagccagggcctccccttctcttccatgcccactgcctacaacacagattaccagttgaccagtgcagagctctcctccttaccagcctttagttcacctggggggctgtcgctaggcaatgtcactgcctggcaacagccacagcagccccagcagccgcagcagccacagcctccacagcagcagccaccgcagccacagcagccacagccacagcagcctcagcagccgcaacagccacctcagcaacagtcccacctggtccctgtatctctcagcaacctcatcccgggcagccccctgccccacgtgggtgctgccctcacagtcaccacccacccccacatcagcatcaagtcagaaccggtgtccccaagccgtgagcgcagccctgcgcctccccctccagctgtgttcccagctgcccgccctgagcctggcgatggtctcagcagcccagccgggggatcctatgagacgggagaccgggatgacggacggggggacttcgggcccacactgggcctgctgcgcccagccccagagcctgaggctgagggctcagctgtgaagaggatgcggcttgatacctggacattaaagtgacgattcccactcccctcctctcagcctccctgatgaagagttgacaatctcaccgcccgcccttccctgccccgggctcctcccgctcgacccccacttcctttcttgtgcttcgtgtcctgttgacggttacatttgtgtataattattatattattattattattattatattttttttaatttggattctcgctttggagagggggatgctctcatcccctctttctgtaccccccaccattttcactggctggggggctctctttttcgcgggaaggggggacactttgcacgttgtacacatatgctgcaggaagggggtggggggcccaataaggcctttgggaaaggacaggtgccgagccctgcatgtggagccctcccaccccacccccagatagagggaaataaccaaaaaactaccaaacaacagaaacccacactctagactgaaaccccaaagtgggcttgatgggtgggtttgtgtttcaaggggaaagtgaggcagaggttctgaaaagggtctctgtttttgtgttcatgtagccataggcacatggagcagaatacttaagcctggcccccaaatgcccctgcacacacacgtgccacacctgcgctgattcttgtgtgtgctgcacccccaaggtgtgtgggtgctggctgagctttgggccgggaaggcagcctgggaatctgaggctggagacaggggtttgaggtgggggcctctctggaagcacatttggagggaaagacaagagagccatgaggagagggctgaggagggcagaagggctaggcagggggcaaattgagcccctcccttccccagtttttctctaagatatacagtgcaatagctccccacccctcagttgacgccagccctgtaaagctggccacagtgtgcagggagaatggggagagggtcttcagtgaggtggctggggcgagagtcggcctggacttccctggggtgctccaggccagagctctttcattggggcgagtgtggtgaggggacgtccttggtcttgcacgcacactacctgggggagtcaacactgggatggtctgtggggtgggagggcctacggatgggtccgtagaggtcccacctccctcattcctccttggcccctctccctagcttctcctgttagctccttctgctcctgaccccacctccttgctcttggcgcccctattgtctctggctacctccttgtcccaccacctccaggctgcatcccaccttccctcttggctactgtaattgtaaatagcgacctttggaaaacgttagcggtgtaacagtccaggaaactgtttttttttgttgttgttgtattgatatgaaatgagattctatttttgtcaaagtatattgtaataataatgactcaaacggcccgtactgtacagacga

SEQ ID NO: 19082 - DNA, 5850 bp, Homo sapiens
  source 1..5850: mol_type = unassigned DNA
atatcaacaacagccgaggcggctcaggcgctcggccccggttccccgcttgcctgccgcccgcctgctggcccccgcgcccacgacgggggcccaggcctcacggcgccgcccagggcccgcgcggacgccggcctcatttattattctccccgcccggagctgcggcttcccggtgttgaagatcccccggaccaggggcgagggctacccgctctttgccgtgacaacaccgttcccccagccgggctggaggctgtgcagaaggtatcctgcagaccatgaactgagcactgttcccagaccgttcatgagcacagtgtaaggtgtgccgagacccaccacccagcgagcccctcccctccgtagcactgaggacccccggagaagatggggaggaaaaagattcagatccagcgaatcaccgacgagcggaaccgacaggtgactttcaccaagcggaagtttggcctgatgaagaaggcgtatgagctgagcgtgctatgtgactgcgagatcgcactcatcatcttcaaccactccaacaagctgttccagtacgccagcaccgacatggacaaggtgctgctcaagtacacggagtacaatgagccacacgagagccgcaccaacgccgacatcatcgagaccctgaggaagaagggcttcaacggctgcgacagccccgagcccgacggggaggactcgctggaacagagccccctgctggaggacaagtaccgacgcgccagcgaggagctcgacgggctcttccggcgctatgggtcaactgtcccggcccccaactttgccatgcctgtcacggtgcccgtgtccaatcagagctcactgcagttcagcaatcccagcggctccctggtcaccccttccctggtgacatcatccctcacggacccgcggctcctgtccccccagcagccagcactacagaggaacagtgtgtctcctggcctgccccagcggccagctagtgcgggggccatgctggggggtgacctgaacagtgctaacggagcctgccccagccctgttgggaatggctacgtcagtgctcgggcttcccctggcctcctccctgtggccaatggcaacagcctaaacaaggtcatccctgccaagtctccacccccacctacccacagcacccagcttggagcccccagccgcaagcccgacctgcgagtcatcacttcccaggcaggaaaggggttaatgcatcacttgaacaatgcccagcgccttggggtctcccagtctactcattcgctcaccaccccagtggtttctgtggcaacgccgagtttactcagccagggcctccccttctcttccatgcccactgcctacaacacagattaccagttgaccagtgcagagctctcctccttaccagcctttagttcacctggggggctgtcgctaggcaatgtcactgcctggcaacagccacagcagccccagcagccgcagcagccacagcctccacagcagcagccaccgcagccacagcagccacagccacagcagcctcagcagccgcaacagccacctcagcaacagtcccacctggtccctgtatctctcagcaacctcatcccgggcagccccctgccccacgtgggtgctgccctcacagtcaccacccacccccacatcagcatcaagtcagaaccggtgtccccaagccgtgagcgcagccctgcgcctccccctccagctgtgttcccagctgcccgccctgagcctggcgatggtctcagcagcccagccgggggatcctatgagacgggagaccgggatgacggacggggggacttcgggcccacactgggcctgctgcgcccagccccagagcctgaggctgagggctcagctgtgaagaggatgcggcttgatacctggacattaaagtgacgattcccactcccctcctctcagcctccctgatgaagagttgacaatctcaccgcccgcccttccctgccccgggctcctcccgctcgacccccacttcctttcttgtgcttcgtgtcctgttgacggttacatttgtgtataattattatattattattattattattatattttttttaatttggattctcgctttggagagggggatgctctcatcccctctttctgtaccccccaccattttcactggctggggggctctctttttcgcgggaaggggggacactttgcacgttgtacacatatgctgcaggaagggggtggggggcccaataaggcctttgggaaaggacaggtgccgagccctgcatgtggagccctcccaccccacccccagatagagggaaataaccaaaaaactaccaaacaacagaaacccacactctagactgaaaccccaaagtgggcttgatgggtgggtttgtgtttcaaggggaaagtgaggcagaggttctgaaaagggtctctgtttttgtgttcatgtagccataggcacatggagcagaatacttaagcctggcccccaaatgcccctgcacacacacgtgccacacctgcgctgattcttgtgtgtgctgcacccccaaggtgtgtgggtgctggctgagctttgggccgggaaggcagcctgggaatctgaggctggagacaggggtttgaggtgggggcctctctggaagcacatttggagggaaagacaagagagccatgaggagagggctgaggagggcagaagggctaggcagggggcaaattgagcccctcccttccccagtttttctctaagatatacagtgcaatagctccccacccctcagttgacgccagccctgtaaagctggccacagtgtgcagggagaatggggagagggtcttcagtgaggtggctggggcgagagtcggcctggacttccctggggtgctccaggccagagctctttcattggggcgagtgtggtgaggggacgtccttggtcttgcacgcacactacctgggggagtcaacactgggatggtctgtggggtgggagggcctacggatgggtccgtagaggtcccacctccctcattcctccttggcccctctccctagcttctcctgttagctccttctgctcctgaccccacctccttgctcttggcgcccctattgtctctggctacctccttgtcccaccacctccaggctgcatcccaccttccctcttggctactgtaattgtaaatagcgacctttggaaaacgttagcggtgtaacagtccaggaaactgtttttttttgttgttgttgtattgatatgaaatgagattctatttttgtcaaagtatattgtaataataatgactcaaacggcccgtactgtacagacgagattcttctgctgttgttcttgctcccctcccctcctctgagtccgcccctccctgctgcctcctcagtggggcagtgggcaaggggcccaggggcagccgaagcacggggtcctgagacctcaggcaggattggagatcaaaccagagggggcaggcccccagcctgctctctaggatcaccccccgccctaaggggcctggcctggggtgacgtggccaggcagactgtctgccccactccttcacacaagcccagctcctctgcccaaggggtgcggcgcccccttggggtttcctcccagttggagagtagagttaagacaaggcccagttttgtgttagccgaccgtctttgcccacctctatgacccagcctcttgcagtattcccatacttgatgcagggaaggaaccagaagcagaggggcctctacgcaggtacacacgtgtacctgagtgtgttcatgagggcatctggtgtttatgtgtctgagtgtagctttgtatttatgtgtgtgtgtgtgtgtatgtctgattgcacgggtgtacttttgtatttatgtgtgtgtgtggttgcacgggtgtgcctctgtgtgtctctgaccctggctgggtgtgtgtgcaaatctgtgtgactggagctctaggggcatctctgtgtctgagtgtgcctggtgtgtgtttacaaagggagagttggctgctccagctccacagccctgggaccccaactcctgtcttccctgctcctttccctgtgttcaccctcagctctgacacattgaactgcagttggggggattggcagttagccctctgtgcttctccctgcagccctacctctgccaaggtctctccctccagggacctctgcttccacccacatatgtccacttagtcacccacacttgacacagttcctggagtaccctcttcccccaaccccagacctgctttcagagcaaaactcaagtccctcttcctccgtgaagcttctccctcagctgagcagtgatcacttactcactcttaaccccaatccgctgactgggtggggacagcacgtccagccttcccacctctcctgcaggcttctagacggagtttcaaaaactgatgagcctcgatccagggcttgaaagaagccagggtgtaatcttgttcatgcatgcgtccccagagcctcgcccagtgcctggcacatagtaggcactcaataaatgctgaatgggtgaatagttgaatgataggtgctcaataaatgaatgaatggccttcccttctcaggctattcccaccattagtctgcccacctttctaggctgggcttggccaccattaaacacggggtgggggtgagggcccctgcaattcacggtgcaatattcaccagttttgccctctgcctcataaaggcaaacctggcttttgattaccatgtgtggatgtttcagtgtcctttcttctctgtccctggggatggggtggtctgtgaatatgtgacatttctgcagttcagtatccgaaggtttctcttgggggtaggggctcctgggcggccagatgaatgggtccctgggaacccagacctcagatgaggacttaatgtcttcttcctctcaagccaaattcgcctccacccactccctctgaagaactgggcatttgccaaagtaaccactggagtcatctaatggccctccccctccccaggtttcccacagctttcagggacagtgggcaagaggacacccccccccaccacctcagtggaacacaccattctccccccctcaacagcacactcagtgcagcaagactgacccctgaccccctcccagccctccctaccttggacaggaaggaagtaatgcaccttctcttgctgattatttatttgtttggagagacagaaatgtaaaagtgtatctagaaatatctatatctctatatatttttaactgactctttggaatcccctggggtggggtgaggggtaagtttaggctttcgcggaggggaggagacatggagcctgggaactccttgttctcccctctgctgcctctccccaccccttaaagcagttggtagaaggaatggtatttgtatggggggagggaggctggaatggagaatctggattctctcctcttccccattctccagagggagggaggtggtgaggaagaggaagggaggggcaggatgggccatggaggtgccccacccccacacctgacaatcacccacactcctggggctcttcctgggtcctggggcagggcgagtccaagtgtgaggctgttgatttgttttcaatatttcttttcgtgctgtatggtgatgctttcttagtattctacacaataagaaaagacaaagtcctcgagattcttatgagttttgtttgaaaactctttcactatatttgttgtaaagaggtttactattaaaagaaaaagaatacacgtttctg

SEQ ID NO: 19083 - DNA, 1668 bp, Homo sapiens
  source 1..1668: mol_type = unassigned DNA
gaggctgtgcagaaggtatcctgcagaccatgaactgagcactgttcccagaccgttcatgagcacagtgtaaggtgtgccgagacccaccacccagcgagcccctcccctccgtagcactgaggacccccggagaagatggggaggaaaaagattcagatccagcgaatcaccgacgagcggaaccgacaggtgactttcaccaagcggaagtttggcctgatgaagaaggcgtatgagctgagcgtgctatgtgactgcgagatcgcactcatcatcttcaaccactccaacaagctgttccagtacgccagcaccgacatggacaaggtgctgctcaagtacacggagtacaatgagccacacgagagccgcaccaacgccgacatcatcgaggcgctgcacaagaagcacagggaatgtgagagccctgaggtggacgaggtgtttgccctgaccccccagacggaagagaaatataaaaagatagacgaggagtttgataaaatgatgcagagttatagactggcctcaactgtcccggcccccaactttgccatgcctgtcacggtgcccgtgtccaatcagagctcactgcagttcagcaatcccagcggctccctggtcaccccttccctggtgacatcatccctcacggacccgcggctcctgtccccccagcagccagcactacagaggaacagtgtgtctcctggcctgccccagcggccagctagtgcgggggccatgctggggggtgacctgaacagtgctaacggagcctgccccagccctgttgggaatggctacgtcagtgctcgggcttcccctggcctcctccctgtggccaatggcaacagcctaaacaaggtcatccctgccaagtctccacccccacctacccacagcacccagcttggagcccccagccgcaagcccgacctgcgagtcatcacttcccaggcaggaaaggggttaatgcatcacttgaacaatgcccagcgccttggggtctcccagtctactcattcgctcaccaccccagtggtttctgtggcaacgccgagtttactcagccagggcctccccttctcttccatgcccactgcctacaacacagattaccagttgaccagtgcagagctctcctccttaccagcctttagttcacctggggggctgtcgctaggcaatgtcactgcctggcaacagccacagcagccccagcagccgcagcagccacagcctccacagcagcagccaccgcagccacagcagccacagccacagcagcctcagcagccgcaacagccacctcagcaacagtcccacctggtccctgtatctctcagcaacctcatcccgggcagccccctgccccacgtgggtgctgccctcacagtcaccacccacccccacatcagcatcaagtcagaaccggtgtccccaagccgtgagcgcagccctgcgcctccccctccagctgtgttcccagctgcccgccctgagcctggcgatggtctcagcagcccagccgggggatcctatgagacgggagaccgggatgacggacggggggacttcgggcccacactgggcctgctgcgcccagccccagagcctgaggctgagggctcagctgtgaagaggatgcggcttgatacctgg

SEQ ID NO: 19084 - DNA, 1905 bp, Homo sapiens
  source 1..1905: mol_type = unassigned DNA
ggaggaaggaagcaaaatatcaacaacagccgaggcggctcaggcgctcggccccggttccccgcttgcctgccgcccgcctgctggcccccgcgcccacgacgggggcccaggcctcacggcgccgcccagggcccgcgcggacgccggcctcatttattattctccccgcccggagctgcggcttcccggtgttgaagatcccccggaccaggggcgagggctacccgctctttgccgtgacaacaccgttcccccagccgggctggaggctgtgcagaaggtatcctgcagaccatgaactgagcactgttcccagaccgttcatgagcacagtgtaaggtgtgccgagacccaccacccagcgagcccctcccctccgtagcactgaggacccccggagaagatggggaggaaaaagattcagatccagcgaatcaccgacgagcggaaccgacaggtgactttcaccaagcggaagtttggcctgatgaagaaggcgtatgagctgagcgtgctatgtgactgcgagatcgcactcatcatcttcaaccactccaacaagctgttccagtacgccagcaccgacatggacaaggtgctgctcaagtacacggagtacaatgagccacacgagagccgcaccaacgccgacatcatcgagaccctgaggaagaagggcttcaacggctgcgacagccccgagcccgacggggaggactcgctggaacagagccccctgctggaggacaagtaccgacgcgccagcgaggagctcgacgggctcttccggcgctatggggggccatgctggggggtgacctgaacagtgctaacggagcctgccccagccctgttgggaatggctacgtcagtgctcgggcttcccctggcctcctccctgtggccaatggcaacagcctaaacaaggtcatccctgccaagtctccacccccacctacccacagcacccagcttggagcccccagccgcaagcccgacctgcgagtcatcacttcccaggcaggaaaggggttaatgcatcacttgattaccagttgaccagtgcagagctctcctccttaccagcctttagttcacctggggggctgtcgctaggcaatgtcactgcctggcaacagccacagcagccccagcagccgcagcagccacagcctccacagcagcagccaccgcagccacagcagccacagccacagcagcctcagcagccgcaacagccacctcagcaacagtcccacctggtccctgtatctctcagcaacctcatcccgggcagccccctgccccacgtgggtgctgccctcacagtcaccacccacccccacatcagcatcaagtcagaaccggtgtccccaagccgtgagcgcagccctgcgcctccccctccagctgtgttcccagctgcccgccctgagcctggcgatggtctcagcagcccagccgggggatcctatgagacgggagaccgggatgacggacggggggacttcgggcccacactgggcctgctgcgcccagccccagagcctgaggctgagggctcagctgtgaagaggatgcggcttgatacctggacattaaagtgacgattcccactcccctctccctagcttctcctgttagctccttctgctcctgaccccacctccttgctcttggcgcccctattgtctctggctacctccttgtcccaccacctccaggctgcatcccaccttccctcttggctactgtaattgtaaatagcgacctttggaaaacgttagcggtgtaacagtccaggaaactgtttttttttgttgttgttgtattgatatgaaatgagattctatttttgtcaaagtatattgtaataataatgactcaaacggcccgtactgt

SEQ ID NO: 19085 - DNA, 1629 bp, Homo sapiens
  source 1..1629: mol_type = unassigned DNA
ggggctggagggagagaaggaagaaggaaggggcgaacggcgtgagctggcgccgaaatgggagaaagcagcgagtgagaggggaaggggcgccaggcgagcacccgggagccagcgggacctgggcaggggcgcccggagcaggcgcgcatggcgggccccgcgcggggatccggctggaagagagcgtagcacggctcgcacgagtccggggccgatgtaccaggtgagcggccagcgcccctctggctgcgacgcgccctatggagcccccagcgcagccccgggcccagcccagaccctatccctccttcctgggctggaggtagtaacaggatccactcaccctgcggaggcagcaccagaggagggctccctggaggaggcggcaacccccatgccccaaggcaatggccctggcatcccccagggcctggacagcactgacctcgacgtccccacagaagctgtgacatgccagcctcaggggaaccccttgggctgcaccccacttctgccgaatgactctggccacccctcagagctgggcggcaccagacgggcggggaatggtgccctgggtggccccaaggcccaccggaagttgcagacacacccatctctcgccagccagggcagcaagaagagtaagagcagcagcaaatccaccacctcccagatccccctccaggcacaggaagactgctgtgtccactgcatcctgtcctgcctgttctgcgagttcctgacgctgtgcaacatcgtcctggactgcgccacctgtggctcctgcagctcggaggactcgtgcctctgctgctgctgctgtggctctggcgagtgtgccgactgcgacctgccctgcgacctggactgcggcatcctggatgcctgctgcgagtccgcggactgcctggagatctgcatggagtgctgtgggctctgcttctcctcctgagcctctgtcgggggctaagccagcctggcgcccctgcagattccagcagggtccctctgagtggggccaggcccaggactgtcacacaaggcttgagaagccccctctccctggtcctctcctacccacccatgtcctctcagaaccccagccttgaaaatagtggggggcactcagaggggccacctcctcagccgtgggtggtgggcccatggcagagaagcctgaactctttactgggttaccaggttcatacattgctgaggacctgacaggacaacctaggggcagggctggggtggggaccgcagggggcagccagggctggggaacactgtgaaagttacttggggagggtgggccggtggggccgtagctctctacctctccctgctcctggtgcctgcctctctcctccaccccaggcttagaggacagaaaaatgtgaagagacgccccacccaccctcagccagccctctccagtctcctttcctaggcttttttgggggcctaacccacgcagtgaccccagagggcagggctaggcgagagcctggggtggggcgggagggggaacagtatggaaaagactggaaggggaaaggaagggaagggagggagggtctgttctatctgttgctgtaaataaagatatttgtccatctcaga

SEQ ID NO: 19086 - DNA, 1622 bp, Homo sapiens
  source 1..1622: mol_type = unassigned DNA
ctcctggggcactaggacagacccccgcggctagcagcccggcctggggggcggaacactctcttcttgtcccgccccaccttcctccgggccgcaaccaccccagcccatcgctgggacgtggccgcgggtgccgagagcgctgccggcgccgtgggggccatcccggtcctggccccgacggcgccccaggacctgcgatagccgtccggggccgatgtaccaggtgagcggccagcgcccctctggctgcgacgcgccctatggagcccccagcgcagccccgggcccagcccagaccctatccctccttcctgggctggaggtagtaacaggatccactcaccctgcggaggcagcaccagaggagggctccctggaggaggcggcaacccccatgccccaaggcaatggccctggcatcccccagggcctggacagcactgacctcgacgtccccacagaagctgtgacatgccagcctcaggggaaccccttgggctgcaccccacttctgccgaatgactctggccacccctcagagctgggcggcaccagacgggcggggaatggtgccctgggtggccccaaggcccaccggaagttgcagacacacccatctctcgccagccagggcagcaagaagagtaagagcagcagcaaatccaccacctcccagatccccctccaggcacaggaagactgctgtgtccactgcatcctgtcctgcctgttctgcgagttcctgacgctgtgcaacatcgtcctggactgcgccacctgtggctcctgcagctcggaggactcgtgcctctgctgctgctgctgtggctctggcgagtgtgccgactgcgacctgccctgcgacctggactgcggcatcctggatgcctgctgcgagtccgcggactgcctggagatctgcatggagtgctgtgggctctgcttctcctcctgagcctctgtcgggggctaagccagcctggcgcccctgcagattccagcagggtccctctgagtggggccaggcccaggactgtcacacaaggcttgagaagccccctctccctggtcctctcctacccacccatgtcctctcagaaccccagccttgaaaatagtggggggcactcagaggggccacctcctcagccgtgggtggtgggcccatggcagagaagcctgaactctttactgggttaccaggttcatacattgctgaggacctgacaggacaacctaggggcagggctggggtggggaccgcagggggcagccagggctggggaacactgtgaaagttacttggggagggtgggccggtggggccgtagctctctacctctccctgctcctggtgcctgcctctctcctccaccccaggcttagaggacagaaaaatgtgaagagacgccccacccaccctcagccagccctctccagtctcctttcctaggcttttttgggggcctaacccacgcagtgaccccagagggcagggctaggcgagagcctggggtggggcgggagggggaacagtatggaaaagactggaaggggaaaggaagggaagggagggagggtctgttctatctgttgctgtaaataaagatatttgtcca

SEQ ID NO: 19087 - DNA, 1183 bp, Homo sapiens
  source 1..1183: mol_type = unassigned DNA
tccagagctcccggacagcagccggatcccggccggctcctggggcactaggacagacccccgcggctagcagcccggcctggggggcggaacactctcttcttgtcccgccccaccttcctccgggccgcaaccaccccagcccatcgctgggacgtggccgcgggtgccgagagcgctgccggcgccgtgggggccatcccggtcctggccccgacggcgccccaggacctgcgatagccaaacttttgcagagtttggacaggcaaaggaaaacgtgcagcccgcggatctccgggcctcagagagcagggagtcggggagactgaggccccgctccgagagcgcggaggaagcgcgcccagccggcttcctgtgggggctcgggcctcgggcgccccgcggacagacgtgtccggctcctggctgggccaagcccggcgcgggggaggggacccgcagaggggcgactgagaaggtccggggccgatgtaccaggtgagcggccagcgcccctctggctgcgacgcgccctatggagcccccagcgcagccccgggcccagcccagaccctatccctccttcctgggctggaggtagtaacaggatccactcaccctgcggaggcagcaccagaggagggctccctggaggaggcggcaacccccatgccccaaggcaatggccctggcatcccccagggcctggacagcactgacctcgacgtccccacagaagctgtgacatgccagcctcaggggaaccccttgggctgcaccccacttctgccgaatgactctggccacccctcagagctgggcggcaccagacgggcggggaatggtgccctgggtggccccaaggcccaccggaagttgcagacacacccatctctcgccagccagggcagcaagaagagtaagagcagcagcaaatccaccacctcccagatccccctccaggcacaggaagactgctgtgtccactgcatcctgtcctgcctgttctgcgagttcctgacgctgtgcaacatcgtcctggactgcgccacctgtggctcctgcagctcggaggactcgtgcctctgctgctgctgctgtggctctggcgagtgtgccgactgcgacctgccctgcgacctggactgcggcatcctggatgcctgctgcgagtccgcggact

SEQ ID NO: 19088 - DNA, 703 bp, Homo sapiens
  source 1..703: mol_type = unassigned DNA
agacggtgaggattgccttcggaggtgggtgaggcccagcgtgcgcgcccaggtccggggccgatgtaccaggtgagcggccagcgcccctctggctgcgacgcgccctatggagcccccagcgcagccccgggcccagcccagaccctatccctccttcctgggctggaggtagtaacaggatccactcaccctgcggaggcagcaccagaggagggctccctggaggaggcggcaacccccatgccccaaggcaatggccctggcatcccccagggcctggacagcactgacctcgacgtccccacagaagctgtgacatgccagcctcaggggaaccccttgggctgcaccccacttctgccgaatgactctggccacccctcagagctgggcggcaccagacgggcggggaatggtgccctgggtggccccaaggcccaccggaagttgcagacacacccatctctcgccagccagggcagcaagaagagtaagagcagcagcaaatccaccacctcccagatccccctccaggcacaggaagactgctgtgtccactgcatcctgtcctgcctgttctgcgagttcctgacgctgtgcaacatcgtcctggactgcgccacctgtggctcctgcagctcggaggactcgtgcctctgctgctgctgctgtggctctggcgagtgtgccgactgcgacc

SEQ ID NO: 19089 - DNA, 353 bp, Homo sapiens
  source 1..353: mol_type = unassigned DNA
ggagcgaggggggctggagggagagaaggaagaaggaaggggcgaacggtccggggccgatgtaccaggtgagcggccagcgcccctctggctgcgacgcgccctatggagcccccagcgcagccccgggcccagcccagaccctatccctccttcctgggctggaggtagtaacaggatccactcaccctgcggaggcagcaccagaggagggctccctggaggaggcggcaacccccatgccccaaggcaatggccctggcatcccccagggcctggacagcactgacctcgacgtccccacagaagctgtgacatgccagcctcaggggaaccccttgggctgcacccca

SEQ ID NO: 19090 - DNA, 635 bp, Homo sapiens
  source 1..635: mol_type = unassigned DNA
ccgaaatgggagaaagcagcgagtgagaggggaaggggcgccaggcgagcacccgggagccagcgggacctgggcaggggcgcccggagcaggcgcgcatggcgggccccgcgcggggatccggctggaagagagcgtagcacggctcgcacgagtgagtggacgtgggaggcgcgcatctgcgggggaatcgccccttgcccgcctccggcgccgcccgctgagccctgttttccgcaggtccggggccgatgtaccaggtgagcggccagcgcccctctggctgcgacgcgccctatggagcccccagcgcagccccgggcccagcccagaccctatccctccttcctgggctggaggtagtaacaggatccactcaccctgcggaggcagcaccagaggagggctccctggaggaggcggcaacccccatgccccaaggcaatggccctggcatcccccagggcctggacagcactgacctcgacgtccccacagaagctgtgacatgccagcctcaggggaaccccttgggctgcaccccacttctgccgaatgactctggccacccctcagagctgggcggcaccagacgggcggggaatggtgccctgggtggccccaaggcccaccgg

SEQ ID NO: 19091 - DNA, 1449 bp, Homo sapiens
  source 1..1449: mol_type = unassigned DNA
gagaaggaagaaggaaggggcgaacggcgtgagctggcgccgaaatgggagaaagcagcgagtgagaggggaaggggcgccaggcgagcacccgggagccagcgggacctgggcaggggcgcccggagcaggcgcgcatggcgggccccgcgcggggatccggctggaagagagcgtagcacggctcgcacgagtgagtggacgtgggaggcgcgcatctgcgggggaatcgccccttgcccgcctccggcgccgcccgctgagccctgttttccgcaggtccggggccgatgtaccaggtgagcggccagcgcccctctggctgcgacgcgccctatggagcccccagcgcagccccgggcccagcccagaccctatccctccttcctgggctggaggtagtaacaggatccactcaccctgcggaggcagcaccagaggagggctccctggaggaggcggcaacccccatgccccaaggcaatggccctggcatcccccagggcctggacagcactgacctcgacgtccccacagaagctgtgacatgccagcctcaggggaaccccttgggctgcaccccacttctgccgaatgactctggccacccctcagagctgggcggcaccagacgggcggggaatggtgccctgggtggccccaaggcccaccggaagttgcagacacacccatctctcgccagccagggcagcaagaagagtaagagcagcagcaaatccaccacctcccagatccccctccaggcacaggaagactgctgtgtccactgcatcctgtcctgcctgttctgcgagttcctgacgctgtgcaacatcgtcctggactgcgccacctgtggctcctgcagctcggaggactcgtgcctctgctgctgctgctgtggctctggcgagtgtgccgactgcgacctgccctgcgacctggactgcggcatcctggatgcctgctgcgagtccgcggactgcctggagatctgcatggagtgctgtgggctctgcttctcctcctgagcctctgtcgggggctaagccagcctggcgcccctgcagattccagcagggtccctctgagtggggccaggcccaggactgtcacacaaggcttgagaagccccctctccctggtcctctcctacccacccatgtcctctcagaaccccagccttgaaaatagtggggggcactcagaggggccacctcctcagccgtgggtggtgggcccatggcagagaagcctgaactctttactgggttaccaggttcatacattgctgaggacctgacaggacaacctaggggcagggctaggcgagagcctggggtggggcgggagggggaacagtatggaaaagactggaaggggaaaggaagggaagggagggagggtctgttctatctgttgctgtaaataaagatatttgtccatctc

SEQ ID NO: 19092 - DNA, 1542 bp, Homo sapiens
  source 1..1542: mol_type = unassigned DNA
acccaggccaacaggcgtctgcccttgttaattaccggagcgacagactagggagctccgcccgggatttgcccatcggcggaggcgccaggctcccgtttctccccatccctctcgctgccgtccaggtgcaccgcctgcctctcagcaggatggacgtgatggatggctgccagttctcaccttctgagtacttctacgacggctcctgcataccgtcccccgagggtgaatttggggacgagtttgtgccgcgagtggctgccttcggagcgcacaaagcagagctgcagggctcagatgaggacgagcacgtgcgagcgcctaccggccaccaccaggctggtcactgcctcatgtgggcctgcaaagcctgcaagaggaagtccaccaccatggatcggcggaaggcagccactatgcgcgagcggaggcgcctgaagaaggtcaaccaggctttcgaaaccctcaagaggtgtaccacgaccaaccccaaccagaggctgcccaaggtggagatcctcaggaatgccatccgctacatcgagagcctgcaggagttgctgagagagcaggtggagaactactatagcctgccgggacagagctgctcggagcccaccagccccacctccaactgctctgatggcatgcccgaatgtaacagtcctgtctggtccagaaagagcagtacttttgacagcatctactgtcctgatgtatcaaatgtatatgccacagataaaaactccttatccagcttggattgcttatccaacatagtggaccggatcacctcctcagagcaacctgggttgcctctccaggatctggcttctctctctccagttgccagcaccgattcacagcctgcaactccaggggcttctagttccaggcttatctatcatgtgctatgaactaattttctggtctatatgacttcttccaggagggcctaatacacaggaagaagaaggcttcaaaaagtcccaaaccaagacaacatgtacataaagatttcttttcagttgtaaatttgtaaagattaccttgccactttataagaaagtgtatttaactaaaaagtcatcattgcaaataatactttcttcttctttattattctttgcttagatattaatacatagttccagtaatactatttctgatagggggccattgattgagggtagcttgttgcaatgcttaacttatatatacatatatatatattataaatattgctcatcaaaatgtctctggtgtttagagctttatttttttctttaaaacattaaaacagctgagaatcagttaaatggaattttaaatatatttaactatttcttttctctttaatcctttagttatattgtattaaataaaaatataatactgcctaatgtatatattttgatcttttcttgtaagaaatgtatcttttaaatgtaagcacaaaatagtactttgtggatcatttcaagatataagaaattttggaaattccaccataaataaaattttttactacaagaaata

SEQ ID NO: 19093 - DNA, 1465 bp, Homo sapiens
  source 1..1465: mol_type = unassigned DNA
agttttctttcaaactagatgttctagagagcactagctgcaatcacattgggagactgatgctccatgacagctaaaagttggattgagtttcaggagctactatatataaagctgggtcgacttatgtcactgcactaattaaatgccatctgggtggttcctctgggtttttgagtccatcacccagttcagatcgagtcagaggccaaggaggagaacatgatgatggacctttttgaaactggctcctatttcttctacttggatggggaaaatgttactctgcagccattagaagtggcagaaggctctcctttgtatccagggagtgatggtaccttgtccccctgccaggaccaaatgcccccggaagcggggagcgacagcagcggagaggaacatgtcctggcgcccccgggcctgcagcctccacactgccccggccagtgtctgatctgggcttgcaagacctgcaagagaaaatctgcccccactgaccggcgaaaagccgccaccctgcgcgaaaggaggaggctaaagaaaatcaacgaggccttcgaggcactgaagcggcgaactgtggccaaccccaaccagaggctgcccaaggtggagattctgcggagcgccatcagctatattgagcggctgcaggacctgctgcaccggctggatcagcaggagaagatgcaggagctgggggtggaccccttcagctacagacccaaacaagaaaatcttgagggtgcggatttcctgcgcacctgcagctcccagtggccaagtgtttccgatcattccagggggctcgtgataacggctaaggaaggaggagcaagtattgattcgtcagcctcgagtagccttcgatgcctttcttccatcgtggacagtatttcctcggaggaacgcaaactcccctgcgtggaggaagtggtggagaagtaactgagcctgcgcttgagaccttctccacgcagcaggaagatcccaccgacccttcctggcctaatcctttagattaggtcacattacattaacatttaggaacccagaccgaaaagttgctgaaagggaaggagacacattcacaaagaaacgttgcgaaaattgcgaaatctgttgtgcatgctcaaatgaaaacgcctttcggctttgggcttttatttttttggaactgcgagtggcttaggtctagcctcattttgtttttgtttggttggttttatactatattaacttttattacggtgatccttttgtgccatgttcaaaagaagttcattcctgtctaaagtgggaaagttgcatttaatgttaggggtatttaatgtatttttgtaaatagtttaacactttctttttttacgtaaacctgaaatatattttaaatgtggaatgatgtatataaaatgtgcgaggatcctggtattgtaatattaaaaagaagtttctatatgaa

SEQ ID NO: 19094 - DNA, 1528 bp, Homo sapiens
  source 1..1528: mol_type = unassigned DNA
atggcacccagcagttggcgtgaggggctgctggagcttgggggctggtggcaggaacaagccttttccgaccccatggagctgtatgagacatccccctacttctaccaggaaccccgcttctatgatggggaaaactacctgcctgtccacctccagggcttcgaaccaccaggctacgagcggacggagctcaccctgagccccgaggccccagggccccttgaggacaaggggctggggacccccgagcactgtccaggccagtgcctgccgtgggcgtgtaaggtgtgtaagaggaagtcggtgtccgtggaccggcggcgggcggccacactgagggagaagcgcaggctcaagaaggtgaatgaggccttcgaggccctgaagagaagcaccctgctcaaccccaaccagcggctgcccaaggtggagatcctgcgcagtgccatccagtacatcgagcgcctccaggccctgctcagctccctcaaccaggaggagcgtgacctccgctaccggggcgggggcgggccccagccaggggtgcccagcgaatgcagctctcacagcgcctcctgcagtccagagtggggcagtgcactggagttcagcgccaacccaggggatcatctgctcacggctgaccctacagatgcccacaacctgcactccctcacctccatcgtggacagcatcacagtggaagatgtgtctgtggccttcccagatgaaaccatgcccaactgagattgtcttccaagccgggcatccttgcgagccccccaagctggccacagatgccactacttctgtagcaggggcctcctaagccaggctgccctgatgctaggaagccagctctggggtgccataggccagactatccccttcctcatccatgtaaggttaacccaccccccagcaagggactggacgccctcattcagctgcctccttagaggagagggcatcccctttccagggaggtaaagcaggggaccagagcgccccctcgtgtatgccccagctcagggggcaaactcaggagcttcctttttatcataacgcggcctctaattccaccccccaagtgaaacggtttgagagacgcagtgccctgacctggacaagctgtgcacgtctcctgttctggtctcttcccgatgccagtggctgggctgggcctgccctgaattgagagagaagaaggggagaggaacagccctctgttcccaagtccctggggggccaaacttttgcagtgaatattgggaaccttccagtggttttatgttttgttttgtttcgtgtgttgtttgtaaagctgccatccgaccaaggtctcctgtgctgaagttgccggggacaggcagggaaaaggggttggggcctcttgggggtgatttcttttgttaacaaagcattgtgtggttttgccattgttttgtattttttttttttttttttttttttgctaacttatttggatttccttttttaaaaaatgaataaagactggttgcca

SEQ ID NO: 19095 - DNA, 1170 bp, Homo sapiens
  source 1..1170: mol_type = unassigned DNA
gagcatgttggcctggtcctttgctaggtactgtagagcaggtgagagagtgagggggaaggactccaaattagaccagttcttagccatgaagcagagactctgaagccagactacctgggtcccaatcttgggcttggtatttcctcgctgtgtgactctggactgcgccatggggctcagcgacggggaatggcagttggtgctgaacgtctgggggaaggtggaggctgacatcccaggccatgggcaggaagtcctcatcaggctctttaagggtcacccagagactctggagaagtttgacaagttcaagcacctgaagtcagaggacgagatgaaggcgtctgaggacttaaagaagcatggtgccaccgtgctcaccgccctgggtggcatccttaagaagaaggggcatcatgaggcagagattaagcccctggcacagtcgcatgccaccaagcacaagatccccgtgaagtacctggagttcatctcggaatgcatcatccaggttctgcagagcaagcatcccggggactttggtgctgatgcccagggggccatgaacaaggccctggagctgttccggaaggacatggcctccaactacaaggagctgggcttccagggctaggcccctgccgctcccacccccacccatctgggccccgggttcaagagagagcggggtctgatctcgtgtagccatatagagtttgcttctgagtgtctgctttgtttagtagaggtgggcaggaggagctgaggggctggggctggggtgttgaagttggctttgcatgcccagcgatgcgcctccctgtgggatgtcatcaccctgggaaccgggagtggcccttggctcactgtgttctgcatggtttggatctgaattaattgtcctttcttctaaatcccaaccgaacttcttccaacctccaaactggctgtaaccccaaatccaagccattaactacacctgacagtagcaattgtctgattaatcactggccccttgaagacagcagaatgtccctttgcaatgaggaggagatctgggctgggcgggccagctggggaagcatttgactatctggaacttgtgtgtgcctcctcaggtatggcagtgactcacctggttttaataaaacaacctgcaacatctca

SEQ ID NO: 19096 - DNA, 1197 bp, Homo sapiens
  source 1..1197: mol_type = unassigned DNA
gattagaccctccctggatgagagagagaaagtgaaggagggcaggggagggggacagcgagccattgagcgatctttgtcaagcatcccagaaggtataaaaacgcccttgggaccaggcagcctcaaaccccagctgttggggccaggacacccagtgagcccatacttgctctttttgtcttcttcagactgcgccatggggctcagcgacggggaatggcagttggtgctgaacgtctgggggaaggtggaggctgacatcccaggccatgggcaggaagtcctcatcaggctctttaagggtcacccagagactctggagaagtttgacaagttcaagcacctgaagtcagaggacgagatgaaggcgtctgaggacttaaagaagcatggtgccaccgtgctcaccgccctgggtggcatccttaagaagaaggggcatcatgaggcagagattaagcccctggcacagtcgcatgccaccaagcacaagatccccgtgaagtacctggagttcatctcggaatgcatcatccaggttctgcagagcaagcatcccggggactttggtgctgatgcccagggggccatgaacaaggccctggagctgttccggaaggacatggcctccaactacaaggagctgggcttccagggctaggcccctgccgctcccacccccacccatctgggccccgggttcaagagagagcggggtctgatctcgtgtagccatatagagtttgcttctgagtgtctgctttgtttagtagaggtgggcaggaggagctgaggggctggggctggggtgttgaagttggctttgcatgcccagcgatgcgcctccctgtgggatgtcatcaccctgggaaccgggagtggcccttggctcactgtgttctgcatggtttggatctgaattaattgtcctttcttctaaatcccaaccgaacttcttccaacctccaaactggctgtaaccccaaatccaagccattaactacacctgacagtagcaattgtctgattaatcactggccccttgaagacagcagaatgtccctttgcaatgaggaggagatctgggctgggcgggccagctggggaagcatttgactatctggaacttgtgtgtgcctcctcaggtatggcagtgactcacctggttttaataaaacaacctgcaacatctca

SEQ ID NO: 19097 - DNA, 1153 bp, Homo sapiens
  source 1..1153: mol_type = unassigned DNA
aatggcacctgccctaaaatagcttcccatgtgagggctagagaaaggaaaagattagaccctccctggatgagagagagaaagtgaaggagggcaggggagggggacagcgagccattgagcgatctttgtcaagcatcccagaagactgcgccatggggctcagcgacggggaatggcagttggtgctgaacgtctgggggaaggtggaggctgacatcccaggccatgggcaggaagtcctcatcaggctctttaagggtcacccagagactctggagaagtttgacaagttcaagcacctgaagtcagaggacgagatgaaggcgtctgaggacttaaagaagcatggtgccaccgtgctcaccgccctgggtggcatccttaagaagaaggggcatcatgaggcagagattaagcccctggcacagtcgcatgccaccaagcacaagatccccgtgaagtacctggagttcatctcggaatgcatcatccaggttctgcagagcaagcatcccggggactttggtgctgatgcccagggggccatgaacaaggccctggagctgttccggaaggacatggcctccaactacaaggagctgggcttccagggctaggcccctgccgctcccacccccacccatctgggccccgggttcaagagagagcggggtctgatctcgtgtagccatatagagtttgcttctgagtgtctgctttgtttagtagaggtgggcaggaggagctgaggggctggggctggggtgttgaagttggctttgcatgcccagcgatgcgcctccctgtgggatgtcatcaccctgggaaccgggagtggcccttggctcactgtgttctgcatggtttggatctgaattaattgtcctttcttctaaatcccaaccgaacttcttccaacctccaaactggctgtaaccccaaatccaagccattaactacacctgacagtagcaattgtctgattaatcactggccccttgaagacagcagaatgtccctttgcaatgaggaggagatctgggctgggcgggccagctggggaagcatttgactatctggaacttgtgtgtgcctcctcaggtatggcagtgactcacctggttttaataaaacaacctgcaacatctca

SEQ ID NO: 19098 - DNA, 582 bp, Homo sapiens
  source 1..582: mol_type = unassigned DNA
gctataagacacctctccccacccccagccctggccgcttggctggaggctctgcgaggacagctggggagaaggggagctgtgactgcgccatggggctcagcgacggggaatggcagttggtgctgaacgtctgggggaaggtggaggctgacatcccaggccatgggcaggaagtcctcatcaggctctttaagggtcacccagagactctggagaagtttgacaagttcaagcacctgaagtcagaggacgagatgaaggcgtctgaggacttaaagaagcatggtgccaccgtgctcaccgccctgggtggcatccttaagaagaaggggcatcatgaggcagagattaagcccctggcacagtcgcatgccaccaagcacaagatccccgtgaagtacctggagttcatctcggaatgcatcatccaggttctgcagagcaagcatcccggggactttggtgctgatgcccagggggccatgaacaaggccctggagctgttccggaaggacatggcctccaactacaaggagctgggcttccagggctaggcccctgccgctcccacccccaccc

SEQ ID NO: 19099 - DNA, 418 bp, Homo sapiens
  source 1..418: mol_type = unassigned DNA
cttggctggaggctctgcgaggacagctggggagaaggggagctgtgcccagatttaccaaagggaattgtcagctgtccaagggctagcaaattcctaggtcacctagattggattttctgaccataaaaactgtgggccaggtgcacagctgcctgaggggctcaaacctgtgcagactgcgccatggggctcagcgacggggaatggcagttggtgctgaacgtctgggggaaggtggaggctgacatcccaggccatgggcaggaagtcctcatcaggctctttaagggtcacccagagactctggagaagtttgacaagttcaagcacctgaagtcagaggacgagatgaaggcgtctgaggacttaaagaagcatggtgccaccgtgctcaccgccctgggtggcatcctta

SEQ ID NO: 19100 - DNA, 648 bp, Homo sapiens
  source 1..648: mol_type = unassigned DNA
gcaagccaaaaccctgggcagactcaatccaaaaataaacaatcaaagagcatgttggcctggtcctttgctaggtactgtagagcaggtgagagagtgagggggaaggactccaaattagaccagttcttagccatgaagcagagactctgaagccagactacctgggtcccaatcttgggcttggtatttcctcgctgtgtgactctggactgcgccatggggctcagcgacggggaatggcagttggtgctgaacgtctgggggaaggtggaggctgacatcccaggccatgggcaggaagtcctcatcaggctctttaagggtcacccagagactctggagaagtttgacaagttcaagcacctgaagtcagaggacgagatgaaggcgtctgaggacttaaagaagcatggtgccaccgtgctcaccgccctgggtggcatccttaagaagaaggggcatcatgaggcagagattaagcccctggcacagtcgcatgccaccaagcacaagatccccgtgaagtacctggagttcatctcggaatgcatcatccaggttctgcagagcaagcatcccggggactttggtgctgatgcccagggggccatgaacaaggccctggagctgttccggaaggacatg

SEQ ID NO: 19101 - DNA, 515 bp, Homo sapiens
  source 1..515: mol_type = unassigned DNA
gagagcattgatgaggtcaggaagcctcctgttgggtagaggagcaactaagagactgaacttggcccccaccctgaggctcacaagcttgaattgcacctgagttccaaaggagaagttgacattcttccagaacatatgcccagtgtcttcaacttgagatggagctgggatgccaagtctgcaaatactgcgccatggggctcagcgacggggaatggcagttggtgctgaacgtctgggggaaggtggaggctgacatcccaggccatgggcaggaagtcctcatcaggctctttaagggtcacccagagactctggagaagtttgacaagttcaagcacctgaagtcagaggacgagatgaaggcgtctgaggacttaaagaagcatggtgccaccgtgctcaccgccctgggtggcatccttaagaagaaggggcatcatgaggcagagattaagcccctggcacagtcgcatgccaccaagcacaagatccccgtgaagtacctggag

SEQ ID NO: 19102 - DNA, 551 bp, Homo sapiens
  source 1..551: mol_type = unassigned DNA
agtgcccaacctcctccccttctttccacacgcacaaccaccccaccccctgtggcctgagctgtcctgcctcgccacaatggcacctgccctaaaatagcttcccatgtgagggctagagaaaggaaaagattagaccctccctggatgagagagagaaagtgaaggagggcaggggagggggacagcgagccattgagcgatctttgtcaagcatcccagaagactgcgccatggggctcagcgacggggaatggcagttggtgctgaacgtctgggggaaggtggaggctgacatcccaggccatgggcaggaagtcctcatcaggctctttaagggtcacccagagactctggagaagtttgacaagttcaagcacctgaagtcagaggacgagatgaaggcgtctgaggacttaaagaagcatggtgccaccgtgctcaccgccctgggtggcatccttaagaagaaggggcatcatgaggcagagattaagcccctggcacagtcgcatgccaccaagcacaagatccccgtgaagtacctggag

SEQ ID NO: 19103 - DNA, 1030 bp, Homo sapiens
  source 1..1030: mol_type = unassigned DNA
aaaccccagctgttggggccaggacacccagtgagcccatacttgctctttttgtcttcttcagactgcgccatggggctcagcgacggggaatggcagttggtgctgaacgtctgggggaagtcctcatcaggctctttaagggtcacccagagactctggagaagtttgacaagttcaagcacctgaagtcagaggacgagatgaaggcgtctgaggacttaaagaagcatggtgccaccgtgctcaccgccctgggtggcatccttaagaagaaggggcatcatgaggcagagattaagcccctggcacagtcgcatgccaccaagcacaagatccccgtgaagtacctggagttcatctcggaatgcatcatccaggttctgcagagcaagcatcccggggactttggtgctgatgcccagggggccatgaacaaggccctggagctgttccggaaggacatggcctccaactacaaggagctgggcttccagggctaggcccctgccgctcccacccccacccatctgggccccgggttcaagagagagcggggtctgatctcgtgtagccatatagagtttgcttctgagtgtctgctttgtttagtagaggtgggcaggaggagctgaggggctggggctggggtgttgaagttggctttgcatgcccagcgatgcgcctccctgtgggatgtcatcaccctgggaaccgggagtggcccttggctcactgtgttctgcatggtttggatctgaattaattgtcctttcttctaaatcccaaccgaacttcttccaacctccaaactggctgtaaccccaaatccaagccattaactacacctgacagtagcaattgtctgattaatcactggccccttgaagacagcagaatgtccctttgcaatgaggaggagatctgggctgggcgggccagctggggaagcatttgactatctggaacttgtgtgtgcctcctcaggtatggcagtgactcacctggttttaataaaacaacctgcaac

SEQ ID NO: 19104 - DNA, 5014 bp, Homo sapiens
  source 1..5014: mol_type = unassigned DNA
aacgggagggaggcacaggcgcttgctttgcaggagtcagctctgccttcctcggctggagtgtgggtggcttggtgagccggtggtcaggaattctctctcctccttgcaattttcctttctgtctgggagcacgccaagatgtcccttgtgactgtccccttctaccagaagagacataggcacttcgaccagtcctaccgtaatattcaaacacggtacctgctggacgaatatgcgtcaaaaaagcgagcttccacccaggcatcttcccagaagtccttgagtcagcggtcgtcttcacagagagcctccagccagacgtccctgggaggaaccatctgcagggtctgtgcgaagcgagtgagcacgcaggaagatgaggagcaggagaacagaagcaggtaccagtccctggtggccgcctatggtgaggccaagcgacagcgcttcctcagcgagctggcccacttggaggaggatgtccacctggcacgctcccaggcccgcgacaagctggacaaatacgccattcagcagatgatggaggacaagctggcctgggagagacacacatttgaagagcggataagcagggctcctgagatcctggtgcggctgcgatcccacaccgtctgggagaggatgtctgtgaaactctgcttcaccgtgcaaggatttcccacgcccgtggtgcagtggtacaaagatggcagtctgatttgccaggcggctgaaccgggaaagtacaggattgagagcaactatggcgtacacacactggagatcaacagggcagactttgacgacactgcgacatactcagcagtggccaccaatgcccacggacaagtgtccaccaacgcggcggtggtggtgagaaggttccggggagacgaggaaccattccgttcggtgggactcccgattggattgcccctgtcatcgatgattccgtacacgcacttcgacgtccagtttttggagaagtttggggtcaccttcaggagggaaggcgagacggtcactctcaagtgcaccatgctggtgacgccggacctgaagcgggtgcagccgcgcgccgagtggtaccgcgatgacgtgctgttgaaagagtccaagtggacgaagatgttctttggagaaggccaggcctccctgtccttcagccacctgcacaaggacgacgagggcctgtacaccctgcgcatcgtgtctcggggcggcgtcagcgaccacagcgccttcctgtttgtcagagatgctgacccgctggtcacaggggcccccggtgcacccatggacttgcagtgccacgacgccaaccgggactacgtcatcgtgacctggaagccgcccaacaccaccactgagagccccgtcatgggctattttgtggaccgatgtgaagtaggaacgaataattgggtgcagtgcaatgatgcaccggtgaaaatctgcaaatacccggtcacagggctttttgaaggaaggtcttacatattccgagtgagggcagtgaacagtgcgggcatcagccgaccctccagggtctctgatgcggtggctgcacttgaccccttggacctcagaaggttacaagccgttcatttggagggagagaaggagattgccatttatcaggatgaccttgaaggtgacgcccaggttccagggcctcccaccggtgtgcacgcttccgagatcagcagaaactatgtcgtcctcagctgggagccacccactccccgtggcaaggacccgctcatgtacttcattgagaagtcggtggtggggagcggcagctggcagagagtcaacgcccagacggctgtgagatccccgagatatgccgtgtttgacctcatggaagggaagtcttatgtgttccgagtgctgtcagcaaaccggcatggcctgagcgaaccttcggagataacgtcccccattcaggcccaggatgtgaccgttgtcccttctgctccgggtcgggttcttgcttcccgaaacaccaagacgtcggtggtggtgcagtgggaccgacctaagcatgaggaggacctgctgggctactacgtggactgctgtgtggccggaaccaacctctgggagccctgcaaccacaagcccattggatacaacaggttcgtggtgcacggcttaaccacgggagagcagtacatcttccgagtcaaggcggtcaatgctgtggggatgagtgaaaattcccaggaatcagacgtcataaaagtgcaggccgcactcaccgtcccgtcccatccttatgggattacgctcctcaactgtgacggccactccatgaccctcggctggaaggtcccgaaattcagtggtggctcgcccatcctgggctactacctggacaagcgtgaagttcaccataaaaactggcacgaggtcaattcctcacccagcaaaccgacaatcctaacggtggacggcttgacggaaggctcactctacgagttcaaaatcgccgccgtcaacctggccggcatcggggagccctcagatcccagtgagcacttcaagtgtgaggcctggaccatgccggagcccggtcctgcctacgacttgacgttctgtgaggtcagggacacgtccttggtcatgctgtggaaggcccctgtgtactccggcagcagccctgtttctggatatttcgtggacttcagggaggaggatgctggagagtggatcactgtaaatcagacgacaacagccaaccgttatttaaaggtctctgacctgcagcaaggtaagacctatgtcttcagggtccgggcagtcaatgcaaatggcgtggggaagccctcagacacgtcggagcctgtgctggtagaggcgagaccaggcaccaaggaaatcagtgctggtgtcgatgaacaaggcaacatctatctgggcttcgactgccaggaaatgacagacgcgtctcagttcacctggtgtaaatcctacgaggagatttcagatgatgagaggtttaaaatcgaaaccgtgggggatcactccaagctgtacttaaagaatccggataaggaggatttagggacttactccgtgtctgtaagtgatacagacggagtgtcctccagttttgttctggacccagaagagctcgagcgtttgatggcattgagcaatgaaataaagaaccccacaattcctctgaaatcggaattagcttatgagatttttgataaggggcgggttcgcttctggctccaggctgagcacttatcaccagatgccagctaccgatttattattaacgacagagaagtctctgacagcgagatacacagaattaaatgtgacaaagctactggcattattgagatggtgatggatcgatttagtattgaaaatgaggggacctacactgtgcagattcatgatgggaaagccaaaagtcagtcttctctagttcttattggagatgcattcaagactgtgctggaagaggctgagtttcaaaggaaagaatttctcaggaaacaaggccctcattttgctgagtacttgcactgggatgtcacggaagaatgtgaagttcgacttgtttgcaaggttgcaaacaccaagaaagaaaccgttttcaaatggctcaaggatgatgttctgtatgaaacggagacactgcctaacctggagaggggaatctgtgagctcctcatcccaaagttgtcaaagaaggaccacggtgaatacaaggcaaccttgaaagatgacagaggccaagatgtgtccatccttgaaatagctggcaaagtgtatgatgatatgattttggcaatgagtagagtctgtgggaaatctgcttcgccactgaaggtactctgcaccccagaaggaatacgacttcagtgtttcatgaagtattttacagacgaaatgaaagtgaactggtgtcacaaagatgctaagatctcatccagtgagcatatgagaatcggggggagtgaagagatggcttggctgcagatatgtgagccgactgagaaggataaaggaaaatacacttttgagattttcgatggcaaagacaaccatcaacgctcccttgacctgtccggacaagcttttgatgaagcatttgcagaattccagcaattcaaagctgctgcttttgcagagaagaatcgtggcaggttgatcggcggcttgcctgacgtggtgaccatcatggaagggaagaccttgaatctgacctgcacggtgtttggaaaccctgaccccgaagtgatttggttcaagaacgaccaggacatccagctcagcgagcacttctcggtgaaggtggagcaggccaagtacgtcagcatgaccatcaaaggcgtgacctccgaggactcgggcaagtacagcatcaacatcaagaataagtatggcggggagaagatcgacgtgacagtgagcgtgtacaaacacggggagaagatcccggacatggccccgccccagcaagccaagcccaagctcatccccgcgtctgcctcagcggcaggccagtgaaggcgttttcctagcctggagatgggaaaatatgcttggcagagacaggaatgctgtgtgcttgttccaaatgagcagctggcatccgagtggtgtcctgtgtgggctgatagttgatcacacattgtgcttttgatttttgcatttggtgatgaatattttatacccgtctaagggagaaagctaatgttttccacaagactgaacaacgtgtatttacacgagggtagacggcagatgcctgacagagagtgggttggcagacaacacactagcattttcacgggtgtgggcacatgggtgtggcacctggacgtgtgcagcatgtggcggtctgtgtgaagccaccgtgcttctctttggggggccgcgagatctagcatctctgaaatcctggctgtcgaggctttgaagcatgtgttacctggttaagcttgttttctcttgctttaggcaaataaaagtttaaaaatca

SEQ ID NO: 19105 - DNA, 3644 bp, Homo sapiens
  source 1..3644: mol_type = unassigned DNA
gtcacaccgacctgcaccatctctcgcctgcctgtggggtttctgtcaactagtcgtggagggaaggagactctttaaagaataacatcttattgtggccatgccagaacccactaagaaagaggatgaagaggaagtctccccgcctagcgccttgcctccagactggacccttgtcgaaactcctcctggggaggaacaagccaagcagaatgccaactcccagctgtccatcttgttcattgaaaaacctcaaggaggaacagtgaaagttggtgaagatatcaccttcatagccaaagtcaaggctgaagatcttctgagaaaacccactatcaaatggttcaaaggaaaatggatggacctggccagcaaagccgggaagcaccttcagctgaaggaaacctttgagaggcacagtcgggtgtacacatttgagatgcagatcatcaaggccaaagataactttgcaggaaattacagatgcgaggtcacctataaggataagtttgacagctgttcatttgatcttgaagtgcacgaatctactgggactactccaaacattgacatcagatctgctttcaagagaagtggagaaggtcaagaggatgcaggagaacttgactttagtggtctcctgaaacgtagggaggtgaagcagcaggaggaagaaccccaggtggacgtatgggagttgctgaagaacgcgaaacccagtgagtacgagaagatcgccttccagtatggaatcaccgacctgcgcggcatgctcaagcgactcaagcgcatgcgcagagaggagaagaagagcgcagcttttgcaaaaattcttgatcctgcatatcaggttgacaaaggaggcagagtgaggtttgttgtggagctggcagatccaaagttggaggtgaaatggtataaaaatggtcaagaaattcgacccagtaccaaatacatctttgaacacaaaggatgccagagaatcctgtttatcaataactgtcagatgacagatgattcagagtattatgtgacagccggtgatgagaaatgttccactgagctcttcgtaagagagcctccaattatggtgaccaaacagctggaagatacaactgcttattgtggggagagagtggaattagaatgtgaggtgtctgaagatgatgccaatgtaaaatggtttaagaatggtgaagagattatccctggtccaaaatcaagataccgaattagagttgagggtaaaaaacacatcttgatcatagagggagcaacaaaggctgatgctgcagaatattcagtaatgacaacaggaggacaatcatctgctaaacttagtgttgacttgaaacctctgaagattttgacacctctgactgatcagactgtaaatcttggaaaagaaatctgcctgaagtgtgaaatctctgaaaacataccaggaaaatggactaaaaatggcctacctgttcaggagagtgaccgtctaaaggtggttcacaagggaaggatccacaagttagtgatagccaatgccctcactgaagatgaaggtgattatgtatttgcacctgatgcctacaatgttactctgcctgccaaagttcatgttattgatcctcctaagatcatcctggatggtcttgatgctgacaacacagtgacagtgattgcaggaaacaagcttcgtcttgagatccccatcagcggagaaccacctcctaaagccatgtggagccggggagataaggctattatggaaggcagtggccggataagaacagaatcttaccctgatagcagcactctggtcattgatatagctgaaagagatgactctggtgtttaccacatcaatctgaaaaacgaagctggagaggcacatgcaagcatcaaggttaaagttgtggacttccctgatcctccagtggcaccgactgtgacagaggtgggagatgactggtgtatcatgaactgggagcctcctgcctacgacggaggctctccaatcctaggatattttattgagaggaagaagaaacaaagctccaggtggatgaggctgaattttgatctctgcaaagaaacaacttttgagcccaagaagatgattgaaggtgtggcctatgaggtccgcatctttgcagtcaatgccattggcatctccaagcccagtatgccctccaggccttttgttcctttggctgtaacaagccctcctactcttctgactgtggactctgtcactgacacgactgtcacgatgaggtggcgccccccagaccacattggtgcagcaggtttagatggctatgtgctagagtattgctttgaaggaactgaggactggatagttgcaaacaaagatctgattgacaagacgaagttcaccatcacaggtctgccaacagatgcaaagatctttgtgcgtgtgaaggctgttaatgcagctggtgccagcgagcccaagtactattctcagcccattctcgtgaaggaaatcatagaacctccaaagattcgcattccaagacacctgaagcaaacctatatccgcagagttggagaagctgtcaatctggttatacctttccagggaaaaccaagaccagaattaacttggaagaaggatggtgcagaaattgataagaatcaaataaacattcgcaactctgagactgatacaatcatatttattagaaaagcagagaggagccactctgggaaatatgatctgcaagtcaaagtggacaaattcgtggagaccgcatcaattgacatccagatcattgaccgtccaggtccaccccaaattgtgaagattgaggatgtctggggagaaaatgtcgctctcacatggactccaccaaaggatgatggaaatgctgctatcacaggctataccattcagaaggctgacaagaagagcatggaatggtttactgtcattgagcattatcatcgaaccagtgccaccattactgaattggtcatagggaatgaatattacttccgggtcttttctgaaaacatgtgtggcctcagtgaggatgccaccatgactaaagagagtgcagtgatcgccagggatggtaaaatctacaaaaatccagtgtatgaagactttgatttctcagaggcacccatgtttactcagcctttggttaacacctatgccatagctggttacaatgccaccctaaactgcagtgtgagaggaaatcctaagcctaaaataacctggatgaaaaacaaagttgctattgtggatgatccaagatacaggatgttcagcaaccagggagtctgtaccctggaaattcgcaagcccagcccctatgatggaggcacttactgctgcaaagcagtcaatgaccttgggacagtggagattgaatgcaaactggaggtgaaaggtgggctctccttctgcagactcctcttgcaaggcgtacctccaaacataattgattcgtatctgcgagacttacactcaagcaatcctgaggaatactgagggagggcctggctactgtctctctgcactctgctgctttgaaatctggttgaaatgagaaaaagcattttctgttttcccaccaggcccccaagtgtggtctttttctttcctcctaatgttg

SEQ ID NO: 19106 - DNA, 3861 bp, Homo sapiens
  source 1..3861: mol_type = unassigned DNA
ttgtcacaccgacctgcaccatctctcgcctgcctgtggggtttctgtcaactagtcgtggagggaaggagactctttaaagaataacatcttattgtggccatgccagaacccactaagaaagaggaaaatgaagtgccagccccagccccacccccggaagaaccaagtaaagagaaggaggccggaactacaccagcaaaagactggacccttgtcgaaactcctcctggggaggaacaagccaagcagaatgccaactcccagctgtccatcttgttcattgaaaaacctcaaggaggaacagtgaaagttggtgaagatatcaccttcatagccaaagtcaaggctgaagatcttctgagaaaacccactatcaaatggttcaaaggaaaatggatggacctggccagcaaagccgggaagcaccttcagctgaaggaaacctttgagaggcacagtcgggtgtacacatttgagatgcagatcatcaaggccaaagataactttgcaggaaattacagatgcgaggtcacctataaggataagtttgacagctgttcatttgatcttgaagtgcacgaatctactgggactactccaaacattgacatcagatctgctttcaagagaagtggagaaggtcaagaggatgcaggagaacttgactttagtggtctcctgaaacgtagggaggtgaagcagcaggaggaagaaccccaggtggacgtatgggagttgctgaagaacgcgaaacccagtgagtacgagaagatcgccttccagtatggaatcaccgacctgcgcggcatgctcaagcgactcaagcgcatgcgcagagaggagaagaagagcgcagcttttgcaaaaattcttgatcctgcatatcaggttgacaaaggaggcagagtgaggtttgttgtggagctggcagatccaaagttggaggtgaaatggtataaaaatggtcaagaaattcgacccagtaccaaatacatctttgaacacaaaggatgccagagaatcctgtttatcaataactgtcagatgacagatgattcagagtattatgtgacagccggtgatgagaaatgttccactgagctcttcgtaagagagcctccaattatggtgaccaaacagctggaagatacaactgcttattgtggggagagagtggaattagaatgtgaggtgtctgaagatgatgccaatgtaaaatggtttaagaatggtgaagagattatccctggtccaaaatcaagataccgaattagagttgagggtaaaaaacacatcttgatcatagagggagcaacaaaggctgatgctgcagaatattcagtaatgacaacaggaggacaatcatctgctaaacttagtgttgacttgaaacctctgaagattttgacacctctgactgatcagactgtaaatcttggaaaagaaatctgcctgaagtgtgaaatctctgaaaacataccaggaaaatggactaaaaatggcctacctgttcaggagagtgaccgtctaaaggtggttcacaagggaaggatccacaagttagtgatagccaatgccctcactgaagatgaaggtgattatgtatttgcacctgatgcctacaatgttactctgcctgccaaagttcatgttattgatcctcctaagatcatcctggatggtcttgatgctgacaacacagtgacagtgattgcaggaaacaagcttcgtcttgagatccccatcagcggagaaccacctcctaaagccatgtggagccggggagataaggctattatggaaggcagtggccggataagaacagaatcttaccctgatagcagcactctggtcattgatatagctgaaagagatgactctggtgtttaccacatcaatctgaaaaacgaagctggagaggcacatgcaagcatcaaggttaaagttgtggacttccctgatcctccagtggcaccgactgtgacagaggtgggagatgactggtgtatcatgaactgggagcctcctgcctacgacggaggctctccaatcctaggatattttattgagaggaagaagaaacaaagctccaggtggatgaggctgaattttgatctctgcaaagaaacaacttttgagcccaagaagatgattgaaggtgtggcctatgaggtccgcatctttgcagtcaatgccattggcatctccaagcccagtatgccctccaggccttttgttcctttggctgtaacaagccctcctactcttctgactgtggactctgtcactgacacgactgtcacgatgaggtggcgccccccagaccacattggtgcagcaggtttagatggctatgtgctagagtattgctttgaaggaagtacatcagcaaaacagtctgatgaaaatggggaggctgcctatgatctgccagctgaggactggatagttgcaaacaaagatctgattgacaagacgaagttcaccatcacaggtctgccaacagatgcaaagatctttgtgcgtgtgaaggctgttaatgcagctggtgccagcgagcccaagtactattctcagcccattctcgtgaaggaaatcatagaacctccaaagattcgcattccaagacacctgaagcaaacctatatccgcagagttggagaagctgtcaatctggttatacctttccagggaaaaccaagaccagaattaacttggaagaaggatggtgcagaaattgataagaatcaaataaacattcgcaactctgagactgatacaatcatatttattagaaaagcagagaggagccactctgggaaatatgatctgcaagtcaaagtggacaaattcgtggagaccgcatcaattgacatccagatcattgaccgtccaggtccaccccaaattgtgaagattgaggatgtctggggagaaaatgtcgctctcacatggactccaccaaaggatgatggaaatgctgctatcacaggctataccattcagaaggctgacaagaagagcatggaatggtttactgtcattgagcattatcatcgaaccagtgccaccattactgaattggtcatagggaatgaatattacttccgggtcttttctgaaaacatgtgtggcctcagtgaggatgccaccatgactaaagagagtgcagtgatcgccagggatggtaaaatctacaaaaatccagtgtatgaagactttgatttctcagaggcacccatgtttactcagcctttggttaacacctatgccatagctggttacaatgccaccctaaactgcagtgtgagaggaaatcctaagcctaaaataacctggatgaaaaacaaagttgctattgtggatgatccaagatacaggatgttcagcaaccagggagtctgtaccctggaaattcgcaagcccagcccctatgatggaggcacttactgctgcaaagcagtcaatgaccttgggacagtggagattgaatgcaaactggaggtgaaagtgatatatcaaggagtaaatacccctggacaaccagtcttcctggaggggcagcaacaggtgggctctccttctgcagactcctcttgcaaggcgtacctccaaacataattgattcgtatctgcgagacttacactcaagcaatcctgaggaatactgagggagggcctggctactgtctctctgcactctgctgctttgaaatctggttgaaatgagaaaaagcattttctgttttcccaccaggcccccaagtgtggtctttttctttcctcctaatgttgaagagaaaaaaaaaaaaaaaagtttgcccagattgcttaattaaaaattgcaaacaaaatctc

SEQ ID NO: 19107 - DNA, 3512 bp, Homo sapiens
  source 1..3512: mol_type = unassigned DNA
gcctgcctgtggggtttctgtcaactagtcgtggagggaaggagactctttaaagaataacatcttattgtggccatgccagaacccactaagaaagaggaaaatgaagtgccagccccagccccacccccggaagaaccaagtaaagagaaggaggccggaactacaccagcaaaagactggacccttgtcgaaactcctcctggggaggaacaagccaagcagaatgccaactcccagctgtccatcttgttcattgaaaaacctcaaggaggaacagtgaaagttggtgaagatatcaccttcatagccaaagtcaaggctgaagatcttctgagaaaacccactatcaaatggttcaaaggaaaatggatggacctggccagcaaagccgggaagcaccttcagctgaaggaaacctttgagaggcacagtcgggtgtacacatttgagatgcagatcatcaaggccaaagataactttgcaggaaattacagatgcgaggtcacctataaggataagtttgacagctgttcatttgatcttgaagtgcacgaatctactgggactactccaaacattgacatcagatctgctttcaagagaagggaggtgaagcagcaggaggaagaaccccaggtggacgtatgggagttgctgaagaacgcgaaacccagtgagtacgagaagatcgccttccagtatggaatcaccgacctgcgcggcatgctcaagcgactcaagcgcatgcgcagagaggagaagaagagcgcagcttttgcaaaaattcttgatcctgcatatcaggttgacaaaggaggcagagtgaggtttgttgtggagctggcagatccaaagttggaggtgaaatggtataaaaatggtcaagaaattcgacccagtaccaaatacatctttgaacacaaaggatgccagagaatcctgtttatcaataactgtcagatgacagatgattcagagtattatgtgacagccggtgatgagaaatgttccactgagctcttcgtaagagagcctccaattatggtgaccaaacagctggaagatacaactgcttattgtggggagagagtggaattagaatgtgaggtgtctgaagatgatgccaatgtaaaatggtttaagaatggtgaagagattatccctggtccaaaatcaagataccgaattagagttgagggtaaaaaacacatcttgatcatagagggagcaacaaaggctgatgctgcagaatattcagtaatgacaacaggaggacaatcatctgctaaacttagtgttgacttgaaacctctgaagattttgacacctctgactgatcagactgtaaatcttggaaaagaaatctgcctgaagtgtgaaatctctgaaaacataccaggaaaatggactaaaaatggcctacctgttcaggagagtgaccgtctaaaggtggttcacaagggaaggatccacaagttagtgatagccaatgccctcactgaagatgaaggtgattatgtatttgcacctgatgcctacaatgttactctgcctgccaaagttcatgttattgatcctcctaagatcatcctggatggtcttgatgctgacaacacagtgacagtgattgcaggaaacaagcttcgtcttgagatccccatcagcggagaaccacctcctaaagccatgtggagccggggagataaggctattatggaaggcagtggccggataagaacagaatcttaccctgatagcagcactctggtcattgatatagctgaaagagatgactctggtgtttaccacatcaatctgaaaaacgaagctggagaggcacatgcaagcatcaaggttaaagttgtggacttccctgatcctccagtggcaccgactgtgacagaggtgggagatgactggtgtatcatgaactgggagcctcctgcctacgacggaggctctccaatcctaggatattttattgagaggaagaagaaacaaagctccaggtggatgaggctgaattttgatctctgcaaagaaacaacttttgagcccaagaagatgattgaaggtgtggcctatgaggtccgcatctttgcagtcaatgccattggcatctccaagcccagtatgccctccaggccttttgttcctttggctgtaacaagccctcctactcttctgactgtggactctgtcactgacacgactgtcacgatgaggtggcgccccccagaccacattggtgcagcaggtttagatggctatgtgctagagtattgctttgaaggaactgaggactggatagttgcaaacaaagatctgattgacaagacgaagttcaccatcacaggtctgccaacagatgcaaagatctttgtgcgtgtgaaggctgttaatgcagctggtgccagcgagcccaagtactattctcagcccattctcgtgaaggaaatcatagaacctccaaagattcgcattccaagacacctgaagcaaacctatatccgcagagttggagaagctgtcaatctggttatacctttccagggaaaaccaagaccagaattaacttggaagaaggatggtgcagaaattgataagaatcaaataaacattcgcaactctgagactgatacaatcatatttattagaaaagcagagaggagccactctgggaaatatgatctgcaagtcaaagtggacaaattcgtggagaccgcatcaattgacatccagatcattgaccgtccaggtccaccccaaattgtgaagattgaggatgtctggggagaaaatgtcgctctcacatggactccaccaaaggatgatggaaatgctgctatcacaggctataccattcagaaggctgacaagaagagcatggaatggtttactgtcattgagcattatcatcgaaccagtgccaccattactgaattggtcatagggaatgaatattacttccgggtcttttctgaaaacatgtgtggcctcagtgaggatgccaccatgactaaagagagtgcagtgatcgccagggatggtaaaatctacaaaaatccagtgtatgaagactttgatttctcagaggcacccatgtttactcagcctttggttaacacctatgccatagctggttacaatgccaccctaaactgcagtgtgagaggaaatcctaagcctaaaataacctggatgaaaaacaaagttgctattgtggatgatccaagatacaggatgttcagcaaccagggagtctgtaccctggaaattcgcaagcccagcccctatgatggaggcacttactgctgcaaagcagtcaatgaccttgggacagtggagattgaatgcaaactggaggtgaaagtgatatatcaaggagtaaatacccctggacaaccagtcttcctggaggggcagcaacagtcattgcacaataaggatttttgaatgtataatatcatctaaggtgggctctccttctgcagactcctcttgcaagg

SEQ ID NO: 19108 - DNA, 3834 bp, Homo sapiens
  source 1..3834: mol_type = unassigned DNA
agatgtgagaaaggtccccatagctgtcaagttcctgcatccttgtgctgaagaaagggaggtgccatcatgattgatgttcagaggcagtataaaagcactgggtttctccccaactgcttgtcacaccgacctgcaccatctctcgcctgcctgtggggtttctgtcaactagtcgtggagggaaggagactctttaaagaataacatcttattgtggccatgccagaacccactaagaaagaggactggacccttgtcgaaactcctcctggggaggaacaagccaagcagaatgccaactcccagctgtccatcttgttcattgaaaaacctcaaggaggaacagtgaaagttggtgaagatatcaccttcatagccaaagtcaaggctgaagatcttctgagaaaacccactatcaaatggttcaaaggaaaatggatggacctggccagcaaagccgggaagcaccttcagctgaaggaaacctttgagaggcacagtcgggtgtacacatttgagatgcagatcatcaaggccaaagataactttgcaggaaattacagatgcgaggtcacctataaggataagtttgacagctgttcatttgatcttgaagtgcacgaatctactgggactactccaaacattgacatcagatctgctttcaagagaagtggagaaggtcaagaggatgcaggagaacttgactttagtggtctcctgaaacgtagggaggtgaagcagcaggaggaagaaccccaggtggacgtatgggagttgctgaagaacgcgaaacccagtgagtacgagaagatcgccttccagtatggaatcaccgacctgcgcggcatgctcaagcgactcaagcgcatgcgcagagaggagaagaagagcgcagcttttgcaaaaattcttgatcctgcatatcaggttgacaaaggaggcagagtgaggtttgttgtggagctggcagatccaaagttggaggtgaaatggtataaaaatggtcaagaaattcgacccagtaccaaatacatctttgaacacaaaggatgccagagaatcctgtttatcaataactgtcagatgacagatgattcagagtattatgtgacagccggtgatgagaaatgttccactgagctcttcgtaagagagcctccaattatggtgaccaaacagctggaagatacaactgcttattgtggggagagagtggaattagaatgtgaggtgtctgaagatgatgccaatgtaaaatggtttaagaatggtgaagagattatccctggtccaaaatcaagataccgaattagagttgagggtaaaaaacacatcttgatcatagagggagcaacaaaggctgatgctgcagaatattcagtaatgacaacaggaggacaatcatctgctaaacttagtgttgacttgaaacctctgaagattttgacacctctgactgatcagactgtaaatcttggaaaagaaatctgcctgaagtgtgaaatctctgaaaacataccaggaaaatggactaaaaatggcctacctgttcaggagagtgaccgtctaaaggtggttcacaagggaaggatccacaagttagtgatagccaatgccctcactgaagatgaaggtgattatgtatttgcacctgatgcctacaatgttactctgcctgccaaagttcatgttattgatcctcctaagatcatcctggatggtcttgatgctgacaacacagtgacagtgattgcaggaaacaagcttcgtcttgagatccccatcagcggagaaccacctcctaaagccatgtggagccggggagataaggctattatggaaggcagtggccggataagaacagaatcttaccctgatagcagcactctggtcattgatatagctgaaagagatgactctggtgtttaccacatcaatctgaaaaacgaagctggagaggcacatgcaagcatcaaggttaaagttgtggacttccctgatcctccagtggcaccgactgtgacagaggtgggagatgactggtgtatcatgaactgggagcctcctgcctacgacggaggctctccaatcctaggatattttattgagaggaagaagaaacaaagctccaggtggatgaggctgaattttgatctctgcaaagaaacaacttttgagcccaagaagatgattgaaggtgtggcctatgaggtccgcatctttgcagtcaatgccattggcatctccaagcccagtatgccctccaggccttttgttcctttggctgtaacaagccctcctactcttctgactgtggactctgtcactgacacgactgtcacgatgaggtggcgccccccagaccacattggtgcagcaggtttagatggctatgtgctagagtattgctttgaaggaactgaggactggatagttgcaaacaaagatctgattgacaagacgaagttcaccatcacaggtctgccaacagatgcaaagatctttgtgcgtgtgaaggctgttaatgcagctggtgccagcgagcccaagtactattctcagcccattctcgtgaaggaaatcatagaacctccaaagattcgcattccaagacacctgaagcaaacctatatccgcagagttggagaagctgtcaatctggttatacctttccagggaaaaccaagaccagaattaacttggaagaaggatggtgcagaaattgataagaatcaaataaacattcgcaactctgagactgatacaatcatatttattagaaaagcagagaggagccactctgggaaatatgatctgcaagtcaaagtggacaaattcgtggagaccgcatcaattgacatccagatcattgaccgtccaggtccaccccaaattgtgaagattgaggatgtctggggagaaaatgtcgctctcacatggactccaccaaaggatgatggaaatgctgctatcacaggctataccattcagaaggctgacaagaagagcatggaatggtttactgtcattgagcattatcatcgaaccagtgccaccattactgaattggtcatagggaatgaatattacttccgggtcttttctgaaaacatgtgtggcctcagtgaggatgccaccatgactaaagagagtgcagtgatcgccagggatggtaaaatctacaaaaatccagtgtatgaagactttgatttctcagaggcacccatgtttactcagcctttggttaacacctatgccatagctggttacaatgccaccctaaactgcagtgtgagaggaaatcctaagcctaaaataacctggatgaaaaacaaagttgctattgtggatgatccaagatacaggatgttcagcaaccagggagtctgtaccctggaaattcgcaagcccagcccctatgatggaggcacttactgctgcaaagcagtcaatgaccttgggacagtggagattgaatgcaaactggaggtgaaagtgatatatcaaggagtaaatacccctggacaaccagtcttcctggaggggcagcaacagtcattgcacaataaggatttttgaatgtataatatcatctaaggtgggctctccttctgcagactcctcttgcaaggcgtacctccaaacataattgattcgtatctgcgagacttacactcaagcaatcctgaggaatactgagggagggcctggctactgtctctctgcactctgctgctttgaaatctggttgaaatgagaaaaagcattttctgttttcccaccaggcccccaagtgtggtctttttctttcctcctaatgttgaagag

SEQ ID NO: 19109 - DNA, 3749 bp, Homo sapiens
  source 1..3749: mol_type = unassigned DNA
gtcacaccgacctgcaccatctctcgcctgcctgtggggtttctgtcaactagtcgtggagggaaggagactctttaaagaataacatcttattgtggccatgccagaacccactaagaaagaggaaaatgaagtgccagccccagccccacccccggaagactggacccttgtcgaaactcctcctggggaggaacaagccaagcagaatgccaactcccagctgtccatcttgttcattgaaaaacctcaaggaggaacagtgaaagttggtgaagatatcaccttcatagccaaagtcaaggctgaagatcttctgagaaaacccactatcaaatggttcaaaggaaaatggatggacctggccagcaaagccgggaagcaccttcagctgaaggaaacctttgagaggcacagtcgggtgtacacatttgagatgcagatcatcaaggccaaagataactttgcaggaaattacagatgcgaggtcacctataaggataagtttgacagctgttcatttgatcttgaagtgcacgaatctactgggactactccaaacattgacatcagatctgctttcaagagaagtggagaaggtcaagaggatgcaggagaacttgactttagtggtctcctgaaacgtagggaggtgaagcagcaggaggaagaaccccaggtggacgtatgggagttgctgaagaacgcgaaacccagtgagtacgagaagatcgccttccagtatggaatcaccgacctgcgcggcatgctcaagcgactcaagcgcatgcgcagagaggagaagaagagcgcagcttttgcaaaaattcttgatcctgcatatcaggttgacaaaggaggcagagtgaggtttgttgtggagctggcagatccaaagttggaggtgaaatggtataaaaatggtcaagaaattcgacccagtaccaaatacatctttgaacacaaaggatgccagagaatcctgtttatcaataactgtcagatgacagatgattcagagtattatgtgacagccggtgatgagaaatgttccactgagctcttcgtaagagagcctccaattatggtgaccaaacagctggaagatacaactgcttattgtggggagagagtggaattagaatgtgaggtgtctgaagatgatgccaatgtaaaatggtttaagaatggtgaagagattatccctggtccaaaatcaagataccgaattagagttgagggtaaaaaacacatcttgatcatagagggagcaacaaaggctgatgctgcagaatattcagtaatgacaacaggaggacaatcatctgctaaacttagtgttgacttgaaacctctgaagattttgacacctctgactgatcagactgtaaatcttggaaaagaaatctgcctgaagtgtgaaatctctgaaaacataccaggaaaatggactaaaaatggcctacctgttcaggagagtgaccgtctaaaggtggttcacaagggaaggatccacaagttagtgatagccaatgccctcactgaagatgaaggtgattatgtatttgcacctgatgcctacaatgttactctgcctgccaaagttcatgttattgatcctcctaagatcatcctggatggtcttgatgctgacaacacagtgacagtgattgcaggaaacaagcttcgtcttgagatccccatcagcggagaaccacctcctaaagccatgtggagccggggagataaggctattatggaaggcagtggccggataagaacagaatcttaccctgatagcagcactctggtcattgatatagctgaaagagatgactctggtgtttaccacatcaatctgaaaaacgaagctggagaggcacatgcaagcatcaaggttaaagttgtggacttccctgatcctccagtggcaccgactgtgacagaggtgggagatgactggtgtatcatgaactgggagcctcctgcctacgacggaggctctccaatcctaggatattttattgagaggaagaagaaacaaagctccaggtggatgaggctgaattttgatctctgcaaagaaacaacttttgagcccaagaagatgattgaaggtgtggcctatgaggtccgcatctttgcagtcaatgccattggcatctccaagcccagtatgccctccaggccttttgttcctttggctgtaacaagccctcctactcttctgactgtggactctgtcactgacacgactgtcacgatgaggtggcgccccccagaccacattggtgcagcaggtttagatggctatgtgctagagtattgctttgaaggaactgaggactggatagttgcaaacaaagatctgattgacaagacgaagttcaccatcacaggtctgccaacagatgcaaagatctttgtgcgtgtgaaggctgttaatgcagctggtgccagcgagcccaagtactattctcagcccattctcgtgaaggaaatcatagaacctccaaagattcgcattccaagacacctgaagcaaacctatatccgcagagttggagaagctgtcaatctggttatacctttccagggaaaaccaagaccagaattaacttggaagaaggatggtgcagaaattgataagaatcaaataaacattcgcaactctgagactgatacaatcatatttattagaaaagcagagaggagccactctgggaaatatgatctgcaagtcaaagtggacaaattcgtggagaccgcatcaattgacatccagatcattgaccgtccaggtccaccccaaattgtgaagattgaggatgtctggggagaaaatgtcgctctcacatggactccaccaaaggatgatggaaatgctgctatcacaggctataccattcagaaggctgacaagaagagcatggaatggtttactgtcattgagcattatcatcgaaccagtgccaccattactgaattggtcatagggaatgaatattacttccgggtcttttctgaaaacatgtgtggcctcagtgaggatgccaccatgactaaagagagtgcagtgatcgccagggatggtaaaatctacaaaaatccagtgtatgaagactttgatttctcagaggcacccatgtttactcagcctttggttaacacctatgccatagctggttacaatgccaccctaaactgcagtgtgagaggaaatcctaagcctaaaataacctggatgaaaaacaaagttgctattgtggatgatccaagatacaggatgttcagcaaccagggagtctgtaccctggaaattcgcaagcccagcccctatgatggaggcacttactgctgcaaagcagtcaatgaccttgggacagtggagattgaatgcaaactggaggtgaaagtgatatatcaaggagtaaatacccctggacaaccagtcttcctggaggggcagcaacagtcattgcacaataaggatttttgaatgtataatatcatctaaggtgggctctccttctgcagactcctcttgcaaggcgtacctccaaacataattgattcgtatctgcgagacttacactcaagcaatcctgaggaatactgagggagggcctggctactgtctctctgcactctgctgctttgaaatctggttgaaatgagaaaaagcattttctgttttcccaccaggcccccaagtgtggtctttttctttcctcctaatgttgaagaga

SEQ ID NO: 19110 - DNA, 4214 bp, Homo sapiens
  source 1..4214: mol_type = unassigned DNA
agtccctctttgggtgacctgtgcctgcttcgtgcctggtgtgacgtctctcaggatgcctgagccggggaagaagccagtctcagcttttagcaagaagccacggtcagtggaagtggccgcaggcagccctgccgtgttcgaggccgagacagagcgggcaggagtgaaggtgcgctggcagcgcggaggcagtgacatcagcgccagcaacaagtacggcctggccacagagggcacacggcatacgctgacagtgcgggaagtgggccctgccgaccagggatcttacgcagtcattgctggctcctccaaggtcaagttcgacctcaaggtcatagaggcagagaaggcagagcccatgctggcccctgcccctgcccctgctgaggccactggagcccctggagaagccccggccccagccgctgagctgggagaaagtgccccaagtcccaaagggtcaagctcagcagctctcaatggtcctacccctggagcccccgatgaccccattggcctcttcgtgatgcggccacaggatggcgaggtgaccgtgggtggcagcatcaccttctcagcccgcgtggccggcgccagcctcctgaagccgcctgtggtcaagtggttcaagggcaaatgggtggacctgagcagcaaggtgggccagcacctgcagctgcacgacagctacgaccgcgccagcaaggtctatctgttcgagctgcacatcaccgatgcccagcctgccttcactggcagctaccgctgtgaggtgtccaccaaggacaaatttgactgctccaacttcaatctcactgtccacgaggccatgggcaccggagacctggacctcctatcagccttccgccgcacgagcctggctggaggtggtcggcggatcagtgatagccatgaggacactgggattctggacttcagctcactgctgaaaaagagcagcagtttccggaccccgagggactcgaagctggaggcaccagcagaggaggacgtgtgggagatcctacggcaggcacccccatctgagtacgagcgcatcgccttccagtacggcgtcactgacctgcgcggcatgctaaagaggctcaagggcatgaggcgcgatgagaagaagagcacagcctttcagaagaagctggagccggcctaccaggtgagcaaaggccacaagatccggctgaccgtggaactggctgaccatgacgctgaggtcaaatggctcaagaatggccaggagatccagatgagcggcaggtacatctttgagtccatcggtgccaagcgtaccctgaccatcagccagtgctcattggcggacgacgcagcctaccagtgcgtggtgggtggcgagaagtgtagcacggagctctttgtgaaagagccccctgtgctcatcacgcgccccttggaggaccagctggtgatggtggggcagcgggtggagtttgagtgtgaagtatcggaggagggggcgcaagtcaaatggctgaaggacggggtggagctgacccgggaggagaccttcaaataccggttcaagaaggacgggcagagacaccacctgatcatcaacgaggccatgctggaggacgcggggcactatgcactgtgcactagcgggggccaggcgctggctgagctcattgtgcaggaaaagaagctggaggtgtaccagagcatcgcagacctgatggtgggcgcaaaggaccaggcggtgttcaaatgtgaggtctcagatgagaatgttcggggtgtgtggctgaagaatgggaaggagctggtgcccgacagccgcataaaggtgtcccacatcgggcgggtccacaaactgaccattgacgacgtcacacctgccgacgaggctgactacagctttgtgcccgagggcttcgcctgcaacctgtcagccaagctccacttcatggaggtcaagattgacttcgtacccaggcaggaacctcccaagatccacctggactgcccaggccgcataccagacaccattgtggttgtagctggaaataagctacgtctggacgtccctatctctggggaccctgctcccactgtgatctggcagaaggctatcacgcaggggaataaggccccagccaggccagccccagatgccccagaggacacaggtgacagcgatgagtgggtgtttgacaagaagctgctgtgtgagaccgagggccgggtccgcgtggagaccaccaaggaccgcagcatcttcacggtcgagggggcagagaaggaagatgagggcgtctacacggtcacagtgaagaaccctgtgggcgaggaccaggtcaacctcacagtcaaggtcatcgacgtgccagacgcacctgcggcccccaagatcagcaacgtgggagaggactcctgcacagtacagtgggagccgcctgcctacgatggcgggcagcccatcctgggctacatcctggagcgcaagaagaagaagagctaccggtggatgcggctgaacttcgacctgattcaggagctgagtcatgaagcgcggcgcatgatcgagggcgtggtgtacgagatgcgcgtctacgcggtcaacgccatcggcatgtccaggcccagccctgcctcccagcccttcatgcctatcggtccccccagcgaacccacccacctggcagtagaggacgtctctgacaccacggtctccctcaagtggcggcccccagagcgcgtgggagcaggaggcctggatggctacagcgtggagtactgcccagagggctgctcagagtgggtggctgccctgcaggggctgacagagcacacatcgatactggtgaaggacctgcccacgggggcccggctgcttttccgagtgcgggcacacaatatggcagggcctggagcccctgttaccaccacggagccggtgacagtgcaggagatcctgcaacggccacggcttcagctgcccaggcacctgcgccagaccattcagaagaaggtcggggagcctgtgaaccttctcatccctttccagggcaagccccggcctcaggtgacctggaccaaagaggggcagcccctggcaggcgaggaggtgagcatccgcaacagccccacagacaccatcctgttcatccgggccgctcgccgcgtgcattcaggcacttaccaggtgacggtgcgcattgagaacatggaggacaaggccacgctggtgctgcaggttgttgacaagccaagtcctccccaggatctccgggtgactgacgcctggggtcttaatgtggctctggagtggaagccaccccaggatgtcggcaacacggagctctgggggtacacagtgcagaaagccgacaagaagaccatggagtggttcaccgtcttggagcattaccgccgcacccactgcgtggtgccagagctcatcattggcaatggctactacttccgcgtcttcagccagaatatggttggctttagtgacagagcggccaccaccaaggagcccgtctttatccccagaccaggcatcacctatgagccacccaactataaggccctggacttctccgaggccccaagcttcacccagcccctggtgaaccgctcggtcatcgcgggctacactgctatgctctgctgtgctgtccggggtagccccaagcccaagatttcctggttcaagaatggcctggacctgggagaagacgcccgcttccgcatgttcagcaagcagggagtgttgactctggagattagaaagccctgcccctttgacgggggcatctatgtctgcagggccaccaacttacagggcgaggcacggtgtgagtgccgcctggaggtgcgagtgcctcagtgaccaggctggctcctggggatggccaggtacaaccggatgccagccccgtgccaggagcctggagggaagttggggaaacccctccctactgttggatgtatgtgtgacaagtgtgtctcctgtgctgcgatgggggatcagcagggcagttgtcgggcagtcctgagtgggtgttgcacagactggtccacagggctcctgaaggaagcccctggatctttggggtaaaaggagggtggcctcaagaaacaatgtctggggacaggcctttctggcctgctatgtcttcccaatgtttattgggcaataaaagataagtgcagtcacagagaactca

SEQ ID NO: 19111 - DNA, 4217 bp, Homo sapiens
  source 1..4217: mol_type = unassigned DNA
agtccctctttgggtgacctgtgcctgcttcgtgcctggtgtgacgtctctcaggatgcctgagccggggaagaagccagtctcagcttttagcaagaagccacggtcagtggaagtggccgcaggcagccctgccgtgttcgaggccgagacagagcgggcaggagtgaaggtgcgctggcagcgcggaggcagtgacatcagcgccagcaacaagtacggcctggccacagagggcacacggcatacgctgacagtgcgggaagtgggccctgccgaccagggatcttacgcagtcattgctggctcctccaaggtcaagttcgacctcaaggtcatagaggcagagaaggcagagcccatgctggcccctgcccctgcccctgctgaggccactggagcccctggagaagccccggccccagccgctgagctgggagaaagtgccccaagtcccaaagggtcaagctcagcagctctcaatggtcctacccctggagcccccgatgaccccattggcctcttcgtgatgcggccacaggatggcgaggtgaccgtgggtggcagcatcaccttctcagcccgcgtggccggcgccagcctcctgaagccgcctgtggtcaagtggttcaagggcaaatgggtggacctgagcagcaaggtgggccagcacctgcagctgcacgacagctacgaccgcgccagcaaggtctatctgttcgagctgcacatcaccgatgcccagcctgccttcactggcagctaccgctgtgaggtgtccaccaaggacaaatttgactgctccaacttcaatctcactgtccacgaggccatgggcaccggagacctggacctcctatcagccttccgccgcacgagcctggctggaggtggtcggcggatcagtgatagccatgaggacactgggattctggacttcagctcactgctgaaaaagagcagcagtttccggaccccgagggactcgaagctggaggcaccagcagaggaggacgtgtgggagatcctacggcaggcacccccatctgagtacgagcgcatcgccttccagtacggcgtcactgacctgcgcggcatgctaaagaggctcaagggcatgaggcgcgatgagaagaagagcacagcctttcagaagaagctggagccggcctaccaggtgagcaaaggccacaagatccggctgaccgtggaactggctgaccatgacgctgaggtcaaatggctcaagaatggccaggagatccagatgagcggcagcaagtacatctttgagtccatcggtgccaagcgtaccctgaccatcagccagtgctcattggcggacgacgcagcctaccagtgcgtggtgggtggcgagaagtgtagcacggagctctttgtgaaagagccccctgtgctcatcacgcgccccttggaggaccagctggtgatggtggggcagcgggtggagtttgagtgtgaagtatcggaggagggggcgcaagtcaaatggctgaaggacggggtggagctgacccgggaggagaccttcaaataccggttcaagaaggacgggcagagacaccacctgatcatcaacgaggccatgctggaggacgcggggcactatgcactgtgcactagcgggggccaggcgctggctgagctcattgtgcaggaaaagaagctggaggtgtaccagagcatcgcagacctgatggtgggcgcaaaggaccaggcggtgttcaaatgtgaggtctcagatgagaatgttcggggtgtgtggctgaagaatgggaaggagctggtgcccgacagccgcataaaggtgtcccacatcgggcgggtccacaaactgaccattgacgacgtcacacctgccgacgaggctgactacagctttgtgcccgagggcttcgcctgcaacctgtcagccaagctccacttcatggaggtcaagattgacttcgtacccaggcaggaacctcccaagatccacctggactgcccaggccgcataccagacaccattgtggttgtagctggaaataagctacgtctggacgtccctatctctggggaccctgctcccactgtgatctggcagaaggctatcacgcaggggaataaggccccagccaggccagccccagatgccccagaggacacaggtgacagcgatgagtgggtgtttgacaagaagctgctgtgtgagaccgagggccgggtccgcgtggagaccaccaaggaccgcagcatcttcacggtcgagggggcagagaaggaagatgagggcgtctacacggtcacagtgaagaaccctgtgggcgaggaccaggtcaacctcacagtcaaggtcatcgacgtgccagacgcacctgcggcccccaagatcagcaacgtgggagaggactcctgcacagtacagtgggagccgcctgcctacgatggcgggcagcccatcctgggctacatcctggagcgcaagaagaagaagagctaccggtggatgcggctgaacttcgacctgattcaggagctgagtcatgaagcgcggcgcatgatcgagggcgtggtgtacgagatgcgcgtctacgcggtcaacgccatcggcatgtccaggcccagccctgcctcccagcccttcatgcctatcggtccccccagcgaacccacccacctggcagtagaggacgtctctgacaccacggtctccctcaagtggcggcccccagagcgcgtgggagcaggaggcctggatggctacagcgtggagtactgcccagagggctgctcagagtgggtggctgccctgcaggggctgacagagcacacatcgatactggtgaaggacctgcccacgggggcccggctgcttttccgagtgcgggcacacaatatggcagggcctggagcccctgttaccaccacggagccggtgacagtgcaggagatcctgcaacggccacggcttcagctgcccaggcacctgcgccagaccattcagaagaaggtcggggagcctgtgaaccttctcatccctttccagggcaagccccggcctcaggtgacctggaccaaagaggggcagcccctggcaggcgaggaggtgagcatccgcaacagccccacagacaccatcctgttcatccgggccgctcgccgcgtgcattcaggcacttaccaggtgacggtgcgcattgagaacatggaggacaaggccacgctggtgctgcaggttgttgacaagccaagtcctccccaggatctccgggtgactgacgcctggggtcttaatgtggctctggagtggaagccaccccaggatgtcggcaacacggagctctgggggtacacagtgcagaaagccgacaagaagaccatggagtggttcaccgtcttggagcattaccgccgcacccactgcgtggtgccagagctcatcattggcaatggctactacttccgcgtcttcagccagaatatggttggctttagtgacagagcggccaccaccaaggagcccgtctttatccccagaccaggcatcacctatgagccacccaactataaggccctggacttctccgaggccccaagcttcacccagcccctggtgaaccgctcggtcatcgcgggctacactgctatgctctgctgtgctgtccggggtagccccaagcccaagatttcctggttcaagaatggcctggacctgggagaagacgcccgcttccgcatgttcagcaagcagggagtgttgactctggagattagaaagccctgcccctttgacgggggcatctatgtctgcagggccaccaacttacagggcgaggcacggtgtgagtgccgcctggaggtgcgagtgcctcagtgaccaggctggctcctggggatggccaggtacaaccggatgccagccccgtgccaggagcctggagggaagttggggaaacccctccctactgttggatgtatgtgtgacaagtgtgtctcctgtgctgcgatgggggatcagcagggcagttgtcgggcagtcctgagtgggtgttgcacagactggtccacagggctcctgaaggaagcccctggatctttggggtaaaaggagggtggcctcaagaaacaatgtctggggacaggcctttctggcctgctatgtcttcccaatgtttattgggcaataaaagataagtgcagtcacagagaactca

SEQ ID NO: 19112 - DNA, 4217 bp, Homo sapiens
  source 1..4217: mol_type = unassigned DNA
agtccctctttgggtgacctgtgcctgcttcgtgcctggtgtgacgtctctcaggatgcctgagccggggaagaagccagtctcagcttttagcaagaagccacggtcagtggaagtggccgcaggcagccctgccgtgttcgaggccgagacagagcgggcaggagtgaaggtgcgctggcagcgcggaggcagtgacatcagcgccagcaacaagtacggcctggccacagagggcacacggcatacgctgacagtgcgggaagtgggccctgccgaccagggatcttacgcagtcattgctggctcctccaaggtcaagttcgacctcaaggtcatagaggcagagaaggcagagcccatgctggcccctgcccctgcccctgctgaggccactggagcccctggagaagccccggccccagccgctgagctgggagaaagtgccccaagtcccaaagggtcaagctcagcagctctcaatggtcctacccctggagcccccgatgaccccattggcctcttcgtgatgcggccacaggatggcgaggtgaccgtgggtggcagcatcaccttctcagcccgcgtggccggcgccagcctcctgaagccgcctgtggtcaagtggttcaagggcaaatgggtggacctgagcagcaaggtgggccagcacctgcagctgcacgacagctacgaccgcgccagcaaggtctatctgttcgagctgcacatcaccgatgcccagcctgccttcactggcagctaccgctgtgaggtgtccaccaaggacaaatttgactgctccaacttcaatctcactgtccacgaggccatgggcaccggagacctggacctcctatcagccttccgccgcacgagcctggctggaggtggtcggcggatcagtgatagccatgaggacactgggattctggacttcagctcactgctgaaaaagagagacagtttccggaccccgagggactcgaagctggaggcaccagcagaggaggacgtgtgggagatcctacggcaggcacccccatctgagtacgagcgcatcgccttccagtacggcgtcactgacctgcgcggcatgctaaagaggctcaagggcatgaggcgcgatgagaagaagagcacagcctttcagaagaagctggagccggcctaccaggtgagcaaaggccacaagatccggctgaccgtggaactggctgaccatgacgctgaggtcaaatggctcaagaatggccaggagatccagatgagcggcagcaagtacatctttgagtccatcggtgccaagcgtaccctgaccatcagccagtgctcattggcggacgacgcagcctaccagtgcgtggtgggtggcgagaagtgtagcacggagctctttgtgaaagagccccctgtgctcatcacgcgccccttggaggaccagctggtgatggtggggcagcgggtggagtttgagtgtgaagtatcggaggagggggcgcaagtcaaatggctgaaggacggggtggagctgacccgggaggagaccttcaaataccggttcaagaaggacgggcagagacaccacctgatcatcaacgaggccatgctggaggacgcggggcactatgcactgtgcactagcgggggccaggcgctggctgagctcattgtgcaggaaaagaagctggaggtgtaccagagcatcgcagacctgatggtgggcgcaaaggaccaggcggtgttcaaatgtgaggtctcagatgagaatgttcggggtgtgtggctgaagaatgggaaggagctggtgcccgacagccgcataaaggtgtcccacatcgggcgggtccacaaactgaccattgacgacgtcacacctgccgacgaggctgactacagctttgtgcccgagggcttcgcctgcaacctgtcagccaagctccacttcatggaggtcaagattgacttcgtacccaggcaggaacctcccaagatccacctggactgcccaggccgcataccagacaccattgtggttgtagctggaaataagctacgtctggacgtccctatctctggggaccctgctcccactgtgatctggcagaaggctatcacgcaggggaataaggccccagccaggccagccccagatgccccagaggacacaggtgacagcgatgagtgggtgtttgacaagaagctgctgtgtgagaccgagggccgggtccgcgtggagaccaccaaggaccgcagcatcttcacggtcgagggggcagagaaggaagatgagggcgtctacacggtcacagtgaagaaccctgtgggcgaggaccaggtcaacctcacagtcaaggtcatcgacgtgccagacgcacctgcggcccccaagatcagcaacgtgggagaggactcctgcacagtacagtgggagccgcctgcctacgatggcgggcagcccatcctgggctacatcctggagcgcaagaagaagaagagctaccggtggatgcggctgaacttcgacctgattcaggagctgagtcatgaagcgcggcgcatgatcgagggcgtggtgtacgagatgcgcgtctacgcggtcaacgccatcggcatgtccaggcccagccctgcctcccagcccttcatgcctatcggtccccccagcgaacccacccacctggcagtagaggacgtctctgacaccacggtctccctcaagtggcggcccccagagcgcgtgggagcaggaggcctggatggctacagcgtggagtactgcccagagggctgctcagagtgggtggctgccctgcaggggctgacagagcacacatcgatactggtgaaggacctgcccacgggggcccggctgcttttccgagtgcgggcacacaatatggcagggcctggagcccctgttaccaccacggagccggtgacagtgcaggagatcctgcaacggccacggcttcagctgcccaggcacctgcgccagaccattcagaagaaggtcggggagcctgtgaaccttctcatccctttccagggcaagccccggcctcaggtgacctggaccaaagaggggcagcccctggcaggcgaggaggtgagcatccgcaacagccccacagacaccatcctgttcatccgggccgctcgccgcgtgcattcaggcacttaccaggtgacggtgcgcattgagaacatggaggacaaggccacgctggtgctgcaggttgttgacaagccaagtcctccccaggatctccgggtgactgacgcctggggtcttaatgtggctctggagtggaagccaccccaggatgtcggcaacacggagctctgggggtacacagtgcagaaagccgacaagaagaccatggagtggttcaccgtcttggagcattaccgccgcacccactgcgtggtgccagagctcatcattggcaatggctactacttccgcgtcttcagccagaatatggttggctttagtgacagagcggccaccaccaaggagcccgtctttatccccagaccaggcatcacctatgagccacccaactataaggccctggacttctccgaggccccaagcttcacccagcccctggtgaaccgctcggtcatcgcgggctacactgctatgctctgctgtgctgtccggggtagccccaagcccaagatttcctggttcaagaatggcctggacctgggagaagacgcccgcttccgcatgttcagcaagcagggagtgttgactctggagattagaaagccctgcccctttgacgggggcatctatgtctgcagggccaccaacttacagggcgaggcacggtgtgagtgccgcctggaggtgcgagtgcctcagtgaccaggctggctcctggggatggccaggtacaaccggatgccagccccgtgccaggagcctggagggaagttggggaaacccctccctactgttggatgtatgtgtgacaagtgtgtctcctgtgctgcgatgggggatcagcagggcagttgtcgggcagtcctgagtgggtgttgcacagactggtccacagggctcctgaaggaagcccctggatctttggggtaaaaggagggtggcctcaagaaacaatgtctggggacaggcctttctggcctgctatgtcttcccaatgtttattgggcaataaaagataagtgcagtcacagagaactca

SEQ ID NO: 19113 - DNA, 3598 bp, Homo sapiens
  source 1..3598: mol_type = unassigned DNA
ggcctagcgggacgcggctgcggtcagaggagcaggaggaggtcccccgacatgcctgaggcaaaaccagcggccaaaaaggcccccaaaggcaaagatgcccccaaaggagcccccaaggaggctccccctaaggaggctcctgcagaggcccccaaagaagccccacccgaggaccagtccccgactgcagaggagcccaccggcgttttcctgaagaagccggactccgtctcagtggagactgggaaggacgcagtggtcgtggccaaggtgaacgggaaggagctcccagacaaaccgaccatcaagtggttcaaggggaagtggctggagctgggcagcaagagtggcgcccgcttctccttcaaggagtcccacaactccgccagcaatgtgtacaccgtggagctgcacattgggaaggtggtactgggggaccgtgggtattaccgcctcgaggtcaaagccaaggacacctgtgacagctgtggcttcaacatcgatgtggaggcaccccgtcaggatgcctctgggcagagtctagaaagcttcaagcgtacgagtgaaaagaagtcggatactgcaggtgagctggatttcagtggcctgttgaagaagagggaggtggtggaggaggagaagaagaagaaaaagaaagatgacgatgacctaggcatccccccggagatttgggagctcctgaaaggggcaaagaagagcgagtacgagaaaatcgccttccagtatggcatcaccgacctccggggcatgctgaagcggctgaaaaaggctaaggtcgaggtcaagaagagtgcagcattcacaaagaagctggatccagcctaccaagtggacagaggcaacaagatcaagttgatggtagagatcagcgacccagacctgaccctcaagtggttcaagaacggccaggagatcaaaccaagcagcaagtacgtgtttgagaacgttggtaagaagcgaattcttaccatcaacaagtgcacgctggcggatgacgctgcctatgaagtagctgtcaaggatgagaagtgtttcaccgagctcttcgtcaaagaacctccagtcctaattgtcacacctcttgaggaccagcaggtgtttgtgggtgaccgggtggaaatggcagtggaggtgtcagaagagggtgcccaggtgatgtggatgaaagatggtgtggaactgactcgggaggattccttcaaggcccggtaccgcttcaagaaggacgggaagcgccacatcctcatcttctcagacgtggtccaggaggacaggggtcgctatcaggtcataaccaatggcggccagtgtgaggccgagctgattgtggaagagaaacagctggaggtcctgcaggacatcgcggatctgacggtgaaggcctcagaacaagctgtgttcaagtgcgaggtgtctgatgagaaagtgacgggcaagtggtataagaatggggtcgaggtgcggcccagcaagaggatcaccatttcccatgtaggcaggttccacaagctggtgatcgatgacgtccgccccgaggatgagggagactacacgtttgtgcctgacggctacgccctgtcgctctcggccaagctcaacttcctggaaatcaaggtggagtacgttcccaagcaagagccaccaaagatccacttggattgctcggggaagacctcagagaatgcgattgtggttgtggctggaaacaagctgaggcttgacgtgtccatcacaggggagccccctcccgtcgctacctggctgaagggagatgaggtattcacgaccaccgagggcaggacccgcatcgagaagcgggtggactgcagcagctttgtgattgagagtgcgcagcgggaagacgagggccgctacaccatcaaggtcaccaaccccgtcggcgaggacgtggcttccatcttcctgcaagttgtagatgtcccagaccccccggaggctgtgcgcatcacctcggttggagaggattgggccatccttgtctgggagccaccaatgtacgatggggggaagccagtcaccgggtacctcgtagagcggaagaagaagggctctcagcgctggatgaagctgaactttgaggtcttcacagagaccacctatgagtccaccaagatgatcgagggcatcctctatgagatgcgtgtcttcgccgtcaatgctataggggtctcccagcccagcatgaacaccaagccttttatgcctattgcacccacgagtgaacccctgcacctgatagtggaggatgtgacagacaccaccaccacactcaagtggaggcctccgaacaggatcggggcaggtggcatcgatgggtacctggtggagtactgcctggaaggctccgaggaatgggtccctgccaacaccgagcccgtggagcgctgtggcttcaccgtcaagaatctcccgaccggagccagaatcctcttccgagtagttggggtcaacatcgcggggcgcagcgagccggccaccctggcccagccggtcaccatcagggagattgcggagccacccaagatccggcttccccgccatctccgccagacctacatccgcaaagtgggcgagcagctcaaccttgtcgtccccttccagggaaagccccggccccaggtggtgtggaccaagggcggggccccgctggacacctcccgcgtgcacgtgcggaccagcgacttcgacaccgtgttcttcgtgcgccaggcggcccgctccgactccggggagtacgagctgagcgtgcagatcgagaacatgaaggacaccgccaccatccgcatccgcgttgtggaaaaggctgggccccccataaacgtgatggtgaaggaggtgtggggcacgaacgcgctggtggagtggcaggcccccaaagatgatgggaacagtgagatcatggggtatttcgtccagaaagcagacaaaaaaaccatggagtggttcaacgtctatgaacgtaacaggcacactagctgtactgtgtccgaccttatcgtgggcaatgaatactatttccgagtttacaccgagaacatctgtgggctcagtgactcacctggtgtctccaagaacacggcccgcatcctcaagacaggaatcaccttcaaaccgttcgagtataaggagcatgacttccggatggctcccaagttcctgacacctctcatagaccgcgtggtcgtggctgggtactcggcagccctcaactgtgctgtcagaggccacccgaagccgaaggtggtctggatgaagaacaagatggaaatccgtgaagatcccaagttcctgataaccaattaccaaggagtcctgacgctgaacatccgtcgcccctcgcccttcgacgctgggacttacacctgccgggccgtcaacgagctgggcgaggcgctggctgagtgcaagctggaggtccgagtgccgcagtgagacctgtcccctacctgccaagacaattggtggtggagtcctgaccccaatccccaacctcccaggactgtgttctttctggagttttcgctgagaacaaaacagtgttgtctggaccctg

SEQ ID NO: 19114 - DNA, 3856 bp, Homo sapiens
  source 1..3856: mol_type = unassigned DNA
ttgtcacaccgacctgcaccatctctcgcctgcctgtggggtttctgtcaactagtcgtggagggaaggagactctttaaagaataacatcttattgtggccatgccagaacccactaagaaagaggaaaatgaagtgccagccccagccccacccccggaagaaccaagtaaagagaaggaggccggaactacaccagcaaaagactggacccttgtcgaaactcctcctggggaggaacaagccaagcagaatgccaactcccagctgtccatcttgttcattgaaaaacctcaaggaggaacagtgaaagttggtgaagatatcaccttcatagccaaagtcaaggctgaagatcttctgagaaaacccactatcaaatggttcaaaggaaaatggatggacctggccagcaaagccgggaagcaccttcagctgaaggaaacctttgagaggcacagtcgggtgtacacatttgagatgcagatcatcaaggccaaagataactttgcaggaaattacagatgcgaggtcacctataaggataagtttgacagctgttcatttgatcttgaagtgcacgaatctactgggactactccaaacattgacatcagatctgctttcaagagaagtggagaaggtcaagaggatgcaggagaacttgactttagtggtctcctgaaacgtagggaggtgaagcagcaggaggaagaaccccaggtggacgtatgggagttgctgaagaacgcgaaacccagtgagtacgagaagatcgccttccagtatggaatcaccgacctgcgcggcatgctcaagcgactcaagcgcatgcgcagagaggagaagaagagcgcagcttttgcaaaaattcttgatcctgcatatcaggttgacaaaggaggcagagtgaggtttgttgtggagctggcagatccaaagttggaggtgaaatggtataaaaatggtcaagaaattcgacccagtaccaaatacatctttgaacacaaaggatgccagagaatcctgtttatcaataactgtcagatgacagatgattcagagtattatgtgacagccggtgatgagaaatgttccactgagctcttcgtaagagagcctccaattatggtgaccaaacagctggaagatacaactgcttattgtggggagagagtggaattagaatgtgaggtgtctgaagatgatgccaatgtaaaatggtttaagaatggtgaagagattatccctggtccaaaatcaagataccgaattagagttgagggtaaaaaacacatcttgatcatagagggagcaacaaaggctgatgctgcagaatattcagtaatgacaacaggaggacaatcatctgctaaacttagtgttgacttgaaacctctgaagattttgacacctctgactgatcagactgtaaatcttggaaaagaaatctgcctgaagtgtgaaatctctgaaaacataccaggaaaatggactaaaaatggcctacctgttcaggagagtgaccgtctaaaggtggttcacaagggaaggatccacaagttagtgatagccaatgccctcactgaagatgaaggtgattatgtatttgcacctgatgcctacaatgttactctgcctgccaaagttcatgttattgatcctcctaagatcatcctggatggtcttgatgctgacaacacagtgacagtgattgcaggaaacaagcttcgtcttgagatccccatcagcggagaaccacctcctaaagccatgtggagccggggagataaggctattatggaaggcagtggccggataagaacagaatcttaccctgatagcagcactctggtcattgatatagctgaaagagatgactctggtgtttaccacatcaatctgaaaaacgaagctggagaggcacatgcaagcatcaaggttaaagttgtggacttccctgatcctccagtggcaccgactgtgacagaggtgggagatgactggtgtatcatgaactgggagcctcctgcctacgacggaggctctccaatcctaggatattttattgagaggaagaagaaacaaagctccaggtggatgaggctgaattttgatctctgcaaagaaacaacttttgagcccaagaagatgattgaaggtgtggcctatgaggtccgcatctttgcagtcaatgccattggcatctccaagcccagtatgccctccaggccttttgttcctttggctgtaacaagccctcctactcttctgactgtggactctgtcactgacacgactgtcacgatgaggtggcgccccccagaccacattggtgcagcaggtttagatggctatgtgctagagtattgctttgaaggaagtacatcagcaaaacagtctgatgaaaatggggaggctgcctatgatctgccagctgaggactggatagttgcaaacaaagatctgattgacaagacgaagttcaccatcacaggtctgccaacagatgcaaagatctttgtgcgtgtgaaggctgttaatgcagctggtgccagcgagcccaagtactattctcagcccattctcgtgaaggaaatcatagaacctccaaagattcgcattccaagacacctgaagcaaacctatatccgcagagttggagaagctgtcaatctggttatacctttccagggaaaaccaagaccagaattaacttggaagaaggatggtgcagaaattgataagaatcaaataaacattcgcaactctgagactgatacaatcatatttattagaaaagcagagaggagccactctgggaaatatgatctgcaagtcaaagtggacaaattcgtggagaccgcatcaattgacatccagatcattgaccgtccaggtccaccccaaattgtgaagattgaggatgtctggggagaaaatgtcgctctcacatggactccaccaaaggatgatggaaatgctgctatcacaggctataccattcagaaggctgacaagaagagcatggaatggtttactgtcattgagcattatcatcgaaccagtgccaccattactgaattggtcatagggaatgaatattacttccgggtcttttctgaaaacatgtgtggcctcagtgaggatgccaccatgactaaagagagtgcagtgatcgccagggatggtaaaatctacaaaaatccagtgtatgaagactttgatttctcagaggcacccatgtttactcagcctttggttaacacctatgccatagctggttacaatgccaccctaaactgcagtgtgagaggaaatcctaagcctaaaataacctggatgaaaaacaaagttgctattgtggatgatccaagatacaggatgttcagcaaccagggagtctgtaccctggaaattcgcaagcccagcccctatgatggaggcacttactgctgcaaagcagtcaatgaccttgggacagtggagattgaatgcaaactggaggtgaaagtcattgcacaataaggatttttgaatgtataatatcatctaaggtgggctctccttctgcagactcctcttgcaaggcgtacctccaaacataattgattcgtatctgcgagacttacactcaagcaatcctgaggaatactgagggagggcctggctactgtctctctgcactctgctgctttgaaatctggttgaaatgagaaaaagcattttctgttttcccaccaggcccccaagtgtggtctttttctttcctcctaatgttgaagagaaaaaaaaaaaaaaaagtttgcccagattgcttaattaaaaattgcaaacaaaatctcatttgaagtca

SEQ ID NO: 19115 - DNA, 3899 bp, Homo sapiens
  source 1..3899: mol_type = unassigned DNA
gcctgcctgtggggtttctgtcaactagtcgtggagggaaggagactctttaaagaataacatcttattgtggccatgccagaacccactaagaaagaggaaaatgaagtgccagccccagccccacccccggaagaaccaagtaaagagaaggaggccggaactacaccagcaaaagatgaagaggaagtctccccgcctagcgccttgcctccaggtttgggtagtcgggccctggagagaaaagattcagactggacccttgtcgaaactcctcctggggaggaacaagccaagcagaatgccaactcccagctgtccatcttgttcattgaaaaacctcaaggaggaacagtgaaagttggtgaagatatcaccttcatagccaaagtcaaggctgaagatcttctgagaaaacccactatcaaatggttcaaaggaaaatggatggacctggccagcaaagccgggaagcaccttcagctgaaggaaacctttgagaggcacagtcgggtgtacacatttgagatgcagatcatcaaggccaaagataactttgcaggaaattacagatgcgaggtcacctataaggataagtttgacagctgttcatttgatcttgaagtgcacgaatctactgggactactccaaacattgacatcagatctgctttcaagagaagtggagaaggtcaagaggatgcaggagaacttgactttagtggtctcctgaaacgtagggaggtgaagcagcaggaggaagaaccccaggtggacgtatgggagttgctgaagaacgcgaaacccagtgagtacgagaagatcgccttccagtatggaatcaccgacctgcgcggcatgctcaagcgactcaagcgcatgcgcagagaggagaagaagagcgcagcttttgcaaaaattcttgatcctgcatatcaggttgacaaaggaggcagagtgaggtttgttgtggagctggcagatccaaagttggaggtgaaatggtataaaaatggtcaagaaattcgacccagtaccaaatacatctttgaacacaaaggatgccagagaatcctgtttatcaataactgtcagatgacagatgattcagagtattatgtgacagccggtgatgagaaatgttccactgagctcttcgtaagagagcctccaattatggtgaccaaacagctggaagatacaactgcttattgtggggagagagtggaattagaatgtgaggtgtctgaagatgatgccaatgtaaaatggtttaagaatggtgaagagattatccctggtccaaaatcaagataccgaattagagttgagggtaaaaaacacatcttgatcatagagggagcaacaaaggctgatgctgcagaatattcagtaatgacaacaggaggacaatcatctgctaaacttagtgttgacttgaaacctctgaagattttgacacctctgactgatcagactgtaaatcttggaaaagaaatctgcctgaagtgtgaaatctctgaaaacataccaggaaaatggactaaaaatggcctacctgttcaggagagtgaccgtctaaaggtggttcacaagggaaggatccacaagttagtgatagccaatgccctcactgaagatgaaggtgattatgtatttgcacctgatgcctacaatgttactctgcctgccaaagttcatgttattgatcctcctaagatcatcctggatggtcttgatgctgacaacacagtgacagtgattgcaggaaacaagcttcgtcttgagatccccatcagcggagaaccacctcctaaagccatgtggagccggggagataaggctattatggaaggcagtggccggataagaacagaatcttaccctgatagcagcactctggtcattgatatagctgaaagagatgactctggtgtttaccacatcaatctgaaaaacgaagctggagaggcacatgcaagcatcaaggttaaagttgtggacttccctgatcctccagtggcaccgactgtgacagaggtgggagatgactggtgtatcatgaactgggagcctcctgcctacgacggaggctctccaatcctaggatattttattgagaggaagaagaaacaaagctccaggtggatgaggctgaattttgatctctgcaaagaaacaacttttgagcccaagaagatgattgaaggtgtggcctatgaggtccgcatctttgcagtcaatgccattggcatctccaagcccagtatgccctccaggccttttgttcctttggctgtaacaagccctcctactcttctgactgtggactctgtcactgacacgactgtcacgatgaggtggcgccccccagaccacattggtgcagcaggtttagatggctatgtgctagagtattgctttgaaggaactgaggactggatagttgcaaacaaagatctgattgacaagacgaagttcaccatcacaggtctgccaacagatgcaaagatctttgtgcgtgtgaaggctgttaatgcagctggtgccagcgagcccaagtactattctcagcccattctcgtgaaggaaatcatagaacctccaaagattcgcattccaagacacctgaagcaaacctatatccgcagagttggagaagctgtcaatctggttatacctttccagggaaaaccaagaccagaattaacttggaagaaggatggtgcagaaattgataagaatcaaataaacattcgcaactctgagactgatacaatcatatttattagaaaagcagagaggagccactctgggaaatatgatctgcaagtcaaagtggacaaattcgtggagaccgcatcaattgacatccagatcattgaccgtccaggtccaccccaaattgtgaagattgaggatgtctggggagaaaatgtcgctctcacatggactccaccaaaggatgatggaaatgctgctatcacaggctataccattcagaaggctgacaagaagagcatggaatggtttactgtcattgagcattatcatcgaaccagtgccaccattactgaattggtcatagggaatgaatattacttccgggtcttttctgaaaacatgtgtggcctcagtgaggatgccaccatgactaaagagagtgcagtgatcgccagggatggtaaaatctacaaaaatccagtgtatgaagactttgatttctcagaggcacccatgtttactcagcctttggttaacacctatgccatagctggttacaatgccaccctaaactgcagtgtgagaggaaatcctaagcctaaaataacctggatgaaaaacaaagttgctattgtggatgatccaagatacaggatgttcagcaaccagggagtctgtaccctggaaattcgcaagcccagcccctatgatggaggcacttactgctgcaaagcagtcaatgaccttgggacagtggagattgaatgcaaactggaggtgaaagtgatatatcaaggagtaaatacccctggacaaccagtcttcctggaggggcagcaacagtcattgcacaataaggatttttgaatgtataatatcatctaaggtgggctctccttctgcagactcctcttgcaaggcgtacctccaaacataattgattcgtatctgcgagacttacactcaagcaatcctgaggaatactgagggagggcctggctactgtctctctgcactctgctgctttgaaatctggttgaaatgagaaaaagcattttctgttttcccaccaggcccccaagtgtggtctttttctttcctcctaatgttgaagagaaaaaaaaaaaaaaaagtttgcccagattgcttaattaaaaattgcaaacaaaatctca

SEQ ID NO: 19116 - DNA, 3871 bp, Homo sapiens
  source 1..3871: mol_type = unassigned DNA
gtcacaccgacctgcaccatctctcgcctgcctgtggggtttctgtcaactagtcgtggagggaaggagactctttaaagaataacatcttattgtggccatgccagaacccactaagaaagaggaaaatgaagtgccagccccagccccacccccggaagaaccaagtaaagagaaggaggccggaactacaccagcaaaagatgaagaggaagtctccccgcctagcgccttgcctccaggtttgggtagtcgggccctggagagaaaagattcagactggacccttgtcgaaactcctcctggggaggaacaagccaagcagaatgccaactcccagctgtccatcttgttcattgaaaaacctcaaggaggaacagtgaaagttggtgaagatatcaccttcatagccaaagtcaaggctgaagatcttctgagaaaacccactatcaaatggttcaaaggaaaatggatggacctggccagcaaagccgggaagcaccttcagctgaaggaaacctttgagaggcacagtcgggtgtacacatttgagatgcagatcatcaaggccaaagataactttgcaggaaattacagatgcgaggtcacctataaggataagtttgacagctgttcatttgatcttgaagtgcacgaatctactgggactactccaaacattgacatcagatctgctttcaagagaagtggagaaggtcaagaggatgcaggagaacttgactttagtggtctcctgaaacgtagggaggtgaagcagcaggaggaagaaccccaggtggacgtatgggagttgctgaagaacgcgaaacccagtgagtacgagaagatcgccttccagtatggaatcaccgacctgcgcggcatgctcaagcgactcaagcgcatgcgcagagaggagaagaagagcgcagcttttgcaaaaattcttgatcctgcatatcaggttgacaaaggaggcagagtgaggtttgttgtggagctggcagatccaaagttggaggtgaaatggtataaaaatggtcaagaaattcgacccagtaccaaatacatctttgaacacaaaggatgccagagaatcctgtttatcaataactgtcagatgacagatgattcagagtattatgtgacagccggtgatgagaaatgttccactgagctcttcgtaagagagcctccaattatggtgaccaaacagctggaagatacaactgcttattgtggggagagagtggaattagaatgtgaggtgtctgaagatgatgccaatgtaaaatggtttaagaatggtgaagagattatccctggtccaaaatcaagataccgaattagagttgagggtaaaaaacacatcttgatcatagagggagcaacaaaggctgatgctgcagaatattcagtaatgacaacaggaggacaatcatctgctaaacttagtgttgacttgaaacctctgaagattttgacacctctgactgatcagactgtaaatcttggaaaagaaatctgcctgaagtgtgaaatctctgaaaacataccaggaaaatggactaaaaatggcctacctgttcaggagagtgaccgtctaaaggtggttcacaagggaaggatccacaagttagtgatagccaatgccctcactgaagatgaaggtgattatgtatttgcacctgatgcctacaatgttactctgcctgccaaagttcatgttattgatcctcctaagatcatcctggatggtcttgatgctgacaacacagtgacagtgattgcaggaaacaagcttcgtcttgagatccccatcagcggagaaccacctcctaaagccatgtggagccggggagataaggctattatggaaggcagtggccggataagaacagaatcttaccctgatagcagcactctggtcattgatatagctgaaagagatgactctggtgtttaccacatcaatctgaaaaacgaagctggagaggcacatgcaagcatcaaggttaaagttgtggacttccctgatcctccagtggcaccgactgtgacagaggtgggagatgactggtgtatcatgaactgggagcctcctgcctacgacggaggctctccaatcctaggatattttattgagaggaagaagaaacaaagctccaggtggatgaggctgaattttgatctctgcaaagaaacaacttttgagcccaagaagatgattgaaggtgtggcctatgaggtccgcatctttgcagtcaatgccattggcatctccaagcccagtatgccctccaggccttttgttcctttggctgtaacaagccctcctactcttctgactgtggactctgtcactgacacgactgtcacgatgaggtggcgccccccagaccacattggtgcagcaggtttagatggctatgtgctagagtattgctttgaaggaactgaggactggatagttgcaaacaaagatctgattgacaagacgaagttcaccatcacaggtctgccaacagatgcaaagatctttgtgcgtgtgaaggctgttaatgcagctggtgccagcgagcccaagtactattctcagcccattctcgtgaaggaaatcatagaacctccaaagattcgcattccaagacacctgaagcaaacctatatccgcagagttggagaagctgtcaatctggttatacctttccagggaaaaccaagaccagaattaacttggaagaaggatggtgcagaaattgataagaatcaaataaacattcgcaactctgagactgatacaatcatatttattagaaaagcagagaggagccactctgggaaatatgatctgcaagtcaaagtggacaaattcgtggagaccgcatcaattgacatccagatcattgaccgtccaggtccaccccaaattgtgaagattgaggatgtctggggagaaaatgtcgctctcacatggactccaccaaaggatgatggaaatgctgctatcacaggctataccattcagaaggctgacaagaagagcatggaatggtttactgtcattgagcattatcatcgaaccagtgccaccattactgaattggtcatagggaatgaatattacttccgggtcttttctgaaaacatgtgtggcctcagtgaggatgccaccatgactaaagagagtgcagtgatcgccagggatggtaaaatctacaaaaatccagtgtatgaagactttgatttctcagaggcacccatgtttactcagcctttggttaacacctatgccatagctggttacaatgccaccctaaactgcagtgtgagaggaaatcctaagcctaaaataacctggatgaaaaacaaagttgctattgtggatgatccaagatacaggatgttcagcaaccagggagtctgtaccctggaaattcgcaagcccagcccctatgatggaggcacttactgctgcaaagcagtcaatgaccttgggacagtggagattgaatgcaaactggaggtgaaagtcattgcacaataaggatttttgaatgtataatatcatctaaggtgggctctccttctgcagactcctcttgcaaggcgtacctccaaacataattgattcgtatctgcgagacttacactcaagcaatcctgaggaatactgagggagggcctggctactgtctctctgcactctgctgctttgaaatctggttgaaatgagaaaaagcattttctgttttcccaccaggcccccaagtgtggtctttttctttcctcctaatgttgaagagaaaaaaaaaaaaaaaagtttgcccagattgcttaattaaaaattgcaaacaaaatctcatttgaa

SEQ ID NO: 19117 - DNA, 3915 bp, Homo sapiens
  source 1..3915: mol_type = unassigned DNA
ttgtcacaccgacctgcaccatctctcgcctgcctgtggggtttctgtcaactagtcgtggagggaaggagactctttaaagaataacatcttattgtggccatgccagaacccactaagaaagaggaaaatgaagtgccagccccagccccacccccggaagaaccaagtaaagagaaggaggccggaactacaccagcaaaagactggacccttgtcgaaactcctcctggggaggaacaagccaagcagaatgccaactcccagctgtccatcttgttcattgaaaaacctcaaggaggaacagtgaaagttggtgaagatatcaccttcatagccaaagtcaaggctgaagatcttctgagaaaacccactatcaaatggttcaaaggaaaatggatggacctggccagcaaagccgggaagcaccttcagctgaaggaaacctttgagaggcacagtcgggtgtacacatttgagatgcagatcatcaaggccaaagataactttgcaggaaattacagatgcgaggtcacctataaggataagtttgacagctgttcatttgatcttgaagtgcacgaatctactgggactactccaaacattgacatcagatctgctttcaagagaagtggagaaggtcaagaggatgcaggagaacttgactttagtggtctcctgaaacgtagggaggtgaagcagcaggaggaagaaccccaggtggacgtatgggagttgctgaagaacgcgaaacccagtgagtacgagaagatcgccttccagtatggaatcaccgacctgcgcggcatgctcaagcgactcaagcgcatgcgcagagaggagaagaagagcgcagcttttgcaaaaattcttgatcctgcatatcaggttgacaaaggaggcagagtgaggtttgttgtggagctggcagatccaaagttggaggtgaaatggtataaaaatggtcaagaaattcgacccagtaccaaatacatctttgaacacaaaggatgccagagaatcctgtttatcaataactgtcagatgacagatgattcagagtattatgtgacagccggtgatgagaaatgttccactgagctcttcgtaagagagcctccaattatggtgaccaaacagctggaagatacaactgcttattgtggggagagagtggaattagaatgtgaggtgtctgaagatgatgccaatgtaaaatggtttaagaatggtgaagagattatccctggtccaaaatcaagataccgaattagagttgagggtaaaaaacacatcttgatcatagagggagcaacaaaggctgatgctgcagaatattcagtaatgacaacaggaggacaatcatctgctaaacttagtgttgacttgaaacctctgaagattttgacacctctgactgatcagactgtaaatcttggaaaagaaatctgcctgaagtgtgaaatctctgaaaacataccaggaaaatggactaaaaatggcctacctgttcaggagagtgaccgtctaaaggtggttcacaagggaaggatccacaagttagtgatagccaatgccctcactgaagatgaaggtgattatgtatttgcacctgatgcctacaatgttactctgcctgccaaagttcatgttattgatcctcctaagatcatcctggatggtcttgatgctgacaacacagtgacagtgattgcaggaaacaagcttcgtcttgagatccccatcagcggagaaccacctcctaaagccatgtggagccggggagataaggctattatggaaggcagtggccggataagaacagaatcttaccctgatagcagcactctggtcattgatatagctgaaagagatgactctggtgtttaccacatcaatctgaaaaacgaagctggagaggcacatgcaagcatcaaggttaaagttgtggacttccctgatcctccagtggcaccgactgtgacagaggtgggagatgactggtgtatcatgaactgggagcctcctgcctacgacggaggctctccaatcctaggatattttattgagaggaagaagaaacaaagctccaggtggatgaggctgaattttgatctctgcaaagaaacaacttttgagcccaagaagatgattgaaggtgtggcctatgaggtccgcatctttgcagtcaatgccattggcatctccaagcccagtatgccctccaggccttttgttcctttggctgtaacaagccctcctactcttctgactgtggactctgtcactgacacgactgtcacgatgaggtggcgccccccagaccacattggtgcagcaggtttagatggctatgtgctagagtattgctttgaaggaagtacatcagcaaaacagtctgatgaaaatggggaggctgcctatgatctgccagctgaggactggatagttgcaaacaaagatctgattgacaagacgaagttcaccatcacaggtctgccaacagatgcaaagatctttgtgcgtgtgaaggctgttaatgcagctggtgccagcgagcccaagtactattctcagcccattctcgtgaaggaaatcatagaacctccaaagattcgcattccaagacacctgaagcaaacctatatccgcagagttggagaagctgtcaatctggttatacctttccagggaaaaccaagaccagaattaacttggaagaaggatggtgcagaaattgataagaatcaaataaacattcgcaactctgagactgatacaatcatatttattagaaaagcagagaggagccactctgggaaatatgatctgcaagtcaaagtggacaaattcgtggagaccgcatcaattgacatccagatcattgaccgtccaggtccaccccaaattgtgaagattgaggatgtctggggagaaaatgtcgctctcacatggactccaccaaaggatgatggaaatgctgctatcacaggctataccattcagaaggctgacaagaagagcatggaatggtttactgtcattgagcattatcatcgaaccagtgccaccattactgaattggtcatagggaatgaatattacttccgggtcttttctgaaaacatgtgtggcctcagtgaggatgccaccatgactaaagagagtgcagtgatcgccagggatggtaaaatctacaaaaatccagtgtatgaagactttgatttctcagaggcacccatgtttactcagcctttggttaacacctatgccatagctggttacaatgccaccctaaactgcagtgtgagaggaaatcctaagcctaaaataacctggatgaaaaacaaagttgctattgtggatgatccaagatacaggatgttcagcaaccagggagtctgtaccctggaaattcgcaagcccagcccctatgatggaggcacttactgctgcaaagcagtcaatgaccttgggacagtggagattgaatgcaaactggaggtgaaagtgatatatcaaggagtaaatacccctggacaaccagtcttcctggaggggcagcaacagtcattgcacaataaggatttttgaatgtataatatcatctaaggtgggctctccttctgcagactcctcttgcaaggcgtacctccaaacataattgattcgtatctgcgagacttacactcaagcaatcctgaggaatactgagggagggcctggctactgtctctctgcactctgctgctttgaaatctggttgaaatgagaaaaagcattttctgttttcccaccaggcccccaagtgtggtctttttctttcctcctaatgttgaagagaaaaaaaaaaaaaaaagtttgcccagattgcttaattaaaaattgcaaacaaaatctcatttgaagtca

SEQ ID NO: 19118 - DNA, 3818 bp, Homo sapiens
  source 1..3818: mol_type = unassigned DNA
tcgcctgcctgtggggtttctgtcaactagtcgtggagggaaggagactctttaaagaataacatcttattgtggccatgccagaacccactaagaaagaggaaaatgaagtgccagccccagccccacccccggaagaaccaagtaaagagaaggaggccggaactacaccagcaaaagatgaagaggaagtctccccgcctagcgccttgcctccaggtttgggtagtcgggccctggagagaaaagattcagactggacccttgtcgaaactcctcctggggaggaacaagccaagcagaatgccaactcccagctgtccatcttgttcattgaaaaacctcaaggaggaacagtgaaagttggtgaagatatcaccttcatagccaaagtcaaggctgaagatcttctgagaaaacccactatcaaatggttcaaaggaaaatggatggacctggccagcaaagccgggaagcaccttcagctgaaggaaacctttgagaggcacagtcgggtgtacacatttgagatgcagatcatcaaggccaaagataactttgcaggaaattacagatgcgaggtcacctataaggataagtttgacagctgttcatttgatcttgaagtgcacgaatctactgggactactccaaacattgacatcagatctgctttcaagagaagtggagaaggtcaagaggatgcaggagaacttgactttagtggtctcctgaaacgtagggaggtgaagcagcaggaggaagaaccccaggtggacgtatgggagttgctgaagaacgcgaaacccagtgagtacgagaagatcgccttccagtatggaatcaccgacctgcgcggcatgctcaagcgactcaagcgcatgcgcagagaggagaagaagagcgcagcttttgcaaaaattcttgatcctgcatatcaggttgacaaaggaggcagagtgaggtttgttgtggagctggcagatccaaagttggaggtgaaatggtataaaaatggtcaagaaattcgacccagtaccaaatacatctttgaacacaaaggatgccagagaatcctgtttatcaataactgtcagatgacagatgattcagagtattatgtgacagccggtgatgagaaatgttccactgagctcttcgtaagagagcctccaattatggtgaccaaacagctggaagatacaactgcttattgtggggagagagtggaattagaatgtgaggtgtctgaagatgatgccaatgtaaaatggtttaagaatggtgaagagattatccctggtccaaaatcaagataccgaattagagttgagggtaaaaaacacatcttgatcatagagggagcaacaaaggctgatgctgcagaatattcagtaatgacaacaggaggacaatcatctgctaaacttagtgttgacttgaaacctctgaagattttgacacctctgactgatcagactgtaaatcttggaaaagaaatctgcctgaagtgtgaaatctctgaaaacataccaggaaaatggactaaaaatggcctacctgttcaggagagtgaccgtctaaaggtggttcacaagggaaggatccacaagttagtgatagccaatgccctcactgaagatgaaggtgattatgtatttgcacctgatgcctacaatgttactctgcctgccaaagttcatgttattgatcctcctaagatcatcctggatggtcttgatgctgacaacacagtgacagtgattgcaggaaacaagcttcgtcttgagatccccatcagcggagaaccacctcctaaagccatgtggagccggggagataaggctattatggaaggcagtggccggataagaacagaatcttaccctgatagcagcactctggtcattgatatagctgaaagagatgactctggtgtttaccacatcaatctgaaaaacgaagctggagaggcacatgcaagcatcaaggttaaagttgtggacttccctgatcctccagtggcaccgactgtgacagaggtgggagatgactggtgtatcatgaactgggagcctcctgcctacgacggaggctctccaatcctaggatattttattgagaggaagaagaaacaaagctccaggtggatgaggctgaattttgatctctgcaaagaaacaacttttgagcccaagaagatgattgaaggtgtggcctatgaggtccgcatctttgcagtcaatgccattggcatctccaagcccagtatgccctccaggccttttgttcctttggctgtaacaagccctcctactcttctgactgtggactctgtcactgacacgactgtcacgatgaggtggcgccccagaccacattggtgcagcaggtttagatggctatgtgctagagtattgctttgaaggaactgaggactggatagttgcaaacaaagatctgattgacaagacgaagttcaccatcacaggtctgccaacagatgcaaagatctttgtgcgtgtgaaggctgttaatgcagctggtgccagcgagcccaagtactattctcagcccattctcgtgaaggaaatcatagaacctccaaagattcgcattccaagacacctgaagcaaacctatatccgcagagttggagaagctgtcaatctggttatacctttccagggaaaaccaagaccagaattaacttggaagaaggatggtgcagaaattgataagaatcaaataaacattcgcaactctgagactgatacaatcatatttattagaaaagcagagaggagccactctgggaaatatgatctgcaagtcaaagtggacaaattcgtggagaccgcatcaattgacatccagatcattgaccgtccaggtccaccccaaattgtgaagattgaggatgtctggggagaaaatgtcgctctcacatggactccaccaaaggatgatggaaatgctgctatcacaggctataccattcagaaggctgacaagaagagcatggaatggtttactgtcattgagcattatcatcgaaccagtgccaccattactgaattggtcatagggaatgaatattacttccgggtcttttctgaaaacatgtgtggcctcagtgaggatgccaccatgactaaagagagtgcagtgatcgccagggatggtaaaatctacaaaaatccagtgtatgaagactttgatttctcagaggcacccatgtttactcagcctttggttaacacctatgccatagctggttacaatgccaccctaaactgcagtgtgagaggaaatcctaagcctaaaataacctggatgaaaaacaaagttgctattgtggatgatccaagatacaggatgttcagcaaccagggagtctgtaccctggaaattcgcaagcccagcccctatgatggaggcacttactgctgcaaagcagtcaatgaccttgggacagtggagattgaatgcaaactggaggtgaaagtcattgcacaataaggatttttgaatgtataatatcatctaaggtgggctctccttctgcagactcctcttgcaaggcgtacctccaaacataattgattcgtatctgcgagacttacactcaagcaatcctgaggaatactgagggagggcctggctactgtctctctgcactctgctgctttgaaatctggttgaaatgagaaaaagcattttctgttttcccaccaggcccccaagtgtggtctttttctttcctcctaatgttgaagagaaaaaaaaaaaaaaaagtttgcccagattgcttaatt

SEQ ID NO: 19119 - DNA, 3426 bp, Homo sapiens
  source 1..3426: mol_type = unassigned DNA
atgccagaacccactaagaaagaggaaaatgaagtgccagccccagccccacccccggaagaaccaagtaaagagaaggaggccggaactacaccagcaaaagactggacccttgtcgaaactcctcctggggaggaacaagccaagcagaatgccaactcccagctgtccatcttgttcattgaaaaacctcaaggaggaacagtgaaagttggtgaagatatcaccttcatagccaaagtcaaggctgaagatcttctgagaaaacccactatcaaatggttcaaaggaaaatggatggacctggccagcaaagccgggaagcaccttcagctgaaggaaacctttgagaggcacagtcgggtgtacacatttgagatgcagatcatcaaggccaaagataactttgcaggaaattacagatgcgaggtcacctataaggataagtttgacagctgttcatttgatcttgaagtgcacgaatctactgggactactccaaacattgacatcagatctgctttcaagagaagtggagaaggtcaagaggatgcaggagaacttgactttagtggtctcctgaaacgtagggaggtgaagcagcaggaggaagaaccccaggtggacgtatgggagttgctgaagaacgcgaaacccagtgagtacgagaagatcgccttccagtatggaatcaccgacctgcgcggcatgctcaagcgactcaagcgcatgcgcagagaggagaagaagagcgcagcttttgcaaaaattcttgatcctgcatatcaggttgacaaaggaggcagagtgaggtttgttgtggagctggcagatccaaagttggaggtgaaatggtataaaaatggtcaagaaattcgacccagtaccaaatacatctttgaacacaaaggatgccagagaatcctgtttatcaataactgtcagatgacagatgattcagagtattatgtgacagccggtgatgagaaatgttccactgagctcttcgtaagagagcctccaattatggtgaccaaacagctggaagatacaactgcttattgtggggagagagtggaattagaatgtgaggtgtctgaagatgatgccaatgtaaaatggtttaagaatggtgaagagattatccctggtccaaaatcaagataccgaattagagttgagggtaaaaaacacatcttgatcatagagggagcaacaaaggctgatgctgcagaatattcagtaatgacaacaggaggacaatcatctgctaaacttagtgttgacttgaaacctctgaagattttgacacctctgactgatcagactgtaaatcttggaaaagaaatctgcctgaagtgtgaaatctctgaaaacataccaggaaaatggactaaaaatggcctacctgttcaggagagtgaccgtctaaaggtggttcacaagggaaggatccacaagttagtgatagccaatgccctcactgaagatgaaggtgattatgtatttgcacctgatgcctacaatgttactctgcctgccaaagttcatgttattgatcctcctaagatcatcctggatggtcttgatgctgacaacacagtgacagtgattgcaggaaacaagcttcgtcttgagatccccatcagcggagaaccacctcctaaagccatgtggagccggggagataaggctattatggaaggcagtggccggataagaacagaatcttaccctgatagcagcactctggtcattgatatagctgaaagagatgactctggtgtttaccacatcaatctgaaaaacgaagctggagaggcacatgcaagcatcaaggttaaagttgtggacttccctgatcctccagtggcaccgactgtgacagaggtgggagatgactggtgtatcatgaactgggagcctcctgcctacgacggaggctctccaatcctaggatattttattgagaggaagaagaaacaaagctccaggtggatgaggctgaattttgatctctgcaaagaaacaacttttgagcccaagaagatgattgaaggtgtggcctatgaggtccgcatctttgcagtcaatgccattggcatctccaagcccagtatgccctccaggccttttgttcctttggctgtaacaagccctcctactcttctgactgtggactctgtcactgacacgactgtcacgatgaggtggcgccccccagaccacattggtgcagcaggtttagatggctatgtgctagagtattgctttgaaggaagtacatcagcaaaacagtctgatgaaaatggggaggctgcctatgatctgccagctgaggactggatagttgcaaacaaagatctgattgacaagacgaagttcaccatcacaggtctgccaacagatgcaaagatctttgtgcgtgtgaaggctgttaatgcagctggtgccagcgagcccaagtactattctcagcccattctcgtgaaggaaatcatagaacctccaaagattcgcattccaagacacctgaagcaaacctatatccgcagagttggagaagctgtcaatctggttatacctttccagggaaaaccaagaccagaattaacttggaagaaggatggtgcagaaattgataagaatcaaataaacattcgcaactctgagactgatacaatcatatttattagaaaagcagagaggagccactctgggaaatatgatctgcaagtcaaagtggacaaattcgtggagaccgcatcaattgacatccagatcattgaccgtccaggtccaccccaaattgtgaagattgaggatgtctggggagaaaatgtcgctctcacatggactccaccaaaggatgatggaaatgctgctatcacaggctataccattcagaaggctgacaagaagagcatggaatggtttactgtcattgagcattatcatcgaaccagtgccaccattactgaattggtcatagggaatgaatattacttccgggtcttttctgaaaacatgtgtggcctcagtgaggatgccaccatgactaaagagagtgcagtgatcgccagggatggtaaaatctacaaaaatccagtgtatgaagactttgatttctcagaggcacccatgtttactcagcctttggttaacacctatgccatagctggttacaatgccaccctaaactgcagtgtgagaggaaatcctaagcctaaaataacctggatgaaaaacaaagttgctattgtggatgatccaagatacaggatgttcagcaaccagggagtctgtaccctggaaattcgcaagcccagcccctatgatggaggcacttactgctgcaaagcagtcaatgaccttgggacagtggagattgaatgcaaactggaggtgaaagtcattgcacaataa

SEQ ID NO: 19120 - DNA, 3777 bp, Homo sapiens
  source 1..3777: mol_type = unassigned DNA
gcaccatctctcgcctgcctgtggggtttctgtcaactagtcgtggagggaaggagactctttaaagaataacatcttattgtggccatgccagaacccactaagaaagaggaaaatgaagtgccagccccagccccacccccggaagaaccaagtaaagagaaggaggccggaactacaccagcaaaagactggacccttgtcgaaactcctcctggggaggaacaagccaagcagaatgccaactcccagctgtccatcttgttcattgaaaaacctcaaggaggaacagtgaaagttggtgaagatatcaccttcatagccaaagtcaaggctgaagatcttctgagaaaacccactatcaaatggttcaaaggaaaatggatggacctggccagcaaagccgggaagcaccttcagctgaaggaaacctttgagaggcacagtcgggtgtacacatttgagatgcagatcatcaaggccaaagataactttgcaggaaattacagatgcgaggtcacctataaggataagtttgacagctgttcatttgatcttgaagtgcacgaatctactgggactactccaaacattgacatcagatctgctttcaagagaagtggagaaggtcaagaggatgcaggagaacttgactttagtggtctcctgaaacgtagggaggtgaagcagcaggaggaagaaccccaggtggacgtatgggagttgctgaagaacgcgaaacccagtgagtacgagaagatcgccttccagtatggaatcaccgacctgcgcggcatgctcaagcgactcaagcgcatgcgcagagaggagaagaagagcgcagcttttgcaaaaattcttgatcctgcatatcaggttgacaaaggaggcagagtgaggtttgttgtggagctggcagatccaaagttggaggtgaaatggtataaaaatggtcaagaaattcgacccagtaccaaatacatctttgaacacaaaggatgccagagaatcctgtttatcaataactgtcagatgacagatgattcagagtattatgtgacagccggtgatgagaaatgttccactgagctcttcgtaagagagcctccaattatggtgaccaaacagctggaagatacaactgcttattgtggggagagagtggaattagaatgtgaggtgtctgaagatgatgccaatgtaaaatggtttaagaatggtgaagagattatccctggtccaaaatcaagataccgaattagagttgagggtaaaaaacacatcttgatcatagagggagcaacaaaggctgatgctgcagaatattcagtaatgacaacaggaggacaatcatctgctaaacttagtgttgacttgaaacctctgaagattttgacacctctgactgatcagactgtaaatcttggaaaagaaatctgcctgaagtgtgaaatctctgaaaacataccaggaaaatggactaaaaatggcctacctgttcaggagagtgaccgtctaaaggtggttcacaagggaaggatccacaagttagtgatagccaatgccctcactgaagatgaaggtgattatgtatttgcacctgatgcctacaatgttactctgcctgccaaagttcatgttattgatcctcctaagatcatcctggatggtcttgatgctgacaacacagtgacagtgattgcaggaaacaagcttcgtcttgagatccccatcagcggagaaccacctcctaaagccatgtggagccggggagataaggctattatggaaggcagtggccggataagaacagaatcttaccctgatagcagcactctggtcattgatatagctgaaagagatgactctggtgtttaccacatcaatctgaaaaacgaagctggagaggcacatgcaagcatcaaggttaaagttgtggacttccctgatcctccagtggcaccgactgtgacagaggtgggagatgactggtgtatcatgaactgggagcctcctgcctacgacggaggctctccaatcctaggatattttattgagaggaagaagaaacaaagctccaggtggatgaggctgaattttgatctctgcaaagaaacaacttttgagcccaagaagatgattgaaggtgtggcctatgaggtccgcatctttgcagtcaatgccattggcatctccaagcccagtatgccctccaggccttttgttcctttggctgtaacaagccctcctactcttctgactgtggactctgtcactgacacgactgtcacgatgaggtggcgccccccagaccacattggtgcagcaggtttagatggctatgtgctagagtattgctttgaaggaactgaggactggatagttgcaaacaaagatctgattgacaagacgaagttcaccatcacaggtctgccaacagatgcaaagatctttgtgcgtgtgaaggctgttaatgcagctggtgccagcgagcccaagtactattctcagcccattctcgtgaaggaaatcatagaacctccaaagattcgcattccaagacacctgaagcaaacctatatccgcagagttggagaagctgtcaatctggttatacctttccagggaaaaccaagaccagaattaacttggaagaaggatggtgcagaaattgataagaatcaaataaacattcgcaactctgagactgatacaatcatatttattagaaaagcagagaggagccactctgggaaatatgatctgcaagtcaaagtggacaaattcgtggagaccgcatcaattgacatccagatcattgaccgtccaggtccaccccaaattgtgaagattgaggatgtctggggagaaaatgtcgctctcacatggactccaccaaaggatgatggaaatgctgctatcacaggctataccattcagaaggctgacaagaagagcatggaatggtttactgtcattgagcattatcatcgaaccagtgccaccattactgaattggtcatagggaatgaatattacttccgggtcttttctgaaaacatgtgtggcctcagtgaggatgccaccatgactaaagagagtgcagtgatcgccagggatggtaaaatctacaaaaatccagtgtatgaagactttgatttctcagaggcacccatgtttactcagcctttggttaacacctatgccatagctggttacaatgccaccctaaactgcagtgtgagaggaaatcctaagcctaaaataacctggatgaaaaacaaagttgctattgtggatgatccaagatacaggatgttcagcaaccagggagtctgtaccctggaaattcgcaagcccagcccctatgatggaggcacttactgctgcaaagcagtcaatgaccttgggacagtggagattgaatgcaaactggaggtgaaagtcattgcacaataaggatttttgaatgtataatatcatctaaggtgggctctccttctgcagactcctcttgcaaggcgtacctccaaacataattgattcgtatctgcgagacttacactcaagcaatcctgaggaatactgagggagggcctggctactgtctctctgcactctgctgctttgaaatctggttgaaatgagaaaaagcattttctgttttcccaccaggcccccaagtgtggtctttttctttcctcctaatgttgaagagaaaaaaaaaaaaaaaagtttgcccagattgcttaattaaaaattgcaaacaaaatctca

SEQ ID NO: 19121 - DNA, 1805 bp, Homo sapiens
  source 1..1805: mol_type = unassigned DNA
aggccccccaacggctgacccctgcacactccaccctggccccccagccagtccagcaatgatggaaaaaaacacctccgagggccctgcctgcagtccagaggagaccgcatctgaatctgccaaggtgcccacagcagagcctcccggagaagtggcagtatcagagtccaccagagaagagcaggtgcccaagccgcaggcccctgccccacaggcccctacagcctccacagccactaagcctgcacccccaagtgaagatgtccccagtgccccactgctgctgaccctggatgatgtgagcagcagctctgtgactgtgagctgggagcccccagagaggctggggaggctgggcctccagggctatgtgctggagctctgcagagagggagcctcggagtgggtgcctgtgagtgcccggcccatgatggtgacccagcagactgtgcggaacctggctctgggagacaagttcctcctgcgcgtgtctgcagtgagttctgcaggggctggcccgccggccatgctggaccagcccatccacatccgagagaacattgaggcccccaagatccgtgtcccccgccacctccgtcagacctacatccgccaggtgggagagacggtcaacctgcaaatccccttccaggggaagcctaagcctcaggccacatggacccacaacggccatgccctggacagccagcgggtgagcatgcgcaccggggaccaggactccatcctcttcattcgctcggcccagcgctccgactctggccgctacgagctcactgtgcgcgtggaagacctggaggccaaggcagtcattgacatcctggtgattgagaaacctggaccccccagcagcatcaggctcctggacgtctggggctgcaatgctgctcttcagtggacgccaccccaggacacaggcaacacagagctcctgggctacatggtgcagaaggcagacaaaaagacagggcaatggttcacagtgctggagcgctaccacccaaccacctgcaccatctctgacctcatcatcggcaactcgtactccttccgggtcttctcagaaaacctgtgtggactcagcacctcggccaccgtcaccaaggagctcgcccacatccagaaggcagatattgctgccaaacctaaagggtttattgagcgagacttctcagaagccccctcattcacccagcccctggctgaccacacctccacccctggctacagcacccagttgttctgcagtgtccgagcttcacccaagcccaagatcatctggatgaaaaacaagatggagatccagggcaaccccaaataccgcgccctctctgagcaaggcgtctgcaccctagagatccggaaacccagcccctttgattctggggtctacacctgcaaggccataaatgtgctgggggaggcatctgtggactgccggctggaggtcaaagcctcagccgcacactgaagtcacgggaggaggctgtgatgaggagccaggtgctgcaggcctgaggggccaggtccaccaggcctacagtcaaactccagagatgcccaagacccccgcttccatagcgacggctgatggaaccgcccctggtacctgctggcctcccttccccagaggctggtgtccagaactcaggaatgggcctggtaggccccaggccagactaactgggctcaaggggtgctggaaggcgcagagattggagtgccctgcggagttgcactctgggtgggaagcactcaaataaagatgcgtggtgttaacagtg

SEQ ID NO: 19122 - DNA, 6222 bp, Homo sapiens
  source 1..6222: mol_type = unassigned DNA
aaattgctgtgaccgcagcatctctaggaagacgctttattcctgaaggacactgactgtcacttgggaaccaagaagccctctgcagtcatgagctctgacgcagaaatggccatttttggagaagcagctccctacctccggaaaccagagaaggagagaatcgaggctcaaaatcgtccattcgattccaagaaagcctgctttgtagcggataataaggaaatgtatgtgaaaggcatgatccagactagggaaaatgacaaagtcatagtcaagaccctcgatgaccggatgctcactctgaacaatgaccaggtcttccccatgaaccctcccaaatttgacaagatcgaggacatggccatgatgactcacctgcatgaacctgctgttctgtacaacctcaaagagcgctatgcagcctggatgatctacacctactcaggcctcttctgtgtcaccgtcaacccctacaagtggctgccggtgtacaagcccgaggtggtggctgcctacagaggcaaaaagcgccaggaggccccgccccacatcttctccatctctgacaatgcctatcagttcatgctgactgatcgagacaaccagtctatcctcatcaccggagaatccggggctgggaagactgtgaacaccaagcgtgtcatccagtattttgcaacaattgcagttaccggggacaagaagaaggagacacagccaggcaaaatgcagggaaccctagaggatcagatcatccaggccaacccactgctggaggcctttggaaatgccaagactgtgaggaatgacaactcctcaagatttgggaagttcattcggattcattttggagccacaggaaagctggcatcggcagacatcgaaacttatctgttagaaaaatccagagtgacgtttcaattatccagtgagagaagctatcatattttctaccaaattatgtcaaacaagaagccagaactaattgacctgcttctgatctccaccaaccccttcgacttccccttcgtgagccaaggagaggtcacggtagccagtatcgatgacagtgaagaactgctggcgacagataatgccattgacatcctgggcttcagctcagaggagaaagtcgggatctacaaactgacgggagccgtgatgcattatgggaacatgaagttcaagcagaagcagcgtgaggagcaggcggagccagacggcaccgaagtggctgacaaagccggatacctgatgggactgaattctgcagaaatgctgaagggcctgtgctgtccaagggtgaaggttggcaatgaatatgtcactaaagggcaaaatgtccagcaggtgaccaattcggtgggtgctctggccaaagccgtctacgagaagatgttcctgtggatggtcacccgcatcaaccagcagctggacaccaagcagcccaggcagtacttcatcggggtcttggacattgctggctttgagatctttgatttcaacagcctggagcagctgtgcatcaacttcaccaatgagaaactgcaacagtttttcaaccaccacatgttcgtgctggagcaggaagagtacaagaaggaaggcatcgagtgggagttcattgacttcggaatggacctggctgcctgcatcgagctcatcgagaagcctatgggcatcttctccatcctggaagaggagtgcatgttccccaaggcaacagacacctccttcaagaacaagctgtatgaccagcatcttggaaaatccaacaacttccagaagcccaagcctgccaaaggcaaggctgaggctcacttctcgctggtgcactatgccggcaccgtggactacaacatcgccggctggctggacaaaaacaaggaccccctgaacgagactgtggtggggctgtaccagaagtcttcgctgaagcttctctccttccttttttccaactatgctggtgcagagacaggcgactccggaggaagcaagaagggcgggaagaagaagggctcctctttccagaccgtgtcggccgtgttcagggaaaatttaaacaaattgatgactaacttaaggagcacccaccctcactttgtacgatgtctgattcccaatgagaccaagactcctggtgtgatggaccactacttggtcatgcaccagctgcgctgtaacggggtcctcgagggcatccggatttgcaggaagggattccccagccggatcctctatgctgacttcaagcagcggtaccggatcctcaatgccagtgctatccctgaagggcagttcattgacagcaaaaatgcctcagagaagctcctcaactccatcgatgtggaccgggagcagttcaggttcggcaacaccaaggtgtttttcaaagctgggctcctgggacttttggaggagatgagagatgagaagctggtgacgctgatgacaagcacgcaggcggtgtgcagggggtacctgatgcgggtggagttcaagaagatgatggagaggagggactccatcttctgcatccagtacaacatccgctcttttatgaacgtcaagcactggccctggatgaacctgttcttcaaaatcaagcccctgctgaagagtgcagaggccgagaaggagatggccaccatgaaggaagactttgagaggaccaaggaagaactggcccgatctgaggctcgccggaaggagctggaggagaaaatggtctccctcctgcaggagaagaatgacctccaattgcaggtccagtctgaaacagaaaatctgatggacgctgaggaacggtgtgaaggactcatcaaaagcaagatcctactggaagcaaaagtcaaggagctgacggagagattggaagaggaagaggagatgaattctgaattggttgccaagaagaggaatctggaagataaatgctcctctctcaagagagacattgatgacctggagctgaccttgacgaaagttgaaaaggagaagcatgccacagagaacaaggtaaagaatctttccgaagaaatgacagcacttgaagaaaacatttccaaattgaccaaagaaaagaaatctctacaggaggcccatcagcaaacactggatgatcttcaggtggaagaagataaagtcaatggtctaatcaaaataaatgccaagcttgaacagcaaacagatgatcttgagggttccttagagcaggagaagaaactgcgggcggacttggaaagggcgaagaggaagctggaaggagatctgaaaatgtcccaggaatccattatggatctagaaaatgacaagcagcaaatagaagagaaattgaaaaagaaggagtttgaactcagtcagttacaagccaaaatagatgacgaacaagtccacagtttgcagtttcaaaagaagattaaagaactgcaagcccgcatagaagagctggaggaggaaattgaagcggaacacacgctcagagccaagattgagaagcagcgctcagatctggccagggaactggaggagatcagcgagaggctggaagaagccagtggggccacttcagcccagattgagatgaacaagaagagggaggctgagttccagaaaatgcgcagggacctggaggaggccaccctgcagcacgaagccacagcagccaccctgaggaagaagcaagcagatagtgtggccgagcttggggagcagattgacaacctgcagcgggtgaagcagaagctggagaaggagaagagcgagctgaagatggagattgacgacatggccagcaacatcgaggctctctccaagtcaaagagtaacatagaaagaacgtgccggacggtagaagatcaatttagtgaaatcaaagccaaggacgagcaacagacacagttgatccatgatctgaacatgcagaaagcaagactgcagacccaaaatggggagctgagccaccgagtggaagagaaggagtctctgatttcacagctgaccaaaagcaagcaggccctcacccagcagctggaggagcttaagaggcaaatggaagaagaaaccaaggccaagaacgccatggcgcacgccctgcagtcctcccgccacgactgtgacctgctgcgggaacagtatgaggaggagcaggaagccaaggccgagctgcagagggcgctgtccaaggccaacagtgaggttgcccagtggaggaccaaatacgagacggacgccattcagcgcacagaggagctggaggaggccaagaaaaaactggcccagaggctccaggaagcagaggagaacacggagacggcgaactccaagtgcgcatcgttggagaaaaccaagcagaggctgcagggagaggtggaggatctgatgcgggatctggagcgctcccacaccgcctgtgccacactggacaagaagcagaggaacttcgacaaggtccttgcagagtggaagcaaaagctggacgaaagccaggctgagttggaagctgctcagaaggagtccaggtcactcagcactgaactcttcaagatgaggaatgcctatgaggaggtggtggaccagttagagacactgaggcgagagaacaaaaatctgcaagaagagatttccgacttaactgagcagattgcagaaactggcaagaatcttcaggaagcggaaaagaccaagaagctagtggagcaggaaaagtcagatctgcaggtcgccttagaagaagtggagggttccttggaacacgaggagagcaagatcttgcgcgtgcagctagagctgagccaggtgaaatccgagctagaccgcaaggtcattgagaaggatgaagaaatcgagcagctaaaaagaaacagccagcgggcagcagaggccctgcagagcgtgctggatgctgaaatccgcagccggaacgacgccctgaggctaaagaagaagatggagggagaccttaatgagatggagattcagctgggccactccaaccgccagatggcagagacccagaagcatctgcgcacggtccagggccagctcaaggactcccagctgcatctcgatgacgccctgaggagcaatgaggacctcaaggagcagctggccatcgtggagcgcaggaatggcctcctgctggaggagctggaggaaatgaaggtggccctggaacagacggagcggacccgcaggctgtcagagcaggagctgctggacgccagcgaccgcgtgcagctcctgcactcccagaacacaagcctgataaataccaagaaaaaactggaggctgacatagctcagtgccaggcagaggtggagaactcgatccaggagtccaggaacgcagaggagaaggccaagaaggccatcacggatgctgccatgatggctgaggagctaaagaaggaacaggacaccagcgcccacctggagcggatgaagaagaacctggagcagacggtgaaggacctgcagcaccgtctagatgaggctgaacaactggcgctgaagggcgggaagaagcagatccagaaactggagaaccgggtgcgggagctggaaaatgagcttgatgtggaacagaagaggggagctgaagccctgaagggagcccacaagtacgaacgcaaagtcaaggagatgacttaccaggctgaggaggaccacaagaatatccttaggctccaggacctggtggacaagctgcaggccaaagtgaagtcttacaagaggcaggctgaggaggcggaggagcaggccaacacgcagctgtccagatgccggagagtccagcatgagctagaggaggccgcggagagggcggacatcgctgagtcccaggtcaacaagctgagggccaagagccgagacgtgggcagccagaagatggaagaatgaggctcacctgatgctcgttgccatgggacacctccgagagagtggagggaaaatgtgtgagaaataaattctcctaaatactcggattcccggctctgctgtgtttattatcatggtccattcctcttctatgaagctgatatttagattcttgctgctctatcgtaaatataaaataaggaatgtgaaagtggaggatctttgctccaagtagaaaacatggaaatccaacccatggccagattctccttttcatctcatcaccagcccaccccaaatgcctttgacacagtggggttggaaattgaggaggat

SEQ ID NO: 19123 - DNA, 6896 bp, Homo sapiens
  source 1..6896: mol_type = unassigned DNA
gaagcctcgggacggccctggaagccgaccatggcagccgtgaccatgtcggtgcccgggcggaaggcgccccccaggccgggcccagtgcccgaggcggcccagccgttcctgttcacgccccgcgggcccagcgcgggtggcgggcctggctcgggcacctccccgcaggtggagtggacggcccggcgtctcgtgtgggtgccttcggagcttcacgggttcgaggcggcggcgctgcgggacgaaggcgaggaggaggcggaggtggagctggcggagagcgggaggcggctgcgactgccgcgggaccagatccagcgcatgaacccgcccaagttcagcaaggccgaggacatggccgagctgacctgcctcaacgaggcctcggtcctgcacaacctccgggagcggtactactccggcctcatctacacgtactccggccttttctgtgtggtcatcaacccgtacaagcagcttcccatctacacagaagccattgtggagatgtaccggggcaagaagcgccacgaggtgccaccccacgtgtacgcagtgaccgagggggcctatcggagcatgctgcaggatcgtgaggaccagtccattctctgcactggagagtctggagctgggaagacggaaaacaccaagaaggtcatccagtacctcgcccacgtggcgtcgtctccaaagggcaggaaggagccgggtgtccccgcctccgtcagcaccgtgtcttatggtgagctggagcggcagctgcttcaggccaaccccatcctagaggcctttggcaatgccaagacagtgaagaatgacaactcctcccgattcggcaaattcatccgcatcaactttgatgttgccgggtacatcgtgggcgccaacattgagacctacctgctggagaagtcgcgggccatccgccaggccaaggacgagtgcagcttccacatcttctaccagctgctggggggcgctggagagcagctcaaagccgacctcctcctcgagccctgctcccactaccggttcctgaccaacgggccgtcatcctctcccggccaggagcgggaactcttccaggagacgctggagtcgctgcgggtcctgggattcagccacgaggaaatcatctccatgctgcggatggtctcagcagttctccagtttggcaacattgccttgaagagagaacggaacaccgatcaagccaccatgcctgacaacacagctgcacagaagctctgccgcctcttgggactgggggtgacggatttctcccgagccttgctcacccctcgcatcaaagttggccgagactatgtgcagaaagcccagactaaggaacaggctgacttcgcgctggaggccctggccaaggccacctacgagcgcctcttccgctggctggttctgcgcctcaaccgggccttggaccgcagcccccgccaaggcgcctccttcctgggcatcctggacatcgcgggctttgagatcttccagctgaactccttcgagcagctctgcatcaactacaccaacgagaagctgcagcagctcttcaaccacaccatgttcgtgctggagcaggaggagtaccagcgtgagggcatcccctggaccttcctcgactttggcctcgacctgcagccctgcatcgacctcatcgagcggccggccaacccccctggactcctggccctgctggatgaggagtgctggttcccgaaggccacagacaagtcgtttgtggagaaggtagcccaggagcagggcggccaccccaagttccagcggccgaggcacctgcgggatcaggccgacttcagtgttctccactacgcgggcaaggtcgactacaaggccaacgagtggctgatgaaaaacatggaccctctgaatgacaacgtcgcagccttgctccaccagagcacagaccggctgacggcagagatctggaaagacgaacatgggggcttccagcagttctctttccttggctccttcccaccgtcgcccccaggatctgcagagaggtgcagctctgctatttctccgccaggggtggagggcatcgtggggctggaacaggtgagcagcctgggcgacggcccaccaggtggccgcccccgtcggggtatgttccggacagtgggacagctctacaaggagtccctgagccgcctcatggccacactcagcaacaccaaccccagttttgtccgctgcattgtccccaaccacgagaagagggccgggaagctggagccacggctggtgctggaccagcttcgctgcaacggggtcctggagggcatccgcatctgtcgccagggcttccccaaccgcatcctcttccaggagttccggcagcgatacgagatcctgacacccaatgccatccccaagggcttcatggatgggaagcaggcctgtgaaaagatgatccaggcgctggaactggaccccaacctctaccgcgtgggacagagcaagatcttcttccgggctggggtcctggcccagctggaagaggagcgagacctgaaggtcaccgacatcatcgtctccttccaggcagctgcccggggatacctggctcgcagggccttccagaagcgccagcagcagcagagcgccctgagggtgatgcagcggaactgcgcggcctacctcaagctgagacactggcagtggtggcggctgtttaccaaggtgaagccactgctgcaggtgacgcggcaggatgaggtgctgcaggcacgggcccaggagctgcagaaagtgcaggagctacagcagcagagcgcccgcgaagttggggagctccagggccgagtggcacagctggaagaggagcgcgcccgcctggcagagcaattgcgagcagaggcagaactgtgtgcagaggccgaggagacgcgggggaggctggcagcccgcaagcaggagctggagctggtggtgtcagagctggaggctcgcgtgggcgaggaggaggagtgcagccgtcaaatgcaaaccgagaagaagaggctgcagcagcacatacaggagctagaggcccaccttgaggctgaggagggtgcgcggcagaagctgcagctggagaaggtgacgacagaggcaaaaatgaagaaatttgaagaggacctgctgctcctggaagaccagaattccaagctgagcaaggagcggaagctgctggaagatcgtctggccgagttctcatcccaggcagctgaggaggaggagaaggtcaagagcctcaataagctacggctcaaatatgaggccacaatcgcagacatggaggaccgcctacggaaggaggagaagggtcgccaggagctggagaagctgaagcggaggctggatggggagagctcagagctgcaggagcagatggtggagcagcaacagcgggcagaggagctgcgggcccagctgggccggaaggaggaggagctgcaggctgccctggccagggcagaagacgagggtggggcccgggcccagctgctgaaatccctgcgggaggctcaagcagccctggccgaggcccaggaggacctggagtctgagcgtgtggccaggaccaaggcggagaagcagcgccgggacctgggcgaggagctggaggcgctgcggggcgagctggaggacacgctggactccaccaacgcacagcaggagctccggtccaagagggaacaggaggtgacggagctgaagaagactctggaggaggagactcgcatccacgaggcggcagtgcaggagctgaggcagcgccacggccaggccctgggggagctggcggagcagctggagcaggcccggaggggcaaaggtgcatgggagaagacccggctggccctggaggccgaggtgtccgagctgcgggcagaactgagcagcctgcagactgcacgtcaggagggtgagcagcggaggcgccgcctggagttacagctgcaggaggtgcagggccgggctggtgatggggagagggcacgagcggaggctgctgagaagctgcagcgagcccaggctgaactggagaatgtgtctggggcgctgaacgaggctgagtccaaaaccatccgtcttagcaaggagctgagcagcacagaagcccagctgcacgatgcccaggagctgctgcaggaggagaccagggcgaaattggccttggggtcccgggtgcgagccatggaggctgaggcagccgggctgcgtgagcagctggaggaggaggcagctgccagggaacgggcgggccgtgaactgcagactgcccaggcccagctttccgagtggcggcggcgccaggaggaggaggcaggggcactggaggcaggggaggaggcacggcgccgggcagcccgggaggccgaggccctgacccagcgcctggcagaaaagacagagaccgtggatcggctggagcggggccgccgccggctgcagcaggagctggacgacgccaccatggacctggagcagcagcggcagcttgtgagcaccctggagaagaagcagcgcaagtttgaccagcttctggcagaggagaaggcagctgtacttcgggcagtggaggaacgtgagcgggccgaggcagagggccgggagcgtgaggctcgggccctgtcactgacacgggcactggaggaggagcaggaggcacgtgaggagctggagcggcagaaccgggccctgcgggctgagctggaggcactgctgagcagcaaggatgacgtcggcaagagcgtgcatgagctggaacgagcctgccgggtagcagaacaggcagccaatgatctgcgagcacaggtgacagaactggaggatgagctgacagcggccgaggatgccaagctgcgtctggaggtgactgtgcaggctctcaagactcagcatgagcgtgacctgcagggccgtgatgaggctggtgaagagaggcggaggcagctggccaagcagctgagagatgcagaggtggagcgggatgaggagcggaagcagcgcactctggccgtggctgcccgcaagaagctggagggagagctggaggagctgaaggctcagatggcctctgccggccagggcaaggaggaggcggtgaagcagcttcgcaagatgcaggcccagatgaaggagctatggcgggaggtggaggagacacgcacctcccgggaggagatcttctcccagaatcgggaaagtgaaaagcgcctcaagggcctggaggctgaggtgctgcggctgcaggaggaactggccgcctcggaccgtgctcggcggcaggcccagcaggaccgggatgagatggcagatgaggtggccaatggtaaccttagcaaggcagccattctggaggagaagcgtcagctggaggggcgcctggggcagttggaggaagagctggaggaggagcagagcaactcggagctgctcaatgaccgctaccgcaagctgctcctgcaggtagagtcactgaccacagagctgtcagctgagcgcagtttctcagccaaggcagagagcgggcggcagcagctggaacggcagatccaggagctacggggacgcctgggtgaggaggatgctggggcccgtgcccgccacaagatgaccattgctgcccttgagtctaagttggcccaggctgaggagcagctagagcaagagaccagagagcgcatcctctctggaaagctggtgcgcagagctgagaagcggcttaaagaggtggtgctccaggtggaggaggagcggagggtggctgaccagctccgggaccagctggagaagggaaaccttcgagtcaagcagctgaagcggcagctggaggaggccgaggaggaggcatcccgggctcaggccggccgccggaggctgcagcgtgagctggaagatgtcacagagtcggccgagtccatgaaccgtgaagtgaccacactgaggaaccggcttcgacgcggccccctcaccttcaccacccgcacggtgcgccaggtcttccgactagaggagggcgtggcatccgacgaggaggcagaggaagcacagcctgggtctgggccatccccggagcctgaggggtccccaccagcccacccccagtgaccctaccctgtccccagatgcactaacagatggggcccagcccccttcctccctggaccccacgggcccctgtcccaggaaccccgccctctgacttcttgccctttggaaatggtgcagcactctggcatttatcacccccacctgggtcccctgcaacctcccatcaaaggatgacccctaaacacagaggagcggggcaggcagggaggcaatgactggagctaccttgcttgttgggggactgggtacagttggcaagctgtgtttccatcagctccctgtcctcctttcttccctcgttattgatctatagacattaggaagggagtgagacggctcctccaccatcctcagccagtgcaacccattccctctgcttctctctctctctctctctctccctccctctccttccctaccctctcaccatctttcttggcctctctgagggtctctctgtgcatctttttaggaatctcgctctcactctctacgtagccactctccttcccccatttctgcgtccacccctgaactcctgagcgacagaagccccaggcctccaccagccttgaacccttgcaaaggggcaggacaaggggacccctctcactcctgctgctgcccatgctctgccctcccttctggttgctctgagggttcggagcttccctctgggactaaaggagtgtcctttaccctcccagcctccaggctctggcagaaataaactccaacccgactggaccatc

SEQ ID NO: 19124 - DNA, 6037 bp, Homo sapiens
  source 1..6037: mol_type = unassigned DNA
gtggctcgcttgtgggcggaggtctgggatctcctggctgttgctgtcttctgctctcatcctgcaggtgggactctcagctgacaccatgagtagtgacactgaaatggaagtgttcggcatagctgctcctttcctccggaagtcagaaaaggagaggatcgaggctcagaaccagccctttgatgccaagacgtattgcttcgtggtggactcaaaggaagaatatgccaaggggaaaatcaagagttctcaggatgggaaggtcactgtggaaactgaggacaacaggaccctggtggtcaaaccagaggatgtgtacgccatgaacccccccaagttcgacaggatcgaagacatggccatgctgacgcacctgaatgagccagccgtgctgtacaacctgaaggaccgttacacatcttggatgatctatacctactcaggcctcttctgtgtcactgtcaacccctacaagtggctgccggtgtacaaccccgaggtggtggaaggctaccgaggcaaaaagcgccaggaggccccaccccacatcttctccatctctgacaacgcctatcagttcatgctgactgatcgtgaaaaccagtccattctgatcaccggagaatccggggcaggaaagactgtgaacaccaaacgggtcatccagtactttgcaacaattgcagctactggggacctggccaagaagaaggactccaaaatgaaggggactctggaagatcaaatcatcagtgccaatcccctgctggaggcctttgggaacgccaagactgtgaggaatgacaactcctcccgttttggcaagttcatccgaatccattttggaaccactgggaagctggcctctgcagatattgaaacttatcttctggaaaaatcaagagtcactttccagctgaaggctgaaagaagctaccacatcttctaccagattctttctaacaagaagcctgagctcatagagctgctgcttattacgaccaacccttacgactacccgttcattagccagggggagatcctggtggccagcatagatgatgcagaggagctgctggctacagacagcgccattgacatcctgggcttcaccccagaagagaaatctgggctctacaagctgacgggagccgtgatgcactacgggaacatgaagttcaagcagaagcagcgagaggagcaggccgagccggatggcacagaagtggctgacaaaacagcctatctgatgggcctgaactcttcggacctcctaaaagctttgtgctttcctagagtgaaagttgggaatgagtacgttaccaaaggtcaaactgtggatcaggttcaccatgctgtgaatgctctttcaaaatcagtttatgaaaagttgttcttgtggatggtcactcgcattaaccagcaactggatacgaagcttccaagacaacacttcattggtgttttggacattgcaggctttgaaatctttgagtataacagcctggagcagctgtgcatcaacttcaccaatgagaaactgcaacagtttttcaaccaccacatgttcgtgctggagcaggaggagtacaagaaggaaggcatcgagtggacgttcattgacttcgggatggacctggctgcctgcatcgagctcatcgagaagcctatgggcatcttctccatcctggaagaggagtgcatgttccccaaggcaacagacacctccttcaagaacaagctgtatgaccagcatcttggaaagtccaacaacttccagaagcccaaggtggtcaaaggcagggccgaggctcacttctcactgatccactatgcgggcaccgtggactacagtgtctcaggttggctggagaagaacaaggaccctctgaacgagactgtggttgggctgtaccagaagtcttccaacaggctcctggcacacctctatgccacgtttgccacggcggatgctgacagtggaaagaagaaagttgccaagaagaagggttcttccttccaaactgtctctgcccttttcagggaaaacctgaacaagctgatgtcaaatttaagaactactcaccctcattttgtgcgttgtataattcccaatgaaaccaaaactccaggggctatggaacacagccttgttctgcaccagctgcggtgtaacggtgtcctggagggcatccgcatctgcaggaaagggttcccaaacaggattctctatggcgattttaaacaaagataccgagtgctgaatgccagtgcaatccctgagggacaattcattgacagcaagaaagcctgtgaaaagcttctggcatccattgatattgaccacactcagtacaaatttggacataccaaggtgttcttcaaggctggcttgctgggaaccctggaagagatgcgggatgaccgcctggccaaactaatcacccggacacaagctgtgtgcagagggttcctcatgcgtgtggaattccagaagatggtgcagaggagggagtccatcttctgcatccagtacaacattcgctcattcatgaacgtcaagcactggccctggatgaaactcttcttcaagatcaagcccctcctcaagagtgcagagactgagaaagagatggccaccatgaaggaagaattccagaaaaccaaagatgaactcgccaagtcggaggcaaaaaggaaggagctagaggaaaaactggtgactctggtccaagagaagaatgacctgcagctccaagtacaagctgaaagcgaaaatttgttggatgctgaggaaagatgcgatcagctgatcaaagccaaattccagctcgaggccaagatcaaggaggtgacagagagagctgaagatgaggaggagatcaatgctgagctgacggccaagaagaggaaactggaggatgaatgctcagagctcaagaaagacattgatgaccttgagttgaccctggccaaggttgagaaggagaagcatgccacagagaacaaggttaaaaaccttactgaggaactctctgggttagatgaaacaattgcaaagttaaccagagagaagaaggccctccaagaggcgcaccagcaggccttggatgacctccaagctgaagaagacaaagtcaattctttgaacaaaaccaagagcaaactggaacagcaagtggaagacctggaaagctccctagaacaagaaaagaagctccgagtagacctggaaaggaacaaaaggaaattggaaggagacttgaagcttgctcaagagtccatattagatctggagaatgacaagcaacagctggacgaaaggctcaagaagaaagattttgaatattgtcaacttcaaagcaaagtggaagatgagcagacactgggcctccagtttcagaagaaaatcaaagagttgcaggctcgaattgaggagctggaagaggagatagaggcggagagggccacccgcgcgaagacagagaaacagcgcagcgactatgcccgggagctggaggagctgagcgagcggctggaggaggcgggaggcgtcacctccacgcagatagagctcaacaagaagcgggaggcggagttcctgaagctgcgcagggacctggaggaggccacactgcagcacgaagccatggtggccgcgctgaggaagaagcatgcggatagtgtggccgagcttggggagcagattgacaacctgcagcgggtcaagcagaagctggagaaggagaagagcgagttcaagctggagatcgatgacctctccagcagcatggagagtgtgtcgaaatctaaggcaaatctggaaaaaatctgccgaaccctggaggatcagttaagtgaggccaggggcaagaatgaggaaattcagaggagcctgagcgagctgaccacacagaagtctcgtttgcagaccgaggctggtgagctgagtcgtcagctggaagaaaaagaaagcatagtatcccaactttccaggagcaagcaagcctttacccagcaaacagaagagctcaagaggcagctggaggaagagaacaaggccaagaacgccctggcgcacgccctgcagtcctcccgccacgactgtgacctgctgcgggaacagtatgaggaggagcaggaaggcaaagctgagctgcagagggcgctgtccaaggccaatagtgaggttgcccagtggagaaccaaatacgagacggacgccatccagcgcacagaagagctggaggaggccaagaaaaaacttgctcagcgccttcaagattccgaggaacaggttgaggcagtgaatgctaaatgtgcttcactggagaagaccaagcagaggctgcaaggagaggtggaggatctgatggttgatgttgaaagagccaattccttggccgccgctctggacaagaagcagaggaactttgacaaggtgttggcagagtggaagacaaagtgtgaggagagccaagcagagctggaggcatccctgaaggagtcccgctccttgagcactgagctcttcaaactgaaaaatgcctacgaggaagccttagatcaacttgaaactgtgaaacgggaaaataagaacttagagcaggagatagcagatctcacagaacaaattgctgaaaatggcaaaaccatccatgaactggagaaatcaagaaagcagattgagctggaaaaggctgatatccagctggctctcgaggaagcagaggctgctcttgagcatgaagaagccaagatcctccgaatccagcttgaattgacacaagtgaaatcagaaattgatagaaagatcgccgagaaggatgaagagatcgagcagctgaagaggaactaccagagaacagtggaaaccatgcagagcgccctggacgccgaggtgcggagcaggaatgaagccatccggctcaagaagaagatggagggggacctgaatgaaatcgagatccagctgagccacgccaaccgccaggcggcggagaccctcaaacacctcaggagtgtccagggacagctgaaggatacgcagctccacctggatgatgccctccggggccaggaggacctgaaggagcagctggcgattgtggagcgcagagccaacctgctgcaggccgaggtggaggagctgcgggctactctggagcagacggagagggcccggaaactggcggaacaggagctcctggactccaacgagagggtgcagctgctgcatacccagaacaccagcctcatccacaccaagaagaagctggagacagacctcatgcagctccagagtgaggtagaagatgccagcagggatgcaaggaacgctgaggagaaggccaagaaggccatcacggacgctgccatgatggcggaggagctgaagaaggagcaggacaccagcgcccaccttgagcggatgaagaagaacctggaacagacggtgaaggacctgcagcatcgtctagatgaggccgagcagctggcgctgaagggcgggaagaagcagatccagaaactggagaccaggatccgagagctggagtttgaacttgagggagagcagaagaagaacacagagtctgttaagggcctgaggaagtatgagcggagggtcaaggagctgacgtaccagagtgaagaggacaggaagaatgtgctgagattgcaggatctggtggataaactgcaagtgaaagtcaagtcctacaagaggcaggcggaggaggctgatgaacaagccaatgctcatctcaccaaattccgaaaggctcagcatgagctggaggaggccgaggaacgtgcggatatcgcagaatctcaagtcaacaagctccgcgctaagactcgagacttcacctccagcaggatggtggtccacgagagtgaagagtgagccagcccttctggagcaggacagaagatatgcaaaatgtatattttcttgattcctgaccattgatacttaatgtccatgtgactctttttcacatgcaataaactttgctttgtttcaatctgg

SEQ ID NO: 19125 - DNA, 3621 bp, Homo sapiens
  source 1..3621: mol_type = unassigned DNA
gactggcacagggagcctgggctggaagaggcagcaaaagggaaaatcagaagagtggacactggcaagaggagggcagcctttttcccagcttccttgcaccatggacagctcccattaagccacctctccatcctggggccaggactcttatgccccattcctgtcaaattgagatttcatccaccattctccaaggacagtgaagttataccctagttccagtgttgggatcagtggcccctctggacatgcctctcctggaaggttctgtgggggtggaggatcttgtcctcctggaacccttggtggaggagtcactgctcaagaatcttcagcttcgctatgaaaacaaggagatttatacctacattgggaatgtggtgatctcagtgaatccctatcaacagcttcccatctatgggccagagttcattgccaaatatcaagactatactttctatgagctgaagccccatatctacgcattggcaaatgtggcgtaccagtcactgagggacagggaccgagaccagtgtatcctcatcacaggcgagagtggatcagggaagactgaggccagcaagctggtgatgtcttatgtggctgccgtctgtgggaaaggagagcaggtgaactctgtgaaggagcagctgctacagtctaacccagtgctggaggcttttggcaatgccaagaccattcgcaacaacaattcctcccgatttggaaaatacatggatattgaatttgacttcaagggatcccccctcggtggtgtcatcacaaactatctgcttgagaaatcccgattagtgaagcagctcaaaggagaaaggaacttccacatcttctatcagctgctggctggagcagatgaacagctgctgaaggccctgaagcttgagcgggatacaactggctatgcctatctgaatcatgaagtatccagagtggatggcatggacgacgcctccagcttcagggctgtacagagtgcaatggcagtgattgggttctcggaggaggagattcgacaagtgctagaggtgacatccatggtgctaaagctggggaacgtgttggtggctgatgagttccaggccagtgggataccagcaagtggcatccgtgatgggagaggtgttcgggagattggggagatggtgggcttgaattcagaagaagtagagagagctttgtgctcgaggaccatggaaacagccaaggaaaaggtggtcactgcactgaatgttatgcaggctcagtatgctcgggacgccctggctaagaacatctacagccgcctctttgactggatagtgaatcgaatcaatgagagcatcaaggtgggcatcggggaaaagaagaaggtaatgggagtccttgatatctacggttttgagatattagaggataatagctttgagcaatttgtgatcaactactgcaatgagaagctgcagcaggtgttcatagagatgaccctgaaagaagagcaagaggaatataagagagaaggcataccgtggacaaaggtggactactttgataatggcatcatttgtaagctcattgagcataatcagcgaggtatcctggccatgttggatgaggagtgcctgcggcctggggtggtcagtgactccactttcctagcaaagctgaaccagctcttctccaagcatggccactacgagagcaaagtcacccagaatgcccagcgtcagtatgaccacaccatgggcctcagctgcttccgcatctgccactatgcgggcaaggtgacatacaacgtgaccagctttattgacaagaataatgacctactcttccgagacctgttgcaggccatgtggaaggcccagcaccccctccttcggtccttgtttcctgagggcaatcctaagcaggcatctctcaaacgccccccgactgctggggcccagttcaagagttctgtggccatcctcatgaagaatctgtattccaagagccccaactacatcaggtgcataaagcccaatgagcatcagcagcgaggtcagttctcttcagacctggtggcaacccaggctcggtacctgggactgctggagaacgtacgggtgcgacgggcaggctatgcccaccgccagggttatgggcccttcctggaaaggtaccgattgctgagccggagcacctggcctcactggaatgggggagaccgggaaggtgttgagaaggtcctgggggagctgagcatgtcctcgggggagctggcctttggcaagacaaagatcttcattagaagccccaagactcttttctacctcgaagaacagaggcgcctgagactccagcagctggccacactcatacagaagatttaccgaggctggcgctgccgcacccactaccaactgatgcgaaagagtcagatcctcatctcctcttggtttcggggaaacatgcaaaagaaatgctatgggaagataaaggcatccgtgttattgatccaggcttttgtgagagggtggaaggcccgaaagaattatcgcaaatatttccggtcagaggctgccctcaccttggcagatttcatctacaagagcatggtacagaaattcctactggggctgaagaacaatttgccatccacaaacgtcttagacaagacatggccagccgccccctacaagtgcctcagcacagcaaatcaggagctgcagcagctcttctaccagtggaagtgcaagaggttccgggatcagctgtccccgaagcaggtagagatcctgagggaaaagctctgtgccagtgaactgttcaagggcaagaaggcttcatatccccagagtgtccccattccattctgtggtgactacattgggctgcaagggaaccccaagctgcagaagctgaaaggcggggaggaggggcctgttctgatggcagaggccgtgaagaaggtcaatcgtggcaatggcaagacttcttctcggattctcctcctgaccaagggccatgtgattctcacagacaccaagaagtcccaggccaaaattgtcattgggctagacaatgtggctggggtgtcagtcaccagcctcaaggatgggctctttagcttgcatctgagtgagatgtcatcggtgggctccaagggggacttcctgctggtcagcgagcatgtgattgaactgctgaccaaaatgtaccgggctgtgctggatgccacgcagaggcagcttacagtcaccgtgactgagaagttctcagtgaggttcaaggagaacagtgtggctgtcaaggtcgtccagggccctgcaggtggtgacaacagcaagctacgctacaaaaaaaaggggagtcattgcttggaggtgactgtgcagtgaggagggggcaccatgcagagatggcagttgcttcctcctgaaccagcactaatccccctctgccctcctgtgtgggaggatctctaacccctctgatcgtggcgcatggcttggggattaaactacccttgaagaggacccttgtcccaaacccttcttgttctctcctccaaaagtagcttcctccaacccgcagcctctctgcacactaataaaacatgtggcttggaaaggttca

SEQ ID NO: 19126 - DNA, 560 bp, Homo sapiens
  source 1..560: mol_type = unassigned DNA
gctgagagttggagaatcaagtctctcttcaggagcctgggctggaagaggcagcaaaagggaaaatcagaagagtggacactggcaagaggagggcagcctttttcccagcttccttgcaccatggacagctcccattaagccacctctccatcctggggccaggactcttatgccccattcctgtcaaattgagatttcatccaccattctccaaggacagtgaagttataccctagttccagtgttgggatcagtggcccctctggacatgcctctcctggaaggttctgtgggggtggaggatcttgtcctcctggaacccttggtggaggagtcactgctcaagaatcttcagcttcgctatgaaaacaaggagatttatacctacattgggaatgtggtgatctcagtgaatccctatcaacagcttcccatctatgggccagagttcattgccaaatatcaagactatactttctatgagctgaagccccatatctacgcattggcaaatgtggcgtaccagtcactgagggacagggaccgagaccagtgta

SEQ ID NO: 19127 - DNA, 3658 bp, Homo sapiens
  source 1..3658: mol_type = unassigned DNA
aatgcaagggggagttcaatgaaactgggacatctatacacatgtgagggagcctgggctggaagaggcagcaaaagggaaaatcagaagagtggacactggcaagaggagggcagcctttttcccagcttccttgcaccatggacagctcccattaagccacctctccatcctggggccaggactcttatgccccattcctgtcaaattgagatttcatccaccattctccaaggacagtgaagttataccctagttccagtgttgggatcagtggcccctctggacatgcctctcctggaaggttctgtgggggtggaggatcttgtcctcctggaacccttggtggaggagtcactgctcaagaatcttcagcttcgctatgaaaacaaggagatttatacctacattgggaatgtggtgatctcagtgaatccctatcaacagcttcccatctatgggccagagttcattgccaaatatcaagactatactttctatgagctgaagccccatatctacgcattggcaaatgtggcgtaccagtcactgagggacagggaccgagaccagtgtatcctcatcacaggcgagagtggatcagggaagactgaggccagcaagctggtgatgtcttatgtggctgccgtctgtgggaaaggagagcaggtgaactctgtgaaggagcagctgctacagtctaacccagtgctggaggcttttggcaatgccaagaccattcgcaacaacaattcctcccgatttggaaaatacatggatattgaatttgacttcaagggatcccccctcggtggtgtcatcacaaactatctgcttgagaaatcccgattagtgaagcagctcaaaggagaaaggaacttccacatcttctatcagctgctggctggagcagatgaacagctgctgaaggccctgaagcttgagcgggatacaactggctatgcctatctgaatcatgaagtatccagagtggatggcatggacgacgcctccagcttcagggctgtacagagtgcaatggcagtgattgggttctcggaggaggagattcgacaagtgctagaggtgacatccatggtgctaaagctggggaacgtgttggtggctgatgagttccaggccagtgggataccagcaagtggcatccgtgatgggagaggtgttcgggagattggggagatggtgggcttgaattcagaagaagtagagagagctttgtgctcgaggaccatggaaacagccaaggaaaaggtggtcactgcactgaatgttatgcaggctcagtatgctcgggacgccctggctaagaacatctacagccgcctctttgactggatagtgaatcgaatcaatgagagcatcaaggtgggcatcggggaaaagaagaaggtaatgggagtccttgatatctacggttttgagatattagaggataatagctttgagcaatttgtgatcaactactgcaatgagaagctgcagcaggtgttcatagagatgaccctgaaagaagagcaagaggaatataagagagaaggcataccgtggacaaaggtggactactttgataatggcatcatttgtaagctcattgagcataatcagcgaggtatcctggccatgttggatgaggagtgcctgcggcctggggtggtcagtgactccactttcctagcaaagctgaaccagctcttctccaagcatggccactacgagagcaaagtcacccagaatgcccagcgtcagtatgaccacaccatgggcctcagctgcttccgcatctgccactatgcgggcaaggtgacatacaacgtgaccagctttattgacaagaataatgacctactcttccgagacctgttgcaggccatgtggaaggcccagcaccccctccttcggtccttgtttcctgagggcaatcctaagcaggcatctctcaaacgccccccgactgctggggcccagttcaagagttctgtggccatcctcatgaagaatctgtattccaagagccccaactacatcaggtgcataaagcccaatgagcatcagcagcgaggtcagttctcttcagacctggtggcaacccaggctcggtacctgggactgctggagaacgtacgggtgcgacgggcaggctatgcccaccgccagggttatgggcccttcctggaaaggtaccgattgctgagccggagcacctggcctcactggaatgggggagaccgggaaggtgttgagaaggtcctgggggagctgagcatgtcctcgggggagctggcctttggcaagacaaagatcttcattagaagccccaagactcttttctacctcgaagaacagaggcgcctgagactccagcagctggccacactcatacagaagatttaccgaggctggcgctgccgcacccactaccaactgatgcgaaagagtcagatcctcatctcctcttggtttcggggaaacatgcaaaagaaatgctatgggaagataaaggcatccgtgttattgatccaggcttttgtgagagggtggaaggcccgaaagaattatcgcaaatatttccggtcagaggctgccctcaccttggcagatttcatctacaagagcatggtacagaaattcctactggggctgaagaacaatttgccatccacaaacgtcttagacaagacatggccagccgccccctacaagtgcctcagcacagcaaatcaggagctgcagcagctcttctaccagtggaagtgcaagaggttccgggatcagctgtccccgaagcaggtagagatcctgagggaaaagctctgtgccagtgaactgttcaagggcaagaaggcttcatatccccagagtgtccccattccattctgtggtgactacattgggctgcaagggaaccccaagctgcagaagctgaaaggcggggaggaggggcctgttctgatggcagaggccgtgaagaaggtcaatcgtggcaatggcaagacttcttctcggattctcctcctgaccaagggccatgtgattctcacagacaccaagaagtcccaggccaaaattgtcattgggctagacaatgtggctggggtgtcagtcaccagcctcaaggatgggctctttagcttgcatctgagtgagatgtcatcggtgggctccaagggggacttcctgctggtcagcgagcatgtgattgaactgctgaccaaaatgtaccgggctgtgctggatgccacgcagaggcagcttacagtcaccgtgactgagaagttctcagtgaggttcaaggagaacagtgtggctgtcaaggtcgtccagggccctgcaggtggtgacaacagcaagctacgctacaaaaaaaaggggagtcattgcttggaggtgactgtgcagtgaggagggggcaccatgcagagatggcagttgcttcctcctgaaccagcactaatccccctctgccctcctgtgtgggaggatctctaacccctctgatcgtggcgcatggcttggggattaaactacccttgaagaggacccttgtcccaaacccttcttgttctctcctccaaaagtagcttcctccaacccgcagcctctctgcacactaataaaacatgtggcttggaaaggttca

SEQ ID NO: 19128 - DNA, 3101 bp, Homo sapiens
  source 1..3101: mol_type = unassigned DNA
agtctgctccaagtagagagagtggatgaacctgcgtgctggagattgagtgaaagatggtgtcttgaactggtttcacaatagtcattgcccacttcctccccacaagctacgcattggcaaatgtggcgtaccagtcactgagggacagggaccgagaccagtgtatcctcatcacaggcgagagtggatcagggaagactgaggccagcaagctggtgatgtcttatgtggctgccgtctgtgggaaaggagagcaggtgaactctgtgaaggagcagctgctacagtctaacccagtgctggaggggaaaatacatggatattgaatttgacttcaagggatcccccctcggtggtgtcatcacaaactatctgcttgagaaatcccgattagtgaagcagctcaaaggagaaaggaacttccacatcttctatcagctgctggctggagcagatgaacagctgctgaaggccctgaagcttgagcgggatacaactggctatgcctatctgaatcatgaagtatccagagtggatggcatggacgacgcctccagcttcagggctgtacagagtgcaatggcagtgattgggttctcggaggaggagattcgacaagtgctagaggtgacatccatggtgctaaagctggggaacgtgttggtggctgatgagttccaggccagtgggataccagcaagtggcatccgtgatgggagaggtgttcgggagattggggagatggtgggcttgaattcagaagaagtagagagagctttgtgctcgaggaccatggaaacagccaaggaaaaggtggtcactgcactgaatgttatgcaggctcagtatgctcgggacgccctggctaagaacatctacagccgcctctttgactggatagtgaatcgaatcaatgagagcatcaaggtgggcatcggggaaaagaagaaggtaatgggagtccttgatatctacggttttgagatattagaggataatagctttgagcaatttgtgatcaactactgcaatgagaagctgcagcaggtgttcatagagatgaccctgaaagaagagcaagaggaatataagagagaaggcataccgtggacaaaggtggactactttgataatggcatcatttgtaagctcattgagcataatcagcgaggtatcctggccatgttggatgaggagtgcctgcggcctggggtggtcagtgactccactttcctagcaaagctgaaccagctcttctccaagcatggccactacgagagcaaagtcacccagaatgcccagcgtcagtatgaccacaccatgggcctcagctgcttccgcatctgccactatgcgggcaaggtgacatacaacgtgaccagctttattgacaagaataatgacctactcttccgagacctgttgcaggccatgtggaaggcccagcaccccctccttcggtccttgtttcctgagggcaatcctaagcaggcatctctcaaacgccccccgactgctggggcccagttcaagagttctgtggccatcctcatgaagaatctgtattccaagagccccaactacatcaggtgcataaagcccaatgagcatcagcagcgaggtcagttctcttcagacctggtggcaacccaggctcggtacctgggactgctggagaacgtacgggtgcgacgggcaggctatgcccaccgccagggttatgggcccttcctggaaaggtaccgattgctgagccggagcacctggcctcactggaatgggggagaccgggaaggtgttgagaaggtcctgggggagctgagcatgtcctcgggggagctggcctttggcaagacaaagatcttcattagaagccccaagactcttttctacctcgaagaacagaggcgcctgagactccagcagctggccacactcatacagaagatttaccgaggctggcgctgccgcacccactaccaactgatgcgaaagagtcagatcctcatctcctcttggtttcggggaaacatgcaaaagaaatgctatgggaagataaaggcatccgtgttattgatccaggcttttgtgagagggtggaaggcccgaaagaattatcgcaaatatttccggtcagaggctgccctcaccttggcagatttcatctacaagagcatggtacagaaattcctactggggctgaagaacaatttgccatccacaaacgtcttagacaagacatggccagccgccccctacaagtgcctcagcacagcaaatcaggagctgcagcagctcttctaccagtggaagtgcaagaggttccgggatcagctgtccccgaagcaggtagagatcctgagggaaaagctctgtgccagtgaactgttcaagggcaagaaggcttcatatccccagagtgtccccattccattctgtggtgactacattgggctgcaagggaaccccaagctgcagaagctgaaaggcggggaggaggggcctgttctgatggcagaggccgtgaagaaggtcaatcgtggcaatggcaagacttcttctcggattctcctcctgaccaagggccatgtgattctcacagacaccaagaagtcccaggccaaaattgtcattgggctagacaatgtggctggggtgtcagtcaccagcctcaaggatgggctctttagcttgcatctgagtgagatgtcatcggtgggctccaagggggacttcctgctggtcagcgagcatgtgattgaactgctgaccaaaatgtaccgggctgtgctggatgccacgcagaggcagcttacagtcaccgtgactgagaagttctcagtgaggttcaaggagaacagtgtggctgtcaaggtcgtccagggccctgcaggtggtgacaacagcaagctacgctacaaaaaaaaggggagtcattgcttggaggtgactgtgcagtgaggagggggcaccatgcagagatggcagttgcttcctcctgaaccagcactaatccccctctgccctcctgtgtgggaggatctctaacccctctgatcgtggcgcatggcttggggattaaactacccttgaagagg

SEQ ID NO: 19129 - DNA, 4933 bp, Homo sapiens
  source 1..4933: mol_type = unassigned DNA
gccccgcagccccgggctgggcccgcgtcccggagcgccaccggagagcgaggacgacgtggaggcggagtggcgcccggcgagctggagaccatggccaaaatggaggtgaaaacctcacttctggacaatatgattggagttggggatatggttcttttagaacctctcaatgaggagaccttcatcaacaacctcaagaagcgctttgaccacagtgaaatatacacatacattggaagtgtggttatatctgttaacccataccggtctttacccatttattcaccagagaaagtggaagaatacaggaacagaaatttttatgaactgagccctcacatctttgccctttcggatgaagcatacagatccctacgagatcaagataaggaccaatgtattctcattactggggaaagtggagcaggaaaaacagaggccagtaagcttgtcatgtcctatgtggcagctgtttgtggaaaaggagcagaagttaatcaagttaaagaacagcttttacagtccaacccggtcctggaagcttttggaaatgccaaaactgtaaggaatgacaactcctctagatttggcaaatatatggatattgaatttgactttaaaggcgatccactaggaggagtaataagtaactatcttttagagaaatctcgggttgttaaacagccaagaggtgaaagaaacttccatgtgttctatcagctgctctctggtgcctctgaagagctcctcaataaacttaagcttgagagggatttcagcaggtataactacctgagtctggattcggccaaagtgaatggagtggatgatgcagcaaattttagaaccgtgcggaatgccatgcagattgtgggctttatggatcatgaagctgagtctgtcttggcggtggtggcagcagtgttgaaactggggaacattgagttcaagcccgaatctcgagtgaatggtctagatgaaagcaaaatcaaagataaaaatgagttaaaagaaatttgtgaattgaccggcattgatcaatcagttctagaacgagcattcagtttccgaacagttgaggccaaacaggagaaagtttcaactacactgaatgtggctcaggcttattatgcccgtgatgctctggctaaaaacctctacagcaggttgttttcatggttggtaaatcgaatcaatgaaagcattaaggcacaaacaaaagtgagaaagaaggtcatgggtgttctggacatttatggctttgagattttcgaggacaacagctttgagcagttcattattaattattgtaacgaaaagctgcaacaaatcttcattgaacttactcttaaagaagagcaggaggagtatatacgggaggatatagaatggactcacattgactacttcaataatgctatcatttgtgacctaatagaaaataacacaaatggaatcctggccatgctggatgaagagtgcctcagacctggcacagtcactgatgagaccttcttagaaaagctgaaccaagtatgtgccacccaccagcattttgagagcaggatgagcaagtgctctcggttcctcaatgacacgtctctgcctcacagctgcttcaggatccagcattatgctggaaaggtgctgtaccaggtggaaggattcgttgacaaaaacaatgaccttctctatcgagacctgtcccaagccatgtggaaggccagccatgccctcatcaagtctttgttccccgaagggaatcccgccaagatcaacctgaaaaggcctcctacagcaggctcacagttcaaggcatccgtggccactctgatgaaaaacctacagaccaagaacccaaactatattaggtgtatcaaaccgaatgataaaaaagcagcacacatcttcaacgaggctctagtgtgtcatcagatcaggtacctggggcttttggagaacgtccgagtgcggagggcaggctacgccttcaggcaggcctatgaaccttgcctagaaagatacaaaatgctttgtaaacaaacatggcctcattggaaaggaccagccaggtctggtgtggaggtcctatttaatgaattagaaattcccgtggaagaatactcctttggtagatcaaagatattcatccgaaacccaagaacattattcaaattagaagacctgaggaagcaacgcctggaggacttggccactctcattcagaagatatatcgggggtggaaatgccgcacacacttcctgctaatgaaaaaaagccaaattgtgattgccgcctggtacaggagatatgcgcaacaaaagaggtaccagcagacaaagagttccgccttagtaattcagtcttatatccggggttggaaggctcgaaaaattctgcgggaactgaagcatcaaaagcgctgtaaggaagcagtcacgaccattgctgcatattggcatgggacccaggcacgaagggaactgagacggctgaaggaggaggctaggaataaacatgctattgcagttatttgggcttactggcttggatctaaggctcgaagggaattgaaacgcttgaaggaggaggctaggcgtaagcatgcagttgctgtcatttgggcttactggcttggactgaaggtacgtagagaatacaggaaattcttcagagccaatgctggaaagaaaatctatgagtttacgcttcagagaattgtgcaaaaatacttcttggaaatgaaaaataagatgccttccttatctccaatagacaagaattggccctcaagaccttacttattcttggattctactcacaaggagctaaaaaggattttccacttgtggaggtgtaaaaaatacagggaccaattcacagaccagcagaaacttatttatgaagagaaactagaagccagtgaactcttcaaagacaagaaggctttatacccatctagtgttgggcaaccattccaaggggcttacctggaaatcaacaagaaccccaagtataagaaactcaaagatgccattgaagaaaagatcatcattgctgaagtcgtgaacaaaattaaccgtgctaatgggaagagtacatctcggattttcctcttaacaaacaataatctccttcttgctgaccaaaagtctggacaaatcaagtcagaggttccattggtggatgtgaccaaggtatcaatgagctcacaaaatgatggcttcttcgccgtccacctcaaagagggctcagaagcagctagtaaaggagactttctcttcagcagtgatcacctgattgaaatggccaccaagctctatcgcacaactctcagccaaaccaaacagaagctcaatattgagatttccgatgagttcctggtacagttcagacaggacaaagtatgtgtgaagtttattcagggaaaccagaaaaatgggagtgtcccaacatgtaaacgaaaaaacaaccgtctccttgaagttgctgtcccttaactggcgcctcctctctactttcatggacttgttcctttgtaatagtgcaatttggttttgttttatttggggttcattgtatgtttgggaatcaccaaaggcttttagagttctttggcaaaataaaaatatttgactaatcaatttttattattggaatagttttaacctttcaaatacatgttctgtcctggagcaggattgtagaaactaacagtgtctattttcatgtctgatgtgttcttcctttagtcatcatgttaggtctgtgtaccctaaatcagcatattactcataaatcattaattaatataagcataggaaatggtcttaaaagatactgcattcattcatcagatatttattccatgcctactctatgctaggcactgtgctagatggtatgaaaacttattaggaacctttttgtttttgagaccattgcattctggctggtttgtgctggtttaacgacatctaagaaggtttagaaatggtgagaccaaaacaataactgttaatgatggacagcattattaggaaccctgtagtatgatatttaacaatataggcttcaagaagggctggtcctaagagggggcagaaatgaatgaccaggttaaatccctctacatgtggtttctgtttgaaaaaaagaaaactgacatttgaacaggacttttaatttgtttaaaactctggtaattacttgtaacagtagaaaatagaagtcattcttattttagaaaaagtgacagaagcagtccagtaagattatatgtttctgtttctggtaaataccatatatgatcctcgaaatgataatatctccagaatattgttttcacccaaatttgagtagatattttaaacacctaacaaagtaaagggctaaaagccattcagatagcagtaaaacattctgtatgatgtgcaataaaacatccaagatcttttttgaaagttttatttataatatacatttttgtatgagaaaggtgattggtacagggtgcctattttagtcatggatcaaaatttgtgtaacttgcagggctttctttctttttcttcaaatttacaagggttcattttggaaactacattttaaactttggaatcaaattgtttcttatttgggaggataatgtatatacattggtattatgttaaataataaaattgttctaatttggtgccatttcctgaatcacaactgtatttttgtatctcaagctattttcatatgttgtgtgtcaatgtatcatctctcagaaaggttttacaatccaaacattatatgttctctgtgtaactgaatttcacttatcttttataaaccagaaacattaattgaaaatattttctggggattttctcttgacttgtatttttaaaaattgctcacataaagaagttctcagaagtc

SEQ ID NO: 19130 - DNA, 5026 bp, Homo sapiens
  source 1..5026: mol_type = unassigned DNA
ggtggctcccgttcctgcccgcgcgccgaggggcgaatcccaggcagcgaggtcgccgcccccgcccctcggccggcccctccgccagcgggcgagaggggagtggccgggctcctcccgccgccgctgagcactccgcagctgggtgcgcacgggagcctcaaccgcggcgcgtggaggcagtaccagagcgcgcggcgcgcagtcggccggcagccgcgggacagccttggcagaacagccgcggcgggagccccgcagccccgggctgggcccgcgtcccggagcgccaccggagagcgaggacgacgtggaggcggagtggcgcccggcgaggtagcgccaggcgagctggagaccatggccaaaatggaggtgaaaacctcacttctggacaatatgattggagttggggatatggttcttttagaacctctcaatgaggagaccttcatcaacaacctcaagaagcgctttgaccacagtgaaatatacacatacattggaagtgtggttatatctgttaacccataccggtctttacccatttattcaccagagaaagtggaagaatacaggaacagaaatttttatgaactgagccctcacatctttgccctttcggatgaagcatacagatccctacgagatcaagataaggaccaatgtattctcattactggggaaagtggagcaggaaaaacagaggccagtaagcttgtcatgtcctatgtggcagctgtttgtggaaaaggagcagaagttaatcaagttaaagaacagcttttacagtccaacccggtcctggaagcttttggaaatgccaaaactgtaaggaatgacaactcctctagatttggcaaatatatggatattgaatttgactttaaaggcgatccactaggaggagtaataagtaactatcttttagagaaatctcgggttgttaaacagccaagaggtgaaagaaacttccatgtgttctatcagctgctctctggtgcctctgaagagctcctcaataaacttaagcttgagagggatttcagcaggtataactacctgagtctggattcggccaaagtgaatggagtggatgatgcagcaaattttagaaccgtgcggaatgccatgcagattgtgggctttatggatcatgaagctgagtctgtcttggcggtggtggcagcagtgttgaaactggggaacattgagttcaagcccgaatctcgagtgaatggtctagatgaaagcaaaatcaaagataaaaatgagttaaaagaaatttgtgaattgaccggcattgatcaatcagttctagaacgagcattcagtttccgaacagttgaggccaaacaggagaaagtttcaactacactgaatgtggctcaggcttattatgcccgtgatgctctggctaaaaacctctacagcaggttgttttcatggttggtaaatcgaatcaatgaaagcattaaggcacaaacaaaagtgagaaagaaggtcatgggtgttctggacatttatggctttgagattttcgaggacaacagctttgagcagttcattattaattattgtaacgaaaagctgcaacaaatcttcattgaacttactcttaaagaagagcaggaggagtatatacgggaggatatagaatggactcacattgactacttcaataatgctatcatttgtgacctaatagaaaataacacaaatggaatcctggccatgctggatgaagagtgcctcagacctggcacagtcactgatgagaccttcttagaaaagctgaaccaagtatgtgccacccaccagcattttgagagcaggatgagcaagtgctctcggttcctcaatgacacgtctctgcctcacagctgcttcaggatccagcattatgctggaaaggtgctgtaccaggtggaaggattcgttgacaaaaacaatgaccttctctatcgagacctgtcccaagccatgtggaaggccagccatgccctcatcaagtctttgttccccgaagggaatcccgccaagatcaacctgaaaaggcctcctacagcaggctcacagttcaaggcatccgtggccactctgatgaaaaacctacagaccaagaacccaaactatattaggtgtatcaaaccgaatgataaaaaagcagcacacatcttcaacgaggctctagtgtgtcatcagatcaggtacctggggcttttggagaacgtccgagtgcggagggcaggctacgccttcaggcaggcctatgaaccttgcctagaaagatacaaaatgctttgtaaacaaacatggcctcattggaaaggaccagccaggtctggtgtggaggtcctatttaatgaattagaaattcccgtggaagaatactcctttggtagatcaaagatattcatccgaaacccaagaacattattcaaattagaagacctgaggaagcaacgcctggaggacttggccactctcattcagaagatatatcgggggtggaaatgccgcacacacttcctgctaatgaaaaaaagccaaattgtgattgccgcctggtacaggagatatgcgcaacaaaagaggtaccagcagacaaagagttccgccttagtaattcagtcttatatccggggttggaaggctcgaaaaattctgcgggaactgaagcatcaaaagcgctgtaaggaagcagtcacgaccattgctgcatattggcatgggacccaggtacgtagagaatacaggaaattcttcagagccaatgctggaaagaaaatctatgagtttacgcttcagagaattgtgcaaaaatacttcttggaaatgaaaaataagatgccttccttatctccaatagacaagaattggccctcaagaccttacttattcttggattctactcacaaggagctaaaaaggattttccacttgtggaggtgtaaaaaatacagggaccaattcacagaccagcagaaacttatttatgaagagaaactagaagccagtgaactcttcaaagacaagaaggctttatacccatctagtgttgggcaaccattccaaggggcttacctggaaatcaacaagaaccccaagtataagaaactcaaagatgccattgaagaaaagatcatcattgctgaagtcgtgaacaaaattaaccgtgctaatgggaagagtacatctcggattttcctcttaacaaacaataatctccttcttgctgaccaaaagtctggacaaatcaagtcagaggttccattggtggatgtgaccaaggtatcaatgagctcacaaaatgatggcttcttcgccgtccacctcaaagagggctcagaagcagctagtaaaggagactttctcttcagcagtgatcacctgattgaaatggccaccaagctctatcgcacaactctcagccaaaccaaacagaagctcaatattgagatttccgatgagttcctggtacagttcagacaggacaaagtatgtgtgaagtttattcagggaaaccagaaaaatgggagtgtcccaacatgtaaacgaaaaaacaaccgtctccttgaagttgctgtcccttaactggcgcctcctctctactttcatggacttgttcctttgtaatagtgcaatttggttttgttttatttggggttcattgtatgtttgggaatcaccaaaggcttttagagttctttggcaaaataaaaatatttgactaatcaatttttattattggaatagttttaacctttcaaatacatgttctgtcctggagcaggattgtagaaactaacagtgtctattttcatgtctgatgtgttcttcctttagtcatcatgttaggtctgtgtaccctaaatcagcatattactcataaatcattaattaatataagcataggaaatggtcttaaaagatactgcattcattcatcagatatttattccatgcctactctatgctaggcactgtgctagatggtatgaaaacttattaggaacctttttgtttttgagaccattgcattctggctggtttgtgctggtttaacgacatctaagaaggtttagaaatggtgagaccaaaacaataactgttaatgatggacagcattattaggaaccctgtagtatgatatttaacaatataggcttcaagaagggctggtcctaagagggggcagaaatgaatgaccaggttaaatccctctacatgtggtttctgtttgaaaaaaagaaaactgacatttgaacaggacttttaatttgtttaaaactctggtaattacttgtaacagtagaaaatagaagtcattcttattttagaaaaagtgacagaagcagtccagtaagattatatgtttctgtttctggtaaataccatatatgatcctcgaaatgataatatctccagaatattgttttcacccaaatttgagtagatattttaaacacctaacaaagtaaagggctaaaagccattcagatagcagtaaaacattctgtatgatgtgcaataaaacatccaagatcttttttgaaagttttatttataatatacatttttgtatgagaaaggtgattggtacagggtgcctattttagtcatggatcaaaatttgtgtaacttgcagggctttctttctttttcttcaaatttacaagggttcattttggaaactacattttaaactttggaatcaaattgtttcttatttgggaggataatgtatatacattggtattatgttaaataataaaattgttctaatttggtgccatttcctgaatcacaactgtatttttgtatctcaagctattttcatatgttgtgtgtcaatgtatcatctctcagaaaggttttacaatccaaacattatatgttctctgtgtaactgaatttcacttatcttttataaaccagaaacattaattgaaaatattttctggggattttctcttgacttgtatttttaaaaattgctcacataaagaagttctcagaagtc

SEQ ID NO: 19131 - DNA, 4764 bp, Homo sapiens
  source 1..4764: mol_type = unassigned DNA
agctggagaccatggccaaaatggaggtgaaaacctcacttctggacaatatgattggagttggggatatggttcttttagaacctctcaatgaggagaccttcatcaacaacctcaagaagcgctttgaccacagtgaaatatacacatacattggaagtgtggttatatctgttaacccataccggtctttacccatttattcaccagagaaagtggaagaatacaggaacagaaatttttatgaactgagccctcacatctttgccctttcggatgaagcatacagatccctacgagatcaagataaggaccaatgtattctcattactggggaaagtggagcaggaaaaacagaggccagtaagcttgtcatgtcctatgtggcagctgtttgtggaaaaggagcagaagttaatcaagttaaagaacagcttttacagtccaacccggtcctggaagcttttggaaatgccaaaactgtaaggaatgacaactcctctagatttggcaaatatatggatattgaatttgactttaaaggcgatccactaggaggagtaataagtaactatcttttagagaaatctcgggttgttaaacagccaagaggtgaaagaaacttccatgtgttctatcagctgctctctggtgcctctgaagagctcctcaataaacttaagcttgagagggatttcagcaggtataactacctgagtctggattcggccaaagtgaatggagtggatgatgcagcaaattttagaaccgtgcggaatgccatgcagattgtgggctttatggatcatgaagctgagtctgtcttggcggtggtggcagcagtgttgaaactggggaacattgagttcaagcccgaatctcgagtgaatggtctagatgaaagcaaaatcaaagataaaaatgagttaaaagaaatttgtgaattgaccggcattgatcaatcagttctagaacgagcattcagtttccgaacagttgaggccaaacaggagaaagtttcaactacactgaatgtggctcaggcttattatgcccgtgatgctctggctaaaaacctctacagcaggttgttttcatggttggtaaatcgaatcaatgaaagcattaaggcacaaacaaaagtgagaaagaaggtcatgggtgttctggacatttatggctttgagattttcgaggacaacagctttgagcagttcattattaattattgtaacgaaaagctgcaacaaatcttcattgaacttactcttaaagaagagcaggaggagtatatacgggaggatatagaatggactcacattgactacttcaataatgctatcatttgtgacctaatagaaaataacacaaatggaatcctggccatgctggatgaagagtgcctcagacctggcacagtcactgatgagaccttcttagaaaagctgaaccaagtatgtgccacccaccagcattttgagagcaggatgagcaagtgctctcggttcctcaatgacacgtctctgcctcacagctgcttcaggatccagcattatgctggaaaggtgctgtaccaggtggaaggattcgttgacaaaaacaatgaccttctctatcgagacctgtcccaagccatgtggaaggccagccatgccctcatcaagtctttgttccccgaagggaatcccgccaagatcaacctgaaaaggcctcctacagcaggctcacagttcaaggcatccgtggccactctgatgaaaaacctacagaccaagaacccaaactatattaggtgtatcaaaccgaatgataaaaaagcagcacacatcttcaacgaggctctagtgtgtcatcagatcaggtacctggggcttttggagaacgtccgagtgcggagggcaggctacgccttcaggcaggcctatgaaccttgcctagaaagatacaaaatgctttgtaaacaaacatggcctcattggaaaggaccagccaggtctggtgtggaggtcctatttaatgaattagaaattcccgtggaagaatactcctttggtagatcaaagatattcatccgaaacccaagaacattattcaaattagaagacctgaggaagcaacgcctggaggacttggccactctcattcagaagatatatcgggggtggaaatgccgcacacacttcctgctaatgaaaaaaagccaaattgtgattgccgcctggtacaggagatatgcgcaacaaaagaggtaccagcagacaaagagttccgccttagtaattcagtcttatatccggggttggaaggctcgaaaaattctgcgggaactgaagcatcaaaagcgctgtaaggaagcagtcacgaccattgctgcatattggcatgggacccaggctcgaagggaattgaaacgcttgaaggaggaggctaggcgtaagcatgcagttgctgtcatttgggcttactggcttggactgaaggtacgtagagaatacaggaaattcttcagagccaatgctggaaagaaaatctatgagtttacgcttcagagaattgtgcaaaaatacttcttggaaatgaaaaataagatgccttccttatctccaatagacaagaattggccctcaagaccttacttattcttggattctactcacaaggagctaaaaaggattttccacttgtggaggtgtaaaaaatacagggaccaattcacagaccagcagaaacttatttatgaagagaaactagaagccagtgaactcttcaaagacaagaaggctttatacccatctagtgttgggcaaccattccaaggggcttacctggaaatcaacaagaaccccaagtataagaaactcaaagatgccattgaagaaaagatcatcattgctgaagtcgtgaacaaaattaaccgtgctaatgggaagagtacatctcggattttcctcttaacaaacaataatctccttcttgctgaccaaaagtctggacaaatcaagtcagaggttccattggtggatgtgaccaaggtatcaatgagctcacaaaatgatggcttcttcgccgtccacctcaaagagggctcagaagcagctagtaaaggagactttctcttcagcagtgatcacctgattgaaatggccaccaagctctatcgcacaactctcagccaaaccaaacagaagctcaatattgagatttccgatgagttcctggtacagttcagacaggacaaagtatgtgtgaagtttattcagggaaaccagaaaaatgggagtgtcccaacatgtaaacgaaaaaacaaccgtctccttgaagttgctgtcccttaactggcgcctcctctctactttcatggacttgttcctttgtaatagtgcaatttggttttgttttatttggggttcattgtatgtttgggaatcaccaaaggcttttagagttctttggcaaaataaaaatatttgactaatcaatttttattattggaatagttttaacctttcaaatacatgttctgtcctggagcaggattgtagaaactaacagtgtctattttcatgtctgatgtgttcttcctttagtcatcatgttaggtctgtgtaccctaaatcagcatattactcataaatcattaattaatataagcataggaaatggtcttaaaagatactgcattcattcatcagatatttattccatgcctactctatgctaggcactgtgctagatggtatgaaaacttattaggaacctttttgtttttgagaccattgcattctggctggtttgtgctggtttaacgacatctaagaaggtttagaaatggtgagaccaaaacaataactgttaatgatggacagcattattaggaaccctgtagtatgatatttaacaatataggcttcaagaagggctggtcctaagagggggcagaaatgaatgaccaggttaaatccctctacatgtggtttctgtttgaaaaaaagaaaactgacatttgaacaggacttttaatttgtttaaaactctggtaattacttgtaacagtagaaaatagaagtcattcttattttagaaaaagtgacagaagcagtccagtaagattatatgtttctgtttctggtaaataccatatatgatcctcgaaatgataatatctccagaatattgttttcacccaaatttgagtagatattttaaacacctaacaaagtaaagggctaaaagccattcagatagcagtaaaacattctgtatgatgtgcaataaaacatccaagatcttttttgaaagttttatttataatatacatttttgtatgagaaaggtgattggtacagggtgcctattttagtcatggatcaaaatttgtgtaacttgcagggctttctttctttttcttcaaatttacaagggttcattttggaaactacattttaaactttggaatcaaattgtttcttatttgggaggataatgtatatacattggtattatgttaaataataaaattgttctaatttggtgccatttcctgaatcacaactgtatttttgtatctcaagctattttcatatgttgtgtgtcaatgtatcatctctcagaaaggttttacaatccaaacattatatgttctctgtgtaactgaatttcacttatcttttataaaccagaaacattaattgaaaatattttctggggattttctcttgacttgtatttttaaaaattgctcacataaagaagttctcagaagtc

SEQ ID NO: 19132 - DNA, 5082 bp, Homo sapiens
  source 1..5082: mol_type = unassigned DNA
cctcccgccgccgctgagcactccgcagctgggtgcgcacgggagcctcaaccgcggcgcgtggaggcagtaccagagcgcgcggcgcgcagtcggccggcagccgcgggacagccttggcagaacagccgcggcgggagccccgcagccccgggctgggcccgcgtcccggagcgccaccggagagcgaggacgacgtggaggcggagtggcgcccggcgaggtagcgccaggcgagctggagaccatggccaaaatggaggtgaaaacctcacttctggacaatatgattggagttggggatatggttcttttagaacctctcaatgaggagaccttcatcaacaacctcaagaagcgctttgaccacagtgaaatatacacatacattggaagtgtggttatatctgttaacccataccggtctttacccatttattcaccagagaaagtggaagaatacaggaacagaaatttttatgaactgagccctcacatctttgccctttcggatgaagcatacagatccctacgagatcaagataaggaccaatgtattctcattactggggaaagtggagcaggaaaaacagaggccagtaagcttgtcatgtcctatgtggcagctgtttgtggaaaaggagcagaagttaatcaagttaaagaacagcttttacagtccaacccggtcctggaagcttttggaaatgccaaaactgtaaggaatgacaactcctctagatttggcaaatatatggatattgaatttgactttaaaggcgatccactaggaggagtaataagtaactatcttttagagaaatctcgggttgttaaacagccaagaggtgaaagaaacttccatgtgttctatcagctgctctctggtgcctctgaagagctcctcaataaacttaagcttgagagggatttcagcaggtataactacctgagtctggattcggccaaagtgaatggagtggatgatgcagcaaattttagaaccgtgcggaatgccatgcagattgtgggctttatggatcatgaagctgagtctgtcttggcggtggtggcagcagtgttgaaactggggaacattgagttcaagcccgaatctcgagtgaatggtctagatgaaagcaaaatcaaagataaaaatgagttaaaagaaatttgtgaattgaccggcattgatcaatcagttctagaacgagcattcagtttccgaacagttgaggccaaacaggagaaagtttcaactacactgaatgtggctcaggcttattatgcccgtgatgctctggctaaaaacctctacagcaggttgttttcatggttggtaaatcgaatcaatgaaagcattaaggcacaaacaaaagtgagaaagaaggtcatgggtgttctggacatttatggctttgagattttcgaggacaacagctttgagcagttcattattaattattgtaacgaaaagctgcaacaaatcttcattgaacttactcttaaagaagagcaggaggagtatatacgggaggatatagaatggactcacattgactacttcaataatgctatcatttgtgacctaatagaaaataacacaaatggaatcctggccatgctggatgaagagtgcctcagacctggcacagtcactgatgagaccttcttagaaaagctgaaccaagtatgtgccacccaccagcattttgagagcaggatgagcaagtgctctcggttcctcaatgacacgtctctgcctcacagctgcttcaggatccagcattatgctggaaaggtgctgtaccaggtggaaggattcgttgacaaaaacaatgaccttctctatcgagacctgtcccaagccatgtggaaggccagccatgccctcatcaagtctttgttccccgaagggaatcccgccaagatcaacctgaaaaggcctcctacagcaggctcacagttcaaggcatccgtggccactctgatgaaaaacctacagaccaagaacccaaactatattaggtgtatcaaaccgaatgataaaaaagcagcacacatcttcaacgaggctctagtgtgtcatcagatcaggtacctggggcttttggagaacgtccgagtgcggagggcaggctacgccttcaggcaggcctatgaaccttgcctagaaagatacaaaatgctttgtaaacaaacatggcctcattggaaaggaccagccaggtctggtgtggaggtcctatttaatgaattagaaattcccgtggaagaatactcctttggtagatcaaagatattcatccgaaacccaagaacattattcaaattagaagacctgaggaagcaacgcctggaggacttggccactctcattcagaagatatatcgggggtggaaatgccgcacacacttcctgctaatgaaaaaaagccaaattgtgattgccgcctggtacaggagatatgcgcaacaaaagaggtaccagcagacaaagagttccgccttagtaattcagtcttatatccggggttggaaggctcgaaaaattctgcgggaactgaagcatcaaaagcgctgtaaggaagcagtcacgaccattgctgcatattggcatgggacccaggcacgaagggaactgagacggctgaaggaggaggctaggaataaacatgctattgcagttatttgggcttactggcttggatctaaggctcgaagggaattgaaacgcttgaaggaggaggctaggcgtaagcatgcagttgctgtcatttgggcttactggcttggactgaaggtacgtagagaatacaggaaattcttcagagccaatgctggaaagaaaatctatgagtttacgcttcagagaattgtgcaaaaatacttcttggaaatgaaaaataagatgccttccttatctccaatagacaagaattggccctcaagaccttacttattcttggattctactcacaaggagctaaaaaggattttccacttgtggaggtgtaaaaaatacagggaccaattcacagaccagcagaaacttatttatgaagagaaactagaagccagtgaactcttcaaagacaagaaggctttatacccatctagtgttgggcaaccattccaaggggcttacctggaaatcaacaagaaccccaagtataagaaactcaaagatgccattgaagaaaagatcatcattgctgaagtcgtgaacaaaattaaccgtgctaatgggaagagtacatctcggattttcctcttaacaaacaataatctccttcttgctgaccaaaagtctggacaaatcaagtcagaggttccattggtggatgtgaccaaggtatcaatgagctcacaaaatgatggcttcttcgccgtccacctcaaagagggctcagaagcagctagtaaaggagactttctcttcagcagtgatcacctgattgaaatggccaccaagctctatcgcacaactctcagccaaaccaaacagaagctcaatattgagatttccgatgagttcctggtacagttcagacaggacaaagtatgtgtgaagtttattcagggaaaccagaaaaatgggagtgtcccaacatgtaaacgaaaaaacaaccgtctccttgaagttgctgtcccttaactggcgcctcctctctactttcatggacttgttcctttgtaatagtgcaatttggttttgttttatttggggttcattgtatgtttgggaatcaccaaaggcttttagagttctttggcaaaataaaaatatttgactaatcaatttttattattggaatagttttaacctttcaaatacatgttctgtcctggagcaggattgtagaaactaacagtgtctattttcatgtctgatgtgttcttcctttagtcatcatgttaggtctgtgtaccctaaatcagcatattactcataaatcattaattaatataagcataggaaatggtcttaaaagatactgcattcattcatcagatatttattccatgcctactctatgctaggcactgtgctagatggtatgaaaacttattaggaacctttttgtttttgagaccattgcattctggctggtttgtgctggtttaacgacatctaagaaggtttagaaatggtgagaccaaaacaataactgttaatgatggacagcattattaggaaccctgtagtatgatatttaacaatataggcttcaagaagggctggtcctaagagggggcagaaatgaatgaccaggttaaatccctctacatgtggtttctgtttgaaaaaaagaaaactgacatttgaacaggacttttaatttgtttaaaactctggtaattacttgtaacagtagaaaatagaagtcattcttattttagaaaaagtgacagaagcagtccagtaagattatatgtttctgtttctggtaaataccatatatgatcctcgaaatgataatatctccagaatattgttttcacccaaatttgagtagatattttaaacacctaacaaagtaaagggctaaaagccattcagatagcagtaaaacattctgtatgatgtgcaataaaacatccaagatcttttttgaaagttttatttataatatacatttttgtatgagaaaggtgattggtacagggtgcctattttagtcatggatcaaaatttgtgtaacttgcagggctttctttctttttcttcaaatttacaagggttcattttggaaactacattttaaactttggaatcaaattgtttcttatttgggaggataatgtatatacattggtattatgttaaataataaaattgttctaatttggtgccatttcctgaatcacaactgtatttttgtatctcaagctattttcatatgttgtgtgtcaatgtatcatctctcagaaaggttttacaatccaaacattatatgttctctgtgtaactgaatttcacttatcttttataaaccagaaacattaattgaaaatattttctggggattttctcttgacttgtatttttaaaaattgctcacataaagaagttctcag

SEQ ID NO: 19133 - DNA, 572 bp, Homo sapiens
  source 1..572: mol_type = unassigned DNA
aaacccgcaaggcgcggaggccgccgcgacgctcaccggggggcgctgtgaagccggcaccgggcggacagagctggagaccatggccaaaatggaggtgaaaacctcacttctggacaatatgattggagttggggatatggttcttttagaacctctcaatgaggagaccttcatcaacaacctcaagaagcgctttgaccacagtgaaatatacacatacattggaagtgtggttatatctgttaacccataccggtctttacccatttattcaccagagaaagtggaagaatacaggaacagaaatttttatgaactgagccctcacatctttgccctttcggatgaagcatacagatccctacgagatcaagataaggaccaatgtattctcattactggggaaagtggagcaggaaaaacagaggccagtaagcttgtcatgtcctatgtggcagctgtttgtggaaaaggagcagaagttaatcaagttaaagaacagcttttacagtccaacccggtcctggaagcttttggaaatgccaaaactgtaaggaatgacaactcct

SEQ ID NO: 19134 - DNA, 374 bp, Homo sapiens
  source 1..374: mol_type = unassigned DNA
ggaagttaacttttcttaatcgggtttctacaaggtagttcactattgtatgttttatttcttaccaaaacttttcttgggaaaatttgttttattgctccatacgtggtcaagctggagaccatggccaaaatggaggtgaaaacctcacttctggacaatatgattggagttggggatatggttcttttagaacctctcaatgaggagaccttcatcaacaacctcaagaagcgctttgaccacagtgaaatatacacatacattggaagtgtggttatatctgttaacccataccggtctttacccatttattcaccagagaaagtggaagaatacaggaacagaaatttttatgaactgagccctcacat

SEQ ID NO: 19135 - DNA, 542 bp, Homo sapiens
  source 1..542: mol_type = unassigned DNA
agagacgggagctacgaagggtggtggggccgggaagagagttggggagagggttgggagagggtgatgagagcgcgctggagagctggagaccatggccaaaatggaggtgaaaacctcacttctggacaatatgattggagttggggatatggttcttttagaacctctcaatgaggagaccttcatcaacaacctcaagaagcgctttgaccacagtgaaatatacacatacattggaagtgtggttatatctgttaacccataccggtctttacccatttattcaccagagaaagtggaagaatacaggaacagaaatttttatgaactgagccctcacatctttgccctttcggatgaagcatacagatccctacgagatcaagataaggaccaatgtattctcattactggggaaagtggagcaggaaaaacagaggccagtaagcttgtcatgtcctatgtggcagctgtttgtggaaaaggagcagaagttaatcaagttaaagaacagcttttacagtccaacccggtcctgg

SEQ ID NO: 19136 - DNA, 2672 bp, Homo sapiens
  source 1..2672: mol_type = unassigned DNA
aattagaaattcccgtggaagaatactcctttggtagatcaaagatattcatccgaaacccaagaacattattcaaattagaagacctgaggaagcaacgcctggaggacttggccactctcattcagaagatatatcgggggtggaaatgccgcacacacttcctgctaatgaaaaaaagccaaattgtgattgccgcctggtacaggagatatgcgcaacaaaagaggtaccagcagacaaagagttccgccttagtaattcagtcttatatccggggttggaaggctcgaaaaattctgcgggaactgaagcatcaaaagcgctgtaaggaagcagtcacgaccattgctgcatattggcatgggacccaggctcgaagggaattgaaacgcttgaaggaggaggctaggcgtaagcatgcagttgctgtcatttgggcttactggcttggactgaaggtacgtagagaatacaggaaattcttcagagccaatgctggaaagaaaatctatgagtttacgcttcagagaattgtgcaaaaatacttcttggaaatgaaaaataagatgccttccttatctccaatagacaagaattggccctcaagaccttacttattcttggattctactcacaaggagctaaaaaggattttccacttgtggaggtgtaaaaaatacagggaccaattcacagaccagcagaaacttatttatgaagagaaactagaagccagtgaactcttcaaagacaagaaggctttatacccatctagtgttgggcaaccattccaaggggcttacctggaaatcaacaagaaccccaagtataagaaactcaaagatgccattgaagaaaagatcatcattgctgaagtcgtgaacaaaattaaccgtgctaatgggaagagtacatctcggattttcctcttaacaaacaataatctccttcttgctgaccaaaagtctggacaaatcaagtcagaggttccattggtggatgtgaccaaggtatcaatgagctcacaaaatgatggcttcttcgccgtccacctcaaagagggctcagaagcagctagtaaaggagactttctcttcagcagtgatcacctgattgaaatggccaccaagctctatcgcacaactctcagccaaaccaaacagaagctcaatattgagatttccgatgagttcctggtacagttcagacaggacaaagtatgtgtgaagtttattcagggaaaccagaaaaatgggagtgtcccaacatgtaaacgaaaaaacaaccgtctccttgaagttgctgtcccttaactggcgcctcctctctactttcatggacttgttcctttgtaatagtgcaatttggttttgttttatttggggttcattgtatgtttgggaatcaccaaaggcttttagagttctttggcaaaataaaaatatttgactaatcaatttttattattggaatagttttaacctttcaaatacatgttctgtcctggagcaggattgtagaaactaacagtgtctattttcatgtctgatgtgttcttcctttagtcatcatgttaggtctgtgtaccctaaatcagcatattactcataaatcattaattaatataagcataggaaatggtcttaaaagatactgcattcattcatcagatatttattccatgcctactctatgctaggcactgtgctagatggtatgaaaacttattaggaacctttttgtttttgagaccattgcattctggctggtttgtgctggtttaacgacatctaagaaggtttagaaatggtgagaccaaaacaataactgttaatgatggacagcattattaggaaccctgtagtatgatatttaacaatataggcttcaagaagggctggtcctaagagggggcagaaatgaatgaccaggttaaatccctctacatgtggtttctgtttgaaaaaaagaaaactgacatttgaacaggacttttaatttgtttaaaactctggtaattacttgtaacagtagaaaatagaagtcattcttattttagaaaaagtgacagaagcagtccagtaagattatatgtttctgtttctggtaaataccatatatgatcctcgaaatgataatatctccagaatattgttttcacccaaatttgagtagatattttaaacacctaacaaagtaaagggctaaaagccattcagatagcagtaaaacattctgtatgatgtgcaataaaacatccaagatcttttttgaaagttttatttataatatacatttttgtatgagaaaggtgattggtacagggtgcctattttagtcatggatcaaaatttgtgtaacttgcagggctttctttctttttcttcaaatttacaagggttcattttggaaactacattttaaactttggaatcaaattgtttcttatttgggaggataatgtatatacattggtattatgttaaataataaaattgttctaatttggtgccatttcctgaatcacaactgtatttttgtatctcaagctattttcatatgttgtgtgtcaatgtatcatctctcagaaaggttttacaatccaaacattatatgttctctgtgtaactgaatttcacttatcttttataaaccagaaacattaattg

SEQ ID NO: 19137 - DNA, 1176 bp, Homo sapiens
  source 1..1176: mol_type = unassigned DNA
gccgggctcctcccgccgccgctgagcactccgcagctgggtgcgcacgggagcctcaaccgcggcgcgtggaggcagtaccagagcgcgcggcgcgcagtcggccggcagccgcgggacagccttggcagaacagccgcggcgggagccccgcagccccgggctgggcccgcgtcccggagcgccaccggagagcgaggacgacgtggaggcggagtggcgcccggcgaggtagcgccaggcgagctggagaccatggccaaaatggaggtgaaaacctcacttctggacaatatgattggagttggggatatggttcttttagaacctctcaatgaggagaccttcatcaacaacctcaagaagcgctttgaccacagtgaaatatacacatacattggaagtgtggttatatctgttaacccataccggtctttacccatttattcaccagagaaagtggaagaatacaggaacagaaatttttatgaactgagccctcacatctttgccctttcggatgaagcatacagatccctacgagatcaagataaggaccaatgtattctcattactggggaaagtggagcaggaaaaacagaggccagtaagcttgtcatgtcctatgtggcagctgtttgtggaaaaggagcagaagttaatcaagttaaagaacagcttttacagtccaacccggtcctggaagcttttggaaatgccaaaactgtaaggaatgacaactcctctagatttggcaaatatatggatattgaatttgactttaaaggcgatccactaggaggagtaataagtaactatcttttagagaaatctcgggttgttaaacagccaagaggtgaaagaaacttccatgtgttctatcagctgctctctggtgcctctgaagagctcctcaataaacttaagcttgagagggatttcagcaggtataactacctgagtctggattcggccaaagtgaatggagtggatgatgcagcaaattttagaaccgtgcggaatgccatgcagattgtgggctttatggatcatgaagctgagtctgtcttggcggtggtggcagcagtgttgaaactggggaacattgagttcaagcccgaatctcgagtgaatggtctagatgaaagcaaaatcaaagataaaaatgaaagtaaa

SEQ ID NO: 19138 - DNA, 1310 bp, Homo sapiens
  source 1..1310: mol_type = unassigned DNA
tttcctcagttagattgcacatgcatgagaagcagtagatgtgtctctcattctttcttctttcattgcctgctaagtactgtttgtataccagtagcatgggtcagagtgggaggttgtcaacagaagagtccagcatgtatccatgatggactctcgatcaactttatatgattaactcatataaaacagccctgtatggaagctgaggctgcctcttcctagccacaggatattgacctactttccccttcttatctgcttgcaaaatatttgttgtacttagtgtgttctccctgtcacaacgaatgtttgtctctctctttcatatgaactgaaggctaaagtgctagttaaatcagtggaaaaagcaatggagaagaaaagttgctggagaccatggccaaaatggaggtgaaaacctcacttctggacaatatgattggagttggggatatggttcttttagaacctctcaatgaggagaccttcatcaacaacctcaagaagcgctttgaccacagtgaaatatacacatacattggaagtgtggttatatctgttaacccataccggtctttacccatttattcaccagagaaagtggaagaatacaggaacagaaatttttatgaactgagccctcacatctttgccctttcggatgaagcatacagatccctacgagatcaagataaggaccaatgtattctcattactggggaaagtggagcaggaaaaacagaggccagtaagcttgtcatgtcctatgtggcagctgtttgtggaaaaggagcagaagttaatcaagttaaagaacagcttttacagtccaacccggtcctggaagcttttggaaatgccaaaactgtaaggaatgacaactcctctagatttggcaaatatatggatattgaatttgactttaaaggcgatccactaggaggagtaataagtaactatcttttagagaaatctcgggttgttaaacagccaagaggtgaaagaaacttccatgtgttctatcagctgctctctggtgcctctgaagagctcctcaataaacttaagcttgagagggatttcagcaggtataactacctgagtctggattcggccaaagtgaatggagtggatgatgcagcaaattttagaaccgtgcggaatgccatgcagattgtgggctttatggatcatgaagctgagtctgtcttggcggtggtggcagcagtgttgaaactggggaacattgagttcaagcccgaatctcgagtgaatggtctagatgaaagcaaaatcaaagataaaaa

SEQ ID NO: 19139 - DNA, 4946 bp, Homo sapiens
  source 1..4946: mol_type = unassigned DNA
agaggcctcccagtcagacctggacggctccagccgtgtcctgaggagctggaccagccacatcccctggggctgcagttgaagcagaaccaagtggccatcccggcgttagaccgtaggttcctggtcccggagtggtcggagcccgccagtgggcaggcagctcttgctcacaggccgcggtgcccaggccgctggctctccgcagggcggaatggcgctgcaagtggagctggtacccaccggggagatcatccgcgtggttcatccccacaggccctgcaagcttgccctgggcagtgacggggttcgggtgaccatggagagtgcgctcaccgcccgtgaccgggtgggggtgcaggatttcgtgctgctggagaacttcaccagcgaggccgccttcatcgagaacctgcggcggcgatttcgggagaatctcatctacacctacattggccccgtcctggtctctgtcaatccctaccgggacctgcagatctacagccggcagcatatggagcgttaccgtggcgtcagcttctatgaagtgccccctcacctgtttgccgtggcggacactgtgtaccgagcactgcgcacggagcgtcgggaccaggctgtgatgatctctggggagagcggggcaggcaagaccgaggccaccaagaggctgctgcagttctatgcagagacctgcccagcccccgagcgcggaggtgccgtgcgggaccggctgctacagagcaacccggtgctggaggcctttggaaatgccaagaccctccggaacgataactccagcaggttcgggaagtacatggatgtgcagtttgacttcaagggtgcccccgtgggtggccacatcctcagttacctcctggaaaagtcacgagtggtgcaccagaatcatggggagcggaacttccacatcttctaccagctgctggaggggggtgaggaggagactcttcgcaggctgggcttggaacggaacccccagagctacctgtacctggtgaagggccagtgtgccaaagtctcctccatcaacgacaagagtgactggaaggtcgtcaggaaggctctgacagtcattgatttcaccgaggatgaagtggaggacctgctgagcatcgtggccagcgtccttcatttgggcaacatccactttgctgccaacgaggagagcaatgcccaggtcaccaccgagaaccagctcaagtatctgaccaggctcctcagcgtggaaggctcgacgctgcgagaagccctgacacacaggaagatcatcgccaagggggaggagctcctgagcccgctgaacctggagcaggccgcgtacgcacgagacgccctcgccaaggctgtgtacagccgcacttttacctggctcgtcgggaagatcaacaggtcgctggcctccaaggacgtggagagccccagctggcggagcaccacggttctcgggctcctggatatttatggctttgaagtgtttcagcataacagctttgagcagttctgcatcaattactgcaacgagaagctgcagcagctcttcatcgagctcacgctcaagtcggagcaggaggagtacgaggcagagggcatcgcgtgggagcccgtccagtatttcaacaacaaaatcatctgtgatctggtggaggagaagtttaagggcatcatctcgattttggatgaggagtgtctgcgccccggggaggccacagacctgaccttcctggagaagctggaggatactgtcaagcaccatccacacttcctgacgcacaagctggctgaccagcggaccaggaaatctctgggccgaggggaattccgccttctgcactatgcgggggaggtgacctacagcgtgaccgggtttctggacaaaaacaatgaccttctcttccggaaccttaaggagaccatgtgtagctcaaagaatcccattatgagccagtgctttgaccggagcgagctcagtgacaagaagcggccagagacggtcgccacccagttcaagatgagcctcctgcagctggtggagatcctgcagtctaaggagcccgcctacgtccgctgcatcaaacccaatgatgccaaacagcccggccgctttgacgaggtgctgatccgccaccaggtgaagtacctggggctgttggaaaacctgcgcgtgcgcagagccggctttgcctatcgccgcaaatacgaagctttcctgcaaaggtacaagtcactgtgcccagagacgtggcccacgtgggcaggacggccgcaggatggggtggctgtgctggtccgacacctgggctacaagccagaagagtacaagatgggcaggaccaagatcttcatccgcttccccaagaccctgtttgccacagaggatgccctggaggtccggcggcagagcctggccacaaagatccaagctgcctggaggggctttcactggcggcagaaattcctccgggtgaagagatcagccatctgcatccagtcgtggtggcgtggaacactgggccggaggaaggcagccaagaggaagtgggcggcacagaccatccggcggctcatccgaggcttcgtcctgcgccacgccccccgctgccccgagaacgccttcttcctggaccatgtgcgcacctcttttttgctaaacctgaggcggcagctgccccagaatgtcctggacacctcgtggcccacgcccccacctgccctgcgtgaggcctcagagcttctgcgggagttgtgcataaagaacatggtgtggaaatactgccggagtatcagccctgagtggaagcagcagctgcagcagaaggccgtggctagtgagatcttcaagggcaagaaggataattaccctcagagtgtacccaggctcttcatcagcactcggcttggtacagatgagatcagcccccgagtgctgcaggccttgggctctgagcccattcagtatgcggtgcctgttgtgaaatacgaccgcaagggctacaagcctcgctcccggcagctgctgctcacgcccaacgccgtcgtcatcgtggaggacgccaaagtcaagcagaggattgattacgccaacctgaccggaatctctgtcagcagcctgagcgacagtctttttgtgcttcatgtacagcgtgcggacaataagcaaaagggagatgtggtgctgcagagtgaccacgtgattgagacgctgaccaagacagccctcagtgccaaccgcgtgaacagcatcaacatcaaccagggcagcatcacgtttgcagggggccccggcagggatggcaccattgacttcacacccggctcggagctgctcatcaccaaggccaagaacgggcacctggctgtggtcgccccacggctgaattctcggtgataaaggcgcccactggaccctcccaacgcccaatgctttgcttttctcctcctccccttcccagttaccaaagactcgaacttccagacagggacccagggacaccccgaagcccacctgcaatctcccacctcctgcccatccctctcttgagggagcagcaggggccaggagctaccccaggagtgggccaggccgggccacagcaataggaaagccagggccagagcgagccatgccagccctactgccgatgccaaatatttgagagaagggaacttttgctgaggttttctctgaggtttttttgatgctttataggaaactattttttaaaaaaagccatttcccacccaaggacacagtggatgtgttttccctgactccagcagggcaaggaatgtagccgagaggttgtgtgggctgggctctggtgccctcttccctggccaggacacctctcctcctgattcccttggcaccttgtctttctgtctgtttacctgtctccctgcctgcccatctgcatcttttgcagcccactctgacttccatctgggggctgagaccacccttgcctgcccccttctttctgccttaagaatgtccttttaggctgggcatggtggctcacgcctgtaaccccagcactttgggaggcggagacgggcagataacctgaggtcaggatttcgagaccaacctgacctacatggagaaactccgcctctagtaaaaatacaaaattagccgggcatggtggtgcacgcctctaatcccagctactcgggaggctgaggcaggagaatcacttgaacccgggaagtggaggttgcagtgagccaagagtacaccactgcactccagcctgggcaacagagcgagactccgtcttaaaaaaaaaaaaaaagaacgcccttttactgtcctcatcatcccagtttgaggcagtgctggagtggggaaggccgtcttagaccatagaggttggaagacgctgagagatcatccagcccagccccttgatgttacagagcagaagacagatgcccaaacaggagaaggcacttgcccacggtcatacggcaggttgccacaaaaccaagatggcagcccttcctcagcgtgcctcactgccactcccagagccagggagccccataaaacccacatcatgtcttaagagtatatctggctccttgaccagcaatcggccctgggagccaccaggtgggaaaagcgcctctgccagagtccaggccttgggatgacagacagcttgcccgcacactcgggccccactcaaggatgtagggccttttctggcccctgacccctccctggcatgggagcgtggggacggggctggccttgggaggagcggcaggggcatcacctccttctgctgcttctccctgctcctaccctcaagggcctgggggctgcccagctgcctctatgcccttctgggggtctcagcccactgctgacacttctgcaatccagagaaacactaaataaagcaatacgtgtttgccaa

SEQ ID NO: 19140 - DNA, 4734 bp, Homo sapiens
  source 1..4734: mol_type = unassigned DNA
agagtgcgcccgggccgcggatccccaagcccgccacgccgcccagcccggccccgcccgcgccggaagagccacgccggccctgggcagtgacggggttcgggtgaccatggagagtgcgctcaccgcccgtgaccgggtgggggtgcaggatttcgtgctgctggagaacttcaccagcgaggccgccttcatcgagaacctgcggcggcgatttcgggagaatctcatctacacctacattggccccgtcctggtctctgtcaatccctaccgggacctgcagatctacagccggcagcatatggagcgttaccgtggcgtcagcttctatgaagtgccccctcacctgtttgccgtggcggacactgtgtaccgagcactgcgcacggagcgtcgggaccaggctgtgatgatctctggggagagcggggcaggcaagaccgaggccaccaagaggctgctgcagttctatgcagagacctgcccagcccccgagcgcggaggtgccgtgcgggaccggctgctacagagcaacccggtgctggaggcctttggaaatgccaagaccctccggaacgataactccagcaggttcgggaagtacatggatgtgcagtttgacttcaagggtgcccccgtgggtggccacatcctcagttacctcctggaaaagtcacgagtggtgcaccagaatcatggggagcggaacttccacatcttctaccagctgctggaggggggtgaggaggagactcttcgcaggctgggcttggaacggaacccccagagctacctgtacctggtgaagggccagtgtgccaaagtctcctccatcaacgacaagagtgactggaaggtcgtcaggaaggctctgacagtcattgatttcaccgaggatgaagtggaggacctgctgagcatcgtggccagcgtccttcatttgggcaacatccactttgctgccaacgaggagagcaatgcccaggtcaccaccgagaaccagctcaagtatctgaccaggctcctcagcgtggaaggctcgacgctgcgagaagccctgacacacaggaagatcatcgccaagggggaggagctcctgagcccgctgaacctggagcaggccgcgtacgcacgagacgccctcgccaaggctgtgtacagccgcacttttacctggctcgtcgggaagatcaacaggtcgctggcctccaaggacgtggagagccccagctggcggagcaccacggttctcgggctcctggatatttatggctttgaagtgtttcagcataacagctttgagcagttctgcatcaattactgcaacgagaagctgcagcagctcttcatcgagctcacgctcaagtcggagcaggaggagtacgaggcagagggcatcgcgtgggagcccgtccagtatttcaacaacaaaatcatctgtgatctggtggaggagaagtttaagggcatcatctcgattttggatgaggagtgtctgcgccccggggaggccacagacctgaccttcctggagaagctggaggatactgtcaagcaccatccacacttcctgacgcacaagctggctgaccagcggaccaggaaatctctgggccgaggggaattccgccttctgcactatgcgggggaggtgacctacagcgtgaccgggtttctggacaaaaacaatgaccttctcttccggaaccttaaggagaccatgtgtagctcaaagaatcccattatgagccagtgctttgaccggagcgagctcagtgacaagaagcggccagagacggtcgccacccagttcaagatgagcctcctgcagctggtggagatcctgcagtctaaggagcccgcctacgtccgctgcatcaaacccaatgatgccaaacagcccggccgctttgacgaggtgctgatccgccaccaggtgaagtacctggggctgttggaaaacctgcgcgtgcgcagagccggctttgcctatcgccgcaaatacgaagctttcctgcaaaggtacaagtcactgtgcccagagacgtggcccacgtgggcaggacggccgcaggatggggtggctgtgctggtccgacacctgggctacaagccagaagagtacaagatgggcaggaccaagatcttcatccgcttccccaagaccctgtttgccacagaggatgccctggaggtccggcggcagagcctggccacaaagatccaagctgcctggaggggctttcactggcggcagaaattcctccgggtgaagagatcagccatctgcatccagtcgtggtggcgtggaacactgggccggaggaaggcagccaagaggaagtgggcggcacagaccatccggcggctcatccgaggcttcgtcctgcgccacgccccccgctgccccgagaacgccttcttcctggaccatgtgcgcacctcttttttgctaaacctgaggcggcagctgccccagaatgtcctggacacctcgtggcccacgcccccacctgccctgcgtgaggcctcagagcttctgcgggagttgtgcataaagaacatggtgtggaaatactgccggagtatcagccctgagtggaagcagcagctgcagcagaaggccgtggctagtgagatcttcaagggcaagaaggataattaccctcagagtgtacccaggctcttcatcagcactcggcttggtacagatgagatcagcccccgagtgctgcaggccttgggctctgagcccattcagtatgcggtgcctgttgtgaaatacgaccgcaagggctacaagcctcgctcccggcagctgctgctcacgcccaacgccgtcgtcatcgtggaggacgccaaagtcaagcagaggattgattacgccaacctgaccggaatctctgtcagcagcctgagcgacagtctttttgtgcttcatgtacagcgtgcggacaataagcaaaagggagatgtggtgctgcagagtgaccacgtgattgagacgctgaccaagacagccctcagtgccaaccgcgtgaacagcatcaacatcaaccagggcagcatcacgtttgcagggggccccggcagggatggcaccattgacttcacacccggctcggagctgctcatcaccaaggccaagaacgggcacctggctgtggtcgccccacggctgaattctcggtgataaaggcgcccactggaccctcccaacgcccaatgctttgcttttctcctcctccccttcccagttaccaaagactcgaacttccagacagggacccagggacaccccgaagcccacctgcaatctcccacctcctgcccatccctctcttgagggagcagcaggggccaggagctaccccaggagtgggccaggccgggccacagcaataggaaagccagggccagagcgagccatgccagccctactgccgatgccaaatatttgagagaagggaacttttgctgaggttttctctgaggtttttttgatgctttataggaaactattttttaaaaaaagccatttcccacccaaggacacagtggatgtgttttccctgactccagcagggcaaggaatgtagccgagaggttgtgtgggctgggctctggtgccctcttccctggccaggacacctctcctcctgattcccttggcaccttgtctttctgtctgtttacctgtctccctgcctgcccatctgcatcttttgcagcccactctgacttccatctgggggctgagaccacccttgcctgcccccttctttctgccttaagaatgtccttttaggctgggcatggtggctcacgcctgtaaccccagcactttgggaggcggagacgggcagataacctgaggtcaggatttcgagaccaacctgacctacatggagaaactccgcctctagtaaaaatacaaaattagccgggcatggtggtgcacgcctctaatcccagctactcgggaggctgaggcaggagaatcacttgaacccgggaagtggaggttgcagtgagccaagagtacaccactgcactccagcctgggcaacagagcgagactccgtcttaaaaaaaaaaaaaaagaacgcccttttactgtcctcatcatcccagtttgaggcagtgctggagtggggaaggccgtcttagaccatagaggttggaagacgctgagagatcatccagcccagccccttgatgttacagagcagaagacagatgcccaaacaggagaaggcacttgcccacggtcatacggcaggttgccacaaaaccaagatggcagcccttcctcagcgtgcctcactgccactcccagagccagggagccccataaaacccacatcatgtcttaagagtatatctggctccttgaccagcaatcggccctgggagccaccaggtgggaaaagcgcctctgccagagtccaggccttgggatgacagacagcttgcccgcacactcgggccccactcaaggatgtagggccttttctggcccctgacccctccctggcatgggagcgtggggacggggctggccttgggaggagcggcaggggcatcacctccttctgctgcttctccctgctcctaccctcaagggcctgggggctgcccagctgcctctatgcccttctgggggtctcagcccactgctgacacttctgcaatccagagaaacactaaataaagcaatacgtgtttgcc

SEQ ID NO: 19141 - DNA, 4719 bp, Homo sapiens
  source 1..4719: mol_type = unassigned DNA
acccggagcgcgggcagcggagcgggcgccaggccggccgggcaggatgcgctaccgggcgtcggccctgggcagtgacggggttcgggtgaccatggagagtgcgctcaccgcccgtgaccgggtgggggtgcaggatttcgtgctgctggagaacttcaccagcgaggccgccttcatcgagaacctgcggcggcgatttcgggagaatctcatctacacctacattggccccgtcctggtctctgtcaatccctaccgggacctgcagatctacagccggcagcatatggagcgttaccgtggcgtcagcttctatgaagtgccccctcacctgtttgccgtggcggacactgtgtaccgagcactgcgcacggagcgtcgggaccaggctgtgatgatctctggggagagcggggcaggcaagaccgaggccaccaagaggctgctgcagttctatgcagagacctgcccagcccccgagcgcggaggtgccgtgcgggaccggctgctacagagcaacccggtgctggaggcctttggaaatgccaagaccctccggaacgataactccagcaggttcgggaagtacatggatgtgcagtttgacttcaagggtgcccccgtgggtggccacatcctcagttacctcctggaaaagtcacgagtggtgcaccagaatcatggggagcggaacttccacatcttctaccagctgctggaggggggtgaggaggagactcttcgcaggctgggcttggaacggaacccccagagctacctgtacctggtgaagggccagtgtgccaaagtctcctccatcaacgacaagagtgactggaaggtcgtcaggaaggctctgacagtcattgatttcaccgaggatgaagtggaggacctgctgagcatcgtggccagcgtccttcatttgggcaacatccactttgctgccaacgaggagagcaatgcccaggtcaccaccgagaaccagctcaagtatctgaccaggctcctcagcgtggaaggctcgacgctgcgagaagccctgacacacaggaagatcatcgccaagggggaggagctcctgagcccgctgaacctggagcaggccgcgtacgcacgagacgccctcgccaaggctgtgtacagccgcacttttacctggctcgtcgggaagatcaacaggtcgctggcctccaaggacgtggagagccccagctggcggagcaccacggttctcgggctcctggatatttatggctttgaagtgtttcagcataacagctttgagcagttctgcatcaattactgcaacgagaagctgcagcagctcttcatcgagctcacgctcaagtcggagcaggaggagtacgaggcagagggcatcgcgtgggagcccgtccagtatttcaacaacaaaatcatctgtgatctggtggaggagaagtttaagggcatcatctcgattttggatgaggagtgtctgcgccccggggaggccacagacctgaccttcctggagaagctggaggatactgtcaagcaccatccacacttcctgacgcacaagctggctgaccagcggaccaggaaatctctgggccgaggggaattccgccttctgcactatgcgggggaggtgacctacagcgtgaccgggtttctggacaaaaacaatgaccttctcttccggaaccttaaggagaccatgtgtagctcaaagaatcccattatgagccagtgctttgaccggagcgagctcagtgacaagaagcggccagagacggtcgccacccagttcaagatgagcctcctgcagctggtggagatcctgcagtctaaggagcccgcctacgtccgctgcatcaaacccaatgatgccaaacagcccggccgctttgacgaggtgctgatccgccaccaggtgaagtacctggggctgttggaaaacctgcgcgtgcgcagagccggctttgcctatcgccgcaaatacgaagctttcctgcaaaggtacaagtcactgtgcccagagacgtggcccacgtgggcaggacggccgcaggatggggtggctgtgctggtccgacacctgggctacaagccagaagagtacaagatgggcaggaccaagatcttcatccgcttccccaagaccctgtttgccacagaggatgccctggaggtccggcggcagagcctggccacaaagatccaagctgcctggaggggctttcactggcggcagaaattcctccgggtgaagagatcagccatctgcatccagtcgtggtggcgtggaacactgggccggaggaaggcagccaagaggaagtgggcggcacagaccatccggcggctcatccgaggcttcgtcctgcgccacgccccccgctgccccgagaacgccttcttcctggaccatgtgcgcacctcttttttgctaaacctgaggcggcagctgccccagaatgtcctggacacctcgtggcccacgcccccacctgccctgcgtgaggcctcagagcttctgcgggagttgtgcataaagaacatggtgtggaaatactgccggagtatcagccctgagtggaagcagcagctgcagcagaaggccgtggctagtgagatcttcaagggcaagaaggataattaccctcagagtgtacccaggctcttcatcagcactcggcttggtacagatgagatcagcccccgagtgctgcaggccttgggctctgagcccattcagtatgcggtgcctgttgtgaaatacgaccgcaagggctacaagcctcgctcccggcagctgctgctcacgcccaacgccgtcgtcatcgtggaggacgccaaagtcaagcagaggattgattacgccaacctgaccggaatctctgtcagcagcctgagcgacagtctttttgtgcttcatgtacagcgtgcggacaataagcaaaagggagatgtggtgctgcagagtgaccacgtgattgagacgctgaccaagacagccctcagtgccaaccgcgtgaacagcatcaacatcaaccagggcagcatcacgtttgcagggggccccggcagggatggcaccattgacttcacacccggctcggagctgctcatcaccaaggccaagaacgggcacctggctgtggtcgccccacggctgaattctcggtgataaaggcgcccactggaccctcccaacgcccaatgctttgcttttctcctcctccccttcccagttaccaaagactcgaacttccagacagggacccagggacaccccgaagcccacctgcaatctcccacctcctgcccatccctctcttgagggagcagcaggggccaggagctaccccaggagtgggccaggccgggccacagcaataggaaagccagggccagagcgagccatgccagccctactgccgatgccaaatatttgagagaagggaacttttgctgaggttttctctgaggtttttttgatgctttataggaaactattttttaaaaaaagccatttcccacccaaggacacagtggatgtgttttccctgactccagcagggcaaggaatgtagccgagaggttgtgtgggctgggctctggtgccctcttccctggccaggacacctctcctcctgattcccttggcaccttgtctttctgtctgtttacctgtctccctgcctgcccatctgcatcttttgcagcccactctgacttccatctgggggctgagaccacccttgcctgcccccttctttctgccttaagaatgtccttttaggctgggcatggtggctcacgcctgtaaccccagcactttgggaggcggagacgggcagataacctgaggtcaggatttcgagaccaacctgacctacatggagaaactccgcctctagtaaaaatacaaaattagccgggcatggtggtgcacgcctctaatcccagctactcgggaggctgaggcaggagaatcacttgaacccgggaagtggaggttgcagtgagccaagagtacaccactgcactccagcctgggcaacagagcgagactccgtcttaaaaaaaaaaaaaaagaacgcccttttactgtcctcatcatcccagtttgaggcagtgctggagtggggaaggccgtcttagaccatagaggttggaagacgctgagagatcatccagcccagccccttgatgttacagagcagaagacagatgcccaaacaggagaaggcacttgcccacggtcatacggcaggttgccacaaaaccaagatggcagcccttcctcagcgtgcctcactgccactcccagagccagggagccccataaaacccacatcatgtcttaagagtatatctggctccttgaccagcaatcggccctgggagccaccaggtgggaaaagcgcctctgccagagtccaggccttgggatgacagacagcttgcccgcacactcgggccccactcaaggatgtagggccttttctggcccctgacccctccctggcatgggagcgtggggacggggctggccttgggaggagcggcaggggcatcacctccttctgctgcttctccctgctcctaccctcaagggcctgggggctgcccagctgcctctatgcccttctgggggtctcagcccactgctgacacttctgcaatccagagaaacactaaataaagcaatacgtgtttgcc

SEQ ID NO: 19142 - DNA, 3013 bp, Homo sapiens
  source 1..3013: mol_type = unassigned DNA
aactttcccgggactcgagttcgggggttgggggaggaaaatcccgcttcctctgggacccgcaggcctcggtgcccgcccagcgcccaggcccgccgcggagtgtagtcccaggcccggaagccctgggcagtgacggggttcgggtgaccatggagagtgcgctcaccgcccgtgaccgggtgggggtgcaggatttcgtgctgctggagaacttcaccagcgaggccgccttcatcgagaacctgcggcggcgatttcgggagaatctcatctacacctacattggccccgtcctggtctctgtcaatccctaccgggacctgcagatctacagccggcagcatatggagcgttaccgtggcgtcagcttctatgaagtgccccctcacctgtttgccgtggcggacactgtgtaccgagcactgcgcacggagcgtcgggaccaggctgtgatgatctctggggagagcggggcaggcaagaccgaggccaccaagaggctgctgcagttctatgcagagacctgcccagcccccgagcgcggaggtgccgtgcgggaccggctgctacagagcaacccggtgctggaggcctttggaaatgccaagaccctccggaacgataactccagcaggttcgggaagtacatggatgtgcagtttgacttcaagggtgcccccgtgggtggccacatcctcagttacctcctggaaaagtcacgagtggtgcaccagaatcatggggagcggaacttccacatcttctaccagctgctggaggggggtgaggaggagactcttcgcaggctgggcttggaacggaacccccagagctacctgtacctggtgaagggccagtgtgccaaagtctcctccatcaacgacaagagtgactggaaggtcgtcaggaaggctctgacagtcattgatttcaccgaggatgaagtggaggacctgctgagcatcgtggccagcgtccttcatttgggcaacatccactttgctgccaacgaggagagcaatgcccaggtcaccaccgagaaccagctcaagtatctgaccaggctcctcagcgtggaaggctcgacgctgcgagaagccctgacacacaggaagatcatcgccaagggggaggagctcctgagcccgctgaacctggagcaggccgcgtacgcacgagacgccctcgccaaggctgtgtacagccgcacttttacctggctcgtcgggaagatcaacaggtcgctggcctccaaggacgtggagagccccagctggcggagcaccacggttctcgggctcctggatatttatggctttgaagtgtttcagcataacagctttgagcagttctgcatcaattactgcaacgagaagctgcagcagctcttcatcgagctcacgctcaagtcggagcaggaggagtacgaggcagagggcatcgcgtgggagcccgtccagtatttcaacaacaaaatcatctgtgatctggtggaggagaagtttaagggcatcatctcgattttggatgaggagtgtctgcgccccggggaggccacagacctgaccttcctggagaagctggaggatactgtcaagcaccatccacacttcctgacgcacaagctggctgaccagcggaccaggaaatctctgggccgaggggaattccgccttctgcactatgcgggggaggtgacctacagcgtgaccgggtttctggacaaaaacaatgaccttctcttccggaaccttaaggagaccatgtgtagctcaaagaatcccattatgagccagtgctttgaccggagcgagctcagtgacaagaagcggccagagacggtcgccacccagttcaagatgagcctcctgcagctggtggagatcctgcagtctaaggagcccgcctacgtccgctgcatcaaacccaatgatgccaaacagcccggccgctttgacgaggtgctgatccgccaccaggtgaagtacctggggctgttggaaaacctgcgcgtgcgcagagccggctttgcctatcgccgcaaatacgaagctttcctgcaaaggtacaagtcactgtgcccagagacgtggcccacgtgggcaggacggccgcaggatggggtggctgtgctggtccgacacctgggctacaagccagaagagtacaagatgggcaggaccaagatcttcatccgcttccccaagaccctgtttgccacagaggatgccctggaggtccggcggcagagcctggccacaaagatccaagctgcctggaggggctttcactggcggcagaaattcctccgggtgaagagatcagccatctgcatccagtcgtggtggcgtggaacactgggccggaggaaggcagccaaggaagtgggcggcacagaccatccggcggctcatccgaggcttcgtcctgcgccacgccccccgctgccccgagaacgccttcttcctggaccatgtgcgcacctcttttttgctaaacctgaggcggcagctgccccagaatgtcctggacacctcgtggcccacgcccccacctgccctgcgtgaggcctcagagcttctgcgggagttgtgcataaagaacatggtgtggaaatactgccggagtatcagccctgagtggaagcagcagctgcagcagaaggccgtggctagtgagatcttcaagggcaagaaggataattaccctcagagtgtacccaggctcttcatcagcactcggcttggtacagatgagatcagcccccgagtgctgcaggccttgggctctgagcccattcagtatgcggtgcctgttgtgaaatacgaccgcaagggctacaagcctcgctcccggcagctgctgctcacgcccaacgccgtcgtcatcgtggaggacgccaaagtcaagcagaggattgattacgccaacctgaccggaatctctgtcagcagcctgagcgacagtctttttgtgcttcatgtacagcgtgcggacaataagcaaaagg

SEQ ID NO: 19143 - DNA, 4673 bp, Homo sapiens
  source 1..4673: mol_type = unassigned DNA
atgcgagggagggcctccgccctgggcagtgacggggttcgggtgaccatggagagtgcgctcaccgcccgtgaccgggtgggggtgcaggatttcgtgctgctggagaacttcaccagcgaggccgccttcatcgagaacctgcggcggcgatttcgggagaatctcatctacacctacattggccccgtcctggtctctgtcaatccctaccgggacctgcagatctacagccggcagcatatggagcgttaccgtggcgtcagcttctatgaagtgccccctcacctgtttgccgtggcggacactgtgtaccgagcactgcgcacggagcgtcgggaccaggctgtgatgatctctggggagagcggggcaggcaagaccgaggccaccaagaggctgctgcagttctatgcagagacctgcccagcccccgagcgcggaggtgccgtgcgggaccggctgctacagagcaacccggtgctggaggcctttggaaatgccaagaccctccggaacgataactccagcaggttcgggaagtacatggatgtgcagtttgacttcaagggtgcccccgtgggtggccacatcctcagttacctcctggaaaagtcacgagtggtgcaccagaatcatggggagcggaacttccacatcttctaccagctgctggaggggggtgaggaggagactcttcgcaggctgggcttggaacggaacccccagagctacctgtacctggtgaagggccagtgtgccaaagtctcctccatcaacgacaagagtgactggaaggtcgtcaggaaggctctgacagtcattgatttcaccgaggatgaagtggaggacctgctgagcatcgtggccagcgtccttcatttgggcaacatccactttgctgccaacgaggagagcaatgcccaggtcaccaccgagaaccagctcaagtatctgaccaggctcctcagcgtggaaggctcgacgctgcgagaagccctgacacacaggaagatcatcgccaagggggaggagctcctgagcccgctgaacctggagcaggccgcgtacgcacgagacgccctcgccaaggctgtgtacagccgcacttttacctggctcgtcgggaagatcaacaggtcgctggcctccaaggacgtggagagccccagctggcggagcaccacggttctcgggctcctggatatttatggctttgaagtgtttcagcataacagctttgagcagttctgcatcaattactgcaacgagaagctgcagcagctcttcatcgagctcacgctcaagtcggagcaggaggagtacgaggcagagggcatcgcgtgggagcccgtccagtatttcaacaacaaaatcatctgtgatctggtggaggagaagtttaagggcatcatctcgattttggatgaggagtgtctgcgccccggggaggccacagacctgaccttcctggagaagctggaggatactgtcaagcaccatccacacttcctgacgcacaagctggctgaccagcggaccaggaaatctctgggccgaggggaattccgccttctgcactatgcgggggaggtgacctacagcgtgaccgggtttctggacaaaaacaatgaccttctcttccggaaccttaaggagaccatgtgtagctcaaagaatcccattatgagccagtgctttgaccggagcgagctcagtgacaagaagcggccagagacggtcgccacccagttcaagatgagcctcctgcagctggtggagatcctgcagtctaaggagcccgcctacgtccgctgcatcaaacccaatgatgccaaacagcccggccgctttgacgaggtgctgatccgccaccaggtgaagtacctggggctgttggaaaacctgcgcgtgcgcagagccggctttgcctatcgccgcaaatacgaagctttcctgcaaaggtacaagtcactgtgcccagagacgtggcccacgtgggcaggacggccgcaggatggggtggctgtgctggtccgacacctgggctacaagccagaagagtacaagatgggcaggaccaagatcttcatccgcttccccaagaccctgtttgccacagaggatgccctggaggtccggcggcagagcctggccacaaagatccaagctgcctggaggggctttcactggcggcagaaattcctccgggtgaagagatcagccatctgcatccagtcgtggtggcgtggaacactgggccggaggaaggcagccaagaggaagtgggcggcacagaccatccggcggctcatccgaggcttcgtcctgcgccacgccccccgctgccccgagaacgccttcttcctggaccatgtgcgcacctcttttttgctaaacctgaggcggcagctgccccagaatgtcctggacacctcgtggcccacgcccccacctgccctgcgtgaggcctcagagcttctgcgggagttgtgcataaagaacatggtgtggaaatactgccggagtatcagccctgagtggaagcagcagctgcagcagaaggccgtggctagtgagatcttcaagggcaagaaggataattaccctcagagtgtacccaggctcttcatcagcactcggcttggtacagatgagatcagcccccgagtgctgcaggccttgggctctgagcccattcagtatgcggtgcctgttgtgaaatacgaccgcaagggctacaagcctcgctcccggcagctgctgctcacgcccaacgccgtcgtcatcgtggaggacgccaaagtcaagcagaggattgattacgccaacctgaccggaatctctgtcagcagcctgagcgacagtctttttgtgcttcatgtacagcgtgcggacaataagcaaaagggagatgtggtgctgcagagtgaccacgtgattgagacgctgaccaagacagccctcagtgccaaccgcgtgaacagcatcaacatcaaccagggcagcatcacgtttgcagggggccccggcagggatggcaccattgacttcacacccggctcggagctgctcatcaccaaggccaagaacgggcacctggctgtggtcgccccacggctgaattctcggtgataaaggcgcccactggaccctcccaacgcccaatgctttgcttttctcctcctccccttcccagttaccaaagactcgaacttccagacagggacccagggacaccccgaagcccacctgcaatctcccacctcctgcccatccctctcttgagggagcagcaggggccaggagctaccccaggagtgggccaggccgggccacagcaataggaaagccagggccagagcgagccatgccagccctactgccgatgccaaatatttgagagaagggaacttttgctgaggttttctctgaggtttttttgatgctttataggaaactattttttaaaaaaagccatttcccacccaaggacacagtggatgtgttttccctgactccagcagggcaaggaatgtagccgagaggttgtgtgggctgggctctggtgccctcttccctggccaggacacctctcctcctgattcccttggcaccttgtctttctgtctgtttacctgtctccctgcctgcccatctgcatcttttgcagcccactctgacttccatctgggggctgagaccacccttgcctgcccccttctttctgccttaagaatgtccttttaggctgggcatggtggctcacgcctgtaaccccagcactttgggaggcggagacgggcagataacctgaggtcaggatttcgagaccaacctgacctacatggagaaactccgcctctagtaaaaatacaaaattagccgggcatggtggtgcacgcctctaatcccagctactcgggaggctgaggcaggagaatcacttgaacccgggaagtggaggttgcagtgagccaagagtacaccactgcactccagcctgggcaacagagcgagactccgtcttaaaaaaaaaaaaaaagaacgcccttttactgtcctcatcatcccagtttgaggcagtgctggagtggggaaggccgtcttagaccatagaggttggaagacgctgagagatcatccagcccagccccttgatgttacagagcagaagacagatgcccaaacaggagaaggcacttgcccacggtcatacggcaggttgccacaaaaccaagatggcagcccttcctcagcgtgcctcactgccactcccagagccagggagccccataaaacccacatcatgtcttaagagtatatctggctccttgaccagcaatcggccctgggagccaccaggtgggaaaagcgcctctgccagagtccaggccttgggatgacagacagcttgcccgcacactcgggccccactcaaggatgtagggccttttctggcccctgacccctccctggcatgggagcgtggggacggggctggccttgggaggagcggcaggggcatcacctccttctgctgcttctccctgctcctaccctcaagggcctgggggctgcccagctgcctctatgcccttctgggggtctcagcccactgctgacacttctgcaatccagagaaacactaaataaagcaatacgtgtttgcc

SEQ ID NO: 19144 - DNA, 3664 bp, Homo sapiens
  source 1..3664: mol_type = unassigned DNA
aaatctgggcctttcgtggtcagaggacaccggcggcccctttgggatccacccccaatcaccaccaccttgttcttctctgaccctggatactctgggtgtccattttttggagccctgagaccctgtttgaagagggatccatctcagccctggttgtggggcgagggtcttgctcagcctgcaccaccctccaccctccagtaggacccagaggcagctgggctttccatggccctgggcagtgacggggttcgggtgaccatggagagtgcgctcaccgcccgtgaccgggtgggggtgcaggatttcgtgctgctggagaacttcaccagcgaggccgccttcatcgagaacctgcggcggcgatttcgggagaatctcatctacacctacattggccccgtcctggtctctgtcaatccctaccgggacctgcagatctacagccggcagcatatggagcgttaccgtggcgtcagcttctatgaagtgccccctcacctgtttgccgtggcggacactgtgtaccgagcactgcgcacggagcgtcgggaccaggctgtgatgatctctggggagagcggggcaggcaagaccgaggccaccaagaggctgctgcagttctatgcagagacctgcccagcccccgagcgcggaggtgccgtgcgggaccggctgctacagagcaacccggtgctggaggcctttggaaatgccaagaccctccggaacgataactccagcaggttcgggaagtacatggatgtgcagtttgacttcaagggtgcccccgtgggtggccacatcctcagttacctcctggaaaagtcacgagtggtgcaccagaatcatggggagcggaacttccacatcttctaccagctgctggaggggggtgaggaggagactcttcgcaggctgggcttggaacggaacccccagagctacctgtacctggtgaagggccagtgtgccaaagtctcctccatcaacgacaagagtgactggaaggtcgtcaggaaggctctgacagtcattgatttcaccgaggatgaagtggaggacctgctgagcatcgtggccagcgtccttcatttgggcaacatccactttgctgccaacgaggagagcaatgcccaggtcaccaccgagaaccagctcaagtatctgaccaggctcctcagcgtggaaggctcgacgctgcgagaagccctgacacacaggaagatcatcgccaagggggaggagctcctgagcccgctgaacctggagcaggccgcgtacgcacgagacgccctcgccaaggctgtgtacagccgcacttttacctggctcgtcgggaagatcaacaggtcgctggcctccaaggacgtggagagccccagctggcggagcaccacggttctcgggctcctggatatttatggctttgaagtgtttcagcataacagctttgagcagttctgcatcaattactgcaacgagaagctgcagcagctcttcatcgagctcacgctcaagtcggagcaggaggagtacgaggcagagggcatcgcgtgggagcccgtccagtatttcaacaacaaaatcatctgtgatctggtggaggagaagtttaagggcatcatctcgattttggatgaggagtgtctgcgccccggggaggccacagacctgaccttcctggagaagctggaggatactgtcaagcaccatccacacttcctgacgcacaagctggctgaccagcggaccaggaaatctctgggccgaggggaattccgccttctgcactatgcgggggaggtgacctacagcgtgaccgggtttctggacaaaaacaatgaccttctcttccggaaccttaaggagaccatgtgtagctcaaagaatcccattatgagccagtgctttgaccggagcgagctcagtgacaagaagcggccagagacggtcgccacccagttcaagatgagcctcctgcagctggtggagatcctgcagtctaaggagcccgcctacgtccgctgcatcaaacccaatgatgccaaacagcccggccgctttgacgaggtgctgatccgccaccaggtgaagtacctggggctgttggaaaacctgcgcgtgcgcagagccggctttgcctatcgccgcaaatacgaagctttcctgcaaaggtacaagtcactgtgcccagagacgtggcccacgtgggcaggacggccgcaggatggggtggctgtgctggtccgacacctgggctacaagccagaagagtacaagatgggcaggaccaagatcttcatccgcttccccaagaccctgtttgccacagaggatgccctggaggtccggcggcagagcctggccacaaagatccaagctgcctggaggggctttcactggcggcagaaattcctccgggtgaagagatcagccatctgcatccagtcgtggtggcgtggaacactgggccggaggaaggcagccaagaggaagtgggcggcacagaccatccggcggctcatccgaggcttcgtcctgcgccacgccccccgctgccccgagaacgccttcttcctggaccatgtgcgcacctcttttttgctaaacctgaggcggcagctgccccagaatgtcctggacacctcgtggcccacgcccccacctgccctgcgtgaggcctcagagcttctgcgggagttgtgcataaagaacatggtgtggaaatactgccggagtatcagccctgagtggaagcagcagctgcagcagaaggccgtggctagtgagatcttcaagggcaagaaggataattaccctcagagtgtacccaggctcttcatcagcactcggcttggtacagatgagatcagcccccgagtgctgcaggccttgggctctgagcccattcagtatgcggtgcctgttgtgaaatacgaccgcaagggctacaagcctcgctcccggcagctgctgctcacgcccaacgccgtcgtcatcgtggaggacgccaaagtcaagcagaggattgattacgccaacctgaccggaatctctgtcagcagcctgagcgacagtctttttgtgcttcatgtacagcgtgcggacaataagcaaaagggagatgtggtgctgcagagtgaccacgtgattgagacgctgaccaagacagccctcagtgccaaccgcgtgaacagcatcaacatcaaccagggcagcatcacgtttgcagggggccccggcagggatggcaccattgacttcacacccggctcggagctgctcatcaccaaggccaagaacgggcacctggctgtggtcgccccacggctgaattctcggtgataaaggcgcccactggaccctcccaacgcccaatgctttgcttttctcctcctccccttcccagttaccaaagactcgaacttccagacagggacccagggacaccccgaagcccacctgcaatctcccacctcctgcccatccctctcttgagggagcagcaggggccaggagctaccccaggagtgggccaggccgggccacagcaataggaaagccagggccagagcgagccatgccagccctactgccgatgccaaatatttgagagaagggaacttttgctgaggttttctctgaggtttttttgatg

SEQ ID NO: 19145 - DNA, 5182 bp, Homo sapiens
  source 1..5182: mol_type = unassigned DNA
cgcgctggcgccatggcggagcaggagagcctggaattcggcaaggcagacttcgtgctgatggacaccgtctccatgcccgagttcatggccaacctcaggctcagatttgaaaaagggcgcatctatacgttcattggagaagtcgtcgtttctgtgaacccttacaagttgttgaacatctatggaagagacacaattgagcagtataaaggccgtgagctgtatgagagaccgcctcacctttttgctattgcggatgctgcttacaaggctatgaagaggcgatcaaaagacacttgtattgtgatatcaggggaaagtggagctggtaaaacggaagccagtaagtacattatgcagtatattgcggccatcaccaaccccagtcagagagcagaggttgaaagagtgaagaatatgttgcttaagtccaactgtgttttggaagcttttggaaatgccaaaaccaaccgtaatgacaactcaagcaggtttggaaaatacatggatatcaactttgacttcaagggtgaccctattggtgggcatatcaataactacttactagaaaagtctcgagtgattgtgcaacagccaggagaaagaagctttcattctttctatcagctactccaaggaggttcagaacaaatgctacgctctctacatctccagaaatccctttcatcctacaactatattcatgtgggagctcaattaaagtcttctatcaatgatgctgccgaattcagagttgttgctgatgccatgaaagtcattggcttcaaacctgaggagatccaaacagtgtataagattttggctgctattctgcacttgggaaatttaaaatttgtagtagatggtgacacgcctcttattgagaatggcaaagtagtatctatcatagcagaattgctctctactaagacagatatggttgagaaagcccttctttaccggactgtggccacaggccgtgacatcattgacaagcagcacacagaacaagaggccagctacggcagagacgcctttgccaaggcaatatatgagcgccttttttgttggatcgttactcgcatcaatgatattattgaggtcaagaactatgacaccacaatccatgggaaaaacactgttattggtgtcttggatatctatggctttgaaatctttgacaacaacagttttgaacaattctgtatcaattactgcaatgagaaactgcagcagctatttattcagctggttctgaagcaagaacaagaggaataccagcgggaagggatcccctggaaacatattgactacttcaacaatcagatcattgttgacctcgtggagcaacagcacaaagggatcattgcaatccttgatgatgcttgcatgaatgtcggcaaagtcaccgatgaaatgtttcttgaagcacttaacagtaaattgggcaaacacgcccatttttccagccgaaagctctgtgcctcagacaaaattctggagtttgatcgagattttcgaattcgacattatgcaggcgatgtagtctattctgtcattggttttattgacaaaaataaagatactttatttcaagatttcaagcgccttatgtataacagttcaaatcctgtgctcaagaatatgtggcctgaaggcaaactgagcattacagaggtgaccaagcgacctctgactgctgctaccttgtttaagaattctatgattgctctagtagacaaccttgcatcaaaggaaccatattacgttcgttgcatcaaacccaatgacaagaaatctccacagatatttgatgatgaacgctgccggcaccaagtagaatatcttggactactggaaaatgtgagagtgcgtcgggcaggatttgccttccgccagacatacgagaagtttcttcacaggtataagatgatctctgaattcacctggcccaaccatgaccttccttcagacaaagaggctgtcaagaaactaattgaacggtgtggttttcaggatgatgtagcttatgggaagaccaaaattttcattcgaacaccccgaacattgtttaccttggaagaactccgtgcccagatgctcataaggattgtcctctttctacaaaaggtgtggcggggcaccctggcccgcatgcggtacaaaagaaccaaggcagctctgacaataatcaggtactaccggcgctacaaagtgaagtcgtacatccacgaggtggccagacgcttccatggcgtcaagaccatgcgagactacgggaagcacgtgaagtggccaagccctcctaaagttcttcgccgttttgaggaggccctgcagacgattttcaatagatggagagcatcccagctcatcaagagcattccggcctcagacctgccccaggtcagggcaaaggttgcagccgtggaaatgttgaagggtcaaagggctgacctcgggctccagagggcctgggagggcaactatcttgcttcaaagccagatacacctcagacctcaggcacttttgtccctgttgctaatgaattgaaacggaaggacaaatacatgaatgtcctcttttcctgtcacgtccgtaaggtaaatcgatttagtaaggtggaagacagagcaatttttgtcactgaccgtcacctgtataaaatggatcccactaaacagtacaaggtgatgaagactatccctctatacaatttgactggtctgagtgtctccaatggaaaggaccaacttgtagtgttccatacgaaagacaacaaagacctcattgtctgcctcttcagcaaacagccaacccatgagagtcgaattggagaacttgttggagtgctggtgaatcatttcaagagtgagaagcgccaccttcaagtgaacgtcaccaacccagtacagtgcagcctgcacgggaagaagtgcaccgtctccgtggagacgcggctcaaccagccccagcccgacttcaccaagaatcgctcgggcttcatcctcagcgtgcccgggaactgacgccccgcggaggcctggcccggagcccggccacactccgagtcctgggtcccagtccagctgctgcctcccaacccatgcccgctagaaacctgctgcgagggcccctcccagaggagccccgcccctgtaagatttccttcctggttttctgcctttggtatcatcttcctctgtccttactgtccacggtccctgttcaataagccaaagaccctggtgccccgcccagacccctgggctgacgtccagaccaatctcaccccagaggcaactggatggtgcctttagttggtgcggatgccccgtggccaggtcaagtcagagcacctggacaggtgtcctccctgctgctgaccctgcagagggaaggggtggggatgcaggaccccactctgcgggagccccatagccacctctcttgcccaaggtgagccagccctggggacccagctcagggaggctctgctcagagttcggcggacccaccccaacccaactcccagccgccagccaaagccactgggtgagcagagtcacccacagggccagcccctcagccaggagccagtggcaggagcggaacagcccatccagcagagtgagtccatccttcccaggttctcccctgggagactccctttgccaccaaggcccccaccagggcctctgaccaccgctctggagaggacagtgtggcatgctccaaggatcatcttacttaactcgcagcctgtggctgtggtcctcttatagatactttcaccgtttgcagggttgctaatcagatacctgctgtcaccacacttgggtcaggaaccctaatgagaacggggagctgccagggtgagggcagccctcagggtcggccgctttccctctggaccacctcccgctgcgtttcctactcagagaaacagcaagggcggggtcaagacacgggatgacgggaagcaggaagcggggcagcagcacagcgtggggtcctggcactgcaggccaggccaggatgcccaccccgccctctacacggccccttggggcctgcgcccgtgaaactggtgccagggagcactgccagcttgccagtttctgcccagcaaaagcacgtatgcttcaggggccttctgagaccaccttccccactgagccccagctgctgagaaggccttgagggaagtagaggctgggagcaaatgccccatgcggtgagaggatgaggggagcctacgcctcaggcatgtggtgagaggatgagggggagggagccaacgcctcaggtggagtgggcagaggtgcaagagagggatgtactgaagcttcttcccgtcctgccacagacacttctcctgccttcccaccctgacccggcagaacccaccaagtgcctgtgtgcagcctcctgtgcctcacccagggcctgaccccagagtggtcccaacaacccggtctcatgcccactccccatccctgcttcccaaaaattgcactgtgtgcagtttgcaacaaagaatcccgctggcatcctgtccttgggaaccctttctcattctccaagcctggtcagctgcctgcacaggcagaggtgccctcagcccagattagcaacactcatagttttgccaattaccagtagacactagtggaaccatctaactggaacttcctctctccttccacttatttcctcaaacttgttgctttacactagacacatgcaaatgtatgttttaaacacaccaaaacagatcatgccaaatgagttgcctgtcaaaggctggagggcaggaggagggcctgggtttgggttctttcctcccagcctttggatggtgccttgggccccttagccccagcgccagggcctcccagctgaggccacaggacaagcacttttttatgatgtactaaaagccacagtatgtggcaactgcaaaaggatcaggaatttagggtatgatctcggtcacgtgtcccgggcgctgaggggaaaggaagcgggcatgattgtagacaatgagggggttctcttgatgtaatgaaatgcaattttatggtttggtgcaaaaactcctattttccagtaaattaactttatttctaaagcatattttgatttgccatcaagagcaataaagcattaaatctt

SEQ ID NO: 19146 - DNA, 3481 bp, Homo sapiens
  source 1..3481: mol_type = unassigned DNA
gaagaggcgatcaaaagacacttgtattgtgatatcaggggaaagtggagctggtaaaacggaagccagtaagtacattatgcagtatattgcggccatcaccaaccccagtcagagagcagaggttgaaagagtgaagaatatgttgcttaagtccaactgtgttttggaagcttttggaaatgccaaaaccaaccgtaatgacaactcaagcaggtttggaaaatacatggatatcaactttgacttcaagggtgaccctattggtgggcatatcaataactacttactagaaaagtctcgagtgattgtgcaacagccaggagaaagaagctttcattctttctatcagctactccaaggaggttcagaacaaatgctacgctctctacatctccagaaatccctttcatcctacaactatattcatgtgggagctcaattaaagtcttctatcaatgatgctgccgaattcagagttgttgctgatgccatgaaagtcattggcttcaaacctgaggagatccaaacagtgtataagattttggctgctattctgcacttgggaaatttaaaatttgtagtagatggtgacacgcctcttattgagaatggcaaagtagtatctatcatagcagaattgctctctactaagacagatatggttgagaaagcccttctttaccggactgtggccacaggccgtgacatcattgacaagcagcacacagaacaagaggccagctacggcagagacgcctttgccaaggcaatatatgagcgccttttttgttggatcgttactcgcatcaatgatattattgaggtcaagaactatgacaccacaatccatgggaaaaacactgttattggtgtcttggatatctatggctttgaaatctttgacaacaacagttttgaacaattctgtatcaattactgcaatgagaaactgcagcagctatttattcagctggttctgaagcaagaacaagaggaataccagcgggaagggatcccctggaaacatattgactacttcaacaatcagatcattgttgacctcgtggagcaacagcacaaagggatcattgcaatccttgatgatgcttgcatgaatgtcggcaaagtcaccgatgaaatgtttcttgaagcacttaacagtaaattgggcaaacacgcccatttttccagccgaaagctctgtgcctcagacaaaattctggagtttgatcgagattttcgaattcgacattatgcaggcgatgtagtctattctgtcattggttttattgacaaaaataaagatactttatttcaagatttcaagcgccttatgtataacagttcaaatcctgtgctcaagaatatgtggcctgaaggcaaactgagcattacagaggtgaccaagcgacctctgactgctgctaccttgtttaagaattctatgattgctctagtagacaaccttgcatcaaaggaaccatattacgttcgttgcatcaaacccaatgacaagaaatctccacagatatttgatgatgaacgctgccggcaccaagtagaatatcttggactactggaaaatgtgagagtgcgtcgggcaggatttgccttccgccagacatacgagaagtttcttcacaggtataagatgatctctgaattcacctggcccaaccatgaccttccttcagacaaagaggctgtcaagaaactaattgaacggtgtggttttcaggatgatgtagcttatgggaagaccaaaattttcattcgaacaccccgaacattgtttaccttggaagaactccgtgcccagatgctcataaggattgtcctctttctacaaaaggtgtggcggggcaccctggcccgcatgcggtacaaaagaaccaaggcagctctgacaataatcaggtactaccggcgctacaaagtgaagtcgtacatccacgaggtggccagacgcttccatggcgtcaagaccatgcgagactacgggaagcacgtgaagtggccaagccctcctaaagttcttcgccgttttgaggaggccctgcagacgattttcaatagatggagagcatcccagctcatcaagagcattccggcctcagacctgccccaggtcagggcaaaggttgcagccgtggaaatgttgaagggtcaaagggctgacctcgggctccagagggcctgggagggcaactatcttgcttcaaagccagatacacctcagacctcaggcacttttgtccctgttgctaatgaattgaaacggaaggacaaatacatgaatgtcctcttttcctgtcacgtccgtaaggtaaatcgatttagtaaggtggaagacagagcaatttttgtcactgaccgtcacctgtataaaatggatcccactaaacagtacaaggtgatgaagactatccctctatacaatttgactggtctgagtgtctccaatggaaaggaccaacttgtagtgttccatacgaaagacaacaaagacctcattgtctgcctcttcagcaaacagccaacccatgagagtcgaattggagaacttgttggagtgctggtgaatcatttcaagagtgagaagcgccaccttcaagtgaacgtcaccaacccagtacagtgcagcctgcacgggaagaagtgcaccgtctccgtggagacgcggctcaaccagccccagcccgacttcaccaagaatcgctcgggcttcatcctcagcgtgcccgggaactgacgccccgcggaggcctggcccggagcccggccacactccgagtcctgggtcccagtccagctgctgcctcccaacccatgcccgctagaaacctgctgcgagggcccctcccagaggagccccgcccctgtggtcctcttatagatacctgcacaggcagaggtgccctcagcccagattagcaacactcatagttttgccaattaccagtagacactagtggaaccatctaactggaacttcctctctccttccacttatttcctcaaacttgttgctttacactagacacatgcaaatgtatgttttaaacacaccaaaacagatcatgccaaatgagttgcctgtcaaaggctggagggcaggaggagggcctgggtttgggttctttcctcccagcctttggatggtgccttgggccccttagccccagcgccagggcctcccagctgaggccacaggacaagcacttttttatgatgtactaaaagccacagtatgtggcaactgcaaaaggatcaggaatttagggtatgatctcggtcacgtgtcccgggcgctgaggggaaaggaagcgggcatgattgtagacaatgagggggttctcttgatgtaatgaaatgcaattttatggtttggtgcaaaaactcctattttccagtaaattaactttatttctaaagcatattttgatttgccatcaagagcaataaagcattaaatctt

SEQ ID NO: 19147 - DNA, 6193 bp, Homo sapiens
  source 1..6193: mol_type = unassigned DNA
atttatggacagattgcccggcccgagccgagactcagccagaggagtacggattaagtggccgaagaaagaggagtgaggcaggggagcgaggcggacgctccgagcgcatcggactcacctgggccggcggcgaccggcgagtacgagtggactcttgccctccgcagcatgcgccccgcctgctaagtcgccgccgtctcgccctcacctagcaccgccaatcccgcctggatggagtcccctctgggttcccattggctcctgtgagtgcttgggtgtcgggagcctgtttttggcgaggggaaccaacttttgaagttcgcccagaagactgcgttccagccccagttccccggcagcgggacccggcgaagacgcgaccgcggcgcgagtcaccatgggaagcaaaggtgtctaccagtaccactggcaaagccacaatgtcaagcacagtggtgtggacgacatggtgctactgtccaagatcacagagaactccatcgtggagaatctgaagaagagatacatggatgactacatttttacatatataggatctgtattaatctcagtcaaccctttcaagcagatgccatattttggggaaaaggaaattgaaatgtaccaaggagcggcacagtatgaaaacccaccacatatctatgcccttgcagataatatgtacagaaacatgatcattgacagagagaaccagtgcgtcattatcagtggtgaaagtggtgctggaaaaacagtggctgccaaatatatcatgagctacatctccagagtgtctggaggagggaccaaagtccagcacgtgaaggacattatcctgcagtccaacccgctgctggaggccttcgggaacgccaagaccgtccggaacaacaactccagccgatttggaaaatactttgaaatccagttcagtccaggtggggaaccagatggtggaaagatctccaacttccttctggaaaaatctagggtggtgatgaggaacccaggagagcggagttttcacatattttaccagctcatcgagggcgcctctgcagagcagaaacacagccttggcatcaccagcatggactattattactacctgagcctctcgggctcatacaaggttgatgacattgacgacaggcgggagtttcaggaaactctgcacgccatgaatgtgattgggatctttgcagaagagcaaacgctggtgttgcagatagtggcgggtattctccacctgggaaacatcagcttcaaagaagttggcaactacgcggctgtggagagtgaagagtttttagcttttcctgcatatctgctagggataaaccaggaccggttgaaagaaaagctaacaagccggcagatggatagcaagtggggaggcaaatccgaatccatccacgtgaccctcaacgtagagcaggcctgttacacccgggatgcgctcgccaaggccctgcacgcccgggtctttgatttcttggtagattccatcaataaagccatggagaaagaccatgaagaatacaacattggcgtcctagacatctatggctttgaaatattccagaaaaatggctttgaacagttttgtatcaattttgttaatgaaaaactgcagcagatttttattgaactgacattaaaggcagaacaggaagaatatgttcaagagggaataagatggacacccattgagtactttaataataaaatcgtatgtgacctcatagagaacaaagtgaaccctcctggcatcatgagcatcctggatgacgtgtgcgccacgatgcatgcggtgggtgagggggcagatcagacgctgctccagaaacttcagatgcagattgggagtcatgagcacttcaacagttggaaccaaggcttcatcattcatcattatgctgggaaggtatcctatgacatggatggcttttgtgaaaggaaccgggatgtgctttttatggatctcatcgagcttatgcagagcagcgagctgcctttcataaagtctttatttccggaaaatctgcaggctgacaagaaagggcgcccaactactgccggaagcaaaataaagaaacaagccaatgaccttgtgagcaccctgatgaaatgtacgccccactacattcgctgcatcaagccaaacgaaaccaagaagcccagagactgggaggaaagcagggtaaagcatcaagtcgaatatttgggtctgaaagagaacattcgagtgagaagagctggctatgcctatcggcgcatcttccaaaaattcctacagaggtatgccattctgaccaaagccacctggccttcttggcagggagaggagaagcaaggcgtcctgcacctgctgcagtcggtcaacatggacagcgaccagttccagctggggaggagtaaagtgttcatcaaagcccccgagtctctatttcttttagaagagatgagagagagaaagtatgatgggtatgctcgagtgatacagaaatcatggaggaaattcgtggcccggaagaaatacgttcaaatgagagaagaagcctcagacctcttattgaacaagaaggagagaaggagaaacagtattaacaggaactttataggggattatattgggatggaagagcacccagaactccagcagttcgtgggcaagagggagaagattgatttcgcagacacagtcaccaagtatgacaggaggttcaagggtgtaaagcgagacctgctccttaccccaaagtgcttgtacttaatcggacgagaaaaagtcaaacagggcccagacaagggcctggtgaaagaagtcctgaagcggaaaatcgagatagaacggatcttgtctgtgtccctcagtactatgcaggatgacatttttattctccatgagcaagagtatgacagtttgcttgaatctgtcttcaaaactgaattcctaagcctcttagcaaagcgttacgaggagaagacccagaagcaactacctctgaaattcagcaatacgcttgaactgaagttgaaaaaggaaaactggggcccctggagtgcagggggctcccggcaagtgcagttccaccaagggtttggggacctggctgtcctcaagcccagtaacaaagtgctgcaggtcagcatcggacctggactgcccaagaactcccgtcctaccagaaggaacactacccaaaatacaggttattccagtgggactcaaaatgccaactacccagtgagagctgcccctcctcccccaggataccatcagaacggagtcatcagaaaccagtatgtgccatatccccatgctcctggaagccagaggtccaatcagaaaagcctgtacacctccatggcccgcccgcccttgcctcggcagcagtctaccagttcagaccgagtgtcacagacgccagagagcctggatttcctcaaggtcccggaccagggagctgcaggggtcaggagacaaacaaccagtcggcctcccccagcagggggcagacccaagccccagcccaagcccaagcctcaggtgccacagtgcaaggctttgtatgcctatgacgctcaggacacagacgaactcagctttaatgccaatgacattattgatattatcaaagaagatccttctggctggtggacgggtcgactacgaggcaagcagggcctgttccccaacaactatgtgaccaagatctgaggtgcccgtgactctgacacatggggcagaggagctccaggcacagaccaggggaggggatatttaggggctccccttacaatccacaatgagcaattgcttctccaaggcctggagctattctggtaccttccccatggaggacactgaaaaggctgggttggggacagggagtatcactccataagtgatcctaaaaggtagcctcttcataggaacccaggaggacaaaaccaccatgcattaagatttatttattgtatttaaacctggtgagaggacaagtgaggtctgctcagaccttgtaggcttctatcaaaacagcaccctgcttgctcaccaggcctagagaatggctgtaggtggccgctgacaagtgcctttagttgaagagcacatttctttcatctctcttgtccatacctgatagacacattcctctctgccaccttccttcagggaggacccgccctctgcagactgggcttagcgtgagcaggcacttcccatgtacgtgccaagggtaagctggcctgctgagcccagggcgacagaggggcactggtttacactttgccgggaccatcagggccgccaagcaggtcaggggctgggggctgggggctgggctgctggctttgctttctctgggtcttcaattagaatgtggctggcccatattggtttgtgtttaaatgctgtacttactacaagaaggatcttttttcaagctgtacatttataaaaacagatcatatactgtatatataaaaatcttgagatggtagaaacatgtatgaatgtactaagtagtattccactgtactcattcataaggtaggttttcttacaaaactcacaccaggtacttaaagatgtgctctgcttttttccaactacggagtgtcactgctttctaggtcagtccctgcagactcttctcaactctttccctataggaaacttactccgcgtcctgcccccacctcctaaataaataaaggaatcggcgaacaccttcttcttttatgacatttgttatgggttgaattgtgtgcctccaaagaagatgttggagtcccagccaccagtacctcacaatatgaccttatttggaaatagagtctttatggagcaaacaaacaaaactaattaaaatgaagtcattagagtgggtcttaatccaatataatggtgtcctgatgaaaaggggaaatttggacacagagaccaacatgccagaggaaagaccatgtgaaaaggcagggagaagacagccattcacaagccctggacagaggcctggaacagattctccctcacaccctcacaaggaaccagccctgcccaccttggtcttggacttccaacctccagaactgtgaggcaatacatttcgctgtttaagccactcggtttgtggtagtttgttacggcagccctaacaaactaaaacaatgttttcttgccataatagtgaaaagctggaatcagtgtaatgcccatcaataatggaatggttgtaagtagagactgccatttctctacctttcctcctctgggtgccatagccattcttaagctactggtaacttagagtttgagcagcatacacctttgaggctttcaggatcctcaagtccatgggaaaaaattatcagggcttacgtataagggaaaaaaattgatctagatttgaaacgaagatacatttaattctgctgtgttttacttcaagaacagggagcaaactccattctgtaacagtaacgaataatgttaaaaggctacttcagttccatgttgcgaccagagaggaaagtagagccatgatgcggtgagttgaggaaaggtaatcctgttgacactagtggtctctaaagtactttcacattcatggactccccgcagtgggaggaagataccaccagaactgggacagaggagcatgctggagtccccacagccaccagcactcaggctgcgttctcagggcaggaacaccaggaccatcttcccttgttatcataagcccctggctggctgggacaagcctttgtttttcctcctgattgattgattggcattttacacttgtgtgtaactgggaaccatcgggctctaggtcacaaaacagggactgagttaaacccccacgagtaacaccctcatccatggaaatcacagaccaagcccttagcacctgcatcgtgtgcccagccagtgccaggctcaaggagatgcccaacaaatggtgctgaaataggtaagtgacccacaggggaaggagacttagatctgcgtagagatgctgaaatgctgacactattaagaaaagtttggagaaatagtggtttatcttaaacttatttgtatatatttagaaattcaacatggggactaccagaaaaatctgggataaataacatttccctttttttcctaattaaaaagtcttcagaaaaa

SEQ ID NO: 19148 - DNA, 4284 bp, Homo sapiens
  source 1..4284: mol_type = unassigned DNA
atcaagttctgacccctcccttcaggctcagagccccaaacagccagctccccgcccccctccacacccagcttccctcccccatggcctcggcccctcccgccaaaggaagtgagaaggggctgttgtaagaggaactaaagccgggagtccggtgaacgggcagaagcagggccatgcccaagccacccccaagatccccctgaacctgcacctccatcacgacccattcaggagcctccaggagcccagacaccagccccccaccatgggcagcaaggagcgcttccactggcagagccacaacgtgaagcagagcggcgtggatgacatggtgcttcttccccagatcaccgaagacgccattgccgccaacctccggaagcgcttcatggacgactacatcttcacctacatcggctctgtgctcatctctgtaaaccccttcaagcagatgccctacttcaccgaccgtgagatcgacctctatcagggcgcggcccagtatgagaatcccccgcacatctacgccctcacggacaacatgtaccggaacatgcttatcgactgtgagaaccagtgtgtcatcattagtggagagagtggagctgggaagacagtggcagccaaatatatcatgggctacatctccaaggtgtctggcggaggcgagaaggtccagcacgtcaaagatatcatcctgcagtccaacccgctgctcgaggccttcggcaacgccaagactgtgcgcaacaacaattccagccgctttggcaagtactttgagatccagttcagccgaggtggggagccagatgggggcaagatctccaacttcttgctggagaagtcccgcgtggtcatgcaaaatgaaaatgagaggaacttccacatctactaccagctgctggaaggggcctcccaggagcaaaggcagaacctgggcctcatgacaccggactactattactacctcaaccaatcggacacctaccaggtggacggcacggacgacagaagcgactttggtgagactctgagtgctatgcaggttattgggatcccgcccagcatccagcagctggtcctgcagctcgtggcggggatcttgcacctggggaacatcagtttctgtgaagacgggaattacgcccgagtggagagtgtggacctcctggcctttcccgcctacctgctgggcattgacagcgggcgactgcaggagaagctgaccagccgcaagatggacagccgctggggcgggcgcagcgagtccatcaatgtgaccctcaacgtggagcaggcagcctacacccgtgatgccctggccaaggggctctatgcccgcctcttcgacttcctcgtggaggccatcaaccgtgctatgcagaaaccccaggaagagtacagcatcggtgtgctggacatttacggcttcgagatcttccagaaaaatggcttcgagcagttttgcatcaacttcgtcaatgagaagctgcagcaaatctttatcgaacttaccctgaaggccgagcaggaggagtatgtgcaggaaggcatccgctggactccaatccagtacttcaacaacaaggtcgtctgtgacctcatcgaaaacaagctgagccccccaggcatcatgagcgtcttggacgacgtgtgcgccaccatgcacgccacgggcgggggagcagaccagacactgctgcagaagctgcaggcggctgtggggacccacgagcatttcaacagctggagcgccggcttcgtcatccaccactacgctggcaaggtctcctacgacgtcagcggcttctgcgagaggaaccgagacgttctcttctccgacctcatagagctgatgcagaccagtgagcaggccttcctccggatgctcttccccgagaagctggatggagacaagaaggggcgccccagcaccgccggctccaagatcaagaaacaagccaacgacctggtggccacactgatgaggtgcacaccccactacatccgctgcatcaaacccaacgagaccaagaggccccgagactgggaggagaacagagtcaagcaccaggtggaatacctgggcctgaaggagaacatcagggtgcgcagagccggcttcgcctaccgccgccagttcgccaaattcctgcagaggtatgccattctgacccccgagacgtggccgcggtggcgtggggacgaacgccagggcgtccagcacctgcttcgggcggtcaacatggagcccgaccagtaccagatggggagcaccaaggtctttgtcaagaacccagagtcgcttttcctcctggaggaggtgcgagagcgaaagttcgatggctttgcccgaaccatccagaaggcctggcggcgccacgtggctgtccggaagtacgaggagatgcgggaggaagcttccaacatcctgctgaacaagaaggagcggaggcgcaacagcatcaatcggaacttcgtcggggactacctggggctggaggagcggcccgagctgcgtcagttcctgggcaagagggagcgggtggacttcgccgattcggtcaccaagtacgaccgccgcttcaagcccatcaagcgggacttgatcctgacgcccaagtgtgtgtatgtgattgggcgagagaaagtgaagaagggacctgagaagggccaggtgtgtgaagtcttgaagaagaaagtggacatccaggctctgcggggagtctccctcagcacgcgacaggacgacttcttcatcctccaagaggatgccgccgacagcttcctggagagcgtcttcaagaccgagtttgtcagccttctgtgcaagcgcttcgaggaggcgacgcggaggcccctgcccctcaccttcagcgacacactacagtttcgggtgaagaaggagggctggggcggtggcggcacccgcagcgtcaccttctcccgcggcttcggcgacttggcagtgctcaaggttggcggtcggaccctcacggtcagcgtgggcgatgggctgcccaagagctccaagcctacgcggaagggaatggccaagggaaaacctcggaggtcgtcccaagcccctacccgggcggcccctgcgccccccagaggcatggatcgcaatggggtgcccccctctgccagagggggccccctgcccggagatcatgtctggagggggcacccacaggcctccccggggctccgtccacatccctgggagccagcagacgaccccgggcacgtccgccctcagagcacaacacagaattcctcaacgtgcctgaccagggcatggccggcatgcagaggaagcgcagcgtggggcaacggccagtgcctggtgtgggccgacccaagccccagcctcggacacatggtcccaggtgccgggccctataccagtacgtgggccaagatgtggacgagctgagcttcaacgtgaacgaggtcattgagatcctcatggaagatccctcgggctggtggaagggccggcttcacggccaggagggccttttcccaggaaactacgtggagaagatctgagctgggccctgggatactgccttctctttcgcccgcctatctgcctgccggcctggtggggagccaggccctgccaatgagagcctcgtttacctgggctgcaatagcctaaaagtccagtcctttggcctccagtcctgcccaggccctgggtcaccaggtcactgctgcagcccccgcccctgggccctggtcttcctccaacatcacacctgctgcccattctccatttctgtgtgtgtcaaaggggactaacagcagaatctacctcccaactgccatgtgattaagaaatgggtcttgagtcctgtgctgttggcaaagtgccaggcacagttggggaggggggggtccttaacaagcgtgactttgctcattctgtcatcactaaggcaataaacctttgccaggtgaaagcacgagttaacttactaagtgcccaacaaggacgatgttttcacagccctgtgaggtaggagctgtgaaggaccccatcttacaggtggaacaatggaggttcagagaggttcactgacccaagactgcacagagccatgccttgcattcatatgtgaccataaagcttgaatttgtcccagtttgggctgggcgcagtggctcacgcctgtaatcccagcactttgggaggctgaggcgggcagatcacgtgagaccaggagttcaagaccagcctggataacacagcaaaaccctgtttctact

SEQ ID NO: 19149 - DNA, 3827 bp, Homo sapiens
  source 1..3827: mol_type = unassigned DNA
gtgaacgggcagaagcagggccatgcccaagccacccccaagatccccctgaacctgcacctccatcacgacccattcaggagcctccaggagcccagacaccagccccccaccatgggcagcaaggagcgcttccactggcagagccacaacgtgaagcagagcggcgtggatgacatggtgcttcttccccagatcaccgaagacgccattgccgccaacctccggaagcgcttcatggacgactacatcttcacctacatcggctctgtgctcatctctgtaaaccccttcaagcagatgccctacttcaccgaccgtgagatcgacctctatcagggcgcggcccagtatgagaatcccccgcacatctacgccctcacggacaacatgtaccggaacatgcttatcgactgtgagaaccagtgtgtcatcattagtggagagagtggagctgggaagacagtggcagccaaatatatcatgggctacatctccaaggtgtctggcggaggcgagaaggtccagcacgtcaaagatatcatcctgcagtccaacccgctgctcgaggccttcggcaacgccaagactgtgcgcaacaacaattccagccgctttggcaagtactttgagatccagttcagccgaggtggggagccagatgggggcaagatctccaacttcttgctggagaagtcccgcgtggtcatgcaaaatgaaaatgagaggaacttccacatctactaccagctgctggaaggggcctcccaggagcaaaggcagaacctgggcctcatgacaccggactactattactacctcaaccaatcggacacctaccaggtggacggcacggacgacagaagcgactttggtgagactctgagtgctatgcaggttattgggatcccgcccagcatccagcagctggtcctgcagctcgtggcggggatcttgcacctggggaacatcagtttctgtgaagacgggaattacgcccgagtggagagtgtggacctcctggcctttcccgcctacctgctgggcattgacagcgggcgactgcaggagaagctgaccagccgcaagatggacagccgctggggcgggcgcagcgagtccatcaatgtgaccctcaacgtggagcaggcagcctacacccgtgatgccctggccaaggggctctatgcccgcctcttcgacttcctcgtggaggccatcaaccgtgctatgcagaaaccccaggaagagtacagcatcggtgtgctggacatttacggcttcgagatcttccagaaaaatggcttcgagcagttttgcatcaacttcgtcaatgagaagctgcagcaaatctttatcgaacttaccctgaaggccgagcaggaggagtatgtgcaggaaggcatccgctggactccaatccagtacttcaacaacaaggtcgtctgtgacctcatcgaaaacaagctgagccccccaggcatcatgagcgtcttggacgacgtgtgcgccaccatgcacgccacgggcgggggagcagaccagacactgctgcagaagctgcaggcggctgtggggacccacgagcatttcaacagctggagcgccggcttcgtcatccaccactacgctggcaaggtctcctacgacgtcagcggcttctgcgagaggaaccgagacgttctcttctccgacctcatagagctgatgcagaccagtgagcaggccttcctccggatgctcttccccgagaagctggatggagacaagaaggggcgccccagcaccgccggctccaagatcaagaaacaagccaacgacctggtggccacactgatgaggtgcacaccccactacatccgctgcatcaaacccaacgagaccaagaggccccgagactgggaggagaacagagtcaagcaccaggtggaatacctgggcctgaaggagaacatcagggtgcgcagagccggcttcgcctaccgccgccagttcgccaaattcctgcagaggtatgccattctgacccccgagacgtggccgcggtggcgtggggacgaacgccagggcgtccagcacctgcttcgggcggtcaacatggagcccgaccagtaccagatggggagcaccaaggtctttgtcaagaacccagagtcgcttttcctcctggaggaggtgcgagagcgaaagttcgatggctttgcccgaaccatccagaaggcctggcggcgccacgtggctgtccggaagtacgaggagatgcgggaggaagcttccaacatcctgctgaacaagaaggagcggaggcgcaacagcatcaatcggaacttcgtcggggactacctggggctggaggagcggcccgagctgcgtcagttcctgggcaagagggagcgggtggacttcgccgattcggtcaccaagtacgaccgccgcttcaagcccatcaagcgggacttgatcctgacgcccaagtgtgtgtatgtgattgggcgagagaaagtgaagaagggacctgagaagggccaggtgtgtgaagtcttgaagaagaaagtggacatccaggctctgcggggagtctccctcagcacgcgacaggacgacttcttcatcctccaagaggatgccgccgacagcttcctggagagcgtcttcaagaccgagtttgtcagccttctgtgcaagcgcttcgaggaggcgacgcggaggcccctgcccctcaccttcagcgacacactacagtttcgggtgaagaaggagggctggggcggtggcggcacccgcagcgtcaccttctcccgcggcttcggcgacttggcagtgctcaaggttggcggtcggaccctcacggtcagcgtgggcgatgggctgcccaagagctccaagcctacgcggaagggaatggccaagggaaaacctcggaggtcgtcccaagcccctacccgggcggcccctgcgccccccagaggcatggatcgcaatggggtgcccccctctgccagagggggccccctgcccctggagatcatgtctggagggggcacccacaggcctccccggggccctccgtccacatccctgggagccagcagacgaccccgggcacgtccgccctcagagcacaacacagaattcctcaacgtgcctgaccagggcatggccggcatgcagaggaagcgcagcgtggggcaacggccagtgcctggtgtgggccgacccaagccccagcctcggacacatggtcccaggtgccgggccctataccagtacgtgggccaagatgtggacgagctgagcttcaacgtgaacgaggtcattgagatcctcatggaagatccctcgggctggtggaagggccggcttcacggccaggagggccttttcccaggaaactacgtggagaagatctgagctgggccctgggatactgccttctctttcgcccgcctatctgcctgccggcctggtggggagccaggccctgccaatgagagcctcgtttacctgggctgcaatagcctaaaagtccagtcctttggcctccagtcctgcccaggccctgggtcaccaggtcactgctgcagcccccgcccctgggccctggtcttcctccaacatcacacctgctgcccattctccatttctgtgtgtgtcaaaggggactaacagcagaatctacctcccaactgccatgtgattaagaaatgggtcttgagtcctgtgctgttggcaaagtgccaggcacagttggggaggggggggtccttaacaagcgtgactttgctcattctgtcatcactaaggcaataaacctttgccaggtgaaa

SEQ ID NO: 19150 - DNA, 3267 bp, Homo sapiens
  source 1..3267: mol_type = unassigned DNA
actttacaccagcactggaggaggctggtggggcagggcgggggcggtggggcctcccctagccttccctccccctctccttcactgtccttccagcaggcacaggaaggtgaggcaaggtgtttccagccggcaggatggaggacgaggaaggccctgagtatggcaaacctgactttgtgcttttggaccaagtgaccatggaggacttcatgaggaacctgcagctcaggttcgagaagggccgcatctacacctacatcggtgaggtgctggtgtccgtgaacccctaccaggagctgcccctgtatgggcctgaggccatcgccaggtaccagggccgtgagctctatgagcggccaccccatctctatgctgtggccaacgccgcctacaaggcaatgaagcaccggtccagggacacctgcatcgtcatctcaggggagagtggggcagggaagacagaagccagtaagcacatcatgcagtacatcgctgctgtcaccaatccaagccagagggctgaggtggagagggtcaaggacgtgctgctcaagtccacctgtgtgctggaggcctttggcaatgcccgcaccaaccgcaatcacaactccagccgctttggcaagtacatggacatcaactttgacttcaagggggacccgatcggaggacacatccacagctacctactggagaagtctcgggtcctcaagcagcacgtgggtgaaagaaacttccacgccttctaccaattgctgagaggcagtgaggacaagcagctgcatgaactgcacttggagagaaaccctgctgtatacaatttcacacaccagggagcaggactcaacatgactgtgcacagtgccttggacagtgatgagcagagccaccaggcagtgaccgaggccatgagggtcatcggcttcagtcctgaagaggtggagtctgtgcatcgcatcctggctgccatattgcacctgggaaacatcgagtttgtggagacggaggagggtgggctgcagaaggagggcctggcagtggccgaggaggcactggtggaccatgtggctgagctgacggccacaccccgggacctcgtgctccgctccctgctggctcgcacagttgcctcgggaggcagggaactcatagagaagggccacactgcagctgaggccagctatgcccgggatgcctgtgccaaggcagtgtaccagcggctgtttgagtgggtggtgaacaggatcaacagtgtcatggaaccccggggccgggatcctcggcgtgatggcaaggacacagtcattggcgtgctggacatctatggcttcgaggtgtttcccgtcaacagtttcgagcagttctgcatcaactactgcaacgagaagctgcagcagctattcatccagctcatcctgaagcaggaacaggaagagtacgagcgcgagggcatcacctggcagagcgttgagtatttcaacaacgccaccattgtggatctggtggagcggccccaccgtggcatcctggccgtgctggacgaggcctgcagctctgctggcaccatcactgaccgaatcttcctgcagaccctggacatgcaccaccgccatcacctacactacaccagccgccagctctgccccacagacaagaccatggagtttggccgagacttccggatcaagcactatgcaggggacgtcacgtactccgtggaaggcttcatcgacaagaacagagatttcctcttccaggacttcaagcggctgctgtacaacagcacggaccccactctacgggccatgtggccggacgggcagcaggacatcacagaggtgaccaagcgccccctgacggctggcacactcttcaagaactccatggtggccctggtggagaaccttgcctccaaggagcccttctacgtccgctgcatcaagcccaatgaggacaaggtagctgggaagctggatgagaaccactgtcgccaccaggtcgcatacctggggctgctggagaatgtgagggtccgcagggctggcttcgcttcccgccagccctactctcgattcctgctcaggtacaagatgacctgtgaatacacatggcccaaccacctgctgggctccgacaaggcagccgtgagcgctctcctggagcagcacgggctgcagggggacgtggcctttggccacagcaagctgttcatccgctcaccccggacactggtcacactggagcagagccgagcccgcctcatccccatcattgtgctgctattgcagaaggcatggcggggcaccttggcgaggtggcgctgccggaggctgagggctatctacaccatcatgcgctggttccggagacacaaggtgcgggctcacctggctgagctgcagcggcgattccaggctgcaaggcagccgccactctacgggcgtgaccttgtgtggccgctgccccctgctgtgctgcagcccttccaggacacctgccacgcactcttctgcaggtggcgggcccggcagctggtgaagaacatccccccttcagacatgccccagatcaaggccaaggtggccgccatgggggccctgcaagggcttcgtcaggactggggctgccgacgggcctgggcccgagactacctgtcctctgccactgacaatcccacagcatcaagcctgtttgctcagcgactaaagacacttcaggacaaagatggcttcggggctgtgctcttttcaagccatgtccgcaaggtgaaccgcttccacaagatccggaaccgggccctcctgctcacagaccagcacctctacaagctggaccctgaccggcagtaccgggtgatgcgggccgtgccccttgaggcggtgacggggctgagcgtgaccagcggaggagaccagctggtggtgctgcacgcccgcggccaggacgacctcgtggtgtgcctgcaccgctcccggccgccattggacaaccgcgttggggagctggtgggcgtgctggccgcacactgccagggggagggccgcaccctggaggttcgcgtctccgactgcatcccactaagccatcgcggggtccggcgcctcatctccgtggagcccaggccggagcagccagagcccgatttccgctgcgctcgcggctccttcaccctgctctggcccagccgctgagcgcccgcacccgccgcaccccgaggccgccaattgtccgccccgccagcgctgcaaataaaccttctgagtc

SEQ ID NO: 19151 - DNA, 5581 bp, Homo sapiens
  source 1..5581: mol_type = unassigned DNA
agggagcgcccgtagccagcgcccccgtaaagaaataaggaggcgcccggcttcccgcccaggcccagggccccagtgcagcctggacacagtattcaaagttttggcgtctgagcattgttatgcgttattttcaagctttgctaacggtttttaaacctttgagatgtttccattaattggaaaaacaatcatctttgataactttcctgatccttctgatacatgggaaatcactgagacaattggcaaaggaacttatgggaaagtttttaaagtattgaataagaaaaatggccaaaaagcagcagtcaaaattcttgatccaattcacgatattgacgaagagattgaagcagaatataacatcttaaaagcactttctgaccaccctaatgtggtcagattctatgggatatactttaagaaggataaagtaaatggagacaagctgtggttggttcttgagctctgcagtggaggatcagtgactgaccttgtgaaaggatttctgaagaggggtgaaagaatgagtgagcctctaattgcctatattttacatgaagcactaatgggacttcaacatttgcataacaacaaaactatccacagagatgtgaaaggcaataacattctattgaccacggaaggtggagtgaaactagtagattttggtgtgtctgcacagctcaccagtacccggcaccgtcggaacacatccgtaggaacaccgttttggatggctcctgaggtgattgcatgtgaacagcaattggataccacttatgacgccagatgtgacacttggtccctgggtatcacggccattgagctgggtgatggagatcctccactagctgaccttcatcccatgagagcactcttcaaaataccaaggaatccacccccaaaactaaggcagcctgagctatggtcagcagaattcaatgacttcataagcaagtgcttgactaaagattatgaaaagcgtccaacagtgtcagaacttttacagcataaattcattactcaaattgagggcaaagatgtgatgctacaaaaacaactaacggaattcattggcatccatcaatgcatgggaggcacagaaaaggccagacgtgaacgtattcacacgaagaaagggaacttcaaccgacctctaatatccaatctgaaggatgtagatgatttagcaaccctagaaattttggatgagaatacagtctcagagcaacttgagaagtgttattccagagatcagatctacgtctatgtgggagacatactcattgctcttaacccttttcagagtctgggtctttactccacaaagcattccaaactatatattggatcaaagagaactgccagtcctcctcacatttttgcaatggctgacttaggatatcaatctatgataacatataattcagatcagtgcattgttatttctggagaaagtggtgctggaaagactgaaaatgctcatcttttagttcagcagctgacagtgcttggaaaggctaataacagaaccttgcaagagaagattttacaagtgaacaatttggtagaagcctttggcaatgcctgcactattataaatgacaattctagcagatttggaaaatacttagaaatgaaattcacctcttctggagcggtagtgggagcacagatttctgaatatctcctggaaaaatcccgagttatccaccaagctattggagaaaaaaattttcatattttttactacatttatgctggtttggctgaaaagaagaaactagcccattacaaactgcctgaaaataagcctcccaggtacctacaaaatgaccacctcagaacagtacaagacatcatgaataatagtttctataaatcccagtatgaattaattgagcaatgtttcaaagtcataggttttacaatggagcaacttggtagtatatacagcatactcgctgcaatcttgaatgttggcaacattgaattttcttctgtggcaactgaacaccagattgacaagagccacatttctaatcatacagccctggagaactgtgcttctttgctttgcattcgggcagatgagctacaagaagctctcacctcccactgtgtggtcactagaggagaaacaattatacgacccaatactgtagaaaaagctaccgatgtcagggatgccatggctaaaactttatatggacgtctctttagttggatagtcaattgcattaacagtttgttgaagcatgactcatcaccaagtgggaatggtgatgagctgagcattggcattcttgatatatttggctttgaaaatttcaaaaaaaattccttcgagcagctgtgcattaacattgcaaatgaacaaattcagtattattataatcaacatgtgtttgcatgggaacagaatgaatacctaaatgaagatgtggatgctagagttattgaatatgaggataactggcccctcttagatatgtttctgcaaaagccaatgggtttactttccctacttgatgaagaaagtagatttcccaaggccactgaccagactcttgtagaaaaatttgaaggtaacctgaaatcacaatacttctggagacccaaaagaatggaacttagttttggaattcaccattatgcaggaaaggtcctctataatgcaagtggattcttagccaaaaacagagacactcttcctactgacattgtgctacttttgaggtcatccgacaacagtgtaattaggcaactagtcaaccaccctctgaccaaaacaggtaatctgccacattctaaaactaaaaatgttataaactatcaaatgaggacttcagaaaaattaatcaacctggcaaagggcgacactggagaagccacacgtcatgccagagagacaaccaacatgaaaacacaaacggttgcatcatattttagatattccctgatggatttgttgtctaaaatggtggtgggccaacctcattttgtccgttgcatcaaaccaaatagtgagcgtcaggcaagaaaatatgacaaagagaaagttctgctacagcttcggtacacaggaattctggaaacagcaagaattcgaagactaggattctcccatcggatactttttgctaactttataaagcggtactaccttctctgctacaagtcgagcgaggagccccgcatgagccctgacacctgtgccaccattttggaaaaagctggtctcgataactgggctcttggaaaaacaaaagtgttccttaagtattatcacgtggagcagttaaatctaatgcgaaaggaagctattgacaagcttattttgattcaagcttgtgtcagagcattcttgtgttcaagaagataccaaaaaatacaggagaaaaggaaagaaagcgctataataatacagtcagctgcaagaggacaccttgtcaggaaacaaagaaaagaaattgttgacatgaaaaacacagcagtaacaaccattcaaacttctgatcaggaattcgactacaagaaaaactttgaaaatacaagggaatctttcgtgaagaaacaagcagaaaatgcaatctctgctaatgaaagattcatttcagctccaaataataaaggaagtgtatctgtagtgaagacttccactttcaaacctgaagaggaaaccaccaatgctgtggagagtaacaacagagtgtatcagactccaaaaaaaatgaataatgtgtatgaggaagaggttaagcaagaattctaccttgtagggccagaagtaagccccaaacagaagtctgtcaaagacctggaagagaacagcaatctaaggaaagtggagaaagaggaagctatgatccagagttactatcagaggtacacagaggagaggaattgtgaagagtcaaaagcagcatatctagaaaggaaggccatatcagaaaggccaagctacccagtgccttggttagctgaaaatgagacttcctttaaaaaaactttggaacctacacttagccaaaggtcaatttatcaaaatgcaaacagcatggaaaaagaaaagaagacatctgtagttacccagcgtgcaccgatatgcagccaggaggaaggcagaggccgtctgaggcatgagacagtcaaagagaggcaagttgaaccagtgacacaggcccaggaggaagaagataaagcagcggtattcattcagagcaaataccggggttacaagagaaggcagcagttgaggaaggacaagatgtcttcttttaagcatcagaggattgtcacaacaccaacagaagtagcaagaaacactcataatttgtattcctatcccacaaaacatgaggaaatcaataacatcaagaagaaggataacaaagactcgaaagcaacttcagaaagagaagcatgtggtttggcaattttttcaaaacagatatcaaagttatctgaagaatatttcattctgcagaaaaaattgaatgaaatgattttgtcacagcaactgaagtcactttatctgggtgtctcgcaccataagccaattaatagacgagtttcttctcagcagtgcctctcaggtgtctgtaaaggagaggagccaaaaatattgagacccccaagacgaccccggaaacccaaaacattaaataaccctgaagactccacatactattatctacttcataagtcaatccaagaagaaaaacgaagaccaaggaaagacagtcagggaaaattattagatttggaagatttctattataaggaatttttgcccagtcgttctggaccaaaggaacatagccctagtttaagagaacgaagaccacagcaagaactccagaatcaatgtattaaggctaatgaaaggtgctgggcggcggagagccccgagaaggaggaggagagagagccagcagccaacccctacgacttcaggaggctcctgcgcaaaacctcccagcgccggcgcctcgtccagcagtcctaaccgttcaacgaggcagtcaccgccgtcggaaggcgctggagcctgcggggcagcaggggccaagcaggcactctggggctggcaccagcaggcactgaagctgcggccctgatctccgcagaggctgcctgctgcgctcggccctcaagtgcccgggccggccttcgtgctccgaaacaagagacctgggagccctcgggaaacctcccccgacgctctctctcggaactcccgcaccctcctttctcaccagcccgccagttgtggcaaccctgtccttgttcccctaatctatcactttgttctttttttttgtgactcctgtggactccactgcgcctgggatctcgccaacccctctctcatttggggtgactgaattcacagatttttttttttattggaaacggcttttcttggccaacagaacacttgctagcggttgaatcttagagaaaaaagcccgggaggggtggggagaatttcgaagatgtatttcatctcaagcttgctctttctcttcctttggttattaaggtcactaaataaaggaagtgccttgga

SEQ ID NO: 19152 - DNA, 727 bp, Homo sapiens
  source 1..727: mol_type = unassigned DNA
aaacctttgagatgtttccattaattggaaaaacaatcatctttgataactttcctgatccttctgatacatgggaaatcactgagacaattggcaaaggaacttatgggaaagtttttaaagtattgaataagaaaaatggccaaaaagcagcagtcaaaattcttgatccaattcacgatattgacgaagagattgaagcagaatataacatcttaaaagcactttctgaccaccctaatgtggtcagattctatgggatatactttaagaaggataaagtaaatggagacaagctgtggttggttcttgagctctgcagtggaggatcagtgactgaccttgtgaaaggatttctgaagaggggtgaaagaatgagtgagcctctaattgcctatattttacatgaagcactaatgggacttcaacatttgcataacaacaaaactatccacagagatgtgaaaggcaataacattctattgaccacggaaggtggagtgaaactagtagattttggtgtgtctgcacagctcaccagtacccggcaccgtcggaacacatccgtaggaacaccgttttggatggctcctgaggtcagatagagttttgaggcagacaaacgtaatagctgatcctgtttgactttcctttttatgtgtactctatctctgtaagcattttggaatataacagaagaaactctcagttgtgttattttcatgtg

SEQ ID NO: 19153 - DNA, 2723 bp, Homo sapiens
  source 1..2723: mol_type = unassigned DNA
gcccgtagccagcgcccccgtaaagaaataaggaggcgcccggcttcccgcccaggcccagggccccagtgcagcctggacacagtattcaaagttttggcgtctgagcattgttatgcgttattttcaagctttgctaacggtttttaaacctttgagatgtttccattaattggaaaaacaatcatctttgataactttcctgatccttctgatacatgggaaatcactgagacaattggcaaaggaacttatgggaaagtttttaaagtattgaataagaaaaatggccaaaaagcagcagtcaaaattcttgatccaattcacgatattgacgaagagattgaagcagaatataacatcttaaaagcactttctgaccaccctaatgtggtcagattctatgggatatactttaagaaggataaagtaaatggagacaagctgtggttggttcttgagctctgcagtggaggatcagtgactgaccttgtgaaaggatttctgaagaggggtgaaagaatgagtgagcctctaattgcctatattttacatgaagcactaatgggacttcaacatttgcataacaacaaaactatccacagagatgtgaaaggcaataacattctattgaccacggaaggtggagtgaaactagtagattttggtgtgtctgcacagctcaccagtacccggcaccgtcggaacacatccgtaggaacaccgttttggatggctcctgaggtgattgcatgtgaacagcaattggataccacttatgacgccagatgtgacacttggtccctgggtatcacggccattgagctgggtgatggagatcctccactagctgaccttcatcccatgagagcactcttcaaaataccaaggtcagatgactaacattgggtccagtatctgcagcccgatttacttcctccagccaccaagtgttcatcatgctcttcatggagacgttcagatatattccaacaagttgggagcagaagatcctggaatattattctgcttcttctgagacattgtatttgttcagtagttgcatttccctggtctaagtaaaagagctttctcttgataatcagtgtgtctttctctcttttgctaggatttgatttcagaaaatagcagttcctcccaccctttatccattccccaatgagtcagtgaggcatcagagtccatagcctgtgcaagtgttttgctttgctttacctaccaatctagtaattttttactacttgctaagatttccctttgttcagaactttaaaataatattattaagaaaattatatataaaatttatccagaaaataatggttttaaacatgttagtattttgaatatgttaatataaaacaataaatttagaagaataacctcttttggtgccatgaaagcacttgactatttatgtggccccccactccttcatgtgtgtttcaacagattttcccctactatcctataaactaatttctttaaacactattttctatgagtggtggttagtcccttgatgtttcagataactaatgtgaaaagactgcctatatttattaaaggtgttatttttaaatatctttttaaggattttgccttaattataatgcagtgcacagccagagcctgtggtgacagggttccaaaacattagaatatttggcatctaactaaattattataagactaaaacatttgaattcatttttaattttgcctttgaatttcttgtcctatctagatgttccaaattataataccttggctatatatcatcctttacatactgcttattttgttaagtggagaaacaacattatggaaaagaatggaaaacctctatactaaatccaagacatttcattaattttgaagaaagcaggaaaaaaatctgtagtttctaattcctattgtcattcagtatgtaaggtgaagttctgtactgccttagctgttttaactgtggattaaaccatcatatttagtctgatgttattactcttgatgataatgccacatgaaggaaggatgacactgttgatagatattgtacctaggtaacaggcaatgtgcaaagtaattctagaaactgcatcatcttagttatttcttaattatgtctaccagcagtggaattccaagaatactgactatggtaatatggagaaaaagggaatctgaaaagctacccagttctgagtgttctgaaataatccaaactttgttattcaaagcaagccaataaatctcataaaaggaaattttcaggaggacaagaaacaaaacaacatttctggagaaaagaattacttcttttaatgtgcaaattagcaatcttcaaattgtcctaaggattgtgaaatgagcttagtcctgatctggggtagatgagtagctgcacttttctttaatgagcctgtacaaactgtacattaatttcattataagctatttaaggagtaatgcagaactgaagacaaagtatttccatttcactaatgaaaacaaagagctgttagaattaacataaagcagcacttcagcaaattcaactatcatggttgatcaatgttgcttgattacagagttagatcagcctcattttcaaatgatgttcctttgtattcaacgaatgtgccaaaaaatatatttgttcagcttaaactgaaaggaattaataaaattgttaaagttgt

SEQ ID NO: 19154 - DNA, 2203 bp, Homo sapiens
  source 1..2203: mol_type = unassigned DNA
gcgtctgagcattgttatgcgttattttcaagctttgctaacggtttttaaacctttgagatgtttccattaattggaaaaacaatcatctttgataactttcctgatccttctgatacatgggaaatcactgagacaattggcaaaggaacttatgggaaagtttttaaagtattgaataagaaaaatggccaaaaagcagcagtcaaaattcttgatccaattcacgatattgacgaagagattgaagcagaatataacatcttaaaagcactttctgaccaccctaatgtggtcagattctatgggatatactttaagaaggataaagtaaatggagacaagctgtggttggttcttgagctctgcagtggaggatcagtgactgaccttgtgaaaggatttctgaagaggggtgaaagaatgagtgagcctctaattgcctatattttacatgaagcactaatgggacttcaacatttgcataacaacaaaactatccacagagatgtgaaaggcaataacattctattgaccacggaaggtggagtgaaactagtagattttggtgtgtctgcacagctcaccagtacccggcaccgtcggaacacatccgtaggaacaccgttttggatggctcctgaggtgattgcatgtgaacagcaattggataccacttatgacgccagatgtgacacttggtccctgggtatcacggccattgagctgggtgatggagatcctccactagctgaccttcatcccatgagagcactcttcaaaataccaaggaatccacccccaaaactaaggcagcctgagctatggtcagcagaattcaatgacttcataagcaagtgcttgactaaagattatgaaaagcgtccaacagtgtcagaacttttacagcataaattcattactcaaattgagggcaaagatgtgatgctacaaaaacaactaacggaattcattggcatccatcaatgcatgggaggcacagaaaaggccagacgtgaacgtattcacacgaagaaagggaacttcaaccgacctctaatatccaatctgaaggatgtagatgatttagcaaccctagaaattttggatgagaatacagtctcagagcaacttgagaagtgttattccagagatcagatctacgtctatgtgggagacatactcattgctcttaacccttttcagagtctgggtctttactccacaaagcattccaaactatatattggatcaaagagaactgccagtcctcctcacatttttgcaatggctgacttaggatatcaatctatgataacatataattcagatcagtgcattgttatttctggagaaagtggtgctggaaagactgaaaatgctcatcttttagttcagcagctgacagtgcttggaaaggctaataacagaaccttgcaagagaagattttacaagtgaacaatttggtagaagcctttggcaatgcctgcactattataaatgacaattctagcagatttggaaaatacttagaaatgaaattcacctcttctggagcggtagtgggagcacagatttctgaatatctcctggaaaaatcccgagttatccaccaagctattggagaaaaaaattttcatattttttactacatttatgctggtttggctgaaaagaagaaactagcccattacaaactgcctgaaaataagcctcccaggtacctacaaaatgaccacctcagaacagtacaagacatcatgaataatagtttctataaatcccagtatgaattaattgagcaatgtttcaaagtcataggttttacaatggaggtgctgggcggcggagagccccgagaaggaggaggagagagagccagcagccaacccctacgacttcaggaggctcctgcgcaaaacctcccagcgccggcgcctcgtccagcagtcctaaccgttcaacgaggcagtcaccgccgtcggaaggcgctggagcctgcggggcagcaggggccaagcaggcactctggggctggcaccagcaggcactgaagctgcggccctgatctccgcagaggctgcctgctgcgctcggccctcaagtgcccgggccggccttcgtgctccgaaacaagagacctgggagccctcgggaaacctcccccgacgctctctctcggaactcccgcaccctcctttc

SEQ ID NO: 19155 - DNA, 6231 bp, Homo sapiens
  source 1..6231: mol_type = unassigned DNA
ctagatcgaaagtcctttggtaatgatgtgtcatacattctagtcatcaaagacaccattttctgggcctgaagtgttctgctggtttttggaggaatgagaatccaatctctcataagccggattcagaaaataggtcatcgatgaaacatctgtatggattatttcactataatcctatgatgcttggacttgaatcacttccagatcccacagacacctgggaaattatagagaccattggtaaaggcacctatggcaaagtctacaaggtaactaacaagagagatgggagcctggctgcagtgaaaattctggatccagtcagtgatatggatgaagaaattgaggcagaatacaacattttgcagttccttcctaatcatcccaatgttgtaaagttttatgggatgttttacaaagcggatcactgtgtagggggacagctgtggctggtcctggagctgtgtaatgggggctcagtcactgagcttgtcaaaggtctactcagatgtggccagcggttggatgaagcaatgatctcatacatcttgtacggggccctcttgggccttcagcatttgcacaacaaccgaatcatccaccgtgatgtgaaggggaataacattcttctgacaacagaaggaggagttaagctcgttgactttggtgtttcagctcaactcaccagtacacgtctgcggagaaacacatctgttggcaccccgttctggatggcccctgaggtcattgcctgtgagcagcagtatgactcttcctatgacgctcgctgtgacgtctggtccttggggatcacagctattgaactgggggatggagaccctcccctctttgacatgcatcctgtgaaaacactctttaagattccaagaaatcctccacctactttacttcatccagaaaaatggtgtgaagaattcaaccactttatttcacagtgtcttattaaggattttgaaaggcgaccttccgtcacacatctccttgaccacccatttattaaaggagtacatggaaaagttctgtttctgcaaaaacagctggccaaggttctccaagaccagaagcatcaaaatcctgttgctaaaaccaggcatgagaggatgcataccagaagaccttatcatgtggaagatgctgaaaaatactgccttgaggatgatttggtcaacctagaggttctggatgaggatacaattatccatcagttgcagaaacgttatgcagacttgctaatttacacatatgttggagacatcttaattgccttaaaccccttccagaatctaagcatatactctccacagttttccagactttatcatggggtgaaacgcgcctccaatcccccccacatatttgcatcagcagatgctgcttaccagtgcatggttactctcagcaaagaccagtgcattgtcatcagcggagagagtggctctgggaagacagaaagcgcccacctgattgttcagcatttgactttcttgggaaaggccaataatcagaccttgagagagaaaattctacaagtcaactccctggtggaagcctttgggaactcatgcactgccatcaatgacaactcgagccgttttggaaaatatctggaaatgatgtttacaccaactggagttgtgatgggggcaagaatctctgaatatctcctggaaaaatccagagttataaaacaggcagcgagagagaaaaattttcatatattttactatatttatgctggtcttcatcaccaaaagaagctttctgatttcagacttcctgaggaaaaacctcctaggtacatagctgatgaaactggaagggtgatgcacgacataacttccaaggagtcttacagaagacaattcgaagcaattcagcattgcttcaggattatagggttcacggacaaagaggtgcactcagtgtacagaattttggctgggattttgaatattgggaacattgagttcgcagctatttcctctcaacatcagactgataaaagtgaggtgcccaatgctgaagctttgcaaaatgctgcctctgttctgtgcattagccctgaagagctccaggaggccctcacctcccactgtgtggtcacccggggcgagaccatcatccgtgccaacactgtagacagggctgcggacgttcgagacgccatgtccaaagccctgtatgggaggctcttcagctggattgtgaatcgcattaatacactcctgcagccagacgaaaacatatgtagtgcaggaggtggaatgaatgtggggatcttggatatctttggattcgagaattttcagagaaattcatttgagcagctctgcataaacatcgccaatgagcaaatccagtactatttcaatcagcatgtttttgctcttgagcagatggaatatcagaatgaaggcattgatgctgtacccgtggaatatgaggacaaccgcccgctcttggacatgttcctccagaaacccctgggactgcttgcacttttggatgaggaaagtcggtttccccaagcaactgaccagaccctggttgataaatttgaagataatctacgatgcaaatacttctggaggcccaaaggagtggaactgtgctttggcattcagcattatgctggaaaggtattatatgatgcttctggggttcttgagaaaaatagagacactctccctgccgatgtggttgtggtcctgagaacgtcagaaaacaagcttcttcagcagctcttctcaatccctctgaccaaaacaggtaatttggcccagacaagagctaggataacagtggcctcaagttctttgcctccacatttcagtgctgggaaagccaaggtggacactctggaggtgatacggcatccggaagaaaccaccaacatgaagaggcaaactgtggcttcttacttccggtattctctgatggacctgctctccaaaatggtggttggacagccccactttgtgcgctgcattaaacccaatgatgaccgagaggccctgcagttctctcgagagagggtgctggcccagctccgctccacagggattctggagacagtcagcatccgccgccagggctattcccaccgcatcctttttgaagaatttgtgaaaaggtattattacttggcattcacagcacatcaaacacctcttgctagcaaagagagctgtgtggctatcttggaaaagtccagattagatcactgggtactgggaaaaacaaaggtttttctcaaatattaccatgttgagcaattaaatttgctgcttcgagaagtcataggcagagtggttgtgctgcaggcatataccaaggggtggcttggagccaggagatacaaaagggtcagagagaagagagagaagggagccattgccatccagtcagcctggagaggatatgatgctcggaggaaatttaagaaaataagcaacagaaggaatgagtctgctgctcataatcaagcaggggacacttcaaaccaaagcagtgggccacattcccccgtcgcagcaggtacgaggggaagtgccgaggttcaagactgcagcgagcctggtgaccataaagttctcaggggctctgtacatcgtaggagccattcacaagcagaatccaacaatggccgtacacagacttcaagcaactctcctgctgtcacagagaaaaatgggcattcacaagcccagagttctccaaaagggtgcgatatcttcgcaggacatgcaaacaagcactcggtttctgggactgatttgctgtcttctcggatatgccatcctgctccagatcagcaaggattgagtctctggggagcccctcaaaagcctgcctttccacattacggatgtaacttttatgggttcagaaaatggtcttgcacagaagcatcgaacacctcgccgacgatgtcagcagcccaaaatgctgagtagccctgaggacaccatgtactataaccagttaaatggaactctagaatatcaagggagcaagaggaagccaagaaaacttggccaaatcaaagtacttgatggggaagatgaatattacaaatctctgtcaccagtggactgtatccctgaggagaacaactcagcccacccttcctttttttcttcatcctcaaaaggagactcttttgctcaacattaaattgtgcttcctaaccctaaatctgtccagagtaggaacattcatggtaatcgactgtctgtcattgcgtaagaaagcactgatatggggtcagcttctttggacatatggtccatgcctgaaccttactgaaccacttgcagattccaaaacatcttatcctatcctctaccactctcccacatgtgttgtgcagcctgagctgggcgctgccttcctttctcatcccatggggccctgtgggacactgagaacacctttacaatagtttaaacagtcattcatgcccccagtgtctaggaagataacagccagtctcaccccagtctaatcatggaccctgataatattgcttgatttttcctatcaagttacttttcaatccattcagaatctgccccagtggagacccaggagttcctttcctgcactcttctccatcctcccacctttgctgggcttttctatcactcccacctcccccagagtcagggctccattgctgagtgccccatcctggaggattggccccaagatctcctagaacaggataattgcctgtgtttaggcagataggcctaaatctttcagattctttctacaaggcaaataacccctctcttgttaattatgatgctgagaaagcctctgtctctttatttcaccttgccaagacacccacactactttggtgatgaaaagaaaggaatgagagggaaagtttggacctgtcactttggtgacagggaaagtccaggtcactttattctgtaactctccattcactggtcaaataactccatgaggctatcagtggctacagtggaaggacctgatcttgtccatctttgtgtgcacagagcctagcacagggcttggtagagggtatatctagtgaatggagaatacatggagaaacttaactaagttacacaagcatatctgacaggaatgttaccttcaattgtatgttacatatgattagtcacttttcatacactataacctctgatttttcactcaagtttgggctgattatattgtaatgatgttagataatactcaacatgattcagtatgacaaacttttttgagcacctactttatataaaacatgacaaattgcagtgtgatgtaatcaaaaacaaagaagccctataagaccatttctctagaacagatgttcttaatatttttcttactctaaaatatgtggtagatagtatgcaagaaaagccgggtgcggtggctcaggcctgtaatcccagcactttgggaggccaagatgggcggatcatgaagtcaggagttcgagaccagcctgaccaacatggtgaaaccccgtctctactaaaaaaaataatgataatacaaaaattagcccagcatggtggtgcatacctgtaatcccagctactcaggaggctgacgcaggagaatcacttgaacccgggaagcaaaggttgcagtcagctgagagcgcaccactgcactccagcctgggcgacagggcaagactctgtctcaaaaaaaaaaaaaaaaaaaaaaaaaagagatagtatgcaagaagacacctaaattttgagagaaataaccttgaagaaaatcttgttatcagagttttgaaagggagcacattaataggccttttatgaagataaataatgaaatgaggtatttaaagatctcagaaattgtaattttacaagtaaaataaatatagccaatttttcaatagctgaacttcacccaaaaggtaatgtttataagtagagcagaaaaaatgcagataaattttattttattgtttaaaaaataatgtgtagaatatataaattttttatgttactgttaatatacgagtgcttttggaagtttcacttttgtcactgattgtctacttttggtttgataatatgagctgcttttcaaattgttgaatggaaatgttcataactccctgcttgtccgtgcacaatgtaattctaaacctggcttgtttctcatttaaatatatctataaataaactt

SEQ ID NO: 19156 - DNA, 6084 bp, Homo sapiens
  source 1..6084: mol_type = unassigned DNA
atgctgcagagtgctttactttcaacaaggaaacatctgtatggattatttcactataatcctatgatgcttggacttgaatcacttccagatcccacagacacctgggaaattatagagaccattggtaaaggcacctatggcaaagtctacaaggtaactaacaagagagatgggagcctggctgcagtgaaaattctggatccagtcagtgatatggatgaagaaattgaggcagaatacaacattttgcagttccttcctaatcatcccaatgttgtaaagttttatgggatgttttacaaagcggatcactgtgtagggggacagctgtggctggtcctggagctgtgtaatgggggctcagtcactgagcttgtcaaaggtctactcagatgtggccagcggttggatgaagcaatgatctcatacatcttgtacggggccctcttgggccttcagcatttgcacaacaaccgaatcatccaccgtgatgtgaaggggaataacattcttctgacaacagaaggaggagttaagctcgttgactttggtgtttcagctcaactcaccagtacacgtctgcggagaaacacatctgttggcaccccgttctggatggcccctgaggtcattgcctgtgagcagcagtatgactcttcctatgacgctcgctgtgacgtctggtccttggggatcacagctattgaactgggggatggagaccctcccctctttgacatgcatcctgtgaaaacactctttaagattccaagaaatcctccacctactttacttcatccagaaaaatggtgtgaagaattcaaccactttatttcacagtgtcttattaaggattttgaaaggcgaccttccgtcacacatctccttgaccacccatttattaaaggagtacatggaaaagttctgtttctgcaaaaacagctggccaaggttctccaagaccagaagcatcaaaatcctgttgctaaaaccaggcatgagaggatgcataccagaagaccttatcatgtggaagatgctgaaaaatactgccttgaggatgatttggtcaacctagaggttctggatgaggatacaattatccatcagttgcagaaacgttatgcagacttgctaatttacacatatgttggagacatcttaattgccttaaaccccttccagaatctaagcatatactctccacagttttccagactttatcatggggtgaaacgcgcctccaatcccccccacatatttgcatcagcagatgctgcttaccagtgcatggttactctcagcaaagaccagtgcattgtcatcagcggagagagtggctctgggaagacagaaagcgcccacctgattgttcagcatttgactttcttgggaaaggccaataatcagaccttgagagagaaaattctacaagtcaactccctggtggaagcctttgggaactcatgcactgccatcaatgacaactcgagccgttttggaaaatatctggaaatgatgtttacaccaactggagttgtgatgggggcaagaatctctgaatatctcctggaaaaatccagagttataaaacaggcagcgagagagaaaaattttcatatattttactatatttatgctggtcttcatcaccaaaagaagctttctgatttcagacttcctgaggaaaaacctcctaggtacatagctgatgaaactggaagggtgatgcacgacataacttccaaggagtcttacagaagacaattcgaagcaattcagcattgcttcaggattatagggttcacggacaaagaggtgcactcagtgtacagaattttggctgggattttgaatattgggaacattgagttcgcagctatttcctctcaacatcagactgataaaagtgaggtgcccaatgctgaagctttgcaaaatgctgcctctgttctgtgcattagccctgaagagctccaggaggccctcacctcccactgtgtggtcacccggggcgagaccatcatccgtgccaacactgtagacagggctgcggacgttcgagacgccatgtccaaagccctgtatgggaggctcttcagctggattgtgaatcgcattaatacactcctgcagccagacgaaaacatatgtagtgcaggaggtggaatgaatgtggggatcttggatatctttggattcgagaattttcagagaaattcatttgagcagctctgcataaacatcgccaatgagcaaatccagtactatttcaatcagcatgtttttgctcttgagcagatggaatatcagaatgaaggcattgatgctgtacccgtggaatatgaggacaaccgcccgctcttggacatgttcctccagaaacccctgggactgcttgcacttttggatgaggaaagtcggtttccccaagcaactgaccagaccctggttgataaatttgaagataatctacgatgcaaatacttctggaggcccaaaggagtggaactgtgctttggcattcagcattatgctggaaaggtattatatgatgcttctggggttcttgagaaaaatagagacactctccctgccgatgtggttgtggtcctgagaacgtcagaaaacaagcttcttcagcagctcttctcaatccctctgaccaaaacaggtaatttggcccagacaagagctaggataacagtggcctcaagttctttgcctccacatttcagtgctgggaaagccaaggtggacactctggaggtgatacggcatccggaagaaaccaccaacatgaagaggcaaactgtggcttcttacttccggtattctctgatggacctgctctccaaaatggtggttggacagccccactttgtgcgctgcattaaacccaatgatgaccgagaggccctgcagttctctcgagagagggtgctggcccagctccgctccacagggattctggagacagtcagcatccgccgccagggctattcccaccgcatcctttttgaagaatttgtgaaaaggtattattacttggcattcacagcacatcaaacacctcttgctagcaaagagagctgtgtggctatcttggaaaagtccagattagatcactgggtactgggaaaaacaaaggtttttctcaaatattaccatgttgagcaattaaatttgctgcttcgagaagtcataggcagagtggttgtgctgcaggcatataccaaggggtggcttggagccaggagatacaaaagggtcagagagaagagagagaagggagccattgccatccagtcagcctggagaggatatgatgctcggaggaaatttaagaaaataagcaacagaaggaatgagtctgctgctcataatcaagcaggggacacttcaaaccaaagcagtgggccacattcccccgtcgcagcaggtacgaggggaagtgccgaggttcaagactgcagcgagcctggtgaccataaagttctcaggggctctgtacatcgtaggagccattcacaagcagaatccaacaatggccgtacacagacttcaagcaactctcctgctgtcacagagaaaaatgggcattcacaagcccagagttctccaaaagggtgcgatatcttcgcaggacatgcaaacaagcactcggtttctgggactgatttgctgtcttctcggatatgccatcctgctccagatcagcaaggattgagtctctggggagcccctcaaaagcctggttcagaaaatggtcttgcacagaagcatcgaacacctcgccgacgatgtcagcagcccaaaatgctgagtagccctgaggacaccatgtactataaccagttaaatggaactctagaatatcaagggagcaagaggaagccaagaaaacttggccaaatcaaagtacttgatggggaagatgaatattacaaatctctgtcaccagtggactgtatccctgaggagaacaactcagcccacccttcctttttttcttcatcctcaaaaggagactcttttgctcaacattaaattgtgcttcctaaccctaaatctgtccagagtaggaacattcatggtaatcgactgtctgtcattgcgtaagaaagcactgatatggggtcagcttctttggacatatggtccatgcctgaaccttactgaaccacttgcagattccaaaacatcttatcctatcctctaccactctcccacatgtgttgtgcagcctgagctgggcgctgccttcctttctcatcccatggggccctgtgggacactgagaacacctttacaatagtttaaacagtcattcatgcccccagtgtctaggaagataacagccagtctcaccccagtctaatcatggaccctgataatattgcttgatttttcctatcaagttacttttcaatccattcagaatctgccccagtggagacccaggagttcctttcctgcactcttctccatcctcccacctttgctgggcttttctatcactcccacctcccccagagtcagggctccattgctgagtgccccatcctggaggattggccccaagatctcctagaacaggataattgcctgtgtttaggcagataggcctaaatctttcagattctttctacaaggcaaataacccctctcttgttaattatgatgctgagaaagcctctgtctctttatttcaccttgccaagacacccacactactttggtgatgaaaagaaaggaatgagagggaaagtttggacctgtcactttggtgacagggaaagtccaggtcactttattctgtaactctccattcactggtcaaataactccatgaggctatcagtggctacagtggaaggacctgatcttgtccatctttgtgtgcacagagcctagcacagggcttggtagagggtatatctagtgaatggagaatacatggagaaacttaactaagttacacaagcatatctgacaggaatgttaccttcaattgtatgttacatatgattagtcacttttcatacactataacctctgatttttcactcaagtttgggctgattatattgtaatgatgttagataatactcaacatgattcagtatgacaaacttttttgagcacctactttatataaaacatgacaaattgcagtgtgatgtaatcaaaaacaaagaagccctataagaccatttctctagaacagatgttcttaatatttttcttactctaaaatatgtggtagatagtatgcaagaaaagccgggtgcggtggctcaggcctgtaatcccagcactttgggaggccaagatgggcggatcatgaagtcaggagttcgagaccagcctgaccaacatggtgaaaccccgtctctactaaaaaaaataatgataatacaaaaattagcccagcatggtggtgcatacctgtaatcccagctactcaggaggctgacgcaggagaatcacttgaacccgggaagcaaaggttgcagtcagctgagagcgcaccactgcactccagcctgggcgacagggcaagactctgtctcaaaaaaaaaaaaaaaaaaaaaaaaaagagatagtatgcaagaagacacctaaattttgagagaaataaccttgaagaaaatcttgttatcagagttttgaaagggagcacattaataggccttttatgaagataaataatgaaatgaggtatttaaagatctcagaaattgtaattttacaagtaaaataaatatagccaatttttcaatagctgaacttcacccaaaaggtaatgtttataagtagagcagaaaaaatgcagataaattttattttattgtttaaaaaataatgtgtagaatatataaattttttatgttactgttaatatacgagtgcttttggaagtttcacttttgtcactgattgtctacttttggtttgataatatgagctgcttttcaaattgttgaatggaaatgttcataactccctgcttgtccgtgcacaatgtaattctaaacctggcttgtttctcatttaaatatatctataaataaactt

SEQ ID NO: 19157 - DNA, 5529 bp, Homo sapiens
  source 1..5529: mol_type = unassigned DNA
ctagatcgaaagtcctttggtaatgatgtgtcatacattctagtcatcaaagacaccattttctgggcctgaagtgttctgctggtttttggaggaatgagaatccaatctctcataagccggattcagaaaataggtcatcgatgaaacatctgtatggattatttcactataatcctatgatgcttggacttgaatcacttccagatcccacagacacctgggaaattatagagaccattggtaaaggcacctatggcaaagtctacaaggtaactaacaagagagatgggagcctggctgcagtgaaaattctggatccagtcagtgatatggatgaagaaattgaggcagaatacaacattttgcagttccttcctaatcatcccaatgttgtaaagttttatgggatgttttacaaagcggatcactgtgtagggggacagctgtggctggtcctggagctgtgtaatgggggctcagtcactgagcttgtcaaaggtctactcagatgtggccagcggttggatgaagcaatgatctcatacatcttgtacggggccctcttgggccttcagcatttgcacaacaaccgaatcatccaccgtgatgtgaaggggaataacattcttctgacaacagaaggaggagttaagctcgttgactttggtgtttcagctcaactcaccagtacacgtctgcggagaaacacatctgttggcaccccgttctggatggcccctgaggtcattgcctgtgagcagcagtatgactcttcctatgacgctcgctgtgacgtctggtccttggggatcacagctattgaactgggggatggagaccctcccctctttgacatgcatcctgtgaaaacactctttaagattccaagaaatcctccacctactttacttcatccagaaaaatggtgtgaagaattcaaccactttatttcacagtgtcttattaaggattttgaaaggcgaccttccgtcacacatctccttgaccacccatttattaaaggagtacatggaaaagttctgtttctgcaaaaacagctggccaaggttctccaagaccagaagcatcaaaatcctgttgctaaaaccaggcatgagaggatgcataccagaagaccttatcatgtggaagatgctgaaaaatactgccttgaggatgatttggtcaacctagaggttctggatgaggatacaattatccatcagttgcagaaacgttatgcagacttgctaatttacacatatgttggagacatcttaattgccttaaaccccttccagaatctaagcatatactctccacagttttccagactttatcatggggtgaaacgcgcctccaatcccccccacatatttgcatcagcagatgctgcttaccagtgcatggttactctcagcaaagaccagtgcattgtcatcagcggagagagtggctctgggaagacagaaagcgcccacctgattgttcagcatttgactttcttgggaaaggccaataatcagaccttgagagagaaaattctacaagtcaactccctggtggaagcctttgggaactcatgcactgccatcaatgacaactcgagccgttttggaaaatatctggaaatgatgtttacaccaactggagttgtgatgggggcaagaatctctgaatatctcctggaaaaatccagagttataaaacaggcagcgagagagaaaaattttcatatattttactatatttatgctggtcttcatcaccaaaagaagctttctgatttcagacttcctgaggaaaaacctcctaggtacatagctgatgaaactggaagggtgatgcacgacataacttccaaggagtcttacagaagacaattcgaagcaattcagcattgcttcaggattatagggttcacggacaaagaggtgcactcagtgtacagaattttggctgggattttgaatattgggaacattgagttcgcagctatttcctctcaacatcagactgataaaagtgaggtgcccaatgctgaagctttgcaaaatgctgcctctgttctgtgcattagccctgaagagctccaggaggccctcacctcccactgtgtggtcacccggggcgagaccatcatccgtgccaacactgtagacagggctgcggacgttcgagacgccatgtccaaagccctgtatgggaggctcttcagctggattgtgaatcgcattaatacactcctgcagccagacgaaaacatatgtagtgcaggaggtggaatgaatgtggggatcttggatatctttggattcgagaattttcagagaaattcatttgagcagctctgcataaacatcgccaatgagcaaatccagtactatttcaatcagcatgtttttgctcttgagcagatggaatatcagaatgaaggcattgatgctgtacccgtggaatatgaggacaaccgcccgctcttggacatgttcctccagaaacccctgggactgcttgcacttttggatgaggaaagtcggtttccccaagcaactgaccagaccctggttgataaatttgaagataatctacgatgcaaatacttctggaggcccaaaggagtggaactgtgctttggcattcagcattatgctggaaaggtattatatgatgcttctggggttcttgagaaaaatagagacactctccctgccgatgtggttgtggtcctgagaacgtcagaaaacaagcttcttcagcagctcttctcaatccctctgaccaaaacaggtaatttggcccagacaagagctaggataacagtggcctcaagttctttgcctccacatttcagtgctgggaaagccaaggtggacactctggaggtgatacggcatccggaagaaaccaccaacatgaagaggcaaactgtggcttcttacttccggtattctctgatggacctgctctccaaaatggtggttggacagccccactttgtgcgctgcattaaacccaatgatgaccgagaggccctgcagttctctcgagagagggtgctggcccagctccgctccacagggattctggagacagtcagcatccgccgccagggctattcccaccgcatcctttttgaagaatttgtgaaaaggtattattacttggcattcacagcacatcaaacacctcttgctagcaaagagagctgtgtggctatcttggaaaagtccagattagatcactgggtactgggaaaaacaaaggtttttctcaaatattaccatgttgagcaattaaatttgctgcttcgagaagtcataggcagagtggttgtgctgcaggcatataccaaggggtggcttggagccaggagatacaaaagggtcagagagaagagagagaagggagccattgccatccagtcagcctggagaggatatgatgctcggaggaaatttaagaaaataagcaacagaaggaatgagtctgctgctcataatcaagcaggggacacttcaaaccaaagcagtgggccacattcccccgtcgcagcaggtacgaggggaagtgccgaggttcaagactgcagcgagcctggtgaccataaagttctcaggggctctgtacatcgtaggagccattcacaagcagaatccaacaatggccgtacacagacttcaagcaactctcctgctgtcacagagaaaaatgggcattcacaagcccagagttctccaaaagggtgcgatatcttcgcaggacatgcaaacaagcactcggtttctgggactgatttgctgtcttctcggatatgccatcctgctccagatcagcaaggattgagtctctggggagcccctcaaaagcctggttcagaaaatggtcttgcacagaagcatcgaacacctcgccgacgatgtcagcagcccaaaatgctgagtagccctgaggacaccatgtactataaccagttaaatggaactctagaatatcaagggagcaagaggaagccaagaaaacttggccaaatcaaagtacttgatggggaagatgaatattacaaatctctgtcaccagtggactgtatccctgaggagaacaactcagcccacccttcctttttttcttcatcctcaaaaggagactcttttgctcaacattaaattgtgcttcctaaccctaaatctgtccagagtaggaacattcatggtaatcgactgtctgtcattgcgtaagaaagcactgatatggggtcagcttctttggacatatggtccatgcctgaaccttactgaaccacttgcagattccaaaacatcttatcctatcctctaccactctcccacatgtgttgtgcagcctgagctgggcgctgccttcctttctcatcccatggggccctgtgggacactgagaacacctttacaatagtttaaacagtcattcatgcccccagtgtctaggaagataacagccagtctcaccccagtctaatcatggaccctgataatattgcttgatttttcctatcaagttacttttcaatccattcagaatctgccccagtggagacccaggagttcctttcctgcactcttctccatcctcccacctttgctgggcttttctatcactcccacctcccccagagtcagggctccattgctgagtgccccatcctggaggattggccccaagatctcctagaacaggataattgcctgtgtttaggcagataggcctaaatctttcagattctttctacaaggcaaataacccctctcttgttaattatgatgctgagaaagcctctgtctctttatttcaccttgccaagacacccacactactttggtgatgaaaagaaaggaatgagagggaaagtttggacctgtcactttggtgacagggaaagtccaggtcactttattctgtaactctccattcactggtcaaataactccatgaggctatcagtggctacagtggaaggacctgatcttgtccatctttgtgtgcacagagcctagcacagggcttggtagagggtatatctagtgaatggagaatacatggagaaacttaactaagttacacaagcatatctgacaggaatgttaccttcaattgtatgttacatatgattagtcacttttcatacactataacctctgatttttcactcaagtttgggctgattatattgtaatgatgttagataatactcaacatgattcagtatgacaaacttttttgagcacctactttatataaaacatgacaaattgcagtgtgatgtaatcaaaaacaaagaagccctataagaccatttctctagaacagatgttcttaatatttttcttactctaaaatatgtggtagatagtatgcaagaaaagccgggtgcggtggctcaggcctgtaatcccagcactttgggaggccaagatgggcggatcatgaagtcaggagttcgagaccagcctgaccaacatggtgaaaccccgtctctactaaaaaaaa

SEQ ID NO: 19158 - DNA, 5448 bp, Homo sapiens
  source 1..5448: mol_type = unassigned DNA
ctagatcgaaagtcctttggtaatgatgtgtcatacattctagtcatcaaagacaccattttctgggcctgaagtgttctgctggtttttggaggaatgagaatccaatctctcataagccggattcagaaaataggtcatcgatgaaacatctgtatggattatttcactataatcctatgatgcttggacttgaatcacttccagatcccacagacacctgggaaattatagagaccattggtaaaggcacctatggcaaagtctacaaggtaactaacaagagagatgggagcctggctgcagtgaaaattctggatccagtcagtgatatggatgaagaaattgaggcagaatacaacattttgcagttccttcctaatcatcccaatgttgtaaagttttatgggatgttttacaaagcggatcactgtgtagggggacagctgtggctggtcctggagctgtgtaatgggggctcagtcactgagcttgtcaaaggtctactcagatgtggccagcggttggatgaagcaatgatctcatacatcttgtacggggccctcttgggccttcagcatttgcacaacaaccgaatcatccaccgtgatgtgaaggggaataacattcttctgacaacagaaggaggagttaagctcgttgactttggtgtttcagctcaactcaccagtacacgtctgcggagaaacacatctgttggcaccccgttctggatggcccctgaggtcattgcctgtgagcagcagtatgactcttcctatgacgctcgctgtgacgtctggtccttggggatcacagctattgaactgggggatggagaccctcccctctttgacatgcatcctgtgaaaacactctttaagattccaagaaatcctccacctactttacttcatccagaaaaatggtgtgaagaattcaaccactttatttcacagtgtcttattaaggattttgaaaggcgaccttccgtcacacatctccttgaccacccatttattaaaggagtacatggaaaagttctgtttctgcaaaaacagctggccaaggttctccaagaccagaagcatcaaaatcctgttgctaaaaccaggcatgagaggatgcataccagaagaccttatcatgtggaagatgctgaaaaatactgccttgaggatgatttggtcaacctagaggttctggatgaggatacaattatccatcagttgcagaaacgttatgcagacttgctaatttacacatatgttggagacatcttaattgccttaaaccccttccagaatctaagcatatactctccacagttttccagactttatcatggggtgaaacgcgcctccaatcccccccacatatttgcatcagcagatgctgcttaccagtgcatggttactctcagcaaagaccagtgcattgtcatcagcggagagagtggctctgggaagacagaaagcgcccacctgattgttcagcatttgactttcttgggaaaggccaataatcagaccttgagagagaaaattctacaagtcaactccctggtggaagcctttgggaactcatgcactgccatcaatgacaactcgagccgttttggaaaatatctggaaatgatgtttacaccaactggagttgtgatgggggcaagaatctctgaatatctcctggaaaaatccagagttataaaacaggcagcgagagagaaaaattttcatatattttactatatttatgctggtcttcatcaccaaaagaagctttctgatttcagacttcctgaggaaaaacctcctaggtacatagctgatgaaactggaagggtgatgcacgacataacttccaaggagtcttacagaagacaattcgaagcaattcagcattgcttcaggattatagggttcacggacaaagaggtgcactcagtgtacagaattttggctgggattttgaatattgggaacattgagttcgcagctatttcctctcaacatcagactgataaaagtgaggtgcccaatgctgaagctttgcaaaatgctgcctctgttctgtgcattagccctgaagagctccaggaggccctcacctcccactgtgtggtcacccggggcgagaccatcatccgtgccaacactgtagacagggctgcggacgttcgagacgccatgtccaaagccctgtatgggaggctcttcagctggattgtgaatcgcattaatacactcctgcagccagacgaaaacatatgtagtgcaggaggtggaatgaatgtggggatcttggatatctttggattcgagaattttcagagaaattcatttgagcagctctgcataaacatcgccaatgagcaaatccagtactatttcaatcagcatgtttttgctcttgagcagatggaatatcagaatgaaggcattgatgctgtacccgtggaatatgaggacaaccgcccgctcttggacatgttcctccagaaacccctgggactgcttgcacttttggatgaggaaagtcggtttccccaagcaactgaccagaccctggttgataaatttgaagataatctacgatgcaaatacttctggaggcccaaaggagtggaactgtgctttggcattcagcattatgctggaaaggtattatatgatgcttctggggttcttgagaaaaatagagacactctccctgccgatgtggttgtggtcctgagaacgtcagaaaacaagcttcttcagcagctcttctcaatccctctgaccaaaacaggtaatttggcccagacaagagctaggataacagtggcctcaagttctttgcctccacatttcagtgctgggaaagccaaggtggacactctggaggtgatacggcatccggaagaaaccaccaacatgaagaggcaaactgtggcttcttacttccggtattctctgatggacctgctctccaaaatggtggttggacagccccactttgtgcgctgcattaaacccaatgatgaccgagaggccctgcagttctctcgagagagggtgctggcccagctccgctccacagggattctggagacagtcagcatccgccgccagggctattcccaccgcatcctttttgaagaatttgtgaaaaggtattattacttggcattcacagcacatcaaacacctcttgctagcaaagagagctgtgtggctatcttggaaaagtccagattagatcactgggtactgggaaaaacaaaggtttttctcaaatattaccatgttgagcaattaaatttgctgcttcgagaagtcataggcagagtggttgtgctgcaggcatataccaaggggtggcttggagccaggagatacaaaagggtcagagagaagagagagaagggagccattgccatccagtcaggggacacttcaaaccaaagcagtgggccacattcccccgtcgcagcaggtacgaggggaagtgccgaggttcaagactgcagcgagcctggtgaccataaagttctcaggggctctgtacatcgtaggagccattcacaagcagaatccaacaatggccgtacacagacttcaagcaactctcctgctgtcacagagaaaaatgggcattcacaagcccagagttctccaaaagggtgcgatatcttcgcaggacatgcaaacaagcactcggtttctgggactgatttgctgtcttctcggatatgccatcctgctccagatcagcaaggattgagtctctggggagcccctcaaaagcctggttcagaaaatggtcttgcacagaagcatcgaacacctcgccgacgatgtcagcagcccaaaatgctgagtagccctgaggacaccatgtactataaccagttaaatggaactctagaatatcaagggagcaagaggaagccaagaaaacttggccaaatcaaagtacttgatggggaagatgaatattacaaatctctgtcaccagtggactgtatccctgaggagaacaactcagcccacccttcctttttttcttcatcctcaaaaggagactcttttgctcaacattaaattgtgcttcctaaccctaaatctgtccagagtaggaacattcatggtaatcgactgtctgtcattgcgtaagaaagcactgatatggggtcagcttctttggacatatggtccatgcctgaaccttactgaaccacttgcagattccaaaacatcttatcctatcctctaccactctcccacatgtgttgtgcagcctgagctgggcgctgccttcctttctcatcccatggggccctgtgggacactgagaacacctttacaatagtttaaacagtcattcatgcccccagtgtctaggaagataacagccagtctcaccccagtctaatcatggaccctgataatattgcttgatttttcctatcaagttacttttcaatccattcagaatctgccccagtggagacccaggagttcctttcctgcactcttctccatcctcccacctttgctgggcttttctatcactcccacctcccccagagtcagggctccattgctgagtgccccatcctggaggattggccccaagatctcctagaacaggataattgcctgtgtttaggcagataggcctaaatctttcagattctttctacaaggcaaataacccctctcttgttaattatgatgctgagaaagcctctgtctctttatttcaccttgccaagacacccacactactttggtgatgaaaagaaaggaatgagagggaaagtttggacctgtcactttggtgacagggaaagtccaggtcactttattctgtaactctccattcactggtcaaataactccatgaggctatcagtggctacagtggaaggacctgatcttgtccatctttgtgtgcacagagcctagcacagggcttggtagagggtatatctagtgaatggagaatacatggagaaacttaactaagttacacaagcatatctgacaggaatgttaccttcaattgtatgttacatatgattagtcacttttcatacactataacctctgatttttcactcaagtttgggctgattatattgtaatgatgttagataatactcaacatgattcagtatgacaaacttttttgagcacctactttatataaaacatgacaaattgcagtgtgatgtaatcaaaaacaaagaagccctataagaccatttctctagaacagatgttcttaatatttttcttactctaaaatatgtggtagatagtatgcaagaaaagccgggtgcggtggctcaggcctgtaatcccagcactttgggaggccaagatgggcggatcatgaagtcaggagttcgagaccagcctgaccaacatggtgaaaccccgtctctactaaaaaaaa

SEQ ID NO: 19159 - DNA, 3863 bp, Homo sapiens
  source 1..3863: mol_type = unassigned DNA
gcgcgaccgaagcggataagggacgcggcggcggttggctgtgtctgttgagagagtacaggacagcccggactgcgagaggcggcggcggaggcagtagttgcaccggcagaggcggccgctggcagcggttgaggcggcggtccaacgcgtgctctctgggcggggtgcggcgggggatgtgcctgctcaggccgggcggagtctctctgacagggcgggggatgcgccgcggccgctcgcccggaccctgaggctgctgggcccaccctcccggaaccgtccgaccctcggtggcctcggcctcttctgccatctccggtcctaccctggggcggagggtggaaggcagcttccgtcgaagaggagggggctgcggtggccaccgcggcggagcccgagttattttaccaagaaaatggtttgcacgactttgaacatatactatccatgctgatgggacaggatccaatatgaatataaatgatggaggaagacgacgctttgaagataatgaacatacattacggatatatcctggggctatttcagaagggacaatctactgtccgattcctgccagaaaaaactccacagctgctgaggtgattgagtctcttataaacaaacttcatcttgacaaaacaaaatgttatgttctagcagaggtaaaggaatttggtggagaagaatggattctcaatccaacagattgtccagttcagcgaatgatgctgtggccccgaatggctctggaaaatcgcttaagtggagaggactaccgcttccttctgagagagaaaaaccttgatggatcaatccattatggtagcctgcagtcatggctacgggtaacagaagaacgtcgcaggatgatggaacggggttttcttccacagcctcaacagaaagactttgatgatttatgtagtttacctgatttgaatgagaaaactctcttagaaaacctacgaaatcgctttaagcatgaaaaaatttatacctatgttggcagtattctaatagttattaacccattcaagtttcttcctatttataaccccaaatatgtcaaaatgtatgataaccaccaactgggaaaacttgagccccacatttatgctgtggctgatgtagcttatcatgccatgcttcagcgcaaaaagaatcagtgcatcgtgatttcaggagagagtggttctgggaagactcaaagcacaaactttcttattcaccaccttactgctctcagtcagaaaggatttgccagtggagtagaacagattattcttggagctggaccagtacttgaggcctttggaaatgcaaagacagctcataataacaattcaagtcgttttgggaagtttattcaagtaaattaccaggaaacaggcactgtacttggtgcctatgttgaaaaatatctactggagaagtccagactcgtttatcaggagcataatgaacggaactatcatgtattctattacctcctggcaggagcaagtgaagatgagagatcagcattccatcttaagcaaccagaggaatatcattatctcaatcaggattgcttcacggtggaaggagaagatttgagacatgactttgagcgcctacaacttgccatggaaatggtaggatttcttcccaagacacgaagacagattttctctcttctctcagccatactacatttgggtaatatctgttacaaaaagaagacataccgggatgactccattgatatctgtaatcctgaagttctgcctattgtctcagaattattagaggttaaagaagagatgctatttgaagcattagttacaaggaagacggtgacagtgggagaaaagcttattttgccatacaagttggcagaggctgtgacagtgaggaactccatggctaagtctctgtatagtgccctgtttgactggatagtttttcgaattaatcatgcacttctgaatagtaaagatttagagcataataccaagacattgtctattggtgttcttgatatttttgggtttgaagattatgaaaataacagctttgaacagttctgtattaattttgctaatgaacgtttacagcactactttaatcagcatatctttaaattggaacaagaggaatatagaactgaaggtatcagctggcacaacatagattacattgataatacctgctgcataaatcttattagcaaaaaaccaacaggactgcttcatcttttggatgaagaaagcaactttccacaggctacaaatcaaacattgctagacaagtttaagcatcaacatgaagataattcttacatcgaatttccagccgtgatggagcctgctttcattataaaacattatgctggaaaagtaaaatatggggtaaaggatttccgggaaaaaaatacagatcatatgcgcccagacattgtagctcttctgagaagcagcaagaatgcatttatctctgggatgattggaattgatcctgtagctgttttccgatgggcaattctccgagcttttttcagagccatggttgctttcagggaagctgggaaaagaaacattcacagaaaaactggacatgatgatacagcgccatgtgcaattttgaaaagtatggatagttttagctttctccaacacccagtccaccagaggagcttagagattctgcagagatgcaaggaagagaagtacagtataacccggaaaaatcccagaacacctctttctgatctccagggcatgaatgctctaaatgaaaaaaaccaacatgatacatttgatattgcctggaatggcagaactgggattcgccagagcagactatcaagtggcacctccttgcttgataaagatggaatatttgctaattcaactagcagcaaactcctggagagagcccatggaattctcacgagaaacaaaaatttcaaatccaagcctgcccttccaaagcacttgctagaagtaaattctttaaagcacctgacaagactgacactacaagatcgcattaccaagtctcttcttcatttacacaagaagaaaaaacctcccagcatcagtgcccagtttcaggcatcattaagcaagctaatggaaacacttggtcaagcagaaccatattttgtaaaatgcattcgctctaatgctgaaaagctgcccttaaggttcagtgatgtcttggtacttagacagcttcgatacaccgggatgctggaaacagttcgaattcgccaatcaggatacagctccaaatattctttccaggattttgtgagccacttccatgtacttcttccccgaaatattattccatccaaatttaacattcaggatttcttcaggaaaataaatcttaatccagataattatcaagttggaaaaaccatggtctttctaaaggagcaggaacgacagcacttacaagatctgcttcaccaagaggtgctccgcagaatcatattgttgcagcgatggttcagggtcttgctgtgtaggcagcatttcctccatctgagacaagcatctgttattatccagagattctggaggaattacctaaatcagaagcaagtcagagatgcagctgtgcagaaggatgcttttgttatggctagtgcagctgctcttctccaagcttcctggcgtgctcacttagagaggcagcggtacttggagttacgggctgcagccatcgttatccagcagaaatggagagattactataggcgcaggcacatggctgctatttgcatacaagcaagatggaaagcctacagggaaagtaaaaggtaccaagaacaaaggaaaaattatccttttgcaatcaacatgtag

SEQ ID NO: 19160 - DNA, 12409 bp, Homo sapiens
  source 1..12409: mol_type = unassigned DNA
gcgcgaccgaagcggataagggacgcggcggcggttggctgtgtctgttgagagagtacaggacagcccggactgcgagaggcggcggcggaggcagtagttgcaccggcagaggcggccgctggcagcggttgaggcggcggtccaacgcgtgctctctgggcggggtgcggcgggggatgtgcctgctcaggccgggcggagtctctctgacagggcgggggatgcgccgcggccgctcgcccggaccctgaggctgctgggcccaccctcccggaaccgtccgaccctcggtggcctcggcctcttctgccatctccggtcctaccctggggcggagggtggaaggcagcttccgtcgaagaggagggggctgcggtggccaccgcggcggagcccgagttattttaccaagaaaatggtttgcacgactttgaacatatactatccatgctgatgggacaggatccaatatgaatataaatgatggaggaagacgacgctttgaagataatgaacatacattacggatatatcctggggctatttcagaagggacaatctactgtccgattcctgccagaaaaaactccacagctgctgaggtgattgagtctcttataaacaaacttcatcttgacaaaacaaaatgttatgttctagcagaggtaaaggaatttggtggagaagaatggattctcaatccaacagattgtccagttcagcgaatgatgctgtggccccgaatggctctggaaaatcgcttaagtggagaggactaccgcttccttctgagagagaaaaaccttgatggatcaatccattatggtagcctgcagtcatggctacgggtaacagaagaacgtcgcaggatgatggaacggggttttcttccacagcctcaacagaaagactttgatgatttatgtagtttacctgatttgaatgagaaaactctcttagaaaacctacgaaatcgctttaagcatgaaaaaatttatacctatgttggcagtattctaatagttattaacccattcaagtttcttcctatttataaccccaaatatgtcaaaatgtatgataaccaccaactgggaaaacttgagccccacatttatgctgtggctgatgtagcttatcatgccatgcttcagcgcaaaaagaatcagtgcatcgtgatttcaggagagagtggttctgggaagactcaaagcacaaactttcttattcaccaccttactgctctcagtcagaaaggatttgccagtggagtagaacagattattcttggagctggaccagtacttgaggcctttggaaatgcaaagacagctcataataacaattcaagtcgttttgggaagtttattcaagtaaattaccaggaaacaggcactgtacttggtgcctatgttgaaaaatatctactggagaagtccagactcgtttatcaggagcataatgaacggaactatcatgtattctattacctcctggcaggagcaagtgaagatgagagatcagcattccatcttaagcaaccagaggaatatcattatctcaatcagataacaaagaaacccctcagacagagctgggatgattattgctatgactctgagccggattgcttcacggtggaaggagaagatttgagacatgactttgagcgcctacaacttgccatggaaatggtaggatttcttcccaagacacgaagacagattttctctcttctctcagccatactacatttgggtaatatctgttacaaaaagaagacataccgggatgactccattgatatctgtaatcctgaagttctgcctattgtctcagaattattagaggttaaagaagagatgctatttgaagcattagttacaaggaagacggtgacagtgggagaaaagcttattttgccatacaagttggcagaggctgtgacagtgaggaactccatggctaagtctctgtatagtgccctgtttgactggatagtttttcgaattaatcatgcacttctgaatagtaaagatttagagcataataccaagacattgtctattggtgttcttgatatttttgggtttgaagattatgaaaataacagctttgaacagttctgtattaattttgctaatgaacgtttacagcactactttaatcagcatatctttaaattggaacaagaggaatatagaactgaaggtatcagctggcacaacatagattacattgataatacctgctgcataaatcttattagcaaaaaaccaacaggactgcttcatcttttggatgaagaaagcaactttccacaggctacaaatcaaacattgctagacaagtttaagcatcaacatgaagataattcttacatcgaatttccagccgtgatggagcctgctttcattataaaacattatgctggaaaagtaaaatatggggtaaaggatttccgggaaaaaaatacagatcatatgcgcccagacattgtagctcttctgagaagcagcaagaatgcatttatctctgggatgattggaattgatcctgtagctgttttccgatgggcaattctccgagcttttttcagagccatggttgctttcagggaagctgggaaaagaaacattcacagaaaaactggacatgatgatacagcgccatgtgcaattttgaaaagtatggatagttttagctttctccaacacccagtccaccagaggagcttagagattctgcagagatgcaaggaagagaagtacagtataacccggaaaaatcccagaacacctctttctgatctccagggcatgaatgctctaaatgaaaaaaaccaacatgatacatttgatattgcctggaatggcagaactgggattcgccagagcagactatcaagtggcacctccttgcttgataaagatggaatatttgctaattcaactagcagcaaactcctggagagagcccatggaattctcacgagaaacaaaaatttcaaatccaagcctgcccttccaaagcacttgctagaagtaaattctttaaagcacctgacaagactgacactacaagatcgcattaccaagtctcttcttcatttacacaagaagaaaaaacctcccagcatcagtgcccagtttcaggcatcattaagcaagctaatggaaacacttggtcaagcagaaccatattttgtaaaatgcattcgctctaatgctgaaaagctgcccttaaggttcagtgatgtcttggtacttagacagcttcgatacaccgggatgctggaaacagttcgaattcgccaatcaggatacagctccaaatattctttccaggattttgtgagccacttccatgtacttcttccccgaaatattattccatccaaatttaacattcaggatttcttcaggaaaataaatcttaatccagataattatcaagttggaaaaaccatggtctttctaaaggagcaggaacgacagcacttacaagatctgcttcaccaagaggtgctccgcagaatcatattgttgcagcgatggttcagggtcttgctgtgtaggcagcatttcctccatctgagacaagcatctgttattatccagagattctggaggaattacctaaatcagaagcaagtcagagatgcagctgtgcagaaggatgcttttgttatggctagtgcagctgctcttctccaagcttcctggcgtgctcacttagagaggcagcggtacttggagttacgggctgcagccatcgttatccagcagaaatggagagattactataggcgcaggcacatggctgctatttgcatacaagcaagatggaaagcctacagggaaagtaaaaggtaccaagaacaaaggaaaaaaattatccttttgcaatcaacatgtagaggattcagagcaagacaaagatttaaagctttaaaagaacaaaggctaagagaaacaaagccagaagttggattggtgaatattaagggatatggatctctggaaattcagggttcagacccttcaggatgggaggattgttcttttgacaacagaataaaagccatagaggaatgtaaatctgtaatagagagtaatcgaattagccgtgaaagttcagtggactgcttgaaggagtcaccaaacaagcagcaggagagagcccaaagccagagtggtgtggacttgcaggaagatgtgcttgtaagagagagacccagatccttggaggatctccatcagaaaaaagtaggccgggctaagagagaaagtaggagaatgagagaactagagcaagctatatttagcttagaattgctgaaagttcgttctcttggtggtatttctccttcagaggatcgcagatggtctacagaattggtgcctgaaggccttcagtctccacggggtacacctgatagtgagagctctcaaggaagcttggaacttctgagctatgaggaaagccaaaagagcaaactagagtctgtcatttcagatgaaggagacttgcagtttccatcacctaagatatccagcagtccaaaatttgattcacgggacaatgccctcagtgcctcaaatgagactagcagtgcagagcatttgaaggatggaactatgaaggaaatggtggtctgcagttctgagtctattacctgtaaaccacagctgaaagactccttcatttcaaatagtctacctacttttttttatatcccccaacaagacccactgaaaacaaattcccaactagacacaagtatccaaagaaacaaactattggaaaatgaagacacagcgggggaagctcttactttggatatcaacagggaaactagaaggtatcactgctcaggaaaagatcagattgttccttctttgaatacagagtcttctaatcctgtgcttaagaagttagaaaagctaaacactgagaaggaagaaaggcaaaaacagttgcagcaacagaatgaaaaagagatgatggaacagattcgccagcaaacagatattttagagaaggagcgcaaagccttcaagacaattgaaaagccaagaattggagagtgtttggtggcaccatcttcctatcagtcaaagcaaagagtagagaggccatcctctctcctcagcttaaatacctcaaataagggagaacttaatgtactggggtccctatcattaaaagatgcagctcttgcccaaaaagacagttcctctgctcacttacccccaaaggaccgacctgtcaccgtgttctttgaaagaaaaggaagtccatgccaatctagtactgtcaaggaattatccaagacagacagaatgggcacccagctgaatgtagcctgtaaactctcaaataatcgcatttcaaaaagagaacactttaggccaactcagtcttacagccacaattctgatgacctttccagagagggaaatgctaggcccattttcttcactccaaaggacaatatgagtattccccttgtcagcaaagaagccttaaacagtaaaaatcctcaactccataaagaagatgaaccagcatggaaacctgtgaagttagctgggccaggccaaagagagacatcacagcgattttcgtcagttgatgaacaagcaaaacttcataagactatgtctcaaggagagattaccaagttggcagtgagacagaaggcttcagattcagatataagacctcagagagctaagatgagattctgggccaaagggaaacaaggggagaagaagactaccagagtgaaacctactacccagtcagaggtttcgccactctttgcaggcacagatgtgattccagctcatcagtttccagatgaattagctgcatatcacccaacacctcctttgagcccagaactgcccggcagttgccggaaggaattcaaagagaacaaagaaccttctccaaaggctaagcgcaagcgaagtgtgaagattagcaacgtggctttggattctatgcattggcaaaatgactctgtccagatcatagcaagtgtcagtgatttaaaaagcatggatgaatttcttctgaaaaaggtgaatgacctagataatgaagacagcaagaaggatacactagtggatgttgtatttaaaaaagccctgaaggaatttcggcagaatatcttcagcttttattcatctgcattggcgatggatgatgggaaaagcatacggtataaagacctctatgcactatttgaacagattctggaaaagacgatgaggcttgagcagcgtgattcactgggtgaatctccagtgagagtttgggtcaacacttttaaagtgtttttagatgaatatatgaatgaattcaagacttcagattgcacagccacaaaggtgccaaaaacagaaagaaagaaaagaaggaaaaaggaaactgatttggtggaagaacacaatggtcacatctttaaagccacccaatatagcatccctacatactgtgaatactgttcttctttgatatggataatggaccgagcctctgtttgcaaattatgcaagtatgcttgccataagaagtgctgtctgaaaaccacagccaagtgctctaaaaagtatgatccagagctgtcatctcgacaatttggggttgaactgtcccgtttgaccagtgaagaccgaactgttcctttagtagtggaaaagctcataaactacattgaaatgcatggactgtatacagaaggtatttatcgaaagtctggttcgactaataaaatcaaggagcttcggcagggtctagatacagatgctgagagtgtaaatctagatgactataacatacacgtcattgcaagtgtattcaaacaatggcttcgagatttgcccaatcctctcatgacctttgaactctatgaggaatttcttcgagctatgggccttcaggagaggaaggagacaatccgtggtgtatactctgtgattgatcaactctcccgaactcatctcaatacactggaacgcctcatctttcatctagtcaggattgctctgcaggaagacactaatcgaatgtctgctaatgctttggccattgtgtttgcgccctgcattctccgctgccctgacaccactgacccactacaaagtgtacaggacatcagtaagactaccacttgtgtggaactgattgttgtggaacaaatgaataaatacaaggctcgtctcaaagatatcagtagcttggaatttgctgagaataaggcaaagaccaggttgtcactgattcgtagatcaatgggaaaggggcgtattcgtcgaggaaactatccaggtccatcgtctcctgttgtagttcggttgccttctgtgtctgatgtctcagaggagaccttgactagtgaggcagccatggagactgacatcacagaacagcagcaagcagctatgcagcaggaggagagagtactgactgagcagattgagaacctacagaaggagaaggaggagctaacatttgagatgcttgtactggaaccccgtgcctctgatgatgaaacccttgagtctgaggcctccattgggactgctgatagctcagagaatttgaatatggagtctgaatatgctatctctgagaaatcagaaagaagcttagcccttagctccctgaagacagctggcaagtctgaaccttccagcaagttgcgaaagcaacttaaaaagcagcaagactctttagatgtcgtggactcttcggtctcctctttatgtctgtctaacacggcatcatctcatgggaccagaaaactatttcagatttattccaaatctccattctaccgagctgcctcaggtaatgaggccctgggaatggaaggaccattgggccagaccaaattcctggaagacaagcctcagttcatcagcagaggaaccttcaacccggaaaagggcaaacaaaaattaaagaatgtgaaaaactcacctcagaaaaccaaagagaccccagaggggacagtcatgtctggccgcagaaaaactgtggacccagactgcacctccaaccaacagctagcactctttggaaataatgaatttatggtctgaaccggcagatgtgtgtccctccgtggctacagagtggtaaacaaatctcacctttggggctgcgtttcatcacctcgtccacaatagtcaatcctaattgtggtcctgcctcttttctaagcatatggctaagactgtatgtgctgaattcctgggcctcctgcagaagcagaaagcctgctggggatggtgccagctgtgccttggctgttgtatttgaattgagatttttactatacaaagccacctagggcctggggatttgggtcagttgtagttgcctctcccccaccctcttttcccttcccaaaggtgggtgttgaactaggggggatattgctgtcctgagggaccctctcatttctgacatttgaagaaaacgtataaatctttcttaaccgtgaaagcaaaagcctttgggtttattttgggatagttaggagctagggtagaatataatttttttccaaaaacttacttacaaacaaaaagcctaatccctctattttaagatttctgaaaaaacactccatgttatattctggggaaagcaaaaacaaaaaaaaaaaacaaaaaaaaaaaaacaaaaaaaaaccgtgattgtttccattaagccatcagagcgtgtctcagatatcttgttatacagtgaagaagagaatacctattttttttgatgatgtttgatgtcatagtaatcagtgctggtttaactcctgtttagttcctgccaaatacattgcatgggctgaagtgtcagtagccatactgttctcatgtttcttggtcctaggatcagattcttctacattattttttagtttcccagagacatggtgatccctaaacttatgaaggtttcatcctaagccattcaggcttttctctttgtatagattaaaccgaaaaccgcatatgagcctgttcatctgctggtggattcccaccacagactcagactcaaacaaacaaacaaataatgtgaccgtttagttagtttccaaaaacattcacatacaatattgcatgaataagtaagtaagtgttacagaaagctgccaaaaaataaaaaggtttttaatatgacctatctaactaactaacttttatcttccttttctcagactatcagtattaaatagatggaaaaaaatcaaggactacttgaagctatttttgttaatattctggttactgaagtttattgtaaatatgtatgtatagtaggcatatttctttttaaccttgtgcttccctccttcccatggaatttcttcccacagatgaggggccactggacagggggatgagagccattcgtccctgggttgagggaattagtaagacatcattttcaccactgggtggtcttcatacacatgagttataatagcattttaagtatcttagcatttgtgggattagaaatctgtttttgctatttataatatataaaaaatgaaacatgatagcctttcttgagataagtatgtgaaatgtttatttttaaagttactaaatgcatcttgtcttgctactacatgcactgctctgaaaaagagcctttaccatctataacctgtattttgggtattcttccttttcatacttctttgaagttgtggaaatattaagtcttttgttaaggcagagtctctctctcctgttacacaacactgaacctcacgccactgcctcagtggttattggccagccccagaggttagacttggagcataattctgagtggcagctaaaggtagcaggagtcttacctctccctactttgggttcagaattgagccagagaaaggaagccattaaaatctccagaataatgatagttaatgagcaaatgttatgctttatatcccacagacatctgccaccttgttcatcttgtcctgaggagtaataaataatgttaagcttttaaaaatctgaatttcagagaatctcctagaggatagaggaaaacccctcagcatggtgtgttagagtgggattgctggttcctcagccccgtgccaggttgcacagtctgtgtttcagtgttcttgggagagtagtgtactgctgggcattaattgttactctgcacttgctccagaatgttggttaaatcctgtatgaaaaaaagagattgcccttatggaataatttcctgtggcccagaggaatggccagaagaacatatgttggcacatgttcttccttctaaatctttgtggggcttttttggcaaaataagttttttggcagttaaaaaacgactgatgtaggtcactttaaaggaactaggtgatggatgttaagagactttataatttttctcagggacctgaaactccagtttggataaaattcaattaaaaaaacttgttttttcagttgctagatttgtggatttctagtaatttaatctgccaggattggggtgggtgggtgaggaggagagagccacaaaatgataagagtggagagcagtgtggggccctccctttgagggaaagccgttgtttacatagggtagtaggccttgttggcctgatcaagagatgaagccataactcttaaaaaccttcagaaccaaacgctgtgtctgcatccatctgttctcactggccctctgcatggtaaagttatgtcaccacaaagtgatgccgcattacaatcacttatgaaactgttagcccttaatatgcatcacatttgtggttccatagtgcttctcctttgcttgtttgatctctgcatggcagcagtggggcagctccacatttggagcccatactccaaaatgcagagcactcttctcacagcacacattcccagccccaaacaaaacctgaattttcaactctgcccattaaagtgaatgtatccctgtaatttagtatgtacttattatggaaaatgtaacaaaagcagagaagtgtgatttcattctgtatcacaaattgaagcaaatcaacagcaaatacagcaggattcagggaggcttagtttacaacgtactttgtacctcctgccatttaaattattttgccactctgggcttctgaaaacacaaagggagatacagccctccaactatgagccttgcagagagagacaaaagggccagaggtcctgggatggaatactagagcccccaccttctcatgctttggaaacctgccagagcacttaccctgctggaagattaatgaagactccattctgtgtttcataacagtagcgttgttttctccatcaaaaacagagggtcacagaaatgtgctgaaaagatgtggtccagcaaggttctgtagtcccacctcagtgcctgtgggctgtgtttttcactgtaacaagcactttggtaaactagaaagaagaaaggattctcaggatgtgttcaaagctaagagagttttcattttaaaaagaaacatacatactcactccatggctttcctcatcctcctctcttttttcttcttggtgggaagctggatgcggggcatgcatcattctgtatggacaaatgtgttatgtccacccatactcttgtgacaactccccagcactgtcctgcaataccatgctggccttggtagtaaaactccttggtatctgtgagagtcctctttttctatgccctagactacttttaaccacttttctctggaatgactcccacatttgattgggtattgaaagggtaacagcaaaatgatgattgtggagatggatctattaggtctcatgttggtcccctggttgaaactattttcaaaaaagccccaacaatgggcctgtcaccttgctagtcatccattcttaatgcctatttatcagccctctgaggtcatataaaagttgcaccttttgaaccaagtatttgtatttactatgggaaaggtgtggactacagattcgtattatattattttaatggattttaagtaatttataagtatgctgagtgtaaattttttttaaaaactgtattataaaaggacatatcctgtgaaatataacattttactgtttaatagaataattctataagaagaatgatttatctcacccacggaactgattacattccggatgcaatcaataggcactttgtaatttcctttttgtttttttttctttgctggggggttgaggggtaacaagataccatctgtataaagtgcagtttgtgtcactcaaaatatgcactgtatggctacacaaaagcagcttgatgaacaaatcaccccatggctcattaaagaacaaagcttccagaagca

SEQ ID NO: 19161 - DNA, 8885 bp, Homo sapiens
  source 1..8885: mol_type = unassigned DNA
gcgcgaccgaagcggataagggacgcggcggcggttggctgtgtctgttgagagagtacaggacagcccggactgcgagaggcggcggcggaggcagtagttgcaccggcagaggcggccgctggcagcggttgaggcggcggtccaacgcgtgctctctgggcggggtgcggcgggggatgtgcctgctcaggccgggcggagtctctctgacagggcgggggatgcgccgcggccgctcgcccggaccctgaggctgctgggcccaccctcccggaaccgtccgaccctcggtggcctcggcctcttctgccatctccggtcctaccctggggcggagggtggaaggcagcttccgtcgaagaggagggggctgcggtggccaccgcggcggagcccgagttattttaccaagaaaatggtttgcacgactttgaacatatactatccatgctgatgggacaggatccaatatgaatataaatgatggaggaagacgacgctttgaagataatgaacatacattacggatatatcctggggctatttcagaagggacaatctactgtccgattcctgccagaaaaaactccacagctgctgaggtgattgagtctcttataaacaaacttcatcttgacaaaacaaaatgttatgttctagcagaggtaaaggaatttggtggagaagaatggattctcaatccaacagattgtccagttcagcgaatgatgctgtggccccgaatggctctggaaaatcgcttaagtggagaggactaccgcttccttctgagagagaaaaaccttgatggatcaatccattatggtagcctgcagtcatggctacgggtaacagaagaacgtcgcaggatgatggaacggggttttcttccacagcctcaacagaaagactttgatgatttatgtagtttacctgatttgaatgagaaaactctcttagaaaacctacgaaatcgctttaagcatgaaaaaatttatacctatgttggcagtattctaatagttattaacccattcaagtttcttcctatttataaccccaaatatgtcaaaatgtatgataaccaccaactgggaaaacttgagccccacatttatgctgtggctgatgtagcttatcatgccatgcttcagcgcaaaaagaatcagtgcatcgtgatttcaggagagagtggttctgggaagactcaaagcacaaactttcttattcaccaccttactgctctcagtcagaaaggatttgccagtggagtagaacagattattcttggagctggaccagtacttgaggcctttggaaatgcaaagacagctcataataacaattcaagtcgttttgggaagtttattcaagtaaattaccaggaaacaggcactgtacttggtgcctatgttgaaaaatatctactggagaagtccagactcgtttatcaggagcataatgaacggaactatcatgtattctattacctcctggcaggagcaagtgaagatgagagatcagcattccatcttaagcaaccagaggaatatcattatctcaatcagataacaaagaaacccctcagacagagctgggatgattattgctatgactctgagccggattgcttcacggtggaaggagaagatttgagacatgactttgagcgcctacaacttgccatggaaatggtaggatttcttcccaagacacgaagacagattttctctcttctctcagccatactacatttgggtaatatctgttacaaaaagaagacataccgggatgactccattgatatctgtaatcctgaagttctgcctattgtctcagaattattagaggttaaagaagagatgctatttgaagcattagttacaaggaagacggtgacagtgggagaaaagcttattttgccatacaagttggcagaggctgtgacagtgaggaactccatggctaagtctctgtatagtgccctgtttgactggatagtttttcgaattaatcatgcacttctgaatagtaaagatttagagcataataccaagacattgtctattggtgttcttgatatttttgggtttgaagattatgaaaataacagctttgaacagttctgtattaattttgctaatgaacgtttacagcactactttaatcagcatatctttaaattggaacaagaggaatatagaactgaaggtatcagctggcacaacatagattacattgataatacctgctgcataaatcttattagcaaaaaaccaacaggactgcttcatcttttggatgaagaaagcaactttccacaggctacaaatcaaacattgctagacaagtttaagcatcaacatgaagataattcttacatcgaatttccagccgtgatggagcctgctttcattataaaacattatgctggaaaagtaaaatatggggtaaaggatttccgggaaaaaaatacagatcatatgcgcccagacattgtagctcttctgagaagcagcaagaatgcatttatctctgggatgattggaattgatcctgtagctgttttccgatgggcaattctccgagcttttttcagagccatggttgctttcagggaagctgggaaaagaaacattcacagaaaaactggacatgatgatacagcgccatgtgcaattttgaaaagtatggatagttttagctttctccaacacccagtccaccagaggagcttagagattctgcagagatgcaaggaagagaagtacagtataacccggaaaaatcccagaacacctctttctgatctccagggcatgaatgctctaaatgaaaaaaaccaacatgatacatttgatattgcctggaatggcagaactgggattcgccagagcagactatcaagtggcacctccttgcttgataaagatggaatatttgctaattcaactagcagcaaactcctggagagagcccatggaattctcacgagaaacaaaaatttcaaatccaagcctgcccttccaaagcacttgctagaagtaaattctttaaagcacctgacaagactgacactacaagatcgcattaccaagtctcttcttcatttacacaagaagaaaaaacctcccagcatcagtgcccagtttcaggcatcattaagcaagctaatggaaacacttggtcaagcagaaccatattttgtaaaatgcattcgctctaatgctgaaaagctgcccttaaggttcagtgatgtcttggtacttagacagcttcgatacaccgggatgctggaaacagttcgaattcgccaatcaggatacagctccaaatattctttccaggattttgtgagccacttccatgtacttcttccccgaaatattattccatccaaatttaacattcaggatttcttcaggaaaataaatcttaatccagataattatcaagttggaaaaaccatggtctttctaaaggagcaggaacgacagcacttacaagatctgcttcaccaagaggtgctccgcagaatcatattgttgcagcgatggttcagggtcttgctgtgtaggcagcatttcctccatctgagacaagcatctgttattatccagagattctggaggaattacctaaatcagaagcaagtcagagatgcagctgtgcagaaggatgcttttgttatggctagtgcagctgctcttctccaagcttcctggcgtgctcacttagagaggcagcggtacttggagttacgggctgcagccatcgttatccagcagaaatggagagattactataggcgcaggcacatggctgctatttgcatacaagcaagatggaaagcctacagggaaagtaaaaggtaccaagaacaaaggaaaaaaattatccttttgcaatcaacatgtagaggattcagagcaagacaaagatttaaagctttaaaagaacaaaggctaagagaaacaaagccagaagttggattggtgaatattaagggatatggatctctggaaattcagggttcagacccttcaggatgggaggattgttcttttgacaacagaataaaagccatagaggaatgtaaatctgtaatagagagtaatcgaattagccgtgaaagttcagtggactgcttgaaggagtcaccaaacaagcagcaggagagagcccaaagccagagtggtgtggacttgcaggaagatgtgcttgtaagagagagacccagatccttggaggatctccatcagaaaaaagtaggccgggctaagagagaaagtaggagaatgagagaactagagcaagctatatttagcttagaattgctgaaagttcgttctcttggtggtatttctccttcagaggatcgcagatggtctacagaattggtgcctgaaggccttcagtctccacggggtacacctgatagtgagagctctcaaggaagcttggaacttctgagctatgaggaaagccaaaagagcaaactagagtctgtcatttcagatgaaggagacttgcagtttccatcacctaagatatccagcagtccaaaatttgattcacgggacaatgccctcagtgcctcaaatgagactagcagtgcagagcatttgaaggatggaactatgaaggaaatggtggtctgcagttctgagtctattacctgtaaaccacagctgaaagactccttcatttcaaatagtctacctacttttttttatatcccccaacaagacccactgaaaacaaattcccaactagacacaagtatccaaagaaacaaactattggaaaatgaagacacagcgggggaagctcttactttggatatcaacagggaaactagaaggtatcactgctcaggaaaagatcagattgttccttctttgaatacagagtcttctaatcctgtgcttaagaagttagaaaagctaaacactgagaaggaagaaaggcaaaaacagttgcagcaacagaatgaaaaagagatgatggaacagattcgccagcaaacagatattttagagaaggagcgcaaagccttcaagacaattgaaaagccaagaattggagagtgtttggtggcaccatcttcctatcagtcaaagcaaagagtagagaggccatcctctctcctcagcttaaatacctcaaataagggagaacttaatgtactggggtccctatcattaaaagatgcagctcttgcccaaaaagacagttcctctgctcacttacccccaaaggaccgacctgtcaccgtgttctttgaaagaaaaggaagtccatgccaatctagtactgtcaaggaattatccaagacagacagaatgggcacccagctgaatgtagcctgtaaactctcaaataatcgcatttcaaaaagagaacactttaggccaactcagtcttacagccacaattctgatgacctttccagagagggaaatgctaggcccattttcttcactccaaaggacaatatgagtattccccttgtcagcaaagaagccttaaacagtaaaaatcctcaactccataaagaagatgaaccagcatggaaacctgtgaagttagctgggccaggccaaagagaggttgccagaccggcccataaaaagaaagctcgaatggcgcggacgcgctccgatttcttgactagaggtacttttgccgatggggagggggatacagaggaagatgattacgatgacattattgagccccttctctcccttgaccaagcttctcactgtgagctagggcctgcacccagcctgggtcaggcctctcacagtgactccgaaatgacatcacagcgattttcgtcagttgatgaacaagcaaaacttcataagactatgtctcaaggagagattaccaagttggcagtgagacagaaggcttcagattcagatataagacctcagagagctaagatgagattctgggccaaagggaaacaaggggagaagaagactaccagagtgaaacctactacccagtcagaggtttcgccactctttgcaggcacagatgtgattccagctcatcagtttccagatgaattagctgcatatcacccaacacctcctttgagcccagaactgcccggcagttgccggaaggaattcaaagagaacaaagaaccttctccaaaggctaagcgcaagcgaagtgtgaagattagcaacgtggctttggattctatgcattggcaaaatgactctgtccagatcatagcaagtgtcagtgatttaaaaagcatggatgaatttcttctgaaaaaggtgaatgacctagataatgaagacagcaagaaggatacactagtggatgttgtatttaaaaaagccctgaaggaatttcggcagaatatcttcagcttttattcatctgcattggcgatggatgatgggaaaagcatacggtataaagacctctatgcactatttgaacagattctggaaaagacgatgaggcttgagcagcgtgattcactgggtgaatctccagtgagagtttgggtcaacacttttaaagtgtttttagatgaatatatgaatgaattcaagacttcagattgcacagccacaaaggtgccaaaaacagaaagaaagaaaagaaggaaaaaggaaactgatttggtggaagaacacaatggtcacatctttaaagccacccaatatagcatccctacatactgtgaatactgttcttctttgatatggataatggaccgagcctctgtttgcaaattatgcaagtatgcttgccataagaagtgctgtctgaaaaccacagccaagtgctctaaaaagtatgatccagagctgtcatctcgacaatttggggttgaactgtcccgtttgaccagtgaagaccgaactgttcctttagtagtggaaaagctcataaactacattgaaatgcatggactgtatacagaaggtatttatcgaaagtctggttcgactaataaaatcaaggagcttcggcagggtctagatacagatgctgagagtgtaaatctagatgactataacatacacgtcattgcaagtgtattcaaacaatggcttcgagatttgcccaatcctctcatgacctttgaactctatgaggaatttcttcgagctatgggccttcaggagaggaaggagacaatccgtggtgtatactctgtgattgatcaactctcccgaactcatctcaatacactggaacgcctcatctttcatctagtcaggattgctctgcaggaagacactaatcgaatgtctgctaatgctttggccattgtgtttgcgccctgcattctccgctgccctgacaccactgacccactacaaagtgtacaggacatcagtaagactaccacttgtgtggaactgattgttgtggaacaaatgaataaatacaaggctcgtctcaaagatatcagtagcttggaatttgctgagaataaggcaaagaccaggttgtcactgattcgtagatcaatgggaaaggggcgtattcgtcgaggaaactatccaggtccatcgtctcctgttgtagttcggttgccttctgtgtctgatgtctcagaggagaccttgactagtgaggcagccatggagactgacatcacagaacagcagcaagcagctatgcagcaggaggagagagtactgactgagcagattgagaacctacagaaggagaaggaggagctaacatttgagatgcttgtactggaaccccgtgcctctgatgatgaaacccttgagtctgaggcctccattgggactgctgatagctcagagaatttgaatatggagtctgaatatgctatctctgagaaatcagaaagaagcttagcccttagctccctgaagacagctggcaagtctgaaccttccagcaagttgcgaaagcaacttaaaaagcagcaagactctttagatgtcgtggactcttcggtctcctctttatgtctgtctaacacggcatcatctcatgggaccagaaaactatttcagatttattccaaatctccattctaccgagctgcctcaggtaatgaggccctgggaatggaaggaccattgggccagaccaaattcctggaagacaagcctcagttcatcagcagaggaaccttcaacccggaaaagggcaaacaaaaattaaagaatgtgaaaaactcacctcagaaaaccaaagagaccccagaggggacagtcatgtctggccgcagaaaaactgtggacccagactgcacctccaaccaacagctagcactctttggaaataatgaatttatggtctgaaccggcagatgtgtgtccctccgtggctacagagtggtaaacaaatctcacctttggggctgcgtttcatcacctcgtccacaatagtcaatcctaattgtggtcctgcctcttttctaagcatatggctaagactgtatgtgctgaattcctgggcctcctgcagaagcagaaagcctgctggggatggtgccagctgtgccttggctgttgtatttgaattgagatttttactatacaaagccacctagggcctggggatttgggtcagttgtagttgcctctcccccaccctcttttcccttcccaaaggtgggtgttgaactaggggggatattgctgtcctgagggaccctctcatttctgacatttgaagaaaacgtataaatctttcttaaccgtgaaagcaaaagcctttgggtttattttgggatagttaggagctagggtagaatataatttttttccaaaaacttacttacaaacaaaaagcctaatccctctattttaagatttctgaaaaaacactccatgttatattctggggaaagc

SEQ ID NO: 19162 - DNA, 8615 bp, Homo sapiens
  source 1..8615: mol_type = unassigned DNA
gcgcgaccgaagcggataagggacgcggcggcggttggctgtgtctgttgagagagtacaggacagcccggactgcgagaggcggcggcggaggcagtagttgcaccggcagaggcggccgctggcagcggttgaggcggcggtccaacgcgtgctctctgggcggggtgcggcgggggatgtgcctgctcaggccgggcggagtctctctgacagggcgggggatgcgccgcggccgctcgcccggaccctgaggctgctgggcccaccctcccggaaccgtccgaccctcggtggcctcggcctcttctgccatctccggtcctaccctggggcggagggtggaaggcagcttccgtcgaagaggagggggctgcggtggccaccgcggcggagcccgagttattttaccaagaaaatggtttgcacgactttgaacatatactatccatgctgatgggacaggatccaatatgaatataaatgatggaggaagacgacgctttgaagataatgaacatacattacggatatatcctggggctatttcagaagggacaatctactgtccgattcctgccagaaaaaactccacagctgctgaggtgattgagtctcttataaacaaacttcatcttgacaaaacaaaatgttatgttctagcagaggtaaaggaatttggtggagaagaatggattctcaatccaacagattgtccagttcagcgaatgatgctgtggccccgaatggctctggaaaatcgcttaagtggagaggactaccgcttccttctgagagagaaaaaccttgatggatcaatccattatggtagcctgcagtcatggctacgggtaacagaagaacgtcgcaggatgatggaacggggttttcttccacagcctcaacagaaagactttgatgatttatgtagtttacctgatttgaatgagaaaactctcttagaaaacctacgaaatcgctttaagcatgaaaaaatttatacctatgttggcagtattctaatagttattaacccattcaagtttcttcctatttataaccccaaatatgtcaaaatgtatgataaccaccaactgggaaaacttgagccccacatttatgctgtggctgatgtagcttatcatgccatgcttcagcgcaaaaagaatcagtgcatcgtgatttcaggagagagtggttctgggaagactcaaagcacaaactttcttattcaccaccttactgctctcagtcagaaaggatttgccagtggagtagaacagattattcttggagctggaccagtacttgaggcctttggaaatgcaaagacagctcataataacaattcaagtcgttttgggaagtttattcaagtaaattaccaggaaacaggcactgtacttggtgcctatgttgaaaaatatctactggagaagtccagactcgtttatcaggagcataatgaacggaactatcatgtattctattacctcctggcaggagcaagtgaagatgagagatcagcattccatcttaagcaaccagaggaatatcattatctcaatcaggattgcttcacggtggaaggagaagatttgagacatgactttgagcgcctacaacttgccatggaaatggtaggatttcttcccaagacacgaagacagattttctctcttctctcagccatactacatttgggtaatatctgttacaaaaagaagacataccgggatgactccattgatatctgtaatcctgaagttctgcctattgtctcagaattattagaggttaaagaagagatgctatttgaagcattagttacaaggaagacggtgacagtgggagaaaagcttattttgccatacaagttggcagaggctgtgacagtgaggaactccatggctaagtctctgtatagtgccctgtttgactggatagtttttcgaattaatcatgcacttctgaatagtaaagatttagagcataataccaagacattgtctattggtgttcttgatatttttgggtttgaagattatgaaaataacagctttgaacagttctgtattaattttgctaatgaacgtttacagcactactttaatcagcatatctttaaattggaacaagaggaatatagaactgaaggtatcagctggcacaacatagattacattgataatacctgctgcataaatcttattagcaaaaaaccaacaggactgcttcatcttttggatgaagaaagcaactttccacaggctacaaatcaaacattgctagacaagtttaagcatcaacatgaagataattcttacatcgaatttccagccgtgatggagcctgctttcattataaaacattatgctggaaaagtaaaatatggggtaaaggatttccgggaaaaaaatacagatcatatgcgcccagacattgtagctcttctgagaagcagcaagaatgcatttatctctgggatgattggaattgatcctgtagctgttttccgatgggcaattctccgagcttttttcagagccatggttgctttcagggaagctgggaaaagaaacattcacagaaaaactggacatgatgatacagcgccatgtgcaattttgaaaagtatggatagttttagctttctccaacacccagtccaccagaggagcttagagattctgcagagatgcaaggaagagaagtacagtataacccggaaaaatcccagaacacctctttctgatctccagggcatgaatgctctaaatgaaaaaaaccaacatgatacatttgatattgcctggaatggcagaactgggattcgccagagcagactatcaagtggcacctccttgcttgataaagatggaatatttgctaattcaactagcagcaaactcctggagagagcccatggaattctcacgagaaacaaaaatttcaaatccaagcctgcccttccaaagcacttgctagaagtaaattctttaaagcacctgacaagactgacactacaagatcgcattaccaagtctcttcttcatttacacaagaagaaaaaacctcccagcatcagtgcccagtttcaggcatcattaagcaagctaatggaaacacttggtcaagcagaaccatattttgtaaaatgcattcgctctaatgctgaaaagctgcccttaaggttcagtgatgtcttggtacttagacagcttcgatacaccgggatgctggaaacagttcgaattcgccaatcaggatacagctccaaatattctttccaggattttgtgagccacttccatgtacttcttccccgaaatattattccatccaaatttaacattcaggatttcttcaggaaaataaatcttaatccagataattatcaagttggaaaaaccatggtctttctaaaggagcaggaacgacagcacttacaagatctgcttcaccaagaggtgctccgcagaatcatattgttgcagcgatggttcagggtcttgctgtgtaggcagcatttcctccatctgagacaagcatctgttattatccagagattctggaggaattacctaaatcagaagcaagtcagagatgcagctgtgcagaaggatgcttttgttatggctagtgcagctgctcttctccaagcttcctggcgtgctcacttagagaggcagcggtacttggagttacgggctgcagccatcgttatccagcagaaatggagagattactataggcgcaggcacatggctgctatttgcatacaagcaagatggaaagcctacagggaaagtaaaaggtaccaagaacaaaggaaaaaaattatccttttgcaatcaacatgtagaggattcagagcaagacaaagatttaaagctttaaaagaacaaaggctaagagaaacaaagccagaagttggattggtgaatattaagggatatggatctctggaaattcagggttcagacccttcaggatgggaggattgttcttttgacaacagaataaaagccatagaggaatgtaaatctgtaatagagagtaatcgaattagccgtgaaagttcagtggactgcttgaaggagtcaccaaacaagcagcaggagagagcccaaagccagagtggtgtggacttgcaggaagatgtgcttgtaagagagagacccagatccttggaggatctccatcagaaaaaagtaggccgggctaagagagaaagtaggagaatgagagaactagagcaagctatatttagcttagaattgctgaaagttcgttctcttggtggtatttctccttcagaggatcgcagatggtctacagaattggtgcctgaaggccttcagtctccacggggtacacctgatagtgagagctctcaaggaagcttggaacttctgagctatgaggaaagccaaaagagcaaactagagtctgtcatttcagatgaaggagacttgcagtttccatcacctaagatatccagcagtccaaaatttgattcacgggacaatgccctcagtgcctcaaatgagactagcagtgcagagcatttgaaggatggaactatgaaggaaatggtggtctgcagttctgagtctattacctgtaaaccacagctgaaagactccttcatttcaaatagtctacctacttttttttatatcccccaacaagacccactgaaaacaaattcccaactagacacaagtatccaaagaaacaaactattggaaaatgaagacacagcgggggaagctcttactttggatatcaacagggaaactagaaggtatcactgctcaggaaaagatcagattgttccttctttgaatacagagtcttctaatcctgtgcttaagaagttagaaaagctaaacactgagaaggaagaaaggcaaaaacagttgcagcaacagaatgaaaaagagatgatggaacagattcgccagcaaacagatattttagagaaggagcgcaaagccttcaagacaattgaaaagccaagaattggagagtgtttggtggcaccatcttcctatcagtcaaagcaaagagtagagaggccatcctctctcctcagcttaaatacctcaaataagggagaacttaatgtactggggtccctatcattaaaagatgcagctcttgcccaaaaagacagttcctctgctcacttacccccaaaggaccgacctgtcaccgtgttctttgaaagaaaaggaagtccatgccaatctagtactgtcaaggaattatccaagacagacagaatgggcacccagctgaatgtagcctgtaaactctcaaataatcgcatttcaaaaagagaacactttaggccaactcagtcttacagccacaattctgatgacctttccagagagggaaatgctaggcccattttcttcactccaaaggacaatatgagtattccccttgtcagcaaagaagccttaaacagtaaaaatcctcaactccataaagaagatgaaccagcatggaaacctgtgaagttagctgggccaggccaaagagagacatcacagcgattttcgtcagttgatgaacaagcaaaacttcataagactatgtctcaaggagagattaccaagttggcagtgagacagaaggcttcagattcagatataagacctcagagagctaagatgagattctgggccaaagggaaacaaggggagaagaagactaccagagtgaaacctactacccagtcagaggtttcgccactctttgcaggcacagatgtgattccagctcatcagtttccagatgaattagctgcatatcacccaacacctcctttgagcccagaactgcccggcagttgccggaaggaattcaaagagaacaaagaaccttctccaaaggctaagcgcaagcgaagtgtgaagattagcaacgtggctttggattctatgcattggcaaaatgactctgtccagatcatagcaagtgtcagtgatttaaaaagcatggatgaatttcttctgaaaaaggtgaatgacctagataatgaagacagcaagaaggatacactagtggatgttgtatttaaaaaagccctgaaggaatttcggcagaatatcttcagcttttattcatctgcattggcgatggatgatgggaaaagcatacggtataaagacctctatgcactatttgaacagattctggaaaagacgatgaggcttgagcagcgtgattcactgggtgaatctccagtgagagtttgggtcaacacttttaaagtgtttttagatgaatatatgaatgaattcaagacttcagattgcacagccacaaaggtgccaaaaacagaaagaaagaaaagaaggaaaaaggaaactgatttggtggaagaacacaatggtcacatctttaaagccacccaatatagcatccctacatactgtgaatactgttcttctttgatatggataatggaccgagcctctgtttgcaaattatgcaagtatgcttgccataagaagtgctgtctgaaaaccacagccaagtgctctaaaaagtatgatccagagctgtcatctcgacaatttggggttgaactgtcccgtttgaccagtgaagaccgaactgttcctttagtagtggaaaagctcataaactacattgaaatgcatggactgtatacagaaggtatttatcgaaagtctggttcgactaataaaatcaaggagcttcggcagggtctagatacagatgctgagagtgtaaatctagatgactataacatacacgtcattgcaagtgtattcaaacaatggcttcgagatttgcccaatcctctcatgacctttgaactctatgaggaatttcttcgagctatgggccttcaggagaggaaggagacaatccgtggtgtatactctgtgattgatcaactctcccgaactcatctcaatacactggaacgcctcatctttcatctagtcaggattgctctgcaggaagacactaatcgaatgtctgctaatgctttggccattgtgtttgcgccctgcattctccgctgccctgacaccactgacccactacaaagtgtacaggacatcagtaagactaccacttgtgtggaactgattgttgtggaacaaatgaataaatacaaggctcgtctcaaagatatcagtagcttggaatttgctgagaataaggcaaagaccaggttgtcactgattcgtagatcaatgggaaaggggcgtattcgtcgaggaaactatccaggtccatcgtctcctgttgtagttcggttgccttctgtgtctgatgtctcagaggagaccttgactagtgaggcagccatggagactgacatcacagaacagcagcaagcagctatgcagcaggaggagagagtactgactgagcagattgagaacctacagaaggagaaggaggagctaacatttgagatgcttgtactggaaccccgtgcctctgatgatgaaacccttgagtctgaggcctccattgggactgctgatagctcagagaatttgaatatggagtctgaatatgctatctctgagaaatcagaaagaagcttagcccttagctccctgaagacagctggcaagtctgaaccttccagcaagttgcgaaagcaacttaaaaagcagcaagactctttagatgtcgtggactcttcggtctcctctttatgtctgtctaacacggcatcatctcatgggaccagaaaactatttcagatttattccaaatctccattctaccgagctgcctcaggtaatgaggccctgggaatggaaggaccattgggccagaccaaattcctggaagacaagcctcagttcatcagcagaggaaccttcaacccggaaaagggcaaacaaaaattaaagaatgtgaaaaactcacctcagaaaaccaaagagaccccagaggggacagtcatgtctggccgcagaaaaactgtggacccagactgcacctccaaccaacagctagcactctttggaaataatgaatttatggtctgaaccggcagatgtgtgtccctccgtggctacagagtggtaaacaaatctcacctttggggctgcgtttcatcacctcgtccacaatagtcaatcctaattgtggtcctgcctcttttctaagcatatggctaagactgtatgtgctgaattcctgggcctcctgcagaagcagaaagcctgctggggatggtgccagctgtgccttggctgttgtatttgaattgagatttttactatacaaagccacctagggcctggggatttgggtcagttgtagttgcctctcccccaccctcttttcccttcccaaaggtgggtgttgaactaggggggatattgctgtcctgagggaccctctcatttctgacatttgaagaaaacgtataaatctttcttaaccgtgaaagcaaaagcctttgggtttattttgggatagttaggagctagggtagaatataatttttttccaaaaacttacttacaaacaaaaagcctaatccctctattttaagatttctgaaaaaacactccatgttatattctggggaaagc

SEQ ID NO: 19163 - DNA, 4008 bp, Homo sapiens
  source 1..4008: mol_type = unassigned DNA
gcgcgaccgaagcggataagggacgcggcggcggttggctgtgtctgttgagagagtacaggacagcccggactgcgagaggcggcggcggaggcagtagttgcaccggcagaggcggccgctggcagcggttgaggcggcggtccaacgcgtgctctctgggcggggcggagtctctctgacagggcgggggatgcgccgcggccgctcgcccggaccctgaggctgctgggcccaccctcccggaaccgtccgaccctcggtggcctcggcctcttctgccatctccggtcctaccctggggcggagggtggaaggcagcttccgtcgaagaggagggggctgcggtggccaccgcggcggagcccgagttattttaccaagaaaatggtttgcacgactttgaacatatactatccatgctgatgggacaggatccaatatgaatataaatgatggaggaagacgacgctttgaagataatgaacatacattacggatatatcctggggctatttcagaagggacaatctactgtccgattcctgccagaaaaaactccacagctgctgaggtgattgagtctcttataaacaaacttcatcttgacaaaacaaaatgttatgttctagcagaggtaaaggaatttggtggagaagaatggattctcaatccaacagattgtccagttcagcgaatgatgctgtggccccgaatggctctggaaaatcgcttaagtggagaggactaccgcttccttctgagagagaaaaaccttgatggatcaatccattatggtagcctgcagtcatggctacgggtaacagaagaacgtcgcaggatgatggaacggggttttcttccacagcctcaacagaaagactttgatgatttatgtagtttacctgatttgaatgagaaaactctcttagaaaacctacgaaatcgctttaagcatgaaaaaatttatacctatgttggcagtattctaatagttattaacccattcaagtttcttcctatttataaccccaaatatgtcaaaatgtatgataaccaccaactgggaaaacttgagccccacatttatgctgtggctgatgtagcttatcatgccatgcttcagcgcaaaaagaatcagtgcatcgtgatttcaggagagagtggttctgggaagactcaaagcacaaactttcttattcaccaccttactgctctcagtcagaaaggatttgccagtggagtagaacagattattcttggagctggaccagtacttgaggcctttggaaatgcaaagacagctcataataacaattcaagtcgttttgggaagtttattcaagtaaattaccaggaaacaggcactgtacttggtgcctatgttgaaaaatatctactggagaagtccagactcgtttatcaggagcataatgaacggaactatcatgtattctattacctcctggcaggagcaagtgaagatgagagatcagcattccatcttaagcaaccagaggaatatcattatctcaatcagataacaaagaaacccctcagacagagctgggatgattattgctatgactctgagccggattgcttcacggtggaaggagaagatttgagacatgactttgagcgcctacaacttgccatggaaatggtaggatttcttcccaagacacgaagacagattttctctcttctctcagccatactacatttgggtaatatctgttacaaaaagaagacataccgggatgactccattgatatctgtaatcctgaagttctgcctattgtctcagaattattagaggttaaagaagagatgctatttgaagcattagttacaaggaagacggtgacagtgggagaaaagcttattttgccatacaagttggcagaggctgtgacagtgaggaactccatggctaagtctctgtatagtgccctgtttgactggatagtttttcgaattaatcatgcacttctgaatagtaaagatttagagcataataccaagacattgtctattggtgttcttgatatttttgggtttgaagattatgaaaataacagctttgaacagttctgtattaattttgctaatgaacgtttacagcactactttaatcagcatatctttaaattggaacaagaggaatatagaactgaaggtatcagctggcacaacatagattacattgataatacctgctgcataaatcttattagcaaaaaaccaacaggactgcttcatcttttggatgaagaaagcaactttccacaggctacaaatcaaacattgctagacaagtttaagcatcaacatgaagataattcttacatcgaatttccagccgtgatggagcctgctttcattataaaacattatgctggaaaagtaaaatatggggtaaaggatttccgggaaaaaaatacagatcatatgcgcccagacattgtagctcttctgagaagcagcaagaatgcatttatctctgggatgattggaattgatcctgtagctgttttccgatgggcaattctccgagcttttttcagagccatggttgctttcagggaagctgggaaaagaaacattcacagaaaaactggtaagtagtagttattagtattctaccatacttcatctttttttttttttttacctttctacttctccacaaaaaggagtagaattcttgctatgagattctcaaggacaaaaatcctgcttctgtagtcaatctagtgtcatctcttaactgatttgtgactatgaacagtttttcttttctgtaaaagagttatactgcctttaaaataatgaggataaagtcagagcatctgttcatgaagtgttcattttcttttcctttactcttagttcatggatttttaaaaactttgaaatttagaaatagataaagcaggatactttttctgtatgcctcccccttcaatcataaaatctctcatctcattttctgtgggagggcaacttcataagcacttttggcctactggaaaccaaactattgtttgctgtagctctagtcttagatagggccattgctgcatagagaagattttgtgatacatatgcagttgagatttatgcctttcagtagaaatgttatagggctcacctgtgctttcaggactcccaaagtgatttacgtggctttttgggatgtgcactagtagtaaaacttttaagtttagcttttaaatgtttgagacaaatagatatatttgagagagtgtatttctaaaaatacatgtaaaataattgaacctagtttccattttttagattgtaaagtatttgaactggtctttgtagatgtatagggagaattatagtttattagagaaataaaaggactatctcaaacctgctttgccttttacaaagtgatttctaagaggttatctttgtaaaaagctttaaggaaaattttttttctttaagatgctttcttgtttattatgacaaacttctaatcaagaaaaccactcaaaattgattagcatcctgctaagacataattgagtaagagaagaaacttttcttgtatttactgtcaaagcctatttactttattcacattatctgtatattcctttggcatttaaaatctattatttgtgaaagctagttgttacatatctgttattatcaatatcggcaatgacatgcaatgttattaatgataaacaacctgtattttctctaccttgataaagtctagattccttattttctaatcttgttttcccttctggctagtacagagcttccatataataatctctttttgaaaatttgtattcaacataacatgcatatacaaaagtacacaaagcaaaaatgtatagttcagtggagtaccacaaagtaaacacaaccctggaactaccacctaggttaagaaacacaacattccagccacccaaaatttctccttggaaaaaactttaaaatttttacttttt

SEQ ID NO: 19164 - DNA, 7520 bp, Homo sapiens
  source 1..7520: mol_type = unassigned DNA
ctagctccaggacacgcgcgccccgagcctgggaggcatgctgaagccaggcggccggcaggatgagtgtgaaagaggcaggcagctcgggccgccgggagcaggcggcctaccacctgcacatctacccccagctgtccaccaccgagagccaggcctcgtgccgcgtgactgccaccaaggacagcaccacctcggacgtcatcaaggacgccattgccagcctgcggctggacggcaccaaatgttatgtgctggtggaggtcaaagagtcgggaggcgaggaatgggtgctggacgccaacgactcgcctgtgcaccgggtgctgctatggccccggcgggcacaggacgagcaccctcaggaggatggctactacttcctgctgcaggagcgcaacgcagatggaaccatcaagtacgtgcatatgcagctggtggcgcaggccacagccacccggcgcctagtggagcgtggcctcctgccacggcagcaggcggactttgatgacctgtgtaacctccccgagctaaccgagggcaacctcctgaagaacctcaagcaccgcttcctgcaacaaaagatctacacgtacgcggggagcatcctggtggccatcaacccctttaagttcctgcccatctacaaccccaagtacgtgaagatgtatgagaaccagcagctgggcaagctggagccacacgtcttcgcgctggccgacgtggcctactacaccatgctcaggaagcgcgtgaaccagtgcatcgtgatctcgggtgagagcggctccggcaagacccagagcaccaacttcctcatccactgcctcaccgccctcagccagaagggctacgccagcggcgtcgagaggaccatcctgggtgctggccctgtgctggaggcttttggaaatgccaagacagcccacaacaacaactccagccggtttgggaaattcatccaagtcagctacctagagagtggcatcgtgagaggagctgtcgtcgagaaatatctgcttgaaaagtctcgcctggtgtctcaggagaaggatgagaggaactaccatgtgttttattatttgttacttggggtcagcgaggaagagcgccaagaatttcagctcaagcagcctgaagattatttctacctcaaccagcataacttgaagattgaagatggggaggacctgaagcatgactttgagaggctcaagcaggccatggagatggtgggcttcctccccgccaccaagaagcagatttttgccgtcctctcggccatcctgtacctgggcaacgtcacttataagaagagagctacaggccgagaggaagggttggaggtcgggccacccgaggtgctggacaccctgtcgcagcttctgaaggtgaagcgagaaatcttggtggaggttctgaccaaaagaaaaacggtgaccgtcaacgacaagcttatccttccctacagcctcagcgaggccatcactgcccgcgactccatggccaagtctctgtacagcgccctgttcgactggattgtgctgcggatcaaccacgcactcctcaacaagaaggacgtggaagaggcagtctcgtgcctgtccattggggtcctggacatcttcgggtttgaagacttcgagaggaacagctttgagcagttctgcatcaactacgccaatgagcagctgcagtattacttcaaccagcacatcttcaagctggagcaggaggaatatcagggcgaggggatcacgtggcacaacatcggctacacagacaatgtcggctgcatccatctcatcagcaagaaacccacgggcctcttctacctgctggacgaggagagcaacttcccccacgccacgagccagaccctgctggccaagttcaaacagcaacatgaggacaataagtacttcctgggcaccccggtcatggagccagctttcatcatccagcacttcgcagggaaggtgaaatatcagatcaaggacttccgggagaagaacatggactacatgcggccagacatcgtggccctgctgcggggcagtgacagctcctacgtgcgggagctcatcggcatggaccccgtggccgtgttccgctgggccgtgctccgggctgctatccgggccatggcagtgcttcgggaggccggacgcctgcgggccgagagggccgaaaaggctgcaggtatgagcagccctggtgcccaaagtcacccagaagagctgccaagaggagccagcaccccttcggaaaaactttaccgcgatttgcataaccaaatgatcaagagcatcaaaggattgccctggcagggcgaggacccccgtagccttctccagtccctcagtcggctccagaaaccccgcgccttcatcctgaaaagtaaaggtatcaaacaaaagcagatcattccaaagaacctactggactccaagtccctgaaactcatcatcagcatgactctgcacgaccgcaccaccaagtccctactgcacctgcacaagaagaaaaagccaccaagcatcagcgcccagttccagacatcccttaacaagctcttggaggcactggggaaggcggagcccttctttatccgctgcatccgttccaatgctgaaaagaaagagctgtgctttgacgacgagctggtcctgcagcagctgcgctacaccggcatgctggagaccgtgcgcatccggaggtcagggtacagcgccaagtacacgttccaggatttcaccgagcagttccaggtgctcctgcccaaggatgcccagccctgcagggaggtcatctccaccctcctggagaaaatgaagatagacaagaggaactaccagatcgggaagaccaaggtcttcctgaaggagacggagcggcaagccctgcaggagacgctgcaccgggaggtggtgcggaaaatcctgctgctgcagagctggttccggatggtgctggagcgtcggcacttcctgcagatgaagcgggccgccgtcaccatccaggcctgctggcggtcctaccgggtccggagggcgctggagaggacgcaggctgccgtgtacctccaggcctcatggaggggctactggcagcggaagctctaccggcaccagaaacagagcatcatccgcctgcagagcctgtgtcgggggcacctgcagcgcaagagcttcagccagatgatctcggagaagcagaaggcagaagagaaggagagggaagccctggaagccgcaagagcaggtgctgaggagggcggacagggtcaggcggctggagggcagcaggtagctgagcaggggccggagccagcggaggatggcgggcacctggcatcggagcctgaggtgcagccaagtgacaggtcccccctagagcactcctcacctgagaaggaggccccaagcccagagaagactctcccaccccagaaaaccgtggcggctgaaagtcacgagaaagtccccagcagccgggagaagcgtgagtcgcgtcggcaaagagggctggagcacgtcaagttccagaacaaacacatccagtcctgcaaggaggagagtgccctcagagaaccttccagaagggtcacccaggagcaaggggtgagtctcctggaagacaaaaaggagagcagagaagatgaaacccttctagtcgtagagacggaggctgagaacacatctcaaaagcagcccacagagcaaccccaggccatggcagttggcaaggtctctgaagaaactgagaagacgctgcccagtgggagccccaggcctggccagttggagcggccgaccagcctggccctggacagcagggtcagcccaccggcccctggcagcgcccccgagacccccgaggacaagagcaaaccatgtggcagcccaagggttcaggaaaagcccgacagccccggaggctccacgcagatccagcggtacctggacgccgagcggctggccagcgccgtggaactgtggcggggcaagaagctggtggccgccgccagccctagtgccatgctcagccagtccctggacctcagcgacagacaccgggccacaggggccgccctcacgcccacagaggagaggcgcacctccttctccacgagcgacgtctccaagctcctcccgtccctggccaaggctcagcctgcagcagaaaccacggacggagagcgaagtgcgaaaaagccagctgtccagaagaagaagccaggcgacgcatcctccctcccagacgcagggctgtccccgggctctcaggtcgactctaaatccacgtttaagaggctttttctgcataaaaccaaggataaaaaatacagcctggagggcgcagaggagctggagaatgcagtgtccgggcacgtggtgctggaagccaccaccatgaagaagggcctggaagccccctccggacagcagcatcgccacgctgcaggtgagaagcgcaccaaggaaccaggaggcaaagggaagaagaaccgaaatgtcaagattgggaagatcacagtgtcagagaagtggcgggaatcggtgttccgccagatcaccaacgccaatgagctcaagtacctggacgagttcctgctcaacaagataaatgacctccgttcccagaagacgcccattgagagcttgtttatcgaagccaccgagaagttcaggagcaacatcaaaacgatgtactctgtcccgaacgggaagatccacgtgggctacaaggatctgatggagaactaccagatcgtcgtcagcaacctggccactgagcgtggccagaaggacaccaacctggtcctcaacctcttccagtcactgctagatgagttcacccgtggctacaccaagaacgacttcgagccagtgaagcagagcaaagctcagaagaagaagcggaagcaggagcgtgctgtccaggagcacaacgggcacgtgttcgccagctaccaggttagcatcccgcagtcgtgcgagcagtgcctctcctatatctggctcatggacaaggccctgctctgcagcgtgtgcaagatgacctgccacaagaagtgcgtgcacaagattcagagccactgctcctacacctacgggaggaagggcgagccaggcgttgagcctggccacttcggcgtgtgcgtagacagcctgaccagcgacaaggcctcggtgcccatcgtgctggagaagctcctggaacacgtggagatgcacggcctgtacaccgagggcctctaccgcaagtcgggtgctgccaaccgcactcgggagctccggcaggcgctgcagacagaccccgcagcagtcaagctggagaacttccccatccacgccatcacaggggtgctgaagcagtggctgcgggagctgcccgagcccctcatgaccttcgcacagtacggcgacttcctccgagccgtcgagctgccggagaagcaggagcagctggctgccatctatgccgtcctggagcaccttccagaagccaaccacaactccctggagagactcatcttccaccttctggcggtggccctgctcgaggatgtcaaccgcatgtcacctggggcgctggccattatcttcgcaccctgcctcctgcgctgccctgacaactcggacccgctgaccagcatgaaggacgtcctcaagatcaccacgtgcgtggagatgctgatcaaggagcagatgaggaaatacaaagtgaagatggaggagatcagccaactggaggctgcagagagtatcgccttccgcaggctttcgctcctgcgacaaaatgctccatggcctctcaaactggggttttcgtctccctatgagggggtcctgaacaagagccccaagacccgggacatccaggaggaggagctggaggtgctgctggaggaggaggcagccggcggcgatgaggaccgggaaaaggagattctcattgaacggatccagtccatcaaggaggagaagcaagacatcacctaccggctgccggagctggacccaaggggctcggacgaggagaacctggactcggagacgtcggccagcaccgagagcctgctggaggagcgggccgggcggggggcctcggaagggccccctgcgcctgctctcccttgccccggcgcgcccaccccgagccccctccccaccgtggccgcccctccacgacgaaggccgtcgtccttcgtaacggtcagagtgaagaccccccggcggacccccatcatgcccacggccaacatcaagctcccaccaggcctgccctcccacctgcctcgctgggcaccgggtgcccgggaggcggctgccccagtgcggcgccgggagccacctgcccgccgcccggaccagatacattccgtgtacatcacgcccggggcagacctgccagtgcagggcgccctggagcccctagaagaggatggccagccacctggggccaagcggaggtactcggatcccccaacgtactgcctgccccccgcctcgggccagaccaatggctgagagccacagctgacaaagtctgcatgtccgaggacggcccctgcactggagctgggcgccagagctgcagagctagtgttcggccctcagagaaggatccagaatcaaaagctcaagagtgacgtgaggtgggcaccggccccaagtgcagagtcaaggcagggagaggccggctggagccaggccccctcgcacgcagcccccaaatcatggacgcacctgtggggagcaccacatctccacctgcggcctcacatctccccactcccctttttgtacgtttaactgtttctttgtacgtggtttacgtaactttaaactgtaacagccttaatggaagaccaaatggttttttatatgtgtatgtacaaagttttctattaacgctgcccgtctcccttataacctggacgtgagctgtcagagcagaagccactaggccactgcgcgtctgaggctcagaccctgctgtggttggcttggggtggccaatgggctgggaccctccatgagagttttggacacttgggtcacctgacccgtgcctctctgacacatgtctccggggggcagccacctggccaatgtgcatttttgcacatgctggaaccttccatgggggtctgggctattggctggagccaggacatgagtcaggggcaccatggacctcacgtgccagggagacttgaatgtggctgtcactcttccggacgccaagggctgcaggaggctgcttttggcactacccaccccgtgtgacagaataggagccagcgactcaggactgctcacgggtcaggagggcaacgcctgaagtcagacctccctataggtcaacagggacaacctggggatctctggagcagggccctcctctctcaggcttggcccactcccccagacacctggacacgtggccacaaatctgggacaaggggcccccgcacagcatgaaataaaaagtgcctgagaagtgtgtgc

SEQ ID NO: 19165 - DNA, 7532 bp, Homo sapiens
  source 1..7532: mol_type = unassigned DNA
ctagctccaggacacgcgcgccccgagcctgggaggcatgctgaagccaggcggccggcaggatgagtgtgaaagaggcaggcagctcgggccgccgggagcaggcggcctaccacctgcacatctacccccagctgtccaccaccgagagccaggcctcgtgccgcgtgactgccaccaaggacagcaccacctcggacgtcatcaaggacgccattgccagcctgcggctggacggcaccaaatgttatgtgctggtggaggtcaaagagtcgggaggcgaggaatgggtgctggacgccaacgactcgcctgtgcaccgggtgctgctatggccccggcgggcacaggacgagcaccctcaggaggatggctactacttcctgctgcaggagcgcaacgcagatggaaccatcaagtacgtgcatatgcagctggtggcgcaggccacagccacccggcgcctagtggagcgtggcctcctgccacggcagcaggcggactttgatgacctgtgtaacctccccgagctaaccgagggcaacctcctgaagaacctcaagcaccgcttcctgcaacaaaagatctacacgtacgcggggagcatcctggtggccatcaacccctttaagttcctgcccatctacaaccccaagtacgtgaagatgtatgagaaccagcagctgggcaagctggagccacacgtcttcgcgctggccgacgtggcctactacaccatgctcaggaagcgcgtgaaccagtgcatcgtgatctcgggtgagagcggctccggcaagacccagagcaccaacttcctcatccactgcctcaccgccctcagccagaagggctacgccagcggcgtcgagaggaccatcctgggtgctggccctgtgctggaggcttttggaaatgccaagacagcccacaacaacaactccagccggtttgggaaattcatccaagtcagctacctagagagtggcatcgtgagaggagctgtcgtcgagaaatatctgcttgaaaagtctcgcctggtgtctcaggagaaggatgagaggaactaccatgtgttttattatttgttacttggggtcagcgaggaagagcgccaagaatttcagctcaagcagcctgaagattatttctacctcaaccagcataacttgaagattgaagatggggaggacctgaagcatgactttgagaggctcaagcaggccatggagatggtgggcttcctccccgccaccaagaagcagatttttgccgtcctctcggccatcctgtacctgggcaacgtcacttataagaagagagctacaggccgagaggaagggttggaggtcgggccacccgaggtgctggacaccctgtcgcagcttctgaaggtgaagcgagaaatcttggtggaggttctgaccaaaagaaaaacggtgaccgtcaacgacaagcttatccttccctacagcctcagcgaggccatcactgcccgcgactccatggccaagtctctgtacagcgccctgttcgactggattgtgctgcggatcaaccacgcactcctcaacaagaaggacgtggaagaggcagtctcgtgcctgtccattggggtcctggacatcttcgggtttgaagacttcgagaggaacagctttgagcagttctgcatcaactacgccaatgagcagctgcagtattacttcaaccagcacatcttcaagctggagcaggaggaatatcagggcgaggggatcacgtggcacaacatcggctacacagacaatgtcggctgcatccatctcatcagcaagaaacccacgggcctcttctacctgctggacgaggagagcaacttcccccacgccacgagccagaccctgctggccaagttcaaacagcaacatgaggacaataagtacttcctgggcaccccggtcatggagccagctttcatcatccagcacttcgcagggaaggtgaaatatcagatcaaggacttccgggagaagaacatggactacatgcggccagacatcgtggccctgctgcggggcagtgacagctcctacgtgcgggagctcatcggcatggaccccgtggccgtgttccgctgggccgtgctccgggctgctatccgggccatggcagtgcttcgggaggccggacgcctgcgggccgagagggccgaaaaggctgcaggtatgagcagccctggtgcccaaagtcacccagaagagctgccaagaggagccagcaccccttcggaaaaactttaccgcgatttgcataaccaaatgatcaagagcatcaaaggattgccctggcagggcgaggacccccgtagccttctccagtccctcagtcggctccagaaaccccgcgccttcatcctgaaaagtaaaggtatcaaacaaaagcagatcattccaaagaacctactggactccaagtccctgaaactcatcatcagcatgactctgcacgaccgcaccaccaagtccctactgcacctgcacaagaagaaaaagccaccaagcatcagcgcccagttccagacatcccttaacaagctcttggaggcactggggaaggcggagcccttctttatccgctgcatccgttccaatgctgaaaagaaagagctgtgctttgacgacgagctggtcctgcagcagctgcgctacaccggcatgctggagaccgtgcgcatccggaggtcagggtacagcgccaagtacacgttccaggatttcaccgagcagttccaggtgctcctgcccaaggatgcccagccctgcagggaggtcatctccaccctcctggagaaaatgaagatagacaagaggaactaccagatcgggaagaccaaggtcttcctgaaggagacggagcggcaagccctgcaggagacgctgcaccgggaggtggtgcggaaaatcctgctgctgcagagctggttccggatggtgctggagcgtcggcacttcctgcagatgaagcgggccgccgtcaccatccaggcctgctggcggtcctaccgggtccggagggcgctggagaggacgcaggctgccgtgtacctccaggcctcatggaggggctactggcagcggaagctctaccggcaccagaaacagagcatcatccgcctgcagagcctgtgtcgggggcacctgcagcgcaagagcttcagccagatgatctcggagaagcagaaggcagaagagaaggagagggaagccctggaagccgcaagagcaggtgctgaggagggcggacagggtcaggcggctggagggcagcaggtagctgagcaggggccggagccagcggaggatggcgggcacctggcatcggagcctgaggtgcagccaagtgacaggtcccccctagagcactcctcacctgagaaggaggccccaagcccagagaagactctcccaccccagaaaaccgtggcggctgaaagtcacgagaaagtccccagcagccgggagaagcgtgagtcgcgtcggcaaagagggctggagcacgtcaagttccagaacaaacacatccagtcctgcaaggaggagagtgccctcagagaaccttccagaagggtcacccaggagcaaggggtgagtctcctggaagacaaaaaggagagcagagaagatgaaacccttctagtcgtagagacggaggctgagaacacatctcaaaagcagcccacagagcaaccccaggccatggcagttggcaaggtctctgaagaaactgagaagacgctgcccagtgggagccccaggcctggccagttggagcggccgaccagcctggccctggacagcagggtcagcccaccggcccctggcagcgcccccgagacccccgaggacaagagcaaaccatgtggcagcccaagggttcaggaaaagcccgacagccccggaggctccacgcagatccagcggtacctggacgccgagcggctggccagcgccgtggaactgtggcggggcaagaagctggtggccgccgccagccctagtgccatgctcagccagtccctggacctcagcgacagacaccgggccacaggggccgccctcacgcccacagaggagaggcgcacctccttctccacgagcgacgtctccaagctcctcccgtccctggccaaggctcagcctgcagcagaaaccacggacggagagcgaagtgcgaaaaagccagctgtccagaagaagaagccaggcgacgcatcctccctcccagacgcagggctgtccccgggctctcaggtcgactctaaatccacgtttaagaggctttttctgcataaaaccaaggataaaaaatacagcctggagggcgcagaggagctggagaatgcagtgtccgggcacgtggtgctggaagccaccaccatgaagaagggcctggaagccccctccggacagcagcatcgccacgctgcaggtgagaagcgcaccaaggaaccaggaggcaaagggaagaagaaccgaaatgtcaagattgggaagatcacagtgtcagagaagtggcgggaatcggtgttccgccagatcaccaacgccaatgagctcaagtacctggacgagttcctgctcaacaagataaatgacctccgttcccagaagacgcccattgagagcttgtttatcgaagccaccgagaagttcaggagcaacatcaaaacgatgtactctgtcccgaacgggaagatccacgtgggctacaaggatctgatggagaactaccagatcgtcgtcagcaacctggccactgagcgtggccagaaggacaccaacctggtcctcaacctcttccagtcactgctagatgagttcacccgtggctacaccaagaacgacttcgagccagtgaagcagagcaaagctcagaagaagaagcggaagcaggagcgtgctgtccaggagcacaacgggcacgtgttcgccagctaccaggttagcatcccgcagtcgtgcgagcagtgcctctcctatatctggctcatggacaaggccctgctctgcagcgtgtgcaagatgacctgccacaagaagtgcgtgcacaagattcagagccactgctcctacacctacgggaggaagggcgagccaggcgttgagcctggccacttcggcgtgtgcgtagacagcctgaccagcgacaaggcctcggtgcccatcgtgctggagaagctcctggaacacgtggagatgcacggcctgtacaccgagggcctctaccgcaagtcgggtgctgccaaccgcactcgggagctccggcaggcgctgcagacagaccccgcagcagtcaagctggagaacttccccatccacgccatcacaggggtgctgaagcagtggctgcgggagctgcccgagcccctcatgaccttcgcacagtacggcgacttcctccgagccgtcgagctgccggagaagcaggagcagctggctgccatctatgccgtcctggagcaccttccagaagccaaccacaactccctggagagactcatcttccaccttgtcaaggtggccctgctcgaggatgtcaaccgcatgtcacctggggcgctggccattatcttcgcaccctgcctcctgcgctgccctgacaactcggacccgctgaccagcatgaaggacgtcctcaagatcaccacgtgcgtggagatgctgatcaaggagcagatgaggaaatacaaagtgaagatggaggagatcagccaactggaggctgcagagagtatcgccttccgcaggctttcgctcctgcgacaaaatgctccatggcctctcaaactggggttttcgtctccctatgagggggtcctgaacaagagccccaagacccgggacatccaggaggaggagctggaggtgctgctggaggaggaggcagccggcggcgatgaggaccgggaaaaggagattctcattgaacggatccagtccatcaaggaggagaaggaggacatcacctaccggctgccggagctggacccaaggggctcggacgaggagaacctggactcggagacgtcggccagcaccgagagcctgctggaggagcgggccgggcggggggcctcggaaggtcagtattaagggccccctgcgcctgctctcccttgccccggcgcgcccaccccgagccccctccccaccgtggccgcccctccacgacgaaggccgtcgtccttcgtaacggtcagagtgaagaccccccggcggacccccatcatgcccacggccaacatcaagctcccaccaggcctgccctcccacctgcctcgctgggcaccgggtgcccgggaggcggctgccccagtgcggcgccgggagccacctgcccgccgcccggaccagatacattccgtgtacatcacgcccggggcagacctgccagtgcagggcgccctggagcccctagaagaggatggccagccacctggggccaagcggaggtactcggatcccccaacgtactgcctgccccccgcctcgggccagaccaatggctgagagccacagctgacaaagtctgcatgtccgaggacggcccctgcactggagctgggcgccagagctgcagagctagtgttcggccctcagagaaggatccagaatcaaaagctcaagagtgacgtgaggtgggcaccggccccaagtgcagagtcaaggcagggagaggccggctggagccaggccccctcgcacgcagcccccaaatcatggacgcacctgtggggagcaccacatctccacctgcggcctcacatctccccactcccctttttgtacgtttaactgtttctttgtacgtggtttacgtaactttaaactgtaacagccttaatggaagaccaaatggttttttatatgtgtatgtacaaagttttctattaacgctgcccgtctcccttataacctggacgtgagctgtcagagcagaagccactaggccactgcgcgtctgaggctcagaccctgctgtggttggcttggggtggccaatgggctgggaccctccatgagagttttggacacttgggtcacctgacccgtgcctctctgacacatgtctccggggggcagccacctggccaatgtgcatttttgcacatgctggaaccttccatgggggtctgggctattggctggagccaggacatgagtcaggggcaccatggacctcacgtgccagggagacttgaatgtggctgtcactcttccggacgccaagggctgcaggaggctgcttttggcactacccaccccgtgtgacagaataggagccagcgactcaggactgctcacgggtcaggagggcaacgcctgaagtcagacctccctataggtcaacagggacaacctggggatctctggagcagggccctcctctctcaggcttggcccactcccccagacacctggacacgtggccacaaatctgggacaaggggcccccgcacagcatgaaataaaaagtgcctgagaagtgtgtgc

SEQ ID NO: 19166 - DNA, 7623 bp, Homo sapiens
  source 1..7623: mol_type = unassigned DNA
cggggcggagcggctcgagcagcggcgggctggcaggcggtcgtccggccggggacccggcccgggaccggcggcgcgcggcggccgaggccagctccaggacacgcgcgccccgagcctgggaggcatgctgaagccaggcggccggcaggatgagtgtgaaagaggcaggcagctcgggccgccgggagcaggcggcctaccacctgcacatctacccccagctgtccaccaccgagagccaggcctcgtgccgcgtgactgccaccaaggacagcaccacctcggacgtcatcaaggacgccattgccagcctgcggctggacggcaccaaatgttatgtgctggtggaggtcaaagagtcgggaggcgaggaatgggtgctggacgccaacgactcgcctgtgcaccgggtgctgctatggccccggcgggcacaggacgagcaccctcaggaggatggctactacttcctgctgcaggagcgcaacgcagatggaaccatcaagtacgtgcatatgcagctggtggcgcaggccacagccacccggcgcctagtggagcgtggcctcctgccacggcagcaggcggactttgatgacctgtgtaacctccccgagctaaccgagggcaacctcctgaagaacctcaagcaccgcttcctgcaacaaaagatctacacgtacgcggggagcatcctggtggccatcaacccctttaagttcctgcccatctacaaccccaagtacgtgaagatgtatgagaaccagcagctgggcaagctggagccacacgtcttcgcgctggccgacgtggcctactacaccatgctcaggaagcgcgtgaaccagtgcatcgtgatctcgggtgagagcggctccggcaagacccagagcaccaacttcctcatccactgcctcaccgccctcagccagaagggctacgccagcggcgtcgagaggaccatcctgggtgctggccctgtgctggaggcttttggaaatgccaagacagcccacaacaacaactccagccggtttgggaaattcatccaagtcagctacctagagagtggcatcgtgagaggagctgtcgtcgagaaatatctgcttgaaaagtctcgcctggtgtctcaggagaaggatgagaggaactaccatgtgttttattatttgttacttggggtcagcgaggaagagcgccaagaatttcagctcaagcagcctgaagattatttctacctcaaccagcataacttgaagattgaagatggggaggacctgaagcatgactttgagaggctcaagcaggccatggagatggtgggcttcctccccgccaccaagaagcagatttttgccgtcctctcggccatcctgtacctgggcaacgtcacttataagaagagagctacaggccgagaggaagggttggaggtcgggccacccgaggtgctggacaccctgtcgcagcttctgaaggtgaagcgagaaatcttggtggaggttctgaccaaaagaaaaacggtgaccgtcaacgacaagcttatccttccctacagcctcagcgaggccatcactgcccgcgactccatggccaagtctctgtacagcgccctgttcgactggattgtgctgcggatcaaccacgcactcctcaacaagaaggacgtggaagaggcagtctcgtgcctgtccattggggtcctggacatcttcgggtttgaagacttcgagaggaacagctttgagcagttctgcatcaactacgccaatgagcagctgcagtattacttcaaccagcacatcttcaagctggagcaggaggaatatcagggcgaggggatcacgtggcacaacatcggctacacagacaatgtcggctgcatccatctcatcagcaagaaacccacgggcctcttctacctgctggacgaggagagcaacttcccccacgccacgagccagaccctgctggccaagttcaaacagcaacatgaggacaataagtacttcctgggcaccccggtcatggagccagctttcatcatccagcacttcgcagggaaggtgaaatatcagatcaaggacttccgggagaagaacatggactacatgcggccagacatcgtggccctgctgcggggcagtgacagctcctacgtgcgggagctcatcggcatggaccccgtggccgtgttccgctgggccgtgctccgggctgctatccgggccatggcagtgcttcgggaggccggacgcctgcgggccgagagggccgaaaaggctgcaggtatgagcagccctggtgcccaaagtcacccagaagagctgccaagaggagccagcaccccttcggaaaaactttaccgcgatttgcataaccaaatgatcaagagcatcaaaggattgccctggcagggcgaggacccccgtagccttctccagtccctcagtcggctccagaaaccccgcgccttcatcctgaaaagtaaaggtatcaaacaaaagcagatcattccaaagaacctactggactccaagtccctgaaactcatcatcagcatgactctgcacgaccgcaccaccaagtccctactgcacctgcacaagaagaaaaagccaccaagcatcagcgcccagttccagacatcccttaacaagctcttggaggcactggggaaggcggagcccttctttatccgctgcatccgttccaatgctgaaaagaaagagctgtgctttgacgacgagctggtcctgcagcagctgcgctacaccggcatgctggagaccgtgcgcatccggaggtcagggtacagcgccaagtacacgttccaggatttcaccgagcagttccaggtgctcctgcccaaggatgcccagccctgcagggaggtcatctccaccctcctggagaaaatgaagatagacaagaggaactaccagatcgggaagaccaaggtcttcctgaaggagacggagcggcaagccctgcaggagacgctgcaccgggaggtggtgcggaaaatcctgctgctgcagagctggttccggatggtgctggagcgtcggcacttcctgcagatgaagcgggccgccgtcaccatccaggcctgctggcggtcctaccgggtccggagggcgctggagaggacgcaggctgccgtgtacctccaggcctcatggaggggctactggcagcggaagctctaccggcaccagaaacagagcatcatccgcctgcagagcctgtgtcgggggcacctgcagcgcaagagcttcagccagatgatctcggagaagcagaaggcagaagagaaggagagggaagccctggaagccgcaagagcaggtgctgaggagggcggacagggtcaggcggctggagggcagcaggtagctgagcaggggccggagccagcggaggatggcgggcacctggcatcggagcctgaggtgcagccaagtgacaggtcccccctagagcactcctcacctgagaaggaggccccaagcccagagaagactctcccaccccagaaaaccgtggcggctgaaagtcacgagaaagtccccagcagccgggagaagcgtgagtcgcgtcggcaaagagggctggagcacgtcaagttccagaacaaacacatccagtcctgcaaggaggagagtgccctcagagaaccttccagaagggtcacccaggagcaaggggtgagtctcctggaagacaaaaaggagagcagagaagatgaaacccttctagtcgtagagacggaggctgagaacacatctcaaaagcagcccacagagcaaccccaggccatggcagttggcaaggtctctgaagaaactgagaagacgctgcccagtgggagccccaggcctggccagttggagcggccgaccagcctggccctggacagcagggtcagcccaccggcccctggcagcgcccccgagacccccgaggacaagagcaaaccatgtggcagcccaagggttcaggaaaagcccgacagccccggaggctccacgcagatccagcggtacctggacgccgagcggctggccagcgccgtggaactgtggcggggcaagaagctggtggccgccgccagccctagtgccatgctcagccagtccctggacctcagcgacagacaccgggccacaggggccgccctcacgcccacagaggagaggcgcacctccttctccacgagcgacgtctccaagctcctcccgtccctggccaaggctcagcctgcagcagaaaccacggacggagagcgaagtgcgaaaaagccagctgtccagaagaagaagccaggcgacgcatcctccctcccagacgcagggctgtccccgggctctcaggtcgactctaaatccacgtttaagaggctttttctgcataaaaccaaggataaaaaatacagcctggagggcgcagaggagctggagaatgcagtgtccgggcacgtggtgctggaagccaccaccatgaagaagggcctggaagccccctccggacagcagcatcgccacgctgcaggtgagaagcgcaccaaggaaccaggaggcaaagggaagaagaaccgaaatgtcaagattgggaagatcacagtgtcagagaagtggcgggaatcggtgttccgccagatcaccaacgccaatgagctcaagtacctggacgagttcctgctcaacaagataaatgacctccgttcccagaagacgcccattgagagcttgtttatcgaagccaccgagaagttcaggagcaacatcaaaacgatgtactctgtcccgaacgggaagatccacgtgggctacaaggatctgatggagaactaccagatcgtcgtcagcaacctggccactgagcgtggccagaaggacaccaacctggtcctcaacctcttccagtcactgctagatgagttcacccgtggctacaccaagaacgacttcgagccagtgaagcagagcaaagctcagaagaagaagcggaagcaggagcgtgctgtccaggagcacaacgggcacgtgttcgccagctaccaggttagcatcccgcagtcgtgcgagcagtgcctctcctatatctggctcatggacaaggccctgctctgcagcgtgtgcaagatgacctgccacaagaagtgcgtgcacaagattcagagccactgctcctacacctacgggaggaagggcgagccaggcgttgagcctggccacttcggcgtgtgcgtagacagcctgaccagcgacaaggcctcggtgcccatcgtgctggagaagctcctggaacacgtggagatgcacggcctgtacaccgagggcctctaccgcaagtcgggtgctgccaaccgcactcgggagctccggcaggcgctgcagacagaccccgcagcagtcaagctggagaacttccccatccacgccatcacaggggtgctgaagcagtggctgcgggagctgcccgagcccctcatgaccttcgcacagtacggcgacttcctccgagccgtcgagctgccggagaagcaggagcagctggctgccatctatgccgtcctggagcaccttccagaagccaaccacaactccctggagagactcatcttccaccttgtcaaggtggccctgctcgaggatgtcaaccgcatgtcacctggggcgctggccattatcttcgcaccctgcctcctgcgctgccctgacaactcggacccgctgaccagcatgaaggacgtcctcaagatcaccacgtgcgtggagatgctgatcaaggagcagatgaggaaatacaaagtgaagatggaggagatcagccaactggaggctgcagagagtatcgccttccgcaggctttcgctcctgcgacaaaatgctccatggcctctcaaactggggttttcgtctccctatgagggggtcctgaacaagagccccaagacccgggacatccaggaggaggagctggaggtgctgctggaggaggaggcagccggcggcgatgaggaccgggaaaaggagattctcattgaacggatccagtccatcaaggaggagaaggaggacatcacctaccggctgccggagctggacccaaggggctcggacgaggagaacctggactcggagacgtcggccagcaccgagagcctgctggaggagcgggccgggcggggggcctcggaaggtcagtattaagggccccctgcgcctgctctcccttgccccggcgcgcccaccccgagccccctccccaccgtggccgcccctccacgacgaaggccgtcgtccttcgtaacggtcagagtgaagaccccccggcggacccccatcatgcccacggccaacatcaagctcccaccaggcctgccctcccacctgcctcgctgggcaccgggtgcccgggaggcggctgccccagtgcggcgccgggagccacctgcccgccgcccggaccagatacattccgtgtacatcacgcccggggcagacctgccagtgcagggcgccctggagcccctagaagaggatggccagccacctggggccaagcggaggtactcggatcccccaacgtactgcctgccccccgcctcgggccagaccaatggctgagagccacagctgacaaagtctgcatgtccgaggacggcccctgcactggagctgggcgccagagctgcagagctagtgttcggccctcagagaaggatccagaatcaaaagctcaagagtgacgtgaggtgggcaccggccccaagtgcagagtcaaggcagggagaggccggctggagccaggccccctcgcacgcagcccccaaatcatggacgcacctgtggggagcaccacatctccacctgcggcctcacatctccccactcccctttttgtacgtttaactgtttctttgtacgtggtttacgtaactttaaactgtaacagccttaatggaagaccaaatggttttttatatgtgtatgtacaaagttttctattaacgctgcccgtctcccttataacctggacgtgagctgtcagagcagaagccactaggccactgcgcgtctgaggctcagaccctgctgtggttggcttggggtggccaatgggctgggaccctccatgagagttttggacacttgggtcacctgacccgtgcctctctgacacatgtctccggggggcagccacctggccaatgtgcatttttgcacatgctggaaccttccatgggggtctgggctattggctggagccaggacatgagtcaggggcaccatggacctcacgtgccagggagacttgaatgtggctgtcactcttccggacgccaagggctgcaggaggctgcttttggcactacccaccccgtgtgacagaataggagccagcgactcaggactgctcacgggtcaggagggcaacgcctgaagtcagacctccctataggtcaacagggacaacctggggatctctggagcagggccctcctctctcaggcttggcccactcccccagacacctggacacgtggccacaaatctgggacaaggggcccccgcacagcatgaaataaaaagtgcctgagaagtgtgtgca

SEQ ID NO: 19167 - DNA, 1249 bp, Homo sapiens
  source 1..1249: mol_type = unassigned DNA
ggcgggaggagggttggtggcgaggccctggcccggacgtccaggggccgggaggctgcaggcgatggagccggtatggggagacgccctgctggagaagtggccgggtcccggccgtgcgtgggccggccctgcgccacctgggtgacctcagacacctgggccttggacggcccggctgcccggcggccaacgcctgccctcccggcgccgcggcgggtcctggcggtggattggggccgacccgggcgtgttcgtgtggagcacctgccctgtgcccaacactatcctagatgctttggagggtggaggagcctcctgttgcacggtcttgcctaaggtgaagcctccaaggaagccattagcataattaaacaaccaccatgtcgagcaaaaaggcaaagaccaagaccaccaagaagcgccctcagcgtgcaacatccaatgtgtttgccatgtttgaccagtcacagattcaggagttcaaagaggccttcaacatgattgatcagaacagagatggcttcatcgacaaggaagatttgcatgatatgcttgcttctctagggaagaatcccactgatgcataccttgatgccatgatgaatgaggccccagggcccatcaatttcaccatgttcctgaccatgtttggtgagaagttaaatggcacagatcctgaagatgtcatcagaaacgcctttgcttgctttgatgaagaagcaacaggcaccattcaggaagattacctaagagagctgctgacaaccatgggggatcggtttacagatgaggaagtggatgagctgtacagagaagcacctattgacaaaaaggggaatttcaattacatcgagttcacacgcatcctgaaacatggagccaaagacaaagatgactgaaagaactttagctaaaatcttccagttacattgtcttactctcttttacttctcagacacttcccccaccctcatagaacctgttgcatgcaacttagtttcacagctttgcctcttctttttgatgtatttattccagacctttctgccacttagcacttgtataatcagactggaaatggggatgagggtgtaaattgtattgaaaaagatcgcgaataaaaatcaacaaatgtgaaagcccagaaaaatatattcgtatttctggttttgctggatttttacatttttatataataaaaatgttattttgaaataaagattatgctgactcaaatgcaatgtaa

SEQ ID NO: 19168 - DNA, 2787 bp, Homo sapiens
  source 1..2787: mol_type = unassigned DNA
ctcctgagcagccgctgggagacagacggcaaccaggttgcccctctttgctccagctagaaagacttgagttagacaagcagcagcacacgcctccctacctcatggcgacagaaaatggagcagttgagctgggaattcagaacccatcaacagacaaggcacctaaaggtcccacaggtgaaagacccctggctgcagggaaagaccctggccccccagacccaaagaaagctccggatccacccaccctgaagaaagatgccaaagcccctgcctcagagaaaggggatggtaccctggcccaaccctcaactagcagccaaggccccaaaggagagggtgacaggggcggggggcccgcggagggcagtgctgggcccccggcagccctgccccagcagactgcgacacctgagaccagcgtcaagaagcccaaggctgagcagggagcctcaggcagccaggatcctggaaagcccagggtgggcaagaaggcagcagagggccaagcagcagccaggaggggctcacctgcctttctgcatagccccagctgtcctgccatcatctccagttctgagaagctgctggccaagaagcccccaagcgaggcatcagagctcacctttgaaggggtgcccatgacccacagccccacggatcccaggccagccaaggcagaagaaggaaagaacatcctggcagagagccagaaggaagtgggagagaaaaccccaggccaggctggccaggctaagatgcaaggggacacctcgagggggattgagttccaggctgttccctcagagaaatccgaggtggggcaggccctctgtctcacagccagggaggaggactgcttccagattttggatgattgcccgccacctccggcccccttccctcaccgcatggtggagctgaggaccgggaatgtcagcagtgaattcagtatgaactccaaggaggcgctcggaggtggcaagtttggggcagtctgtacctgcatggagaaagccacaggcctcaagctggcagccaaggtcatcaagaaacagactcccaaagacaaggaaatggtgttgctggagattgaggtcatgaaccagctgaaccaccgcaatctgatccagctgtatgcagccatcgagactccgcatgagatcgtcctgttcatggagtacatcgagggcggagagctcttcgagaggattgtggatgaggactaccatctgaccgaggtggacaccatggtgtttgtcaggcagatctgtgacgggatcctcttcatgcacaagatgagggttttgcacctggacctcaagccagagaacatcctgtgtgtcaacaccaccgggcatttggtgaagatcattgactttggcctggcacggaggtataaccccaacgagaagctgaaggtgaactttgggaccccagagttcctgtcacctgaggtggtgaattatgaccaaatctccgataagacagacatgtggagtatgggggtgatcacctacatgctgctgagcggcctctcccccttcctgggagatgatgacacagagaccctaaacaacgttctatctggcaactggtactttgatgaagagacctttgaggccgtatcagacgaggccaaagactttgtctccaacctcatcgtcaaggaccagagggcccggatgaacgctgcccagtgtctcgcccatccctggctcaacaacctggcggagaaagccaaacgctgtaaccgacgccttaagtcccagatcttgcttaagaaatacctcatgaagaggcgctggaagaaaaacttcattgctgtcagcgctgccaaccgcttcaagaagatcagcagctcgggggcactgatggctctgggggtctgagccctgggcgcagctgaagcctggacgcagccacacagtggccggggctgaagccacacagcccagaaggccagaaaaggcagccagatccccagggcagcctcgttaggacaaggctgtgccaggctgggaggctcggggctccccacgcccccatgcagtgaccgcttccccgatgtgagccgcctcggagtgtggcctggatccatcctgctagcacctccccagacagggctccagcctgtcggccacaccccagactccaggcccccgttgaagccgctcccggttccctccccagctcctcgtctttgaactgccgccgccgtggtgacccctgctttgccccactgggagagtccttagcctgggcctcctcctagctggagtgccatggctggggggtctcagcatgtagggcttctgtggttgtggatgggaggctcctggtggggcagaaaggctgcaacgctgattcctaaggcccagctgccagggaagacagagcaggctttgtgagagaggacctccatgcccccgccacctccccactccagcagataaggccgagcccacaccatctggcccaggctggcccccacccaccttccttgcgaccaccaacacacaggaactctgtgtgagagagagggcgcccagcccaggcctggtggagggggaggggagaagccaagggacacaggagaccacccccgagcttgcctcagggccaagccggcccaacccaaccactcggggcccccatcttgggggtcacccatggcctcagatgatggggtcagcaggcccaggagaattaggaaggccatggggcagcctccagtctgctctcagcttgtgccttgtaaataaatgtacaggttggatgtgg

SEQ ID NO: 19169 - DNA, 2956 bp, Homo sapiens
  source 1..2956: mol_type = unassigned DNA
actgcccacacccctgcctccgcctctgcccacccggcccaatcccttacaactgcccaggactgctcctgagcagccgctgggagacagacggcaaccaggttgcccctctttgctccaggtacctctctcccctcagttagcaggcctcggcttcctgtctcactgcagccagacgagaggggaaattggacagcctgacacactccactcttgtttctgcagctagaaagacttgagttagacaagcagcagcacacgcctccctacctcatggcgacagaaaatggagcagttgagctgggaattcagaacccatcaacagacaaggcacctaaaggtcccacaggtgaaagacccctggctgcagggaaagaccctggccccccagacccaaagaaagctccggatccacccaccctgaagaaagatgccaaagcccctgcctcagagaaaggggatggtaccctggcccaaccctcaactagcagccaaggccccaaaggagagggtgacaggggcggggggcccgcggagggcagtgctgggcccccggcagccctgccccagcagactgcgacacctgagaccagcgtcaagaagcccaaggctgagcagggagcctcaggcagccaggatcctggaaagcccagggtgggcaagaaggcagcagagggccaagcagcagccaggaggggctcacctgcctttctgcatagccccagctgtcctgccatcatctccagttctgagaagctgctggccaagaagcccccaagcgaggcatcagagctcacctttgaaggggtgcccatgacccacagccccacggatcccaggccagccaaggcagaagaaggaaagaacatcctggcagagagccagaaggaagtgggagagaaaaccccaggccaggctggccaggctaagatgcaaggggacacctcgagggggattgagttccaggctgttccctcagagaaatccgaggtggggcaggccctctgtctcacagccagggaggaggactgcttccagattttggatgattgcccgccacctccggcccccttccctcaccgcatggtggagctgaggaccgggaatgtcagcagtgaattcagtatgaactccaaggaggcgctcggaggtggcaagtttggggcagtctgtacctgcatggagaaagccacaggcctcaagctggcagccaaggtcatcaagaaacagactcccaaagacaaggaaatggtgttgctggagattgaggtcatgaaccagctgaaccaccgcaatctgatccagctgtatgcagccatcgagactccgcatgagatcgtcctgttcatggagtacatcgagggcggagagctcttcgagaggattgtggatgaggactaccatctgaccgaggtggacaccatggtgtttgtcaggcagatctgtgacgggatcctcttcatgcacaagatgagggttttgcacctggacctcaagccagagaacatcctgtgtgtcaacaccaccgggcatttggtgaagatcattgactttggcctggcacggaggtataaccccaacgagaagctgaaggtgaactttgggaccccagagttcctgtcacctgaggtggtgaattatgaccaaatctccgataagacagacatgtggagtatgggggtgatcacctacatgctgctgagcggcctctcccccttcctgggagatgatgacacagagaccctaaacaacgttctatctggcaactggtactttgatgaagagacctttgaggccgtatcagacgaggccaaagactttgtctccaacctcatcgtcaaggaccagagggcccggatgaacgctgcccagtgtctcgcccatccctggctcaacaacctggcggagaaagccaaacgctgtaaccgacgccttaagtcccagatcttgcttaagaaatacctcatgaagaggcgctggaagaaaaacttcattgctgtcagcgctgccaaccgcttcaagaagatcagcagctcgggggcactgatggctctgggggtctgagccctgggcgcagctgaagcctggacgcagccacacagtggccggggctgaagccacacagcccagaaggccagaaaaggcagccagatccccagggcagcctcgttaggacaaggctgtgccaggctgggaggctcggggctccccacgcccccatgcagtgaccgcttccccgatgtgagccgcctcggagtgtggcctggatccatcctgctagcacctccccagacagggctccagcctgtcggccacaccccagactccaggcccccgttgaagccgctcccggttccctccccagctcctcgtctttgaactgccgccgccgtggtgacccctgctttgccccactgggagagtccttagcctgggcctcctcctagctggagtgccatggctggggggtctcagcatgtagggcttctgtggttgtggatgggaggctcctggtggggcagaaaggctgcaacgctgattcctaaggcccagctgccagggaagacagagcaggctttgtgagagaggacctccatgcccccgccacctccccactccagcagataaggccgagcccacaccatctggcccaggctggcccccacccaccttccttgcgaccaccaacacacaggaactctgtgtgagagagagggcgcccagcccaggcctggtggagggggaggggagaagccaagggacacaggagaccacccccgagcttgcctcagggccaagccggcccaacccaaccactcggggcccccatcttgggggtcacccatggcctcagatgatggggtcagcaggcccaggagaattaggaaggccatggggcagcctccagtctgctctcagcttgtgccttgtaaataaatgtacaggttggatgtgg

SEQ ID NO: 19170 - DNA, 2765 bp, Homo sapiens
  source 1..2765: mol_type = unassigned DNA
aggagtctgtcagctacggaggacaatgaccttgcagacaccaccgcctgagtgagaaccaggggtctgtgcctctcctcattccccgctcttgcccttgtcaagcctgcaccagcatgtcaggaacctccaaggagagtctggggcatggggggctgccagggttgggcaagacctgcttaacaaccatggacacaaagctgaacatgctgaacgagaaggtggaccagctcctgcacttccaagaagatgtcacagagaagttgcagagcatgtgccgagacatgggccacctggagcggggcctgcacaggctggaggcctcccgggcaccgggcccgggcggggctgatggggttccccacattgacacccaggctgggtggcccgaggtcctggagctggtgagggccatgcagcaggatgcggcccagcacggtgccaggctggaggccctcttcaggatggtggctgcggtggacagggccatcgctttggtgggggccacgttccagaaatcaaaggtggcggatttcctcatgcaggggcgtgtgccctggaggagaggcagcccaggtgacagccctgaggagaataaagagcgagtggaagaagagggaggaaaaccaaagcatgtgctgagcaccagtggggtgcagtctgatgccagggagcctggggaagagagccagaaggcggacgtgctggaggggacagcggagaggctgccccccatcagagcgtcagggctgggagctgaccccgcccaggcagtggtctcaccgggccagggagatggtgttcctggcccagcccaggcattccctggccacctgcccctgcccacaaaggtggaagccaaggctcctgagacacccagcgagaacctcaggactggcctggaattggctccagcacccggcagggtcaatgtggtctccccgagcctggaggttgcaccaggtgcaggacaaggagcatcgtccagcaggcctgaccctgagcccttagaggaaggcacgaggctgactccagggcctggccctcagtgcccagggcctccagggctgccagcccaggccagggcaacccacagtggtggagaaacacctccaaggatctccatccacatacaagagatggatactcctggggagatgctgatgacaggcaggggcagccttggacccaccctcaccacagaggctccagcagctgcccagccaggcaagcagggcccacctgggaccgggcgctgcctccaagcccctgggactgagcccggagaacagacccctgaaggagccagagagctctccccgctgcaggagagcagcagccccgggggagtgaaggcagaggaggagcaaagggctggggccgagcctggcacgagaccaagcttggccaggagtgacgacaatgaccacgaggttggggccctgggcctgcagcagggcaaaagcccaggggcgggaaaccctgagcctgagcaggactgtgcagccagggctccggtgagagctgaagcagtaaggaggatgcccccaggcgccgaggctggcagcgtggttctggatgacagtccggccccaccagctccttttgaacaccgggtagtgagcgtcaaggagacctccatctctgcgggttacgaggtgtgccagcacgaagtcttgggagggggtcggtttggccaggtccacaggtgcacagagaagtccacaggcctcccactggctgccaagatcatcaaagtgaagagcgccaaggaccgggaggacgtgaagaacgagatcaacatcatgaaccagctcagccacgtgaacctgatccagctctatgacgccttcgagagcaagcacagctgcacccttgtcatggagtacgtggacgggggtgagctcttcgaccggatcacagatgagaagtaccacctgactgagctggatgtggtcctgttcaccaggcagatctgtgagggtgtgcattacctgcaccagcactacatcctgcacctggacctcaagccggagaacatattgtgcgtcaatcagacaggacatcaaattaagatcattgactttgggctggccagaaggtacaagcctcgagagaagctgaaggtgaacttcggcactcctgagttcctggccccagaagtcgtcaattatgagtttgtctcattccccacagacatgtggagtgtgggagtcatcacctacatgctactcagtggcttgtccccatttctaggggaaacagatgcagagaccatgaatttcattgtaaactgtagctgggattttgatgctgacacctttgaagggctctcggaggaggccaaggactttgtttcccggttgctggtcaaagagaagagctgcagaatgagtgccacacagtgcctgaaacacgagtggctgaataatttgcctgccaaagcttcaagatccaaaactcgtctcaaatcccaactactgctgcagaaatacatagctcaaagaaaatggaagaaacatttctatgtggtgactgctgccaacaggttaaggaaatttccaacttctccctaatcttcaactctgctgctccaatgggtccagaaattactgaggccagtggtgaagtgaagagatgactcaaacatttaaataatttggctttttggtattattgattccacttattttgtaaaaatggttatggctgctgccttccttgtggatgaaaagtggctgtaaagaagcttcctaagaacgttt

SEQ ID NO: 19171 - DNA, 1795 bp, Homo sapiens
  source 1..1795: mol_type = unassigned DNA
agagggccgaccagcagaggaagggagaccagagggcagcttgcacagatcttgtcttgggttataactgttgacaagccacttaactgcctccaggtttaagtttgtctgtgtataagatggaggtaacaatatttatacatctcactggagacttatgaaaacaagattttggacagatcccttgggacccatggatggaaagtgaataaagagcgagtggaagaagagggaggaaaaccaaagcatgtgctgagcaccagtggggtgcagtctgatgccagggagcctggggaaggatctccatccacatacaagagatggatactcctggggagatgctgatgacaggcaggggcagccttggacccaccctcaccacagaggctccagcagctgcccagccaggcaagcagggcccacctgggaccgggcgctgcctccaagcccctgggactgagcccggagaacagacccctgaaggagccagagagctctccccgctgcaggagagcagcagccccgggggagtgaaggcagaggaggagcaaagggctggggccgagcctggcacgagaccaagcttggccaggagtgacgacaatgaccacgaggttggggccctgggcctgcagcagggcaaaagcccaggggcgggaaaccctgagcctgagcaggactgtgcagccagggctccggtgagagctgaagcagtaaggaggatgcccccaggcgccgaggctggcagcgtggttctggatgacagtccggccccaccagctccttttgaacaccgggtagtgagcgtcaaggagacctccatctctgcgggttacgaggtgtgccagcacgaagtcttgggagggggtcggtttggccaggtccacaggtgcacagagaagtccacaggcctcccactggctgccaagatcatcaaagtgaagagcgccaaggaccgggaggacgtgaagaacgagatcaacatcatgaaccagctcagccacgtgaacctgatccagctctatgacgccttcgagagcaagcacagctgcacccttgtcatggagtacgtggacgggggtgagctcttcgaccggatcacagatgagaagtaccacctgactgagctggatgtggtcctgttcaccaggcagatctgtgagggtgtgcattacctgcaccagcactacatcctgcacctggacctcaagccggagaacatattgtgcgtcaatcagacaggacatcaaattaagatcattgactttgggctggccagaaggtacaagcctcgagagaagctgaaggtgaacttcggcactcctgagttcctggccccagaagtcgtcaattatgagtttgtctcattccccacagacatgtggagtgtgggagtcatcacctacatgctactcagtggcttgtccccatttctaggggaaacagatgcagagaccatgaatttcattgtaaactgtagctgggattttgatgctgacacctttgaagggctctcggaggaggccaaggactttgtttcccggttgctggtcaaagagaagagctgcagaatgagtgccacacagtgcctgaaacacgagtggctgaataatttgcctgccaaagcttcaagatccaaaactcgtctcaaatcccaactactgctgcagaaatacatagctcaaagaaaatggaagaaacatttctatgtggtgactgctgccaacaggttaaggaaatttccaacttctccctaatcttcaactctgctgctccaatgggtccagaaattact

SEQ ID NO: 19172 - DNA, 4876 bp, Homo sapiens
  source 1..4876: mol_type = unassigned DNA
gctgctgctggagagctgtgagaaggagaagcaggcattgctgcagaacctaaaggaagtggaagacaaggccagcgcctatgaggaccagctgcagggtcaggcacagcaggtggagaccctgcagaaggagaagctgagcgccactttcgagggcagtgagcaggtgcaccagctggaggagcagctggaggcacgagaggccagcgtgcgcaggctcgcagagcacgtgcagagcctctgtgacgagcgggacctcctcagacagcggttccaggagctgacagagcgcgtggccacgtccgacgaggatgtggctgagctccgggaaaagctgaggagaagagaggctgacaaccagagcctggagcactcctaccagagggtctccagccagctgcagagcatgcacactctgctgagagagaaggaggaagagctggagcgcattaaggaagcacatgagaaggttctggagaagaaggagcaggacctcaatgaggctttggttaaaatggttgccttggggagcagcttagaggaaacagaaattaagctccaggcaaaagaagagattttaaggaaatttgcaagtgaatctccaaaggacatggaagagccacggagtacccctgaagagacagaaagggatggcactttgctcccaggccaaccagtccaagccactagggcacctctaggcctcccacacacaaggctcgaggatgaggacgaggacctgggggctcctccgggggaagagtacggtgatggcagccccagtagggaagacagcatggtgcccccaaagtcagtggaagtgcttgacagggagggccatcagcagggcacagccaaactcgaccaaggggcacctggtgttaaaaggcaaagaatccggttctccacaatccagtgccaaagatacattcaccccgaagggtctgagaagacctggaccagcagcacatcttccgacaccagccaggaccggtcaccctcggaagaaagcatgtcctcagagcctgcacccagtgtactgcctgcaactggcgactctgacacgtacctctccatcatccactccctggagaccaagctctacgtcacagaggaaaagctcaaagacgtgaccgtgaggctggagagccagcagggtcagagccgtgaggcactgctcgcactgcaccaccagtgggcgggcaccgaggcccagctgcgtgagcagctccgcgccagcctgctccaggttggcgcactggcctcccagctggagcaggagaggcaggagagggccaggagggttgaagggcatgttggagagcttggggacttccaggtcaagaatagtcaggccctgatgtgcctggaaaattgccgagaacaactgagatctctgcctagggccagccaggaggatgagcaggacgcacgcgcagcctccctggccagtgtggagagtgcactcgtcagcgccatccaagccctgcagcactggccggccccagcccatggcggggcccgtgcacagctggagacaggtggcaccgaggagaatgggaagcctgcctccctgcagcagtgctcccagtctgagttgacagagcaggagcaggtgaggcttctttctgaccagattgctctggaggcctcgctgatcagccagatagcagattccctgaagaacacaacatcagatgtctcccgaatgctccatgagatttcttggtcaggacagccaccgatggaatctgctggggcccccgtagacacctgggccaggaaggtcctagtggatggtgagttctggagccaggttgagtctctgaggaagcacttggggacactgggaggagaggcagtcggtgcctcaggagacgggcagcaaagcatcccacagggcctggcccccatcctggccaatgccacatgggtcagggcagagctcagctttgccacacagtcagtgagggagtcgttccaccgcaggctacagagcatccaggagaccctgcggggcacccagacggccctgcggcagcacaaatgcctgctgagggaaatcctgggagcctaccaaaccccagactttgaaagagtgatgcagcaggtcttggaagccctcaggcttccagcgggccatgaagatggtgttcagctgtcctgggacctgagccccttaggagaagtcctgggccgagactcagacagctctcaggagcccttcgatgtgtctgaccagagccctggggcctttgttgctattcaggaggagcttgcccagcagctgaaggagaaggccagcctcttagaggagatagcggctgccttaccatctctgccacctgtggaatcgctgagagattgccagaagcttctccaggtgtcccagagtctctcgtataacacttgtttgggaggcctcggtcagtattcttcattgttggttcaggatgccattattcaggcccaggtttgctatgcgtcctgcagaatccggctagaatatgagaaggagctccagctctgcaaggagtcctggcaaacccgggagccctcctgctcagagcaggcacaggcagcccgggccctgagggaggagtatgaggagcttctccgcaagcagaagagcgagtacctggatgtgatcgccattgttgaaagggagaatgcagagctcaaggccaaggccgcccagctagaccatcagcagcagtgtctggaggatgcagagagcaagcacagcatgagcatgttcaccctgcggggcaggtatgaggaggagattcggtgtgtggtggagcagctgaccaggaccgagagcacactgcaggctgagcgcagccgggtcctgagccagctggatgcctcggtcagagacaggcaggacatggagaggcatcatggtgagcagatacagaccctggaggacaggttccagctcaaggtccgggagctgcagacgatccacgaggaggagctgaggaccctgcaggagcactactcgcagagcctgaggtgccttcaggacaccctctgcctccaccaggggccacaccccaaggccctgccagcccctgcccccaactggcaggccacccagggagaggctgactccatgacggggctgagggagcgcatccaggagctggaggcccagatggatgtcatgcgggaggagctgggacacaaggacctggagggcgacgcggccacactgcgtgagaagtaccagagggacttggagagccttaaggccacgtgcgagcgagggtttgcagcaatggaagaaacgcaccagaagaagattgaagatctccagaggcagcaccagcgggagctagagaaacttcgagaagagaaagaccgcctcctagccgaggagacagcggccaccatctcagccatcgaagccatgaagaacgcccaccgggaggaaatggagcgggagctggagaagagccagcggtcccagatcagcagcgtcaactcggatgttgaggccctgcggcgccagtacctggaggagctgcagtcggtgcagcgggaactggaggtcctctcggagcagtactcgcagaagtgcctggagaatgcccatctggcccaggcgctggaggccgagcggcaggccctgcggcagtgccagcgtgagaaccaggagctcaatgcccacaaccaggagctgaacaaccgcctggctgcagagatcacacggttgcggacgctgctgactggggacggcggtggggaggccactgggtcaccccttgcacagggcaaggatgcctatgaactagaggtcttattgcgggtaaaggaatcggaaatacagtacctgaaacaggagattagctccctcaaggatgagctgcagacggcactgcgggacaagaagtacgcaagtgacaagtacaaagacatctacacagagctcagcatcgcgaaggctaaggctgactgtgacatcagcaggttgaaggagcagctcaaggctgcaacggaagcactgggggagaagtcccctgacagtgccacggtgtccggatatgatataatgaaatctaaaagcaaccctgacttcttgaagaaagacagatcctgtgtcacccggcaactcagaaacatcaggtccaagagtctgaaggaaggcctgacggtgcaagaacggttgaagctctttgaatccagggacttgaagaaagactaggtgtgtcccatccaagttgagcacgcgccttccccagcttgcagcagcacaccccaagcgctgcttttcacctgtacctttgttttattattattattattattgctgttgttgtcatcgttaactgtgggcatggaatgcgtgaggctggcttctgggttgtccacaccactctctgctgtgttgacttcctgttgtcttcatcaaagcttttttccgtggtattctaaaattaggccagcagtgggggctgggagggcatctgtgttagtcctttcctggctgtgacccgccacactcactgtcagtattaaggcccagcagcctgttgataagctaccctgtctcaccatgtgctggtgtggaaacggggcccagccagcacgcctcaaggtagatggaatccccactggtcagagaaaaagctatgcggacactccagcttggcctgggtcacagcactgactcctcacccgctagtctggctgttaagaggagaaagtgcactgccttccagcccaggaggaggacagcattttgtatttgttccactgatgcagcttagaaccacacccctgagagtcgtggcaaacctttcacaacctggaaaatgttgaaagcaaccattcctatttttgtttgttttttattaaatcttgcacaaaa

SEQ ID NO: 19173 - DNA, 3846 bp, Homo sapiens
  source 1..3846: mol_type = unassigned DNA
atgtcggcagccaaggagaacccgtgcaggaaattccaggccaacatcttcaacaagagcaagtgtcagaactgcttcaagccccgcgagtcgcatctgctcaacgacgaggacctgacgcaggcaaaacccatttatggcggttggctgctcctggctccagatgggaccgactttgacaacccagtgcaccggtctcggaaatggcagcgacggttcttcatcctttacgagcacggcctcttgcgctacgccctggatgagatgcccacgacccttcctcagggcaccatcaacatgaaccagtgcacagatgtggtggatggggagggccgcacgggccagaagttctccctgtgtattctgacgcctgagaaggagcatttcatccgggcggagaccaaggagatcgtcagtgggtggctggagatgctcatggtctatccccggaccaacaagcagaatcagaagaagaaacggaaagtggagccccccacaccacaggagcctgggcctgccaaggtggctgttaccagcagcagcagcagcagcagcagcagcagcagcatccccagtgctgagaaagtccccaccaccaagtccacactctggcaggaagaaatgaggaccaaggaccagccagatggcagcagcctgagtccagctcagagtcccagccagagccagcctcctgctgccagctccctgcgggaacctgggctagagagcaaagaagaggagagcgccatgagtagcgaccgcatggactgtggccgcaaagtccgggtggagagcggctacttctctctggagaagaccaaacaggacttgaaggctgaagaacagcagctgcccccgccgctctcccctcccagccccagcacccccaaccacaggaggtcccaggtgattgaaaagtttgaggccttggacattgagaaggcagagcacatggagaccaatgcagtggggccctcaccatccagcgacacacgccagggccgcagcgagaagagggcgttccctaggaagcgggacttcaccaatgaagcccccccagctcctctcccagacgcctcggcttcccccctgtctccacaccgaagagccaagtcactggacaggaggtccacggagccctccgtgacgcccgacctgctgaatttcaagaaaggctggctgactaagcagtatgaggacggccagtggaagaaacactggtttgtcctcgccgatcaaagcctgagatactacagggattcagtggctgaggaggcagccgacttggatggagaaattgacttgtccgcatgttacgatgtcacagagtatccagttcagagaaactatggcttccagatacatacaaaggagggcgagtttaccctgtcggccatgacatctgggattcggcggaactggatccagaccatcatgaagcacgtgcacccgaccactgccccggatgtgaccagctcgttgccagaggaaaaaaacaagagcagctgctcttttgagacctgcccgaggcctactgagaagcaagaggcagagctgggggagccggaccctgagcagaagaggagccgcgcacgggagcggaggcgagagggccgctccaagacctttgactgggctgagttccgtcccatccagcaggccctggctcaggagcgggtgggcggcgtggggcctgctgacacccacgagcccctgcgccctgaggcggagcctggggagctggagcgggagcgtgcacggaggcgggaggagcgccgcaagcgcttcgggatgctcgacgccacagacgggccaggcactgaggatgcagccctgcgcatggaggtggaccggagcccagggctgcctatgagcgacctcaaaacgcataacgtccacgtggagattgagcagcggtggcatcaggtggagaccacacctctccgggaagagaagcaggtgcccatcgcccccgtccacctgtcttctgaagatgggggtgaccggctctccacacacgagctgacctctctgctcgagaaggagctggagcagagccagaaggaggcctcagaccttctggagcagaaccggctcctgcaggaccagctgagggtggccctgggccgggagcagagcgcccgtgagggctacgtgctgcaggccacgtgcgagcgagggtttgcagcaatggaagaaacgcaccagaagaagattgaagatctccagaggcagcaccagcgggagctagagaaacttcgagaagagaaagaccgcctcctagccgaggagacagcggccaccatctcagccatcgaagccatgaagaacgcccaccgggaggaaatggagcgggagctggagaagagccagcggtcccagatcagcagcgtcaactcggatgttgaggccctgcggcgccagtacctggaggagctgcagtcggtgcagcgggaactggaggtcctctcggagcagtactcgcagaagtgcctggagaatgcccatctggcccaggcgctggaggccgagcggcaggccctgcggcagtgccagcgtgagaaccaggagctcaatgcccacaaccaggagctgaacaaccgcctggctgcagagatcacacggttgcggacgctgctgactggggacggcggtggggaggccactgggtcaccccttgcacagggcaaggatgcctatgaactagaggtcttattgcgggtaaaggaatcggaaatacagtacctgaaacaggagattagctccctcaaggatgagctgcagacggcactgcgggacaagaagtacgcaagtgacaagtacaaagacatctacacagagctcagcatcgcgaaggctaaggctgactgtgacatcagcaggttgaaggagcagctcaaggctgcaacggaagcactgggggagaagtcccctgacagtgccacggtgtccggatatgatataatgaaatctaaaagcaaccctgacttcttgaagaaagacagatcctgtgtcacccggcaactcagaaacatcaggtccaagtccgtaattgagcaggtctcgtgggatacctgaaatgcacccgcttcccggcccatgcaggagagtctgaaggaaggcctgacggtgcaagaacggttgaagctctttgaatccagggacttgaagaaagactaggtgtgtcccatccaagttgagcacgcgccttccccagcttgcagcagcacaccccaagcgctgcttttcacctgtacctttgttttattattattattattattgctgttgttgtcatcgttaactgtgggcatggaatgcgtgaggctggcttctgggttgtccacaccactctctgctgtgttgacttcctgttgtcttcatcaaagcttttttccgtggtattctaaaattaggccagcagtgggggctgggagggcatctgtgttagtcctttcctggctgtgacccgccacactcactgtcagtattaaggcccagcagcctgttgataagctaccctgtctcaccatgtgctggtgtggaaacggggcccagccagcacgcctcaaggtagatggaatccccactggtcagagaaaaagctatgcggacactccagcttggcctgggtcacagcactgactcctcacccgctagtctggctgttaagaggagaaagtgcactgccttccagcccaggaggaggacagcattttgtatttgttccactgatgcagcttagaaccacacccctgagagtcgtggcaaacctttcacaacctggaaaatgttgaaagcaaccattcctatttttgtttgttttttattaaatcttgcacaaaa

SEQ ID NO: 19174 - DNA, 3134 bp, Homo sapiens
  source 1..3134: mol_type = unassigned DNA
gccaggccggccaggcctgcgccgccgccgccgccgccgtcgccgccgcgccgaccatgtcggcagccaaggagaacccgtgcaggaaattccaggccaacatcttcaacaagagcaagtgtcagaactgcttcaagccccgcgagtcgcatctgctcaacgacgaggacctgacgcaggcaaaacccatttatggcggttggctgctcctggctccagatgggaccgactttgacaacccagtgcaccggtctcggaaatggcagcgacggttcttcatcctttacgagcacggcctcttgcgctacgccctggatgagatgcccacgacccttcctcagggcaccatcaacatgaaccagtgcacagatgtggtggatggggagggccgcacgggccagaagttctccctgtgtattctgacgcctgagaaggagcatttcatccgggcggagaccaaggagatcgtcagtgggtggctggagatgctcatggtctatccccggaccaacaagcagaatcagaagaagaaacggaaagtggagccccccacaccacaggagcctgggcctgccaaggtggctgttaccagcagcagcagcagcagcagcagcagcagcagcatccccagtgctgagaaagtccccaccaccaagtccacactctggcaggaagaaatgaggaccaaggaccagccagatggcagcagcctgagtccagctcagagtcccagccagagccagcctcctgctgccagctccctgcgggaacctgggctagagagcaaagaagaggagagcgccatgagtagcgaccgcatggactgtggccgcaaagtccgggtggagagcggctacttctctctggagaagaccaaacaggacttgaaggctgaagaacagcagctgcccccgccgctctcccctcccagccccagcacccccaaccacaggaggtcccaggtgattgaaaagtttgaggccttggacattgagaaggcagagcacatggagaccaatgcagtggggccctcaccatccagcgacacacgccagggccgcagcgagaagagggcgttccctaggaagcgggacttcaccaatgaagcccccccagctcctctcccagacgcctcggcttcccccctgtctccacaccgaagagccaagtcactggacaggaggtccacggagccctccgtgacgcccgacctgctgaatttcaagaaaggctggctgactaagcagtatgaggacggccagtggaagaaacactggtttgtcctcgccgatcaaagcctgagatactacagggattcagtggctgaggaggcagccgacttggatggagaaattgacttgtccgcatgttacgatgtcacagagtatccagttcagagaaactatggcttccagatacatacaaaggagggcgagtttaccctgtcggccatgacatctgggattcggcggaactggatccagaccatcatgaagcacgtgcacccgaccactgccccggatgtgaccagctcgttgccagaggaaaaaaacaagagcagctgctcttttgagacctgcccgaggcctactgagaagcaagaggcagagctgggggagccggaccctgagcagaagaggagccgcgcacgggagcggaggcgagagggccgctccaagacctttgactgggctgagttccgtcccatccagcaggccctggctcaggagcgggtgggcggcgtggggcctgctgacacccacgagcccctgcgccctgaggcggagcctggggagctggagcgggagcgtgcacggaggcgggaggagcgccgcaagcgcttcgggatgctcgacgccacagacgggccaggcactgaggatgcagccctgcgcatggaggtggaccggagcccagggctgcctatgagcgacctcaaaacgcataacgtccacgtggagattgagcagcggtggcatcaggtggagaccacacctctccgggaagagaagcaggtgcccatcgcccccgtccacctgtcttctgaagatgggggtgaccggctctccacacacgagctgacctctctgctcgagaaggagctggagcagagccagaaggaggcctcagaccttctggagcagaaccggctcctgcaggaccagctgagggtggccctgggccgggagcagagcgcccgtgagggctacgtgctgcaggccacgtgcgagcgagggtttgcagcaatggaagaaacgcaccagaagaagattgaagatctccagaggcagcaccagcgggagctagagaaacttcgagaagagaaagaccgcctcctagccgaggagacagcggccaccatctcagccatcgaagccatgaagaacgcccaccgggaggaaatggagcgggagctggagaagagccagcggtcccagatcagcagcgtcaactcggatgttgaggccctgcggcgccagtacctggaggagctgcagtcggtgcagcgggaactggaggtcctctcggagcagtactcgcagaagtgcctggagaatgcccatctggcccaggcgctggaggccgagcggcaggccctgcggcagtgccagcgtgagaaccaggagctcaatgcccacaaccaggagctgaacaaccgcctggctgcagagatcacacggttgcggacgctgctgactggggacggcggtggggaggccactgggtcaccccttgcacagggcaaggatgcctatgaactagaggtcttattgcgggtaaaggaatcggaaatacagtacctgaaacaggagattagctccctcaaggatgagctgcagacggcactgcgggacaagaagtacgcaagtgacaagtacaaagacatctacacagagctcagcatcgcgaaggctaaggctgactgtgacatcagcaggttgaaggagcagctcaaggctgcaacggaagcactgggggagaagtcccctgacagtgccacggtgtccggatatgatataatgaaatctaaaagcaaccctgacttcttgaagaaagacagatcctgtgtcacccggcaactcagaaacatcaggtccaagtccgtaattgagcaggtctcgtgggatacctga

SEQ ID NO: 19175 - DNA, 527 bp, Homo sapiens
  source 1..527: mol_type = unassigned DNA
gcggccgcgctgagcccctagcccgccgggagcgccaggccggccaggcctgcgccgccgccgccgccgccgtcgccgccgcgccgaccatgtcggcagccaaggagaacccgtgcaggaaattccaggccaacatcttcaacaagagcaagtgtcagaactgcttcaagccccgcgagtcgcatctgctcaacgacgaggacctgacgcagcaaaacacccacccccttgaaatgaaacgtggagctcacatatatgatgcacgaatgttctcatgttgaaggacaggaagaggaatggcatcagctatgagaccaccctgacccccacccgctgccccatcctacacccgaggtggcccctgaagcatgacctccagggatcttcacagtttgaagagccgctgatatactctaatacttgcagtaatattttttaatagaatgcaatattggatgtacacaaaaggatacaagcagcatacatttacaatataaatctaaataataaaaatgaatgctcgtgaa

SEQ ID NO: 19176 - DNA, 893 bp, Homo sapiens
  source 1..893: mol_type = unassigned DNA
gccaggccggccaggcctgcgccgccgccgccgccgccgtcgccgccgcgccgaccatgtcggcagccaaggagaacccgtgcaggaaattccaggccaacatcttcaacaagagcaagtgtcagaactgcttcaagccccgcgagtcgcatctgctcaacgacgaggacctgacgcaggcaaaacccatttatggcggttggctgctcctggctccagatgggaccgactttgacaacccagtgcaccggtctcggaaatggcagcgacggttcttcatcctttacgagcacggcctcttgcgctacgccctggatgagatgatgtcttcccagtgactctccttggggcctggggaaaccacaagggagcttggattcattcacccattgctgccttgctgtgtgcctcagaggggctcagaggtggaaaataaatatgaaaaagcatccttgtcttctagaatctcgtcggctgctgggaagaccaaggggccagccatcgcagggagcataagcactgagacaggcacacgtgcctgcccggctatcgtagccaggctggcagccttgcaactccctggggaagaacaatctaggaacattctggggtgtggagcaggaagggagtgtcacatgcaaaaggcaggatcagccaaagcagaggggctgaagaagcagtgattcccccacctaatgtcagaagtaaaatcagttcatggtgaaaatttggggaaacaaaatcatgcagcaaaattgcctattaaaccccacacggaggtaaaaatcggttcatattgtggttatgtatctattctcttatgatgtgtatttatgtgcttatgtaagacctaaaaacaataatttttaaataaaccagttatttttaataag

SEQ ID NO: 19177 - DNA, 3839 bp, Homo sapiens
  source 1..3839: mol_type = unassigned DNA
gccaggccggccaggcctgcgccgccgccgccgccgccgtcgccgccgcgccgaccatgtcggcagccaaggagaacccgtgcaggaaattccaggccaacatcttcaacaagagcaagtgtcagaactgcttcaagccccgcgagtcgcatctgctcaacgacgaggacctgacgcaggcaaaacccatttatggcggttggctgctcctggctccagatgggaccgactttgacaacccagtgcaccggtctcggaaatggcagcgacggttcttcatcctttacgagcacggcctcttgcgctacgccctggatgagatgcccacgacccttcctcagggcaccatcaacatgaaccagtgcacagatgtggtggatggggagggccgcacgggccagaagttctccctgtgtattctgacgcctgagaaggagcatttcatccgggcggagaccaaggagatcgtcagtgggtggctggagatgctcatggtctatccccggaccaacaagcagaatcagaagaagaaacggaaagtggagccccccacaccacaggagcctgggcctgccaaggtggctgttaccagcagcagcagcagcagcagcagcagcagcagcatccccagtgctgagaaagtccccaccaccaagtccacactctggcaggaagaaatgaggaccaaggaccagccagatggcagcagcctgagtccagctcagagtcccagccagagccagcctcctgctgccagctccctgcgggaacctgggctagagagcaaagaagaggagagcgccatgagtagcgaccgcatggactgtggccgcaaagtccgggtggagagcggctacttctctctggagaagaccaaacaggacttgaaggctgaagaacagcagctgcccccgccgctctcccctcccagccccagcacccccaaccacaggaggtcccaggtgattgaaaagtttgaggccttggacattgagaaggcagagcacatggagaccaatgcagtggggccctcaccatccagcgacacacgccagggccgcagcgagaagagggcgttccctaggaagcgggacttcaccaatgaagcccccccagctcctctcccagacgcctcggcttcccccctgtctccacaccgaagagccaagtcactggacaggaggtccacggagccctccgtgacgcccgacctgctgaatttcaagaaaggctggctgactaagcagtatgaggacggccagtggaagaaacactggtttgtcctcgccgatcaaagcctgagatactacagggattcagtggctgaggaggcagccgacttggatggagaaattgacttgtccgcatgttacgatgtcacagagtatccagttcagagaaactatggcttccagatacatacaaaggagggcgagtttaccctgtcggccatgacatctgggattcggcggaactggatccagaccatcatgaagcacgtgcacccgaccactgccccggatgtgaccagctcgttgccagaggaaaaaaacaagagcagctgctcttttgagacctgcccgaggcctactgagaagcaagaggcagagctgggggagccggaccctgagcagaagaggagccgcgcacgggagcggaggcgagagggccgctccaagacctttgactgggctgagttccgtcccatccagcaggccctggctcaggagcgggtgggcggcgtggggcctgctgacacccacgagcccctgcgccctgaggcggagcctggggagctggagcgggagcgtgcacggaggcgggaggagcgccgcaagcgcttcgggatgctcgacgccacagacgggccaggcactgaggatgcagccctgcgcatggaggtggaccggagcccagggctgcctatgagcgacctcaaaacgcataacgtccacgtggagattgagcagcggtggcatcaggtggagaccacacctctccgggaagagaagcaggtgcccatcgcccccgtccacctgtcttctgaagatgggggtgaccggctctccacacacgagctgacctctctgctcgagaaggagctggagcagagccagaaggaggcctcagaccttctggagcagaaccggctcctgcaggaccagctgagggtggccctgggccgggagcagagcgcccgtgagggctacgtgctgcaggccacgtgcgagcgagggtttgcagcaatggaagaaacgcaccagaagaagattgaagatctccagaggcagcaccagcgggagctagagaaacttcgagaagagaaagaccgcctcctagccgaggagacagcggccaccatctcagccatcgaagccatgaagaacgcccaccgggaggaaatggagcgggagctggagaagagccagcggtcccagatcagcagcgtcaactcggatgttgaggccctgcggcgccagtacctggaggagctgcagtcggtgcagcgggaactggaggtcctctcggagcagtactcgcagaagtgcctggagaatgcccatctggcccaggcgctggaggccgagcggcaggccctgcggcagtgccagcgtgagaaccaggagctcaatgcccacaaccaggagctgaacaaccgcctggctgcagagatcacacggttgcggacgctgctgactggggacggcggtggggaggccactgggtcaccccttgcacagggcaaggatgcctatgaactagaggtcttattgcgggtaaaggaatcggaaatacagtacctgaaacaggagattagctccctcaaggatgagctgcagacggcactgcgggacaagaagtacgcaagtgacaagtacaaagacatctacacagagctcagcatcgcgaaggctaaggctgactgtgacatcagcaggttgaaggagcagctcaaggctgcaacggaagcactgggggagaagtcccctgacagtgccacggtgtccggatatgatataatgaaatctaaaagcaaccctgacttcttgaagaaagacagatcctgtgtcacccggcaactcagaaacatcaggtccaagagtctgaaggaaggcctgacggtgcaagaacggttgaagctctttgaatccagggacttgaagaaagactaggtgtgtcccatccaagttgagcacgcgccttccccagcttgcagcagcacaccccaagcgctgcttttcacctgtacctttgttttattattattattattattgctgttgttgtcatcgttaactgtgggcatggaatgcgtgaggctggcttctgggttgtccacaccactctctgctgtgttgacttcctgttgtcttcatcaaagcttttttccgtggtattctaaaattaggccagcagtgggggctgggagggcatctgtgttagtcctttcctggctgtgacccgccacactcactgtcagtattaaggcccagcagcctgttgataagctaccctgtctcaccatgtgctggtgtggaaacggggcccagccagcacgcctcaaggtagatggaatccccactggtcagagaaaaagctatgcggacactccagcttggcctgggtcacagcactgactcctcacccgctagtctggctgttaagaggagaaagtgcactgccttccagcccaggaggaggacagcattttgtatttgttccactgatgcagcttagaaccacacccctgagagtcgtggcaaacctttcacaacctggaaaatgttgaaagcaaccattcctatttttgtttgttttttattaaatcttgcacaaaa

SEQ ID NO: 19178 - DNA, 4043 bp, Homo sapiens
  source 1..4043: mol_type = unassigned DNA
tccggttctccacaatccagtgccaaagatacattcaccccgaagggtctgagaagacctggaccagcagcacatcttccgacaccagccaggaccggtcaccctcggaagaaagcatgtcctcagagcctgcacccagtgtactgcctgcaactggcgactctgacacgtacctctccatcatccactccctggagaccaagctctacgtcacagaggaaaagctcaaagacgtgaccgtgaggctggagagccagcagggtcagagccgtgaggcactgctcgcactgcaccaccagtgggcgggcaccgaggcccagctgcgtgagcagctccgcgccagcctgctccaggttggcgcactggcctcccagctggagcaggagaggcaggagagggccaggagggttgaagggcatgttggagagcttggggacttccaggtcaagaatagtcaggccctgatgtgcctggaaaattgccgagaacaactgagatctctgcctagggccagccaggaggatgagcaggacgcacgcgcagcctccctggccagtgtggagagtgcactcgtcagcgccatccaagccctgcagcactggccggccccagcccatggcggggcccgtgcacagctggagacaggtggcaccgaggagaatgggaagcctgcctccctgcagcagtgctcccagtctgagttgacagagcaggagcaggtgaggcttctttctgaccagattgctctggaggcctcgctgatcagccagatagcagattccctgaagaacacaacatcagatgtctcccgaatgctccatgagatttcttggtcaggacagccaccgatggaatctgctggggcccccgtagacacctgggccaggaaggtcctagtggatggtgagttctggagccaggttgagtctctgaggaagcacttggggacactgggaggagaggcagtcggtgcctcaggagacgggcagcaaagcatcccacagggcctggcccccatcctggccaatgccacatgggtcagggcagagctcagctttgccacacagtcagtgagggagtcgttccaccgcaggctacagagcatccaggagaccctgcggggcacccagacggccctgcggcagcacaaatgcctgctgagggaaatcctgggagcctaccaaaccccagactttgaaagagtgatgcagcaggtcttggaagccctcaggcttccagcgggccatgaagatggtgttcagctgtcctgggacctgagccccttaggagaagtcctgggccgagactcagacagctctcaggagcccttcgatgtgtctgaccagagccctggggcctttgttgctattcaggaggagcttgcccagcagctgaaggagaaggccagcctcttagaggagatagcggctgccttaccatctctgccacctgtggaatcgctgagagattgccagaagcttctccaggtgtcccagagtctctcgtataacacttgtttgggaggcctcggtcagtattcttcattgttggttcaggatgccattattcaggcccaggtttgctatgcgtcctgcagaatccggctagaatatgagaaggagctccagctctgcaaggagtcctggcaaacccgggagccctcctgctcagagcaggcacaggcagcccgggccctgagggaggagtatgaggagcttctccgcaagcagaagagcgagtacctggatgtgatcgccattgttgaaagggagaatgcagagctcaaggccaaggccgcccagctagaccatcagcagcagtgtctggaggatgcagagagcaagcacagcatgagcatgttcaccctgcggggcaggtatgaggaggagattcggtgtgtggtggagcagctgaccaggaccgagagcacactgcaggctgagcgcagccgggtcctgagccagctggatgcctcggtcagagacaggcaggacatggagaggcatcatggtgagcagatacagaccctggaggacaggttccagctcaaggtccgggagctgcagacgatccacgaggaggagctgaggaccctgcaggagcactactcgcagagcctgaggtgccttcaggacaccctctgcctccaccaggggccacaccccaaggccctgccagcccctgcccccaactggcaggccacccagggagaggctgactccatgacggggctgagggagcgcatccaggagctggaggcccagatggatgtcatgcgggaggagctgggacacaaggacctggagggcgacgcggccacactgcgtgagaagtaccagagggacttggagagccttaaggccacgtgcgagcgagggtttgcagcaatggaagaaacgcaccagaagaagattgaagatctccagaggcagcaccagcgggagctagagaaacttcgagaagagaaagaccgcctcctagccgaggagacagcggccaccatctcagccatcgaagccatgaagaacgcccaccgggaggaaatggagcgggagctggagaagagccagcggtcccagatcagcagcgtcaactcggatgttgaggccctgcggcgccagtacctggaggagctgcagtcggtgcagcgggaactggaggtcctctcggagcagtactcgcagaagtgcctggagaatgcccatctggcccaggcgctggaggccgagcggcaggccctgcggcagtgccagcgtgagaaccaggagctcaatgcccacaaccaggagctgaacaaccgcctggctgcagagatcacacggttgcggacgctgctgactggggacggcggtggggaggccactgggtcaccccttgcacagggcaaggatgcctatgaactagaggtcttattgcgggtaaaggaatcggaaatacagtacctgaaacaggagattagctccctcaaggatgagctgcagacggcactgcgggacaagaagtacgcaagtgacaagtacaaagacatctacacagagctcagcatcgcgaaggctaaggctgactgtgacatcagcaggttgaaggagcagctcaaggctgcaacggaagcactgggggagaagtcccctgacagtgccacggtgtccggatatgatataatgaaatctaaaagcaaccctgacttcttgaagaaagacagatcctgtgtcacccggcaactcagaaacatcaggtccaagtccgtaattgagcaggtctcgtgggatacctgaaatgcacccgcttcccggcccatgcaggagagtctgaaggaaggcctgacggtgcaagaacggttgaagctctttgaatccagggacttgaagaaagactaggtgtgtcccatccaagttgagcacgcgccttccccagcttgcagcagcacaccccaagcgctgcttttcacctgtacctttgttttattattattattattattgctgttgttgtcatcgttaactgtgggcatggaatgcgtgaggctggcttctgggttgtccacaccactctctgctgtgttgacttcctgttgtcttcatcaaagcttttttccgtggtattctaaaattaggccagcagtgggggctgggagggcatctgtgttagtcctttcctggctgtgacccgccacactcactgtcagtattaaggcccagcagcctgttgataagctaccctgtctcaccatgtgctggtgtggaaacggggcccagccagcacgcctcaaggtagatggaatccccactggtcagagaaaaagctatgcggacactccagcttggcctgggtcacagcactgactcctcacccgctagtctggctgttaagaggagaaagtgcactgccttccagcccaggaggaggacagcattttgtatttgttccactgatgcagcttagaaccacacccctgagagtcgtggcaaacctttcacaacctggaaaatgttgaaagcaaccattcctatttttgtttgttttttattaaatcttgcacaaaa

SEQ ID NO: 19179 - DNA, 837 bp, Homo sapiens
  source 1..837: mol_type = unassigned DNA
agcaagaggcagagctgggggagccggaccctgagcagaagaggagccgcgcacgggagcggaggcgagagggccgctccaagacctttgactgggctgagttccgtcccatccagcaggccctggctcaggagcgggtgggcggcgtggggcctgctgacacccacgagcccctgcgccctgaggcggagcctggggagctggagcgggagcgtgcacggaggcgggaggagcgccgcaagcgcttcgggatgctcgacgccacagacgggccaggcactgaggatgcagccctgcgcatggaggtggaccggagcccagggctgcctatgagcgacctcaaaacgcataacgtccacgtggagattgagcagcggtggcatcaggtggagaccacacctctccgggaagagaagcaggtgcccatcgcccccgtccacctgtcttctgaagatgggggtgaccggctctccacacacgagctgacctctctgctcgagaaggagctggagcagagccagaaggaggcctcagaccttctggagcagaaccggctcctgcaggaccagctgagggtggccctgggccgggagcagagcgcccgtgagggctacgtgctgcagactgaagtggccgcctccccatcgggtgcctggcagaggctccatagagtcaaccaagaccttcaaagtgagcttgaagcccagtgccagcgccaggagctgattacacaccagattcagaccctgaagcgtagctatggggaggccaaggacacgatccggcaccacgaggctgagatccggagccttcaggcacggctcagcaatgcggccg

SEQ ID NO: 19180 - DNA, 746 bp, Homo sapiens
  source 1..746: mol_type = unassigned DNA
ttaagacaacagactgtggaggagctgcagtcggtgcagcgggaactggaggtcctctcggagcagtactcgcagaagtgcctggagaatgcccatctggcccaggcgctggaggccgagcggcaggccctgcggcagtgccagcgtgagaaccaggagctcaatgcccacaaccaggtcttattgcgggtaaaggaatcggaaatacagtacctgaaacaggagattagctccctcaaggatgagctgcagacggcactgcgggacaagaagtacgcaagtgacaagtacaaagacatctacacagagctcagcatcgcgaaggctaaggctgactgtgacatcagcaggttgaaggagcagctcaaggctgcaacggaagcactgggggagaagtcccctgacagtgccacggtgtccggatatgatataatgaaatctaaaagcaaccctgacttcttgaagaaagacagatcctgtgtcacccggcaactcagaaacatcaggtccaagagtctgaaggaaggcctgacggtgcaagaacggttgaagctctttgaatccagggacttgaagaaagactaggtgtgtcccatccaagttgagcacgcgccttccccagcttgcagcagcacaccccaagcgctgcttttcacctgtacctttgttttattattattattattattgctgttgttgtcatcgttaactgtgggcatggaatgcgtgaggctggcttctgggtt

SEQ ID NO: 19181 - DNA, 3244 bp, Homo sapiens
  source 1..3244: mol_type = unassigned DNA
ctgagcccctagcccgccgggagcgccaggccggccaggcctgcgccgccgccgccgccgccgtcgccgccgcgccgaccatgtcggcagccaaggagaacccgtgcaggaaattccaggccaacatcttcaacaagagcaagtgtcagaactgcttcaagccccgcgagtcgcatctgctcaacgacgaggacctgacgcaggcaaaacccatttatggcggttggctgctcctggctccagatgggaccgactttgacaacccagtgcaccggtctcggaaatggcagcgacggttcttcatcctttacgagcacggcctcttgcgctacgccctggatgagatgcccacgacccttcctcagggcaccatcaacatgaaccagtgcacagatgtggtggatggggagggccgcacgggccagaagttctccctgtgtattctgacgcctgagaaggagcatttcatccgggcggagaccaaggagatcgtcagtgggtggctggagatgctcatggtctatccccggaccaacaagcagaatcagaagaagaaacggaaagtggagccccccacaccacaggagcctgggcctgccaaggtggctgttaccagcagcagcagcagcagcagcagcagcagcagcatccccagtgctgagaaagtccccaccaccaagtccacactctggcaggaagaaatgaggaccaaggaccagccagatggcagcagcctgagtccagctcagagtcccagccagagccagcctcctgctgccagctccctgcgggaacctgggctagagagcaaagaagaggagagcgccatgagtagcgaccgcatggactgtggccgcaaagtccgggtggagagcggctacttctctctggagaagaccaaacaggacttgaaggctgaagaacagcagctgcccccgccgctctcccctcccagccccagcacccccaaccacaggaggtcccaggtgattgaaaagtttgaggccttggacattgagaaggcagagcacatggagaccaatgcagtggggccctcaccatccagcgacacacgccagggccgcagcgagaagagggcgttccctaggaagcggcccgacctgctgaatttcaagaaaggctggctgactaagcagtatgaggacggccagtggaagaaacactggtttgtcctcgccgatcaaagcctgagatactacagggattcagtggctgaggaggcagccgacttggatggagaaattgacttgtccgcatgttacgatgtcacagagtatccagttcagagaaactatggcttccagatacatacaaaggagggcgagtttaccctgtcggccatgacatctgggattcggcggaactggatccagaccatcatgaagcacgtgcacccgaccactgccccggatgtgaccagctcgttgccagaggaaaaaaacaagagcagctgctcttttgagacctgcccgaggcctactgagaagcaagaggcagagctgggggagccggaccctgagcagaagaggagccgcgcacgggagcggaggcgagagggccgctccaagacctttgactgggctgagttccgtcccatccagcaggccctggctcaggagcgggtgggcggcgtggggcctgctgacacccacgagcccctgcgccctgaggcggagcctggggagctggagcgggagcgtgcacggaggcgggaggagcgccgcaagcgcttcgggatgctcgacgccacagacgggccaggcactgaggatgcagccctgcgcatggaggtggaccggagcccagggctgcctatgagcgacctcaaaacgcataacgtccacgtggagattgagcagcggtggcatcaggtggagaccacacctctccgggaagagaagcaggtgcccatcgcccccgtccacctgtcttctgaagatgggggtgaccggctctccacacacgagctgacctctctgctcgagaaggagctggagcagagccagaaggaggcctcagaccttctggagcagaaccggctcctgcaggaccagctgagggtggccctgggccgggagcagagcgcccgtgagggctacgtgctgcaggccacgtgcgagcgagggtttgcagcaatggaagaaacgcaccagaagaagattgaagatctccagaggcagcaccagcgggagctagagaaacttcgagaagagaaagaccgcctcctagccgaggagacagcggccaccatctcagccatcgaagccatgaagaacgcccaccgggaggaaatggagcgggagctggagaagagccagcggtcccagatcagcagcgtcaactcggatgttgaggccctgcggcgccagtacctggaggagctgcagtcggtgcagcgggaactggaggtcctctcggagcagtactcgcagaagtgcctggagaatgcccatctggcccaggcgctggaggccgagcggcaggccctgcggcagtgccagcgtgagaaccaggagctcaatgcccacaaccaggagctgaacaaccgcctggctgcagagatcacacggttgcggacgctgctgactggggacggcggtggggaggccactgggtcaccccttgcacagggcaaggatgcctatgaactagaggtcttattgcgggtaaaggaatcggaaatacagtacctgaaacaggagattagctccctcaaggatgagctgcagacggcactgcgggacaagaagtacgcaagtgacaagtacaaagacatctacacagagctcagcatcgcgaaggctaaggctgactgtgacatcagcaggttgaaggagcagctcaaggctgcaacggaagcactgggggagaagtcccctgacagtgccacggtgtccggatatgatataatgaaatctaaaagcaaccctgacttcttgaagaaagacagatcctgtgtcacccggcaactcagaaacatcaggtccaagagtctgaaggaaggcctgacggtgcaagaacggttgaagctctttgaatccagggacttgaagaaagactaggtgtgtcccatccaagttgagcacgcgccttccccagcttgcagcagcacaccccaagcgctgcttttcacctgtacctttgttttattattattattattattgctgttgttgtcatcgttaactgtgggcatggaatgcgtgaggctggcttctgggtt

SEQ ID NO: 19182 - DNA, 2796 bp, Homo sapiens
  source 1..2796: mol_type = unassigned DNA
gcggccgcggggccccggacaagggtccgcagagctgcagccttcgagggccagccctctccgagtccggggctgggtcccaccagtgacaaggcggcagccccgcgcacaccaaagagaaggcggctgtggcggcagcggcagccccagccatgctgtgttatgtgacgaggccggacgcggtgctgatggaggtggaggtggaggcgaaagccaacggcgaggactgcctcaaccaggcatatctttttcttgcacatcaaggaggccctcttggcaggccacctcttgtgttccccagagcaggcagtggaactcagtgccctcctggcccagaccaagtttggagactacaaccagaacactgccaagtataactatgaggagctctgtgccaaggagctctcctctgccaccttgaacagcattgttgcaaaacataaggagttggaggggaccagccaggcttcagctgaataccaagttttgcagattgtgtcggcaatggaaaactatggcatagaatggcattctgtgcgggatagcgaagggcagaaactgctcattggggttggacctgaaggaatctcaatttgtaaagatgactttagcccaattaataggatagcttatcctgtggtgcagatggccacccagtcaggaaagaatgtatatttgacggtcaccaaggaatctgggaacagcatcgtgctcttgtttaaaatgatcagcaccagggcggccagcgggctctaccgagcgataacagagacgcacgcattctacaggtgtgacacagtgaccagcgccgtgatgatgcagtatagccgtgacttgaagggccacttggcatctctgtttctgaatgaaaacattaaccttggcaagaaatatgtctttgatattaaaagaacatcaaaggaggtgtatgaccatgccaggagggctctgtacaatgctggcgttgtggacctcgtttcaagaaacaaccagagcccttcacactcgcctctgaagtcctcagaaagcagcatgaactgcagcagctgcgagggcctcagctgccagcagacccgggtgctgcaggagaagctacgcaagctgaaggaagccatgctgtgcatggtgtgctgcgaggaggagatcaactccaccttctgtccctgtggccacactgtgtgctgtgagagctgcgccgcccagctacagtcatgtcccgtctgcaggtcgcgtgtggagcatgtccagcacgtctatctgccaacgcacaccagtcttctcaatctgactgtaatctaatctgttgtgcttttgttggacttggcatgtttccatgaactgcactattataaactattaaaatgatagattgtggagaaagtaattattccaacacccatctgccatgcgatgttaaaaaaaaaaaaaaggaagaaaaataacacagctactcctcactgcaaaaacatatccatgcgtagaatcaacaactccagtcatgggaccaggaggagctctgggacgcagacacattccttggatgttgattttttttatgatctagtaaaggaataggtaaagtctttgatgtcagtgaagtggcaacatagccaaaaagttgggtaccttttaggaaatgatgttgtaagtctccttaatgtatcctgaggtaagtttcctactggcagcagattttgtaagaattacttttaagaatttcattctttttgtatggtcatggagctccaaccatttttaataggaaagtcttttgtaaattgttgtcgttttaatgtcatttctgtctttataacttgatcaagaatgattggaaggcaaacaggtttacaaatcaattctgtgacttttaaaaagttgacaatgttgtcagatttaaaccagtgtggctagtaaaaagcagctcactcaatgtgggtggctccctattcctttacgctccccctatccctaccccacaagcctttcgattataaaatactaccaatcttgttataagattactgtggagtagtcaagtactccccgggccttctgagctggtggaatattttatttcagactgaaaacagagagcactctccttgggaagggaaagcggagcttgctgagtgagagatggagcctcatggtgtacaactgagggtagttaactcatcacttctcccaagcactcgatcccagcttcacccactggtgttgctttgcttgaactgttcaagccttttatagccttaccataagtatttagatatggtgtccttttctgtttttggggggggagttttgttgtgtttttttaaagtaagtgcttaagtattaactttgggttgtcccctctgtatgtttcgaaggggttttggttctttttgcttctgttttcttaaacatgttttccactcccacttgggcattttggaagctggtcagctagcaggttttctgggatgtcgggagacctagatgaccttatcgggtgcaatactagctaaggtaaagctagaaacctacactgtcactttactgagatttctgagtatacttttcatattgccttaatgtagcagtaatgtgtttatgcatttgtttctttgcacagacattttgtcaaatattaaaactctacttttttatggcacatattagcatataagcctttattccaagaggtatttattttttcacttgtaaaaaaataatgtttccacgtaaagaactctgttatatcctagaggactctgtcttttatattcgggataataaagactttaaagcaaa

SEQ ID NO: 19183 - DNA, 1666 bp, Homo sapiens
  source 1..1666: mol_type = unassigned DNA
gggcagctggcgggcagcgggtgagggggtggcggggacgcgagtggcggccgcggggccccggacaagggtccgcagagctgcagccttcgagggccagccctctccgagtccggggctgggtcccaccagtgacaaggcggcagccccgcgcacaccaaagagaaggcggctgtggcggcagcggcagccccagccatgctgtgttatgtgacgaggccggacgcggtgctgatggaggtggaggtggaggcgaaagccaacggcgaggactgcctcaaccaggtgtgcaggcgactgggaatcatagaagttgactattttggactgcagtttacgggtagcaaaggtgaaagtttatggctaaacctgagaaaccggatctcccagcagatggatgggctagccccttacaggcttaaacttagagtcaagttcttcgtggagcctcatctcatcttacaggagcagactaggcatatctttttcttgcacatcaaggaggccctcttggcaggccacctcttgtgttccccagagcaggcagtggaactcagtgccctcctggcccagaccaagtttggagactacaaccagaacactgccaagtataactatgaggagctctgtgccaaggagctctcctctgccaccttgaacagcattgttgcaaaacataaggagttggaggggaccagccaggcttcagctgaataccaagttttgcagattgtgtcggcaatggaaaactatggcatagaatggcattctgtgcgggatagcgaagggcagaaactgctcattggggttggacctgaaggaatctcaatttgtaaagatgactttagcccaattaataggatagcttatcctgtggtgcagatggccacccagtcaggaaagaatgtatatttgacggtcaccaaggaatctgggaacagcatcgtgctcttgtttaaaatgatcagcaccagggcggccagcgggctctaccgagcgataacagagacgcacgcattctacaggtgtgacacagtgaccagcgccgtgatgatgcagtatagccgtgacttgaagggccacttggcatctctgtttctgaatgaaaacattaaccttggcaagaaatatgtctttgatattaaaagaacatcaaaggaggtgtatgaccatgccaggagggctctgtacaatgctggcgttgtggacctcgtttcaagaaacaaccagagcccttcacactcgcctctgaagtcctcagaaagcagcatgaactgcagcagctgcgagggcctcagctgccagcagacccgggtgctgcaggagaagctacgcaagctgaaggaagccatgctgtgcatggtgtgctgcgaggaggagatcaactccaccttctgtccctgtggccacactgtgtgctgtgagagctgcgccgcccagctacagtcatgtcccgtctgcaggtcgcgtgtggagcatgtccagcacgtctatctgccaacgcacaccagtcttctcaatctgactgtaatctaatctgttgtgcttttgttggacttggcatgtttccatgaactgcactattataaactattaaaatgatagattgtggagaaagtaattattccaacacccatctgccatgcgatgttaaaaaaaaaaaaaa

SEQ ID NO: 19184 - DNA, 12139 bp, Homo sapiens
  source 1..12139: mol_type = unassigned DNA
accccgggcaggtggagcgctcgcggctgctcgcggcgagcccgggagtgatggcgaggcccctgcgggcggccagcgcctgaggcgccccgccccgccccgccccgcgcggccctccccgcccggccctgccctgccctgctccctgccggcggctgcgggcgcttcctagtccgctcgggcggccgcccaggcgaggtgcggcctccgcacaggcggggggcgtaggcgcgcggggcccgccatggctgcgtcggagctctacacaaagtttgccagggtttggatacctgatccagaggaagtctggaagtcagcagagctgctcaaagattataagccaggagataaagtcctcctgcttcacctcgaggaaggaaaggatttggaataccatctagatccaaagaccaaggagctgcctcacttacgaaatcctgacatacttgttggtgaaaatgacctcacagccctcagctatcttcatgagcctgctgtgctccataatctcagagtccgctttattgattccaaacttatttatacgtattgtggtatagtcctagtagctataaatccctatgaacagctgcctatttatggagaagatattattaatgcatacagtggtcagaacatgggtgatatggatccacatatctttgcagtagctgaagaagcttacaagcaaatggccagagatgaacgaaatcagtccatcatcgtaagtggagagtctggggcaggaaaaacagtctcagctaagtatgccatgcgatactttgcaactgtgagtggttctgccagtgaggccaatgtggaggaaaaggtcttggcctccaaccccatcatggagtccattggaaatgctaaaacaaccaggaatgataatagcagccgttttgggaagtatattgagattggttttgataagagatatcgaatcattggtgccaatatgagaacttatcttttagagaaatccagagtggtattccaggcagaagaggagagaaactatcatatcttctatcagctttgtgcctcagcaaagttacctgaatttaaaatgctacgattaggaaatgcagataactttaattacacaaaacaaggaggcagtcctgtgattgaaggagtggatgatgcaaaggagatggcacatactaggcaggcctgcactttgctaggaattagtgaatctcatcaaatgggaattttccgaatacttgctggcatccttcacttaggcaatgttggatttacatcccgagatgcagacagctgcacaatacctcccaagcatgaacctctctgcatcttctgtgaactcatgggtgtggactatgaggagatgtgtcactggctctgccatcggaaactggctactgccacagagacatacatcaagcccatctccaagctgcaggccacaaatgcccgcgatgctttggccaagcacatctatgccaagctctttaactggattgtagataatgtcaatcaggctctccattctgctgtcaaacagcactcttttattggtgtgctagacatttacggatttgaaacatttgagataaatagttttgaacagttttgcataaattatgcaaatgaaaaactacagcaacaattcaatatgcatgtcttcaaattggagcaagaagaatatatgaaggaacaaattccatggacactcatagatttttatgataatcagccttgtattaatcttatagaatcaaaactaggcattctagatttactggatgaggaatgcaagatgcctaaaggcacagatgacacctgggcccaaaaattgtacaacacacatttgaacaaatgtgcactctttgaaaagcctcgtctatcaaacaaagctttcatcatccaacattttgctgacaaagtggaataccagtgtgaaggatttctcgaaaagaataaagacaccgtttttgaagaacaaattaaagttcttaaatcaagcaagtttaagatgctaccagaactatttcaagatgatgagaaggccatcagtccaacttcagccacctcctcagggcgcacacccctcacacgaactcctgcaaagcccaccaaaggcagaccaggccaaatggccaaagagcacaagaaaacagtggggcatcagttcagaaactccctgcacctgcttatggagacactcaatgccactacccctcactatgtgcgctgtatcaagcctaatgacttcaagttcccattcacgtttgatgagaagagggcagtgcagcagctgagagcatgtggtgtcctggaaaccatccgaatcagtgcggccggtttcccctcacggtggacttaccaagaatttttcagccgctaccgtgtcctaatgaagcagaaagatgtgctgagtgacagaaagcaaacatgcaagaatgtgttagagaaactgatactggacaaggacaaataccagtttggtaagacaaagatctttttccgtgccggtcaagtggcctatctagaaaaattgagagctgacaaactgagagctgcctgcatccggatccagaagaccatccgagggtggctgctgagaaagaagtacctacgcatgcggaaggcagccatcaccatgcagagatacgtgcggggctaccaggcccgatgctatgctaagtttctgcgcagaaccaaggcagcaaccatcattcaaaagtactggcgcatgtatgtggtccgcaggaggtacaagattagacgagctgccactatcgttcttcagtcttacttgcgaggcttcttggccagaaataggtatcgcaagatactccgtgagcacaaagcagtcatcattcagaagcgagtccggggctggctggcccgcacacactacaagaggagcatgcatgccatcatctaccttcagtgctgcttcaggcggatgatggccaagcgtgagctaaagaagctcaaaatcgaggctcgctcagtggagcgctataagaagctgcacatcggcatggagaacaagatcatgcagctgcagcgcaaagttgatgagcagaacaaagactacaaatgccttgtggagaaactaaccaatctggaaggaatatacaactctgagactgagaaactacgaagtgacttagaacgtcttcaactaagtgaagaggaagcgaaagttgccactgggcgggtccttagtctgcaggaagaaattgccaagctccggaaagacctggagcaaactcgttcagagaaaaaatgcattgaggaacatgcagatcgatacaaacaagaaacagagcagctggtatcaaatctgaaggaagaaaatactttgctgaagcaagaaaaagaagccctcaatcaccgcatcgtgcagcaggctaaggagatgacagaaactatggagaagaagttagtagaagaaacgaaacaactggaactcgaccttaatgatgaaaggctgagatatcagaaccttctgaatgagttcagtcgcctggaagaaagatatgatgacctcaaggaagagatgacccttatggtgcatgtgcctaagcctggacacaagagaacagactccacccacagcagcaacgagtctgaatatatctttagctctgaaattgcagaaatggaagacattccatcaaggacagaggaaccaagtgagaagaaggtacctctggacatgtcattgttccttaagctccagaagcgggtcacagagctggagcaggagaagcaggtgatgcaggatgagctggaccgcaaggaggagcaggtgctccgcagcaaggccaaggaagaagaaagaccacaaattagaggtgcagaactggaatatgagtcactcaagcgtcaagaactagaatcagaaaacaaaaaactgaagaatgagctaaatgagttgcgcaaggccctcagtgagaaaagtgccccagaggtgaccgccccaggtgcacctgcctaccgtgtcctcatggagcagctgacctctgtgagcgaggagcttgatgtccgcaaggaggaagtcctcatcttaaggtctcaactggtgagccagaaagaggccatccaacccaaggatgacaagaatacaatgacagattccacaatacttttggaagatgtacaaaaaatgaaagataaaggtgaaatagcacaagcatacattggtttgaaagaaacaaataggctcctggaatcccagctgcagtcacagaagaggagccatgagaatgaggccgaggccctccgtggggagatccagagcctgaaggaggagaacaaccgacagcagcagctgctggcccagaacctgcagctgcccccagaggcccgcattgaggccagcctgcagcacgagatcacccggctgaccaacgaaaacttggatttgatggaacaacttgaaaaacaggataagacggtccgtaaactgaaaaaacaactgaaagtatttgccaaaaaaattggcgaactagaagtgggccagatggagaacatatccccaggacagatcattgatgaacccatccgaccagtcaacattcccaggaaagaaaaggatttccaagggatgctggaatacaagaaggaggatgagcaaaaacttgttaagaacctgattctggaactgaagccacgtggtgtagcagtcaatttgattccaggattaccggcatatatcctgttcatgtgtgttcgacatgctgactacctgaatgatgatcagaaagtaaggtcgttgctaacatcaacaattaacagcatcaaaaaagtattgaagaaaagaggtgatgattttgaaaccgtctccttctggctctctaacacatgccgatttttgcactgcttgaaacagtacagtggagaagagggctttatgaagcacaacacatctcgccagaatgaacactgcctcaccaattttgacctggctgagtatcggcaggtgctgagtgacttggccattcagatctaccagcagctcgtgcgggtgttagagaacatccttcagccaatgattgtctcaggcatgctggaacatgaaacgattcagggcgtgtctggggtgaagcccacagggttgagaaagcgaacctccagtatcgccgatgagggcacctacacactggactccatcctccggcagctcaactccttccactcggtcatgtgtcagcatggcatggaccctgaactgatcaagcaggtggtcaagcagatgttctacatcataggggccatcaccctgaacaaccttctcctgcggaaggacatgtgctcctggagtaaaggcatgcagatcaggtacaatgtcagtcaactggaagaatggctgcgtgacaagaatctgatgaatagtggggctaaagaaaccctggaacctctcattcaggctgctcaacttttgcaagtgaaaaagaaaacagatgatgatgcagaagccatttgttctatgtgcaatgctttaactactgcccagattgtgaaagtgttgaatttgtatactccagttaatgagtttgaagaaagagtctctgtgtcgttcattcgtactatacagatgcgtttacgagacaggaaagactctccccagctgctcatggatgctaaacacatctttcctgtcacctttcctttcaacccatcttccctcgcactagaaaccatccagattccagccagcctcggcctgggcttcatttcacgggtctgaaagtgatgtccaggcaaaaattgacaatacatttcttgcccgaaataagaacccattatttccagtgagttactgaaaatacatttttaaagagaaagtactgattatctcccaaatgagaagtcattaactggaaatctccctagaatactttcatcactttggaaacaaagataggctctttcgtgctgtgttatctttatagcaacactcatccttaaccaactaggtaccgtgagtttacatacaggagaatgatggaaggaagggaggaaggaaaggaggagaaaaatgtgtcttcagctggcagcatttattttaaatccttagcactgagtttgaatggtataaaaagtataacttccatagatgagctgttgttaggaaggcaccaaagaacctcctctgcactaaacaggagaatggaaagaaaagtctccattgagtacatatcatgtcagtttagtaatcaattatgttgatattgttaaactggttcaaagaaataaactggcaatatgtaaagtaattcctcatttgtgtcactatgatatagagatattaaaggaatgttggtttgctaaatagtatagatgtccatttgtactatagtttactgagcattttaaattgctgctacatactgtcttcttaaaatgtaagtgatattaggcactacaataagtttctcttgtcaattctgtttacaattcaatcagatcacagttttaactggattatatgcaaatacctacagattcacctgcacaagtagcagacactggaaagtcatgtagtaatatgacaaaatgcttgacatttaggggtaggattagacaaagtggctattgttgatgtcattatttattcaggatgtattacattgatgtgctcattaattttccctgggtggatattgcgtcagggtacagtgttctgtgaagtgacttatttttaactaccagatctgattccttcagtgcatattttcaaccttgacaggttttctctcttcttaatttattaagaattaatctcggctgggcgcggtggctcacgcctgtaatcccagcactttgggaagccaaggtgggcggatcacttcaggttaggagttggagaccagcctggccaacatggcgaaaccctgtctctactaaaaatacaaaaattagccgggcgtggtggcacttgcctgtaatcccagctactcgggaggctgaggcacgagaatcgattaaacctgggaggcggagattgcaatgagatcgaaccactgcactccagcctgggtgacagagagagacactgccttggaaaaaaaaagaatctcactcactatctagagaggattgtcagaatattcacgattcaggtcttgaaactttgattatgcaaaagaaggtatataataaatatttcattatgattcagtttttaaggctttgcagcttctataagtgttctcagatgccactagataattttaaaagcatcatattagaaatactttaagaagacttatataagaaatagaagattgttgaattttacagaggatttggttcattaagacccagattctgtaagttttcattctgaaattctagttaaacatattcaccatttttcttaggaatcttatacaataaatccttcaggttgcacaaaagcaaattattagttttcattagaaactctggttctgaattacaatcataggttatataaatttaactgttagatggtctataaatcttattaaaatatgtgcaatatttatggaagtcaaacagcttcatatcagtgataaagattgttattaaaagataaatactgtctgttaatttacatgggcctcaagttcctcgtttataaaataagagagttggacactgattcttaacatctcctccacatttaaaattctctcttctcagcccttagattctagagagaaaaagctgcagttactcagtaagtccattctctgatggaaagaccagtgtgtagtgcctgtcaattccttaggattaatcaaatgtaaaatcacaagtttgtgtagctgtaacctttcttaaatgtacatgatttatgtacatgcttttagaaggtcctactatatttgtattataattagtttaagtaatttttattacatcatgtattgctttattcagtttgaatacatttatttatttatttgcagtatcaaccagaaacactaccaattgcatcaaattctcccagtttttcctggttgtcaatgcggttttcaatgcacaattaagtcatagccatttggttcgtaccaaatgtgtcagaatctaacagcatccgataggctgtaagttggggagttgctaagaaaatgcaacgtggtacaggctgtccgcctcagccctggaaatctcccagacctcccccagcttcatcctgtgtagcacgactcaacgtgcaccctgaatcttctcaggtcttccaggtcatgctgtagctgtcactgccatgcagcccttttttttactccggacagctcatgtactgaagcgtcatgaaagaaaggctgtggtctgagcccttctctcccatctcctgtctttgtcctgtcaagtgctggagccagagctcctacagctgcccttggtggtttctcctgttcagcgatggtggcacaaaggttctgctattccagggctccagcttcctcccaggtctacccagagctccagatgggggtctgaattaacctctcttggtggcctggagatttttagtcattgacaagaataccttgtaaccagggaaccccaaggcccagtaaatgattctgtataccattttcttgaaggtacaagaagattctgccgactatggggatctttgggccagtttgaggattgctttccctctgaggttctttctctctgtcagccacactttctcacccaacttcagacacaccctgccagcctttcccctactcattcactcttccccttccctcaacttaatcgtctatcccgttgcctgctgtttgactgtgcactgaaggcaggtggatggagtcagtcctcagttgcccctgctggccttcctggtgcttaccatcagcccaatctttgcacagtccttgttgttcttacttctctgcatgcattccttcagaagatcagtcatcaactttttcttaattcctctgtgacacacaatgggaattcaaaggaagagatcttaaaagtcacaacagttctttatcttaataatcccctccccattcaccttactacatgcagactcacctcacacccttacaacttgaagctgaaaatttaaaagtaatttccctttttgcagcttttcctcaggttaaggctttgatctgcctgagagtaactctaaaaggagggaagataaatatgggataaaatccacaaagtgtagcttctaattcctttggaagtttaaaaaatttccacatatctgatgcttcttttgtcaggtgcagaagcacaaaaacatattccgaagccaactgatagggaatttggggattattgtcagtttggagaatttgctgtgttatttcttcatttccatggatagctcatagttggctctttctgggtgagtaattatgtgtaatatagatcaaatcttttactaaggttacagctacatgttaggggaggctatgaaaatactatattattataatttcagtgcagtgattgttgtgagaaataactttcatggtaaccctaggaaaatgggcacctgccaccatcctgagaagtcctcacacaatgccctttctctcttacacacacacacacacacatacacacacacacacccccgtcactaattcatagagttccttagcaggcatagtcaaggatcctctgggtaatgtcagctgcttagtgataaaacagagccaaaactagtgcatcctgttgaaagtaatgcagaaacagtacctgggtccagatatgctttcctgcggcgctttcctctgttacctcgtttcatcctcacagcagcatggacggtaggtggggtcgcttctacaatcatttctgatgatagcttgggaatagagataggggcagtgacttgcctgatgtcgcacagccctctggctgtcctgctttcccatatggagcagtggtggtgtgggcacctgtgatgcaggagactttaaaaatgtcgtgaggtcacgtgctgcccctcctggtacgtgtggaatgcccctggccagcaaggggtgcttttttatcagagttggcagctggcatgtgggaaccgagcaagtgctgcgtaccaagttacttgttttaaggagaccaagtgctcagcgccaggtggttttcttttttgtcatagttacttgctataactcagcttgacttctgtcatgaatcagtgctctctgggaggatgcaatactctgtttgggcattaattggtagcaggttgtctcaaccaaaaagacaggaaacagcaaaagcctctctgaaattaagaggaaagttactctccccacacccatcagagtctttattggagccaccaggtgagctgtgcagcctggacaggcctgcagctataggccaccttcccagtttaggtcctcagcacaggggagcccaagtcactgggtgccttccgagggctgtcactgggcaggccatatacaagtcagtgtgtgcgtgggcactgcagtgtgtgcatgccgtaggtgttgatgggtgctaggaggggtgtcgtgtgcatgcgcgttgaagaggatctgtattgccgtgacctctgttcatggatgagtgcattgtaatttgttctcaggctgtgctgtgagggccgccttaacccttgctcccttcccttctagagctgccttaagttctccagaacttttcttctgtaaaggatatcttgcctggaagggatatcttgccctgtttctcaaggttttgtgagagttttgactggatgtggccctgcatgaccctccttctcctgtacttcctctttcctttccaaatgggaattagaactgtggggcagcaacagtctcagagccagtgagaggccagcttagagaatgcttctgagttagtgggactctgtgtcacaagtaagcaaatgaatatatgaaagaaattatggagataagttagattcttggtaatacttaaatgtcttgctttctactaaccttttgttactaaaggtaaagggtataactcaaactttttgtggacattcttttcaaaattttttaagaaccctgtactataaaaggttgagtaaaaacaggaaagcgtgctataagttcaaatctgttgtattaccctaaattagataaaccaacctgaattatagtagatttctcaatagatgaggaactgaaaaatactatgtaaaatatcttccaaaatgctttttatactttttttatttgtaatttggtctatctaaaatgttcgttagcttaacttaatgggcgttattggattcatatgactaacgtttcctcagtattgtaatgcttgaaatatttgaaagaaaaaatgttgttttttagttgaaactggtatatataattcagtgcttggcaggttagtatatttttatgcatttttcagagtcagcagtttcaaatcttattgttatcatgttataaaattttagcccacatttcaggctccgtaaatcatttgagccattattttttcccaacaaatggtgaattttttctttaaatgtggatatatatgttgtaatttatgattcctggttatgtatttttgtgggatcctgcagtaaaattgacttttttgtgtctttgggagatttaaattgcgctaacagtgttgcgcaaaaatgagttcatgccatttaacatattgtattttaattattaactgtattaatttactatgaaatggacatccttttaactaaaatggaattgaacattgcagttttcaaatatttttccttgttgggtctggaaaaggaattctactttgatctgcatagaaaattttgatacaattttttgaaagttcttaggtgaaacatttacccattaaaaaggaagcagaaatactgagacatgaaaggcattatcaactaactctagactctagaacccattctagcatatctcacgtgcaatttttaaaaataagttaataattcatctcatatcaacaaaagcctttgaaacatgggttttcactagatatcacctagtgctaagataaaaaccaaaacaatatcagaattacatttatgctctaaatttgtagttgtccattgttgtgcttagtaaatgtgtgtcattaatgctgtattctcctagctattatggaaacttgtttaaataaagatatggat

SEQ ID NO: 19185 - DNA, 12051 bp, Homo sapiens
  source 1..12051: mol_type = unassigned DNA
atgaaatctagtagtttggaaactatgtttgccagggtttggatacctgatccagaggaagtctggaagtcagcagagctgctcaaagattataagccaggagataaagtcctcctgcttcacctcgaggaaggaaaggatttggaataccatctagatccaaagaccaaggagctgcctcacttacgaaatcctgacatacttgttggtgaaaatgacctcacagccctcagctatcttcatgagcctgctgtgctccataatctcagagtccgctttattgattccaaacttatttatacgtattgtggtatagtcctagtagctataaatccctatgaacagctgcctatttatggagaagatattattaatgcatacagtggtcagaacatgggtgatatggatccacatatctttgcagtagctgaagaagcttacaagcaaatggccagagatgaacgaaatcagtccatcatcgtaagtggagagtctggggcaggaaaaacagtctcagctaagtatgccatgcgatactttgcaactgtgagtggttctgccagtgaggccaatgtggaggaaaaggtcttggcctccaaccccatcatggagtccattggaaatgctaaaacaaccaggaatgataatagcagccgttttgggaagtatattgagattggttttgataagagatatcgaatcattggtgccaatatgagaacttatcttttagagaaatccagagtggtattccaggcagaagaggagagaaactatcatatcttctatcagctttgtgcctcagcaaagttacctgaatttaaaatgctacgattaggaaatgcagataactttaattacacaaaacaaggaggcagtcctgtgattgaaggagtggatgatgcaaaggagatggcacatactaggcaggcctgcactttgctaggaattagtgaatctcatcaaatgggaattttccgaatacttgctggcatccttcacttaggcaatgttggatttacatcccgagatgcagacagctgcacaatacctcccaagcatgaacctctctgcatcttctgtgaactcatgggtgtggactatgaggagatgtgtcactggctctgccatcggaaactggctactgccacagagacatacatcaagcccatctccaagctgcaggccacaaatgcccgcgatgctttggccaagcacatctatgccaagctctttaactggattgtagataatgtcaatcaggctctccattctgctgtcaaacagcactcttttattggtgtgctagacatttacggatttgaaacatttgagataaatagttttgaacagttttgcataaattatgcaaatgaaaaactacagcaacaattcaatatgcatgtcttcaaattggagcaagaagaatatatgaaggaacaaattccatggacactcatagatttttatgataatcagccttgtattaatcttatagaatcaaaactaggcattctagatttactggatgaggaatgcaagatgcctaaaggcacagatgacacctgggcccaaaaattgtacaacacacatttgaacaaatgtgcactctttgaaaagcctcgtctatcaaacaaagctttcatcatccaacattttgctgacaaagtggaataccagtgtgaaggatttctcgaaaagaataaagacaccgtttttgaagaacaaattaaagttcttaaatcaagcaagtttaagatgctaccagaactatttcaagatgatgagaaggccatcagtccaacttcagccacctcctcagggcgcacacccctcacacgaactcctgcaaagcccaccaaaggcagaccaggccaaatggccaaagagcacaagaaaacagtggggcatcagttcagaaactccctgcacctgcttatggagacactcaatgccactacccctcactatgtgcgctgtatcaagcctaatgacttcaagttcccattcacgtttgatgagaagagggcagtgcagcagctgagagcatgtggtgtcctggaaaccatccgaatcagtgcggccggtttcccctcacggtggacttaccaagaatttttcagccgctaccgtgtcctaatgaagcagaaagatgtgctgagtgacagaaagcaaacatgcaagaatgtgttagagaaactgatactggacaaggacaaataccagtttggtaagacaaagatctttttccgtgccggtcaagtggcctatctagaaaaattgagagctgacaaactgagagctgcctgcatccggatccagaagaccatccgagggtggctgctgagaaagaagtacctacgcatgcggaaggcagccatcaccatgcagagatacgtgcggggctaccaggcccgatgctatgctaagtttctgcgcagaaccaaggcagcaaccatcattcaaaagtactggcgcatgtatgtggtccgcaggaggtacaagattagacgagctgccactatcgttcttcagtcttacttgcgaggcttcttggccagaaataggtatcgcaagatactccgtgagcacaaagcagtcatcattcagaagcgagtccggggctggctggcccgcacacactacaagaggagcatgcatgccatcatctaccttcagtgctgcttcaggcggatgatggccaagcgtgagctaaagaagctcaaaatcgaggctcgctcagtggagcgctataagaagctgcacatcggcatggagaacaagatcatgcagctgcagcgcaaagttgatgagcagaacaaagactacaaatgccttgtggagaaactaaccaatctggaaggaatatacaactctgagactgagaaactacgaagtgacttagaacgtcttcaactaagtgaagaggaagcgaaagttgccactgggcgggtccttagtctgcaggaagaaattgccaagctccggaaagacctggagcaaactcgttcagagaaaaaatgcattgaggaacatgcagatcgatacaaacaagaaacagagcagctggtatcaaatctgaaggaagaaaatactttgctgaagcaagaaaaagaagccctcaatcaccgcatcgtgcagcaggctaaggagatgacagaaactatggagaagaagttagtagaagaaacgaaacaactggaactcgaccttaatgatgaaaggctgagatatcagaaccttctgaatgagttcagtcgcctggaagaaagatatgatgacctcaaggaagagatgacccttatggtgcatgtgcctaagcctggacacaagagaacagactccacccacagcagcaacgagtctgaatatatctttagctctgaaattgcagaaatggaagacattccatcaaggacagaggaaccaagtgagaagaaggtacctctggacatgtcattgttccttaagctccagaagcgggtcacagagctggagcaggagaagcaggtgatgcaggatgagctggaccgcaaggaggagcaggtgctccgcagcaaggccaaggaagaagaaagaccacaaattagaggtgcagaactggaatatgagtcactcaagcgtcaagaactagaatcagaaaacaaaaaactgaagaatgagctaaatgagttgcgcaaggccctcagtgagaaaagtgccccagaggtgaccgccccaggtgcacctgcctaccgtgtcctcatggagcagctgacctctgtgagcgaggagcttgatgtccgcaaggaggaagtcctcatcttaaggtctcaactggtgagccagaaagaggccatccaacccaagttacatgagaatacaatgacagattccacaatacttttggaagatgtacaaaaaatgaaagataaaggtgaaatagcacaagcatacattggtttgaaagaaacaaatagatcatctgctctggattaccatgagttgaatgaggatggagagctgtggctggtttatgaagggttaaaacaagccaacaggctcctggaatcccagctgcagtcacagaagaggagccatgagaatgaggccgaggccctccgtggggagatccagagcctgaaggaggagaacaaccgacagcagcagctgctggcccagaacctgcagctgcccccagaggcccgcattgaggccagcctgcagcacgagatcacccggctgaccaacgaaaacttgtattttgaggaattatatgcagatgaccctaagaagtatcaatcatatcggatttccctttacaaacggatgattgatttgatggaacaacttgaaaaacaggataagacggtccgtaaactgaaaaaacaactgaaagtatttgccaaaaaaattggcgaactagaagtgggccagatggagaacatatccccaggacagatcattgatgaacccatccgaccagtcaacattcccaggaaagaaaaggatttccaagggatgctggaatacaagaaggaggatgagcaaaaacttgttaagaacctgattctggaactgaagccacgtggtgtagcagtcaatttgattccaggattaccggcatatatcctgttcatgtgtgttcgacatgctgactacctgaatgatgatcagaaagtaaggtcgttgctaacatcaacaattaacagcatcaaaaaagtattgaagaaaagaggtgatgattttgaaaccgtctccttctggctctctaacacatgccgatttttgcactgcttgaaacagtacagtggagaagagggctttatgaagcacaacacatctcgccagaatgaacactgcctcaccaattttgacctggctgagtatcggcaggtgctgagtgacttggccattcagatctaccagcagctcgtgcgggtgttagagaacatccttcagccaatgattgtctcaggcatgctggaacatgaaacgattcagggcgtgtctggggtgaagcccacagggttgagaaagcgaacctccagtatcgccgatgagggcacctacacactggactccatcctccggcagctcaactccttccactcggtcatgtgtcagcatggcatggaccctgaactgatcaagcaggtggtcaagcagatgttctacatcataggggccatcaccctgaacaaccttctcctgcggaaggacatgtgctcctggagtaaaggcatgcagatcaggtacaatgtcagtcaactggaagaatggctgcgtgacaagaatctgatgaatagtggggctaaagaaaccctggaacctctcattcaggctgctcaacttttgcaagtgaaaaagaaaacagatgatgatgcagaagccatttgttctatgtgcaatgctttaactactgcccagattgtgaaagtgttgaatttgtatactccagttaatgagtttgaagaaagagtctctgtgtcgttcattcgtactatacagatgcgtttacgagacaggaaagactctccccagctgctcatggatgctaaacacatctttcctgtcacctttcctttcaacccatcttccctcgcactagaaaccatccagattccagccagcctcggcctgggcttcatttcacgggtctgaaagtgatgtccaggcaaaaattgacaatacatttcttgcccgaaataagaacccattatttccagtgagttactgaaaatacatttttaaagagaaagtactgattatctcccaaatgagaagtcattaactggaaatctccctagaatactttcatcactttggaaacaaagataggctctttcgtgctgtgttatctttatagcaacactcatccttaaccaactaggtaccgtgagtttacatacaggagaatgatggaaggaagggaggaaggaaaggaggagaaaaatgtgtcttcagctggcagcatttattttaaatccttagcactgagtttgaatggtataaaaagtataacttccatagatgagctgttgttaggaaggcaccaaagaacctcctctgcactaaacaggagaatggaaagaaaagtctccattgagtacatatcatgtcagtttagtaatcaattatgttgatattgttaaactggttcaaagaaataaactggcaatatgtaaagtaattcctcatttgtgtcactatgatatagagatattaaaggaatgttggtttgctaaatagtatagatgtccatttgtactatagtttactgagcattttaaattgctgctacatactgtcttcttaaaatgtaagtgatattaggcactacaataagtttctcttgtcaattctgtttacaattcaatcagatcacagttttaactggattatatgcaaatacctacagattcacctgcacaagtagcagacactggaaagtcatgtagtaatatgacaaaatgcttgacatttaggggtaggattagacaaagtggctattgttgatgtcattatttattcaggatgtattacattgatgtgctcattaattttccctgggtggatattgcgtcagggtacagtgttctgtgaagtgacttatttttaactaccagatctgattccttcagtgcatattttcaaccttgacaggttttctctcttcttaatttattaagaattaatctcggctgggcgcggtggctcacgcctgtaatcccagcactttgggaagccaaggtgggcggatcacttcaggttaggagttggagaccagcctggccaacatggcgaaaccctgtctctactaaaaatacaaaaattagccgggcgtggtggcacttgcctgtaatcccagctactcgggaggctgaggcacgagaatcgattaaacctgggaggcggagattgcaatgagatcgaaccactgcactccagcctgggtgacagagagagacactgccttggaaaaaaaaagaatctcactcactatctagagaggattgtcagaatattcacgattcaggtcttgaaactttgattatgcaaaagaaggtatataataaatatttcattatgattcagtttttaaggctttgcagcttctataagtgttctcagatgccactagataattttaaaagcatcatattagaaatactttaagaagacttatataagaaatagaagattgttgaattttacagaggatttggttcattaagacccagattctgtaagttttcattctgaaattctagttaaacatattcaccatttttcttaggaatcttatacaataaatccttcaggttgcacaaaagcaaattattagttttcattagaaactctggttctgaattacaatcataggttatataaatttaactgttagatggtctataaatcttattaaaatatgtgcaatatttatggaagtcaaacagcttcatatcagtgataaagattgttattaaaagataaatactgtctgttaatttacatgggcctcaagttcctcgtttataaaataagagagttggacactgattcttaacatctcctccacatttaaaattctctcttctcagcccttagattctagagagaaaaagctgcagttactcagtaagtccattctctgatggaaagaccagtgtgtagtgcctgtcaattccttaggattaatcaaatgtaaaatcacaagtttgtgtagctgtaacctttcttaaatgtacatgatttatgtacatgcttttagaaggtcctactatatttgtattataattagtttaagtaatttttattacatcatgtattgctttattcagtttgaatacatttatttatttatttgcagtatcaaccagaaacactaccaattgcatcaaattctcccagtttttcctggttgtcaatgcggttttcaatgcacaattaagtcatagccatttggttcgtaccaaatgtgtcagaatctaacagcatccgataggctgtaagttggggagttgctaagaaaatgcaacgtggtacaggctgtccgcctcagccctggaaatctcccagacctcccccagcttcatcctgtgtagcacgactcaacgtgcaccctgaatcttctcaggtcttccaggtcatgctgtagctgtcactgccatgcagcccttttttttactccggacagctcatgtactgaagcgtcatgaaagaaaggctgtggtctgagcccttctctcccatctcctgtctttgtcctgtcaagtgctggagccagagctcctacagctgcccttggtggtttctcctgttcagcgatggtggcacaaaggttctgctattccagggctccagcttcctcccaggtctacccagagctccagatgggggtctgaattaacctctcttggtggcctggagatttttagtcattgacaagaataccttgtaaccagggaaccccaaggcccagtaaatgattctgtataccattttcttgaaggtacaagaagattctgccgactatggggatctttgggccagtttgaggattgctttccctctgaggttctttctctctgtcagccacactttctcacccaacttcagacacaccctgccagcctttcccctactcattcactcttccccttccctcaacttaatcgtctatcccgttgcctgctgtttgactgtgcactgaaggcaggtggatggagtcagtcctcagttgcccctgctggccttcctggtgcttaccatcagcccaatctttgcacagtccttgttgttcttacttctctgcatgcattccttcagaagatcagtcatcaactttttcttaattcctctgtgacacacaatgggaattcaaaggaagagatcttaaaagtcacaacagttctttatcttaataatcccctccccattcaccttactacatgcagactcacctcacacccttacaacttgaagctgaaaatttaaaagtaatttccctttttgcagcttttcctcaggttaaggctttgatctgcctgagagtaactctaaaaggagggaagataaatatgggataaaatccacaaagtgtagcttctaattcctttggaagtttaaaaaatttccacatatctgatgcttcttttgtcaggtgcagaagcacaaaaacatattccgaagccaactgatagggaatttggggattattgtcagtttggagaatttgctgtgttatttcttcatttccatggatagctcatagttggctctttctgggtgagtaattatgtgtaatatagatcaaatcttttactaaggttacagctacatgttaggggaggctatgaaaatactatattattataatttcagtgcagtgattgttgtgagaaataactttcatggtaaccctaggaaaatgggcacctgccaccatcctgagaagtcctcacacaatgccctttctctcttacacacacacacacacacatacacacacacacacccccgtcactaattcatagagttccttagcaggcatagtcaaggatcctctgggtaatgtcagctgcttagtgataaaacagagccaaaactagtgcatcctgttgaaagtaatgcagaaacagtacctgggtccagatatgctttcctgcggcgctttcctctgttacctcgtttcatcctcacagcagcatggacggtaggtggggtcgcttctacaatcatttctgatgatagcttgggaatagagataggggcagtgacttgcctgatgtcgcacagccctctggctgtcctgctttcccatatggagcagtggtggtgtgggcacctgtgatgcaggagactttaaaaatgtcgtgaggtcacgtgctgcccctcctggtacgtgtggaatgcccctggccagcaaggggtgcttttttatcagagttggcagctggcatgtgggaaccgagcaagtgctgcgtaccaagttacttgttttaaggagaccaagtgctcagcgccaggtggttttcttttttgtcatagttacttgctataactcagcttgacttctgtcatgaatcagtgctctctgggaggatgcaatactctgtttgggcattaattggtagcaggttgtctcaaccaaaaagacaggaaacagcaaaagcctctctgaaattaagaggaaagttactctccccacacccatcagagtctttattggagccaccaggtgagctgtgcagcctggacaggcctgcagctataggccaccttcccagtttaggtcctcagcacaggggagcccaagtcactgggtgccttccgagggctgtcactgggcaggccatatacaagtcagtgtgtgcgtgggcactgcagtgtgtgcatgccgtaggtgttgatgggtgctaggaggggtgtcgtgtgcatgcgcgttgaagaggatctgtattgccgtgacctctgttcatggatgagtgcattgtaatttgttctcaggctgtgctgtgagggccgccttaacccttgctcccttcccttctagagctgccttaagttctccagaacttttcttctgtaaaggatatcttgcctggaagggatatcttgccctgtttctcaaggttttgtgagagttttgactggatgtggccctgcatgaccctccttctcctgtacttcctctttcctttccaaatgggaattagaactgtggggcagcaacagtctcagagccagtgagaggccagcttagagaatgcttctgagttagtgggactctgtgtcacaagtaagcaaatgaatatatgaaagaaattatggagataagttagattcttggtaatacttaaatgtcttgctttctactaaccttttgttactaaaggtaaagggtataactcaaactttttgtggacattcttttcaaaattttttaagaaccctgtactataaaaggttgagtaaaaacaggaaagcgtgctataagttcaaatctgttgtattaccctaaattagataaaccaacctgaattatagtagatttctcaatagatgaggaactgaaaaatactatgtaaaatatcttccaaaatgctttttatactttttttatttgtaatttggtctatctaaaatgttcgttagcttaacttaatgggcgttattggattcatatgactaacgtttcctcagtattgtaatgcttgaaatatttgaaagaaaaaatgttgttttttagttgaaactggtatatataattcagtgcttggcaggttagtatatttttatgcatttttcagagtcagcagtttcaaatcttattgttatcatgttataaaattttagcccacatttcaggctccgtaaatcatttgagccattattttttcccaacaaatggtgaattttttctttaaatgtggatatatatgttgtaatttatgattcctggttatgtatttttgtgggatcctgcagtaaaattgacttttttgtgtctttgggagatttaaattgcgctaacagtgttgcgcaaaaatgagttcatgccatttaacatattgtattttaattattaactgtattaatttactatgaaatggacatccttttaactaaaatggaattgaacattgcagttttcaaatatttttccttgttgggtctggaaaaggaattctactttgatctgcatagaaaattttgatacaattttttgaaagttcttaggtgaaacatttacccattaaaaaggaagcagaaatactgagacatgaaaggcattatcaactaactctagactctagaacccattctagcatatctcacgtgcaatttttaaaaataagttaataattcatctcatatcaacaaaagcctttgaaacatgggttttcactagatatcacctagtgctaagataaaaaccaaaacaatatcagaattacatttatgctctaaatttgtagttgtccattgttgtgcttagtaaatgtgtgtcattaatgctgtattctcctagctattatggaaacttgtttaaataaagatatggat

SEQ ID NO: 19186 - DNA, 10754 bp, Homo sapiens
  source 1..10754: mol_type = unassigned DNA
gcctatttatggagaagatattattaatgcatacagtggtcagaacatgggtgatatggatccacatatctttgcagtagctgaagaagcttacaagcaaatggccagagatgaacgaaatcagtccattctgctgtcaaacagcactcttttattggtgtgctagacatttacggatttgaaacatttgagataaatagttttgaacagttttgcataaattatgcaaatgaaaaactacagcaacaattcaatatgcatgtcttcaaattggagcaagaagaatatatgaaggaacaaattccatggacactcatagatttttatgataatcagccttgtattaatcttatagaatcaaaactaggcattctagatttactggatgaggaatgcaagatgcctaaaggcacagatgacacctgggcccaaaaattgtacaacacacatttgaacaaatgtgcactctttgaaaagcctcgtctatcaaacaaagctttcatcatccaacattttgctgacaaagtggaataccagtgtgaaggatttctcgaaaagaataaagacaccgtttttgaagaacaaattaaagttcttaaatcaagcaagtttaagatgctaccagaactatttcaagatgatgagaaggccatcagtccaacttcagccacctcctcagggcgcacacccctcacacgaactcctgcaaagcccaccaaaggcagaccaggccaaatggccaaagagcacaagaaaacagtggggcatcagttcagaaactccctgcacctgcttatggagacactcaatgccactacccctcactatgtgcgctgtatcaagcctaatgacttcaagttcccattcacgtttgatgagaagagggcagtgcagcagctgagagcatgtggtgtcctggaaaccatccgaatcagtgcggccggtttcccctcacggtggacttaccaagaatttttcagccgctaccgtgtcctaatgaagcagaaagatgtgctgagtgacagaaagcaaacatgcaagaatgtgttagagaaactgatactggacaaggacaaataccagtttggtaagacaaagatctttttccgtgccggtcaagtggcctatctagaaaaattgagagctgacaaactgagagctgcctgcatccggatccagaagaccatccgagggtggctgctgagaaagaagtacctacgcatgcggaaggcagccatcaccatgcagagatacgtgcggggctaccaggcccgatgctatgctaagtttctgcgcagaaccaaggcagcaaccatcattcaaaagtactggcgcatgtatgtggtccgcaggaggtacaagattagacgagctgccactatcgttcttcagtcttacttgcgaggcttcttggccagaaataggtatcgcaagatactccgtgagcacaaagcagtcatcattcagaagcgagtccggggctggctggcccgcacacactacaagaggagcatgcatgccatcatctaccttcagtgctgcttcaggcggatgatggccaagcgtgagctaaagaagctcaaaatcgaggctcgctcagtggagcgctataagaagctgcacatcggcatggagaacaagatcatgcagctgcagcgcaaagttgatgagcagaacaaagactacaaatgccttgtggagaaactaaccaatctggaaggaatatacaactctgagactgagaaactacgaagtgacttagaacgtcttcaactaagtgaagaggaagcgaaagttgccactgggcgggtccttagtctgcaggaagaaattgccaagctccggaaagacctggagcaaactcgttcagagaaaaaatgcattgaggaacatgcagatcgatacaaacaagaaacagagcagctggtatcaaatctgaaggaagaaaatactttgctgaagcaagaaaaagaagccctcaatcaccgcatcgtgcagcaggctaaggagatgacagaaactatggagaagaagttagtagaagaaacgaaacaactggaactcgaccttaatgatgaaaggctgagatatcagaaccttctgaatgagttcagtcgcctggaagaaagatatgatgacctcaaggaagagatgacccttatggtgcatgtgcctaagcctggacacaagagaacagactccacccacagcagcaacgagtctgaatatatctttagctctgaaattgcagaaatggaagacattccatcaaggacagaggaaccaagtgagaagaaggtacctctggacatgtcattgttccttaagctccagaagcgggtcacagagctggagcaggagaagcaggtgatgcaggatgagctggaccgcaaggaggagcaggtgctccgcagcaaggccaaggaagaagaaagaccacaaattagaggtgcagaactggaatatgagtcactcaagcgtcaagaactagaatcagaaaacaaaaaactgaagaatgagctaaatgagttgcgcaaggccctcagtgagaaaagtgccccagaggtgaccgccccaggtgcacctgcctaccgtgtcctcatggagcagctgacctctgtgagcgaggagcttgatgtccgcaaggaggaagtcctcatcttaaggtctcaactggtgagccagaaagaggccatccaacccaaggatgacaagaatacaatgacagattccacaatacttttggaagatgtacaaaaaatgaaagataaaggtgaaatagcacaagcatacattggtttgaaagaaacaaataggctcctggaatcccagctgcagtcacagaagaggagccatgagaatgaggccgaggccctccgtggggagatccagagcctgaaggaggagaacaaccgacagcagcagctgctggcccagaacctgcagctgcccccagaggcccgcattgaggccagcctgcagcacgagatcacccggctgaccaacgaaaacttggatttgatggaacaacttgaaaaacaggataagacggtccgtaaactgaaaaaacaactgaaagtatttgccaaaaaaattggcgaactagaagtgggccagatggagaacatatccccaggacagatcattgatgaacccatccgaccagtcaacattcccaggaaagaaaaggatttccaagggatgctggaatacaagaaggaggatgagcaaaaacttgttaagaacctgattctggaactgaagccacgtggtgtagcagtcaatttgattccaggattaccggcatatatcctgttcatgtgtgttcgacatgctgactacctgaatgatgatcagaaagtaaggtcgttgctaacatcaacaattaacagcatcaaaaaagtattgaagaaaagaggtgatgattttgaaaccgtctccttctggctctctaacacatgccgatttttgcactgcttgaaacagtacagtggagaagagggctttatgaagcacaacacatctcgccagaatgaacactgcctcaccaattttgacctggctgagtatcggcaggtgctgagtgacttggccattcagatctaccagcagctcgtgcgggtgttagagaacatccttcagccaatgattgtctcaggcatgctggaacatgaaacgattcagggcgtgtctggggtgaagcccacagggttgagaaagcgaacctccagtatcgccgatgagggcacctacacactggactccatcctccggcagctcaactccttccactcggtcatgtgtcagcatggcatggaccctgaactgatcaagcaggtggtcaagcagatgttctacatcataggggccatcaccctgaacaaccttctcctgcggaaggacatgtgctcctggagtaaaggcatgcagatcaggtacaatgtcagtcaactggaagaatggctgcgtgacaagaatctgatgaatagtggggctaaagaaaccctggaacctctcattcaggctgctcaacttttgcaagtgaaaaagaaaacagatgatgatgcagaagccatttgttctatgtgcaatgctttaactactgcccagattgtgaaagtgttgaatttgtatactccagttaatgagtttgaagaaagagtctctgtgtcgttcattcgtactatacagatgcgtttacgagacaggaaagactctccccagctgctcatggatgctaaacacatctttcctgtcacctttcctttcaacccatcttccctcgcactagaaaccatccagattccagccagcctcggcctgggcttcatttcacgggtctgaaagtgatgtccaggcaaaaattgacaatacatttcttgcccgaaataagaacccattatttccagtgagttactgaaaatacatttttaaagagaaagtactgattatctcccaaatgagaagtcattaactggaaatctccctagaatactttcatcactttggaaacaaagataggctctttcgtgctgtgttatctttatagcaacactcatccttaaccaactaggtaccgtgagtttacatacaggagaatgatggaaggaagggaggaaggaaaggaggagaaaaatgtgtcttcagctggcagcatttattttaaatccttagcactgagtttgaatggtataaaaagtataacttccatagatgagctgttgttaggaaggcaccaaagaacctcctctgcactaaacaggagaatggaaagaaaagtctccattgagtacatatcatgtcagtttagtaatcaattatgttgatattgttaaactggttcaaagaaataaactggcaatatgtaaagtaattcctcatttgtgtcactatgatatagagatattaaaggaatgttggtttgctaaatagtatagatgtccatttgtactatagtttactgagcattttaaattgctgctacatactgtcttcttaaaatgtaagtgatattaggcactacaataagtttctcttgtcaattctgtttacaattcaatcagatcacagttttaactggattatatgcaaatacctacagattcacctgcacaagtagcagacactggaaagtcatgtagtaatatgacaaaatgcttgacatttaggggtaggattagacaaagtggctattgttgatgtcattatttattcaggatgtattacattgatgtgctcattaattttccctgggtggatattgcgtcagggtacagtgttctgtgaagtgacttatttttaactaccagatctgattccttcagtgcatattttcaaccttgacaggttttctctcttcttaatttattaagaattaatctcggctgggcgcggtggctcacgcctgtaatcccagcactttgggaagccaaggtgggcggatcacttcaggttaggagttggagaccagcctggccaacatggcgaaaccctgtctctactaaaaatacaaaaattagccgggcgtggtggcacttgcctgtaatcccagctactcgggaggctgaggcacgagaatcgattaaacctgggaggcggagattgcaatgagatcgaaccactgcactccagcctgggtgacagagagagacactgccttggaaaaaaaaagaatctcactcactatctagagaggattgtcagaatattcacgattcaggtcttgaaactttgattatgcaaaagaaggtatataataaatatttcattatgattcagtttttaaggctttgcagcttctataagtgttctcagatgccactagataattttaaaagcatcatattagaaatactttaagaagacttatataagaaatagaagattgttgaattttacagaggatttggttcattaagacccagattctgtaagttttcattctgaaattctagttaaacatattcaccatttttcttaggaatcttatacaataaatccttcaggttgcacaaaagcaaattattagttttcattagaaactctggttctgaattacaatcataggttatataaatttaactgttagatggtctataaatcttattaaaatatgtgcaatatttatggaagtcaaacagcttcatatcagtgataaagattgttattaaaagataaatactgtctgttaatttacatgggcctcaagttcctcgtttataaaataagagagttggacactgattcttaacatctcctccacatttaaaattctctcttctcagcccttagattctagagagaaaaagctgcagttactcagtaagtccattctctgatggaaagaccagtgtgtagtgcctgtcaattccttaggattaatcaaatgtaaaatcacaagtttgtgtagctgtaacctttcttaaatgtacatgatttatgtacatgcttttagaaggtcctactatatttgtattataattagtttaagtaatttttattacatcatgtattgctttattcagtttgaatacatttatttatttatttgcagtatcaaccagaaacactaccaattgcatcaaattctcccagtttttcctggttgtcaatgcggttttcaatgcacaattaagtcatagccatttggttcgtaccaaatgtgtcagaatctaacagcatccgataggctgtaagttggggagttgctaagaaaatgcaacgtggtacaggctgtccgcctcagccctggaaatctcccagacctcccccagcttcatcctgtgtagcacgactcaacgtgcaccctgaatcttctcaggtcttccaggtcatgctgtagctgtcactgccatgcagcccttttttttactccggacagctcatgtactgaagcgtcatgaaagaaaggctgtggtctgagcccttctctcccatctcctgtctttgtcctgtcaagtgctggagccagagctcctacagctgcccttggtggtttctcctgttcagcgatggtggcacaaaggttctgctattccagggctccagcttcctcccaggtctacccagagctccagatgggggtctgaattaacctctcttggtggcctggagatttttagtcattgacaagaataccttgtaaccagggaaccccaaggcccagtaaatgattctgtataccattttcttgaaggtacaagaagattctgccgactatggggatctttgggccagtttgaggattgctttccctctgaggttctttctctctgtcagccacactttctcacccaacttcagacacaccctgccagcctttcccctactcattcactcttccccttccctcaacttaatcgtctatcccgttgcctgctgtttgactgtgcactgaaggcaggtggatggagtcagtcctcagttgcccctgctggccttcctggtgcttaccatcagcccaatctttgcacagtccttgttgttcttacttctctgcatgcattccttcagaagatcagtcatcaactttttcttaattcctctgtgacacacaatgggaattcaaaggaagagatcttaaaagtcacaacagttctttatcttaataatcccctccccattcaccttactacatgcagactcacctcacacccttacaacttgaagctgaaaatttaaaagtaatttccctttttgcagcttttcctcaggttaaggctttgatctgcctgagagtaactctaaaaggagggaagataaatatgggataaaatccacaaagtgtagcttctaattcctttggaagtttaaaaaatttccacatatctgatgcttcttttgtcaggtgcagaagcacaaaaacatattccgaagccaactgatagggaatttggggattattgtcagtttggagaatttgctgtgttatttcttcatttccatggatagctcatagttggctctttctgggtgagtaattatgtgtaatatagatcaaatcttttactaaggttacagctacatgttaggggaggctatgaaaatactatattattataatttcagtgcagtgattgttgtgagaaataactttcatggtaaccctaggaaaatgggcacctgccaccatcctgagaagtcctcacacaatgccctttctctcttacacacacacacacacacatacacacacacacacccccgtcactaattcatagagttccttagcaggcatagtcaaggatcctctgggtaatgtcagctgcttagtgataaaacagagccaaaactagtgcatcctgttgaaagtaatgcagaaacagtacctgggtccagatatgctttcctgcggcgctttcctctgttacctcgtttcatcctcacagcagcatggacggtaggtggggtcgcttctacaatcatttctgatgatagcttgggaatagagataggggcagtgacttgcctgatgtcgcacagccctctggctgtcctgctttcccatatggagcagtggtggtgtgggcacctgtgatgcaggagactttaaaaatgtcgtgaggtcacgtgctgcccctcctggtacgtgtggaatgcccctggccagcaaggggtgcttttttatcagagttggcagctggcatgtgggaaccgagcaagtgctgcgtaccaagttacttgttttaaggagaccaagtgctcagcgccaggtggttttcttttttgtcatagttacttgctataactcagcttgacttctgtcatgaatcagtgctctctgggaggatgcaatactctgtttgggcattaattggtagcaggttgtctcaaccaaaaagacaggaaacagcaaaagcctctctgaaattaagaggaaagttactctccccacacccatcagagtctttattggagccaccaggtgagctgtgcagcctggacaggcctgcagctataggccaccttcccagtttaggtcctcagcacaggggagcccaagtcactgggtgccttccgagggctgtcactgggcaggccatatacaagtcagtgtgtgcgtgggcactgcagtgtgtgcatgccgtaggtgttgatgggtgctaggaggggtgtcgtgtgcatgcgcgttgaagaggatctgtattgccgtgacctctgttcatggatgagtgcattgtaatttgttctcaggctgtgctgtgagggccgccttaacccttgctcccttcccttctagagctgccttaagttctccagaacttttcttctgtaaaggatatcttgcctggaagggatatcttgccctgtttctcaaggttttgtgagagttttgactggatgtggccctgcatgaccctccttctcctgtacttcctctttcctttccaaatgggaattagaactgtggggcagcaacagtctcagagccagtgagaggccagcttagagaatgcttctgagttagtgggactctgtgtcacaagtaagcaaatgaatatatgaaagaaattatggagataagttagattcttggtaatacttaaatgtcttgctttctactaaccttttgttactaaaggtaaagggtataactcaaactttttgtggacattcttttcaaaattttttaagaaccctgtactataaaaggttgagtaaaaacaggaaagcgtgctataagttcaaatctgttgtattaccctaaattagataaaccaacctgaattatagtagatttctcaatagatgaggaactgaaaaatactatgtaaaatatcttccaaaatgctttttatactttttttatttgtaatttggtctatctaaaatgttcgttagcttaacttaatgggcgttattggattcatatgactaacgtttcctcagtattgtaatgcttgaaatatttgaaagaaaaaatgttgttttttagttgaaactggtatatataattcagtgcttggcaggttagtatatttttatgcatttttcagagtcagcagtttcaaatcttattgttatcatgttataaaattttagcccacatttcaggctccgtaaatcatttgagccattattttttcccaacaaatggtgaattttttctttaaatgtggatatatatgttgtaatttatgattcctggttatgtatttttgtgggatcctgcagtaaaattgacttttttgtgtctttgggagatttaaattgcgctaacagtgttgcgcaaaaatgagttcatgccatttaacatattgtattttaattattaactgtattaatttactatgaaatggacatccttttaactaaaatggaattgaacattgcagttttcaaatatttttccttgttgggtctggaaaaggaattctactttgatctgcatagaaaattttgatacaattttttgaaagttcttaggtgaaacatttacccattaaaaaggaagcagaaatactgagacatgaaaggcattatcaactaactctagactctagaacccattctagcatatctcacgtgcaatttttaaaaataagttaataattcatctcatatcaacaaaagcctttgaaacatgggttttcactagatatcacctagtgctaagataaaaaccaaaacaatatcagaattacatttatgctctaaatttgtagttgtccattgttgtgcttagtaaatgtgtgtcattaatgctgtattctcctagctattatggaaacttgtttaaataaagatatggatat

SEQ ID NO: 19187 - DNA, 12225 bp, Homo sapiens
  source 1..12225: mol_type = unassigned DNA
accccgggcaggtggagcgctcgcggctgctcgcggcgagcccgggagtgatggcgaggcccctgcgggcggccagcgcctgaggcgccccgccccgccccgccccgcgcggccctccccgcccggccctgccctgccctgctccctgccggcggctgcgggcgcttcctagtccgctcgggcggccgcccaggcgaggtgcggcctccgcacaggcggggggcgtaggcgcgcggggcccgccatggctgcgtcggagctctacacaaagtttgccagggtttggatacctgatccagaggaagtctggaagtcagcagagctgctcaaagattataagccaggagataaagtcctcctgcttcacctcgaggaaggaaaggatttggaataccatctagatccaaagaccaaggagctgcctcacttacgaaatcctgacatacttgttggtgaaaatgacctcacagccctcagctatcttcatgagcctgctgtgctccataatctcagagtccgctttattgattccaaacttatttatacgtattgtggtatagtcctagtagctataaatccctatgaacagctgcctatttatggagaagatattattaatgcatacagtggtcagaacatgggtgatatggatccacatatctttgcagtagctgaagaagcttacaagcaaatggccagagatgaacgaaatcagtccatcatcgtaagtggagagtctggggcaggaaaaacagtctcagctaagtatgccatgcgatactttgcaactgtgagtggttctgccagtgaggccaatgtggaggaaaaggtcttggcctccaaccccatcatggagtccattggaaatgctaaaacaaccaggaatgataatagcagccgttttgggaagtatattgagattggttttgataagagatatcgaatcattggtgccaatatgagaacttatcttttagagaaatccagagtggtattccaggcagaagaggagagaaactatcatatcttctatcagctttgtgcctcagcaaagttacctgaatttaaaatgctacgattaggaaatgcagataactttaattacacaaaacaaggaggcagtcctgtgattgaaggagtggatgatgcaaaggagatggcacatactaggcaggcctgcactttgctaggaattagtgaatctcatcaaatgggaattttccgaatacttgctggcatccttcacttaggcaatgttggatttacatcccgagatgcagacagctgcacaatacctcccaagcatgaacctctctgcatcttctgtgaactcatgggtgtggactatgaggagatgtgtcactggctctgccatcggaaactggctactgccacagagacatacatcaagcccatctccaagctgcaggccacaaatgcccgcgatgctttggccaagcacatctatgccaagctctttaactggattgtagataatgtcaatcaggctctccattctgctgtcaaacagcactcttttattggtgtgctagacatttacggatttgaaacatttgagataaatagttttgaacagttttgcataaattatgcaaatgaaaaactacagcaacaattcaatatgcatgtcttcaaattggagcaagaagaatatatgaaggaacaaattccatggacactcatagatttttatgataatcagccttgtattaatcttatagaatcaaaactaggcattctagatttactggatgaggaatgcaagatgcctaaaggcacagatgacacctgggcccaaaaattgtacaacacacatttgaacaaatgtgcactctttgaaaagcctcgtctatcaaacaaagctttcatcatccaacattttgctgacaaagtggaataccagtgtgaaggatttctcgaaaagaataaagacaccgtttttgaagaacaaattaaagttcttaaatcaagcaagtttaagatgctaccagaactatttcaagatgatgagaaggccatcagtccaacttcagccacctcctcagggcgcacacccctcacacgaactcctgcaaagcccaccaaaggcagaccaggccaaatggccaaagagcacaagaaaacagtggggcatcagttcagaaactccctgcacctgcttatggagacactcaatgccactacccctcactatgtgcgctgtatcaagcctaatgacttcaagttcccattcacgtttgatgagaagagggcagtgcagcagctgagagcatgtggtgtcctggaaaccatccgaatcagtgcggccggtttcccctcacggtggacttaccaagaatttttcagccgctaccgtgtcctaatgaagcagaaagatgtgctgagtgacagaaagcaaacatgcaagaatgtgttagagaaactgatactggacaaggacaaataccagtttggtaagacaaagatctttttccgtgccggtcaagtggcctatctagaaaaattgagagctgacaaactgagagctgcctgcatccggatccagaagaccatccgagggtggctgctgagaaagaagtacctacgcatgcggaaggcagccatcaccatgcagagatacgtgcggggctaccaggcccgatgctatgctaagtttctgcgcagaaccaaggcagcaaccatcattcaaaagtactggcgcatgtatgtggtccgcaggaggtacaagattagacgagctgccactatcgttcttcagtcttacttgcgaggcttcttggccagaaataggtatcgcaagatactccgtgagcacaaagcagtcatcattcagaagcgagtccggggctggctggcccgcacacactacaagaggagcatgcatgccatcatctaccttcagtgctgcttcaggcggatgatggccaagcgtgagctaaagaagctcaaaatcgaggctcgctcagtggagcgctataagaagctgcacatcggcatggagaacaagatcatgcagctgcagcgcaaagttgatgagcagaacaaagactacaaatgccttgtggagaaactaaccaatctggaaggaatatacaactctgagactgagaaactacgaagtgacttagaacgtcttcaactaagtgaagaggaagcgaaagttgccactgggcgggtccttagtctgcaggaagaaattgccaagctccggaaagacctggagcaaactcgttcagagaaaaaatgcattgaggaacatgcagatcgatacaaacaagaaacagagcagctggtatcaaatctgaaggaagaaaatactttgctgaagcaagaaaaagaagccctcaatcaccgcatcgtgcagcaggctaaggagatgacagaaactatggagaagaagttagtagaagaaacgaaacaactggaactcgaccttaatgatgaaaggctgagatatcagaaccttctgaatgagttcagtcgcctggaagaaagatatgatgacctcaaggaagagatgacccttatggtgcatgtgcctaagcctggacacaagagaacagactccacccacagcagcaacgagtctgaatatatctttagctctgaaattgcagaaatggaagacattccatcaaggacagaggaaccaagtgagaagaaggtacctctggacatgtcattgttccttaagctccagaagcgggtcacagagctggagcaggagaagcaggtgatgcaggatgagctggaccgcaaggaggagcaggtgctccgcagcaaggccaaggaagaagaaagaccacaaattagaggtgcagaactggaatatgagtcactcaagcgtcaagaactagaatcagaaaacaaaaaactgaagaatgagctaaatgagttgcgcaaggccctcagtgagaaaagtgccccagaggtgaccgccccaggtgcacctgcctaccgtgtcctcatggagcagctgacctctgtgagcgaggagcttgatgtccgcaaggaggaagtcctcatcttaaggtctcaactggtgagccagaaagaggccatccaacccaaggatgacaagaatacaatgacagattccacaatacttttggaagatgtacaaaaaatgaaagataaaggtgaaatagcacaagcatacattggtttgaaagaaacaaatagatcatctgctctggattaccatgagttgaatgaggatggagagctgtggctggtttatgaagggttaaaacaagccaacaggctcctggaatcccagctgcagtcacagaagaggagccatgagaatgaggccgaggccctccgtggggagatccagagcctgaaggaggagaacaaccgacagcagcagctgctggcccagaacctgcagctgcccccagaggcccgcattgaggccagcctgcagcacgagatcacccggctgaccaacgaaaacttggatttgatggaacaacttgaaaaacaggataagacggtccgtaaactgaaaaaacaactgaaagtatttgccaaaaaaattggcgaactagaagtgggccagatggagaacatatccccaggacagatcattgatgaacccatccgaccagtcaacattcccaggaaagaaaaggatttccaagggatgctggaatacaagaaggaggatgagcaaaaacttgttaagaacctgattctggaactgaagccacgtggtgtagcagtcaatttgattccaggattaccggcatatatcctgttcatgtgtgttcgacatgctgactacctgaatgatgatcagaaagtaaggtcgttgctaacatcaacaattaacagcatcaaaaaagtattgaagaaaagaggtgatgattttgaaaccgtctccttctggctctctaacacatgccgatttttgcactgcttgaaacagtacagtggagaagagggctttatgaagcacaacacatctcgccagaatgaacactgcctcaccaattttgacctggctgagtatcggcaggtgctgagtgacttggccattcagatctaccagcagctcgtgcgggtgttagagaacatccttcagccaatgattgtctcaggcatgctggaacatgaaacgattcagggcgtgtctggggtgaagcccacagggttgagaaagcgaacctccagtatcgccgatgagggcacctacacactggactccatcctccggcagctcaactccttccactcggtcatgtgtcagcatggcatggaccctgaactgatcaagcaggtggtcaagcagatgttctacatcataggggccatcaccctgaacaaccttctcctgcggaaggacatgtgctcctggagtaaaggcatgcagatcaggtacaatgtcagtcaactggaagaatggctgcgtgacaagaatctgatgaatagtggggctaaagaaaccctggaacctctcattcaggctgctcaacttttgcaagtgaaaaagaaaacagatgatgatgcagaagccatttgttctatgtgcaatgctttaactactgcccagattgtgaaagtgttgaatttgtatactccagttaatgagtttgaagaaagagtctctgtgtcgttcattcgtactatacagatgcgtttacgagacaggaaagactctccccagctgctcatggatgctaaacacatctttcctgtcacctttcctttcaacccatcttccctcgcactagaaaccatccagattccagccagcctcggcctgggcttcatttcacgggtctgaaagtgatgtccaggcaaaaattgacaatacatttcttgcccgaaataagaacccattatttccagtgagttactgaaaatacatttttaaagagaaagtactgattatctcccaaatgagaagtcattaactggaaatctccctagaatactttcatcactttggaaacaaagataggctctttcgtgctgtgttatctttatagcaacactcatccttaaccaactaggtaccgtgagtttacatacaggagaatgatggaaggaagggaggaaggaaaggaggagaaaaatgtgtcttcagctggcagcatttattttaaatccttagcactgagtttgaatggtataaaaagtataacttccatagatgagctgttgttaggaaggcaccaaagaacctcctctgcactaaacaggagaatggaaagaaaagtctccattgagtacatatcatgtcagtttagtaatcaattatgttgatattgttaaactggttcaaagaaataaactggcaatatgtaaagtaattcctcatttgtgtcactatgatatagagatattaaaggaatgttggtttgctaaatagtatagatgtccatttgtactatagtttactgagcattttaaattgctgctacatactgtcttcttaaaatgtaagtgatattaggcactacaataagtttctcttgtcaattctgtttacaattcaatcagatcacagttttaactggattatatgcaaatacctacagattcacctgcacaagtagcagacactggaaagtcatgtagtaatatgacaaaatgcttgacatttaggggtaggattagacaaagtggctattgttgatgtcattatttattcaggatgtattacattgatgtgctcattaattttccctgggtggatattgcgtcagggtacagtgttctgtgaagtgacttatttttaactaccagatctgattccttcagtgcatattttcaaccttgacaggttttctctcttcttaatttattaagaattaatctcggctgggcgcggtggctcacgcctgtaatcccagcactttgggaagccaaggtgggcggatcacttcaggttaggagttggagaccagcctggccaacatggcgaaaccctgtctctactaaaaatacaaaaattagccgggcgtggtggcacttgcctgtaatcccagctactcgggaggctgaggcacgagaatcgattaaacctgggaggcggagattgcaatgagatcgaaccactgcactccagcctgggtgacagagagagacactgccttggaaaaaaaaagaatctcactcactatctagagaggattgtcagaatattcacgattcaggtcttgaaactttgattatgcaaaagaaggtatataataaatatttcattatgattcagtttttaaggctttgcagcttctataagtgttctcagatgccactagataattttaaaagcatcatattagaaatactttaagaagacttatataagaaatagaagattgttgaattttacagaggatttggttcattaagacccagattctgtaagttttcattctgaaattctagttaaacatattcaccatttttcttaggaatcttatacaataaatccttcaggttgcacaaaagcaaattattagttttcattagaaactctggttctgaattacaatcataggttatataaatttaactgttagatggtctataaatcttattaaaatatgtgcaatatttatggaagtcaaacagcttcatatcagtgataaagattgttattaaaagataaatactgtctgttaatttacatgggcctcaagttcctcgtttataaaataagagagttggacactgattcttaacatctcctccacatttaaaattctctcttctcagcccttagattctagagagaaaaagctgcagttactcagtaagtccattctctgatggaaagaccagtgtgtagtgcctgtcaattccttaggattaatcaaatgtaaaatcacaagtttgtgtagctgtaacctttcttaaatgtacatgatttatgtacatgcttttagaaggtcctactatatttgtattataattagtttaagtaatttttattacatcatgtattgctttattcagtttgaatacatttatttatttatttgcagtatcaaccagaaacactaccaattgcatcaaattctcccagtttttcctggttgtcaatgcggttttcaatgcacaattaagtcatagccatttggttcgtaccaaatgtgtcagaatctaacagcatccgataggctgtaagttggggagttgctaagaaaatgcaacgtggtacaggctgtccgcctcagccctggaaatctcccagacctcccccagcttcatcctgtgtagcacgactcaacgtgcaccctgaatcttctcaggtcttccaggtcatgctgtagctgtcactgccatgcagcccttttttttactccggacagctcatgtactgaagcgtcatgaaagaaaggctgtggtctgagcccttctctcccatctcctgtctttgtcctgtcaagtgctggagccagagctcctacagctgcccttggtggtttctcctgttcagcgatggtggcacaaaggttctgctattccagggctccagcttcctcccaggtctacccagagctccagatgggggtctgaattaacctctcttggtggcctggagatttttagtcattgacaagaataccttgtaaccagggaaccccaaggcccagtaaatgattctgtataccattttcttgaaggtacaagaagattctgccgactatggggatctttgggccagtttgaggattgctttccctctgaggttctttctctctgtcagccacactttctcacccaacttcagacacaccctgccagcctttcccctactcattcactcttccccttccctcaacttaatcgtctatcccgttgcctgctgtttgactgtgcactgaaggcaggtggatggagtcagtcctcagttgcccctgctggccttcctggtgcttaccatcagcccaatctttgcacagtccttgttgttcttacttctctgcatgcattccttcagaagatcagtcatcaactttttcttaattcctctgtgacacacaatgggaattcaaaggaagagatcttaaaagtcacaacagttctttatcttaataatcccctccccattcaccttactacatgcagactcacctcacacccttacaacttgaagctgaaaatttaaaagtaatttccctttttgcagcttttcctcaggttaaggctttgatctgcctgagagtaactctaaaaggagggaagataaatatgggataaaatccacaaagtgtagcttctaattcctttggaagtttaaaaaatttccacatatctgatgcttcttttgtcaggtgcagaagcacaaaaacatattccgaagccaactgatagggaatttggggattattgtcagtttggagaatttgctgtgttatttcttcatttccatggatagctcatagttggctctttctgggtgagtaattatgtgtaatatagatcaaatcttttactaaggttacagctacatgttaggggaggctatgaaaatactatattattataatttcagtgcagtgattgttgtgagaaataactttcatggtaaccctaggaaaatgggcacctgccaccatcctgagaagtcctcacacaatgccctttctctcttacacacacacacacacacatacacacacacacacccccgtcactaattcatagagttccttagcaggcatagtcaaggatcctctgggtaatgtcagctgcttagtgataaaacagagccaaaactagtgcatcctgttgaaagtaatgcagaaacagtacctgggtccagatatgctttcctgcggcgctttcctctgttacctcgtttcatcctcacagcagcatggacggtaggtggggtcgcttctacaatcatttctgatgatagcttgggaatagagataggggcagtgacttgcctgatgtcgcacagccctctggctgtcctgctttcccatatggagcagtggtggtgtgggcacctgtgatgcaggagactttaaaaatgtcgtgaggtcacgtgctgcccctcctggtacgtgtggaatgcccctggccagcaaggggtgcttttttatcagagttggcagctggcatgtgggaaccgagcaagtgctgcgtaccaagttacttgttttaaggagaccaagtgctcagcgccaggtggttttcttttttgtcatagttacttgctataactcagcttgacttctgtcatgaatcagtgctctctgggaggatgcaatactctgtttgggcattaattggtagcaggttgtctcaaccaaaaagacaggaaacagcaaaagcctctctgaaattaagaggaaagttactctccccacacccatcagagtctttattggagccaccaggtgagctgtgcagcctggacaggcctgcagctataggccaccttcccagtttaggtcctcagcacaggggagcccaagtcactgggtgccttccgagggctgtcactgggcaggccatatacaagtcagtgtgtgcgtgggcactgcagtgtgtgcatgccgtaggtgttgatgggtgctaggaggggtgtcgtgtgcatgcgcgttgaagaggatctgtattgccgtgacctctgttcatggatgagtgcattgtaatttgttctcaggctgtgctgtgagggccgccttaacccttgctcccttcccttctagagctgccttaagttctccagaacttttcttctgtaaaggatatcttgcctggaagggatatcttgccctgtttctcaaggttttgtgagagttttgactggatgtggccctgcatgaccctccttctcctgtacttcctctttcctttccaaatgggaattagaactgtggggcagcaacagtctcagagccagtgagaggccagcttagagaatgcttctgagttagtgggactctgtgtcacaagtaagcaaatgaatatatgaaagaaattatggagataagttagattcttggtaatacttaaatgtcttgctttctactaaccttttgttactaaaggtaaagggtataactcaaactttttgtggacattcttttcaaaattttttaagaaccctgtactataaaaggttgagtaaaaacaggaaagcgtgctataagttcaaatctgttgtattaccctaaattagataaaccaacctgaattatagtagatttctcaatagatgaggaactgaaaaatactatgtaaaatatcttccaaaatgctttttatactttttttatttgtaatttggtctatctaaaatgttcgttagcttaacttaatgggcgttattggattcatatgactaacgtttcctcagtattgtaatgcttgaaatatttgaaagaaaaaatgttgttttttagttgaaactggtatatataattcagtgcttggcaggttagtatatttttatgcatttttcagagtcagcagtttcaaatcttattgttatcatgttataaaattttagcccacatttcaggctccgtaaatcatttgagccattattttttcccaacaaatggtgaattttttctttaaatgtggatatatatgttgtaatttatgattcctggttatgtatttttgtgggatcctgcagtaaaattgacttttttgtgtctttgggagatttaaattgcgctaacagtgttgcgcaaaaatgagttcatgccatttaacatattgtattttaattattaactgtattaatttactatgaaatggacatccttttaactaaaatggaattgaacattgcagttttcaaatatttttccttgttgggtctggaaaaggaattctactttgatctgcatagaaaattttgatacaattttttgaaagttcttaggtgaaacatttacccattaaaaaggaagcagaaatactgagacatgaaaggcattatcaactaactctagactctagaacccattctagcatatctcacgtgcaatttttaaaaataagttaataattcatctcatatcaacaaaagcctttgaaacatgggttttcactagatatcacctagtgctaagataaaaaccaaaacaatatcagaattacatttatgctctaaatttgtagttgtccattgttgtgcttagtaaatgtgtgtcattaatgctgtattctcctagctattatggaaacttgtttaaataaagatatggatataaa

SEQ ID NO: 19188 - DNA, 12211 bp, Homo sapiens
  source 1..12211: mol_type = unassigned DNA
accccgggcaggtggagcgctcgcggctgctcgcggcgagcccgggagtgatggcgaggcccctgcgggcggccagcgcctgaggcgccccgccccgccccgccccgcgcggccctccccgcccggccctgccctgccctgctccctgccggcggctgcgggcgcttcctagtccgctcgggcggccgcccaggcgaggtgcggcctccgcacaggcggggggcgtaggcgcgcggggcccgccatggctgcgtcggagctctacacaaagtttgccagggtttggatacctgatccagaggaagtctggaagtcagcagagctgctcaaagattataagccaggagataaagtcctcctgcttcacctcgaggaaggaaaggatttggaataccatctagatccaaagaccaaggagctgcctcacttacgaaatcctgacatacttgttggtgaaaatgacctcacagccctcagctatcttcatgagcctgctgtgctccataatctcagagtccgctttattgattccaaacttatttatacgtattgtggtatagtcctagtagctataaatccctatgaacagctgcctatttatggagaagatattattaatgcatacagtggtcagaacatgggtgatatggatccacatatctttgcagtagctgaagaagcttacaagcaaatggccagagatgaacgaaatcagtccatcatcgtaagtggagagtctggggcaggaaaaacagtctcagctaagtatgccatgcgatactttgcaactgtgagtggttctgccagtgaggccaatgtggaggaaaaggtcttggcctccaaccccatcatggagtccattggaaatgctaaaacaaccaggaatgataatagcagccgttttgggaagtatattgagattggttttgataagagatatcgaatcattggtgccaatatgagaacttatcttttagagaaatccagagtggtattccaggcagaagaggagagaaactatcatatcttctatcagctttgtgcctcagcaaagttacctgaatttaaaatgctacgattaggaaatgcagataactttaattacacaaaacaaggaggcagtcctgtgattgaaggagtggatgatgcaaaggagatggcacatactaggcaggcctgcactttgctaggaattagtgaatctcatcaaatgggaattttccgaatacttgctggcatccttcacttaggcaatgttggatttacatcccgagatgcagacagctgcacaatacctcccaagcatgaacctctctgcatcttctgtgaactcatgggtgtggactatgaggagatgtgtcactggctctgccatcggaaactggctactgccacagagacatacatcaagcccatctccaagctgcaggccacaaatgcccgcgatgctttggccaagcacatctatgccaagctctttaactggattgtagataatgtcaatcaggctctccattctgctgtcaaacagcactcttttattggtgtgctagacatttacggatttgaaacatttgagataaatagttttgaacagttttgcataaattatgcaaatgaaaaactacagcaacaattcaatatgcatgtcttcaaattggagcaagaagaatatatgaaggaacaaattccatggacactcatagatttttatgataatcagccttgtattaatcttatagaatcaaaactaggcattctagatttactggatgaggaatgcaagatgcctaaaggcacagatgacacctgggcccaaaaattgtacaacacacatttgaacaaatgtgcactctttgaaaagcctcgtctatcaaacaaagctttcatcatccaacattttgctgacaaagtggaataccagtgtgaaggatttctcgaaaagaataaagacaccgtttttgaagaacaaattaaagttcttaaatcaagcaagtttaagatgctaccagaactatttcaagatgatgagaaggccatcagtccaacttcagccacctcctcagggcgcacacccctcacacgaactcctgcaaagcccaccaaaggcagaccaggccaaatggccaaagagcacaagaaaacagtggggcatcagttcagaaactccctgcacctgcttatggagacactcaatgccactacccctcactatgtgcgctgtatcaagcctaatgacttcaagttcccattcacgtttgatgagaagagggcagtgcagcagctgagagcatgtggtgtcctggaaaccatccgaatcagtgcggccggtttcccctcacggtggacttaccaagaatttttcagccgctaccgtgtcctaatgaagcagaaagatgtgctgagtgacagaaagcaaacatgcaagaatgtgttagagaaactgatactggacaaggacaaataccagtttggtaagacaaagatctttttccgtgccggtcaagtggcctatctagaaaaattgagagctgacaaactgagagctgcctgcatccggatccagaagaccatccgagggtggctgctgagaaagaagtacctacgcatgcggaaggcagccatcaccatgcagagatacgtgcggggctaccaggcccgatgctatgctaagtttctgcgcagaaccaaggcagcaaccatcattcaaaagtactggcgcatgtatgtggtccgcaggaggtacaagattagacgagctgccactatcgttcttcagtcttacttgcgaggcttcttggccagaaataggtatcgcaagatactccgtgagcacaaagcagtcatcattcagaagcgagtccggggctggctggcccgcacacactacaagaggagcatgcatgccatcatctaccttcagtgctgcttcaggcggatgatggccaagcgtgagctaaagaagctcaaaatcgaggctcgctcagtggagcgctataagaagctgcacatcggcatggagaacaagatcatgcagctgcagcgcaaagttgatgagcagaacaaagactacaaatgccttgtggagaaactaaccaatctggaaggaatatacaactctgagactgagaaactacgaagtgacttagaacgtcttcaactaagtgaagaggaagcgaaagttgccactgggcgggtccttagtctgcaggaagaaattgccaagctccggaaagacctggagcaaactcgttcagagaaaaaatgcattgaggaacatgcagatcgatacaaacaagaaacagagcagctggtatcaaatctgaaggaagaaaatactttgctgaagcaagaaaaagaagccctcaatcaccgcatcgtgcagcaggctaaggagatgacagaaactatggagaagaagttagtagaagaaacgaaacaactggaactcgaccttaatgatgaaaggctgagatatcagaaccttctgaatgagttcagtcgcctggaagaaagatatgatgacctcaaggaagagatgacccttatggtgcatgtgcctaagcctggacacaagagaacagactccacccacagcagcaacgagtctgaatatatctttagctctgaaattgcagaaatggaagacattccatcaaggacagaggaaccaagtgagaagaaggtacctctggacatgtcattgttccttaagctccagaagcgggtcacagagctggagcaggagaagcaggtgatgcaggatgagctggaccgcaaggaggagcaggtgctccgcagcaaggccaaggaagaagaaagaccacaaattagaggtgcagaactggaatatgagtcactcaagcgtcaagaactagaatcagaaaacaaaaaactgaagaatgagctaaatgagttgcgcaaggccctcagtgagaaaagtgccccagaggtgaccgccccaggtgcacctgcctaccgtgtcctcatggagcagctgacctctgtgagcgaggagcttgatgtccgcaaggaggaagtcctcatcttaaggtctcaactggtgagccagaaagaggccatccaacccaagaatacaatgacagattccacaatacttttggaagatgtacaaaaaatgaaagataaaggtgaaatagcacaagcatacattggtttgaaagaaacaaatagatcatctgctctggattaccatgagttgaatgaggatggagagctgtggctggtttatgaagggttaaaacaagccaacaggctcctggaatcccagctgcagtcacagaagaggagccatgagaatgaggccgaggccctccgtggggagatccagagcctgaaggaggagaacaaccgacagcagcagctgctggcccagaacctgcagctgcccccagaggcccgcattgaggccagcctgcagcacgagatcacccggctgaccaacgaaaacttggatttgatggaacaacttgaaaaacaggataagacggtccgtaaactgaaaaaacaactgaaagtatttgccaaaaaaattggcgaactagaagtgggccagatggagaacatatccccaggacagatcattgatgaacccatccgaccagtcaacattcccaggaaagaaaaggatttccaagggatgctggaatacaagaaggaggatgagcaaaaacttgttaagaacctgattctggaactgaagccacgtggtgtagcagtcaatttgattccaggattaccggcatatatcctgttcatgtgtgttcgacatgctgactacctgaatgatgatcagaaagtaaggtcgttgctaacatcaacaattaacagcatcaaaaaagtattgaagaaaagaggtgatgattttgaaaccgtctccttctggctctctaacacatgccgatttttgcactgcttgaaacagtacagtggagaagagggctttatgaagcacaacacatctcgccagaatgaacactgcctcaccaattttgacctggctgagtatcggcaggtgctgagtgacttggccattcagatctaccagcagctcgtgcgggtgttagagaacatccttcagccaatgattgtctcaggcatgctggaacatgaaacgattcagggcgtgtctggggtgaagcccacagggttgagaaagcgaacctccagtatcgccgatgagggcacctacacactggactccatcctccggcagctcaactccttccactcggtcatgtgtcagcatggcatggaccctgaactgatcaagcaggtggtcaagcagatgttctacatcataggggccatcaccctgaacaaccttctcctgcggaaggacatgtgctcctggagtaaaggcatgcagatcaggtacaatgtcagtcaactggaagaatggctgcgtgacaagaatctgatgaatagtggggctaaagaaaccctggaacctctcattcaggctgctcaacttttgcaagtgaaaaagaaaacagatgatgatgcagaagccatttgttctatgtgcaatgctttaactactgcccagattgtgaaagtgttgaatttgtatactccagttaatgagtttgaagaaagagtctctgtgtcgttcattcgtactatacagatgcgtttacgagacaggaaagactctccccagctgctcatggatgctaaacacatctttcctgtcacctttcctttcaacccatcttccctcgcactagaaaccatccagattccagccagcctcggcctgggcttcatttcacgggtctgaaagtgatgtccaggcaaaaattgacaatacatttcttgcccgaaataagaacccattatttccagtgagttactgaaaatacatttttaaagagaaagtactgattatctcccaaatgagaagtcattaactggaaatctccctagaatactttcatcactttggaaacaaagataggctctttcgtgctgtgttatctttatagcaacactcatccttaaccaactaggtaccgtgagtttacatacaggagaatgatggaaggaagggaggaaggaaaggaggagaaaaatgtgtcttcagctggcagcatttattttaaatccttagcactgagtttgaatggtataaaaagtataacttccatagatgagctgttgttaggaaggcaccaaagaacctcctctgcactaaacaggagaatggaaagaaaagtctccattgagtacatatcatgtcagtttagtaatcaattatgttgatattgttaaactggttcaaagaaataaactggcaatatgtaaagtaattcctcatttgtgtcactatgatatagagatattaaaggaatgttggtttgctaaatagtatagatgtccatttgtactatagtttactgagcattttaaattgctgctacatactgtcttcttaaaatgtaagtgatattaggcactacaataagtttctcttgtcaattctgtttacaattcaatcagatcacagttttaactggattatatgcaaatacctacagattcacctgcacaagtagcagacactggaaagtcatgtagtaatatgacaaaatgcttgacatttaggggtaggattagacaaagtggctattgttgatgtcattatttattcaggatgtattacattgatgtgctcattaattttccctgggtggatattgcgtcagggtacagtgttctgtgaagtgacttatttttaactaccagatctgattccttcagtgcatattttcaaccttgacaggttttctctcttcttaatttattaagaattaatctcggctgggcgcggtggctcacgcctgtaatcccagcactttgggaagccaaggtgggcggatcacttcaggttaggagttggagaccagcctggccaacatggcgaaaccctgtctctactaaaaatacaaaaattagccgggcgtggtggcacttgcctgtaatcccagctactcgggaggctgaggcacgagaatcgattaaacctgggaggcggagattgcaatgagatcgaaccactgcactccagcctgggtgacagagagagacactgccttggaaaaaaaaagaatctcactcactatctagagaggattgtcagaatattcacgattcaggtcttgaaactttgattatgcaaaagaaggtatataataaatatttcattatgattcagtttttaaggctttgcagcttctataagtgttctcagatgccactagataattttaaaagcatcatattagaaatactttaagaagacttatataagaaatagaagattgttgaattttacagaggatttggttcattaagacccagattctgtaagttttcattctgaaattctagttaaacatattcaccatttttcttaggaatcttatacaataaatccttcaggttgcacaaaagcaaattattagttttcattagaaactctggttctgaattacaatcataggttatataaatttaactgttagatggtctataaatcttattaaaatatgtgcaatatttatggaagtcaaacagcttcatatcagtgataaagattgttattaaaagataaatactgtctgttaatttacatgggcctcaagttcctcgtttataaaataagagagttggacactgattcttaacatctcctccacatttaaaattctctcttctcagcccttagattctagagagaaaaagctgcagttactcagtaagtccattctctgatggaaagaccagtgtgtagtgcctgtcaattccttaggattaatcaaatgtaaaatcacaagtttgtgtagctgtaacctttcttaaatgtacatgatttatgtacatgcttttagaaggtcctactatatttgtattataattagtttaagtaatttttattacatcatgtattgctttattcagtttgaatacatttatttatttatttgcagtatcaaccagaaacactaccaattgcatcaaattctcccagtttttcctggttgtcaatgcggttttcaatgcacaattaagtcatagccatttggttcgtaccaaatgtgtcagaatctaacagcatccgataggctgtaagttggggagttgctaagaaaatgcaacgtggtacaggctgtccgcctcagccctggaaatctcccagacctcccccagcttcatcctgtgtagcacgactcaacgtgcaccctgaatcttctcaggtcttccaggtcatgctgtagctgtcactgccatgcagcccttttttttactccggacagctcatgtactgaagcgtcatgaaagaaaggctgtggtctgagcccttctctcccatctcctgtctttgtcctgtcaagtgctggagccagagctcctacagctgcccttggtggtttctcctgttcagcgatggtggcacaaaggttctgctattccagggctccagcttcctcccaggtctacccagagctccagatgggggtctgaattaacctctcttggtggcctggagatttttagtcattgacaagaataccttgtaaccagggaaccccaaggcccagtaaatgattctgtataccattttcttgaaggtacaagaagattctgccgactatggggatctttgggccagtttgaggattgctttccctctgaggttctttctctctgtcagccacactttctcacccaacttcagacacaccctgccagcctttcccctactcattcactcttccccttccctcaacttaatcgtctatcccgttgcctgctgtttgactgtgcactgaaggcaggtggatggagtcagtcctcagttgcccctgctggccttcctggtgcttaccatcagcccaatctttgcacagtccttgttgttcttacttctctgcatgcattccttcagaagatcagtcatcaactttttcttaattcctctgtgacacacaatgggaattcaaaggaagagatcttaaaagtcacaacagttctttatcttaataatcccctccccattcaccttactacatgcagactcacctcacacccttacaacttgaagctgaaaatttaaaagtaatttccctttttgcagcttttcctcaggttaaggctttgatctgcctgagagtaactctaaaaggagggaagataaatatgggataaaatccacaaagtgtagcttctaattcctttggaagtttaaaaaatttccacatatctgatgcttcttttgtcaggtgcagaagcacaaaaacatattccgaagccaactgatagggaatttggggattattgtcagtttggagaatttgctgtgttatttcttcatttccatggatagctcatagttggctctttctgggtgagtaattatgtgtaatatagatcaaatcttttactaaggttacagctacatgttaggggaggctatgaaaatactatattattataatttcagtgcagtgattgttgtgagaaataactttcatggtaaccctaggaaaatgggcacctgccaccatcctgagaagtcctcacacaatgccctttctctcttacacacacacacacacacatacacacacacacacccccgtcactaattcatagagttccttagcaggcatagtcaaggatcctctgggtaatgtcagctgcttagtgataaaacagagccaaaactagtgcatcctgttgaaagtaatgcagaaacagtacctgggtccagatatgctttcctgcggcgctttcctctgttacctcgtttcatcctcacagcagcatggacggtaggtggggtcgcttctacaatcatttctgatgatagcttgggaatagagataggggcagtgacttgcctgatgtcgcacagccctctggctgtcctgctttcccatatggagcagtggtggtgtgggcacctgtgatgcaggagactttaaaaatgtcgtgaggtcacgtgctgcccctcctggtacgtgtggaatgcccctggccagcaaggggtgcttttttatcagagttggcagctggcatgtgggaaccgagcaagtgctgcgtaccaagttacttgttttaaggagaccaagtgctcagcgccaggtggttttcttttttgtcatagttacttgctataactcagcttgacttctgtcatgaatcagtgctctctgggaggatgcaatactctgtttgggcattaattggtagcaggttgtctcaaccaaaaagacaggaaacagcaaaagcctctctgaaattaagaggaaagttactctccccacacccatcagagtctttattggagccaccaggtgagctgtgcagcctggacaggcctgcagctataggccaccttcccagtttaggtcctcagcacaggggagcccaagtcactgggtgccttccgagggctgtcactgggcaggccatatacaagtcagtgtgtgcgtgggcactgcagtgtgtgcatgccgtaggtgttgatgggtgctaggaggggtgtcgtgtgcatgcgcgttgaagaggatctgtattgccgtgacctctgttcatggatgagtgcattgtaatttgttctcaggctgtgctgtgagggccgccttaacccttgctcccttcccttctagagctgccttaagttctccagaacttttcttctgtaaaggatatcttgcctggaagggatatcttgccctgtttctcaaggttttgtgagagttttgactggatgtggccctgcatgaccctccttctcctgtacttcctctttcctttccaaatgggaattagaactgtggggcagcaacagtctcagagccagtgagaggccagcttagagaatgcttctgagttagtgggactctgtgtcacaagtaagcaaatgaatatatgaaagaaattatggagataagttagattcttggtaatacttaaatgtcttgctttctactaaccttttgttactaaaggtaaagggtataactcaaactttttgtggacattcttttcaaaattttttaagaaccctgtactataaaaggttgagtaaaaacaggaaagcgtgctataagttcaaatctgttgtattaccctaaattagataaaccaacctgaattatagtagatttctcaatagatgaggaactgaaaaatactatgtaaaatatcttccaaaatgctttttatactttttttatttgtaatttggtctatctaaaatgttcgttagcttaacttaatgggcgttattggattcatatgactaacgtttcctcagtattgtaatgcttgaaatatttgaaagaaaaaatgttgttttttagttgaaactggtatatataattcagtgcttggcaggttagtatatttttatgcatttttcagagtcagcagtttcaaatcttattgttatcatgttataaaattttagcccacatttcaggctccgtaaatcatttgagccattattttttcccaacaaatggtgaattttttctttaaatgtggatatatatgttgtaatttatgattcctggttatgtatttttgtgggatcctgcagtaaaattgacttttttgtgtctttgggagatttaaattgcgctaacagtgttgcgcaaaaatgagttcatgccatttaacatattgtattttaattattaactgtattaatttactatgaaatggacatccttttaactaaaatggaattgaacattgcagttttcaaatatttttccttgttgggtctggaaaaggaattctactttgatctgcatagaaaattttgatacaattttttgaaagttcttaggtgaaacatttacccattaaaaaggaagcagaaatactgagacatgaaaggcattatcaactaactctagactctagaacccattctagcatatctcacgtgcaatttttaaaaataagttaataattcatctcatatcaacaaaagcctttgaaacatgggttttcactagatatcacctagtgctaagataaaaaccaaaacaatatcagaattacatttatgctctaaatttgtagttgtccattgttgtgcttagtaaatgtgtgtcattaatgctgtattctcctagctattatggaaacttgtttaaataaagatatggat

SEQ ID NO: 19189 - DNA, 12139 bp, Homo sapiens
  source 1..12139: mol_type = unassigned DNA
accccgggcaggtggagcgctcgcggctgctcgcggcgagcccgggagtgatggcgaggcccctgcgggcggccagcgcctgaggcgccccgccccgccccgccccgcgcggccctccccgcccggccctgccctgccctgctccctgccggcggctgcgggcgcttcctagtccgctcgggcggccgcccaggcgaggtgcggcctccgcacaggcggggggcgtaggcgcgcggggcccgccatggctgcgtcggagctctacacaaagtttgccagggtttggatacctgatccagaggaagtctggaagtcagcagagctgctcaaagattataagccaggagataaagtcctcctgcttcacctcgaggaaggaaaggatttggaataccatctagatccaaagaccaaggagctgcctcacttacgaaatcctgacatacttgttggtgaaaatgacctcacagccctcagctatcttcatgagcctgctgtgctccataatctcagagtccgctttattgattccaaacttatttatacgtattgtggtatagtcctagtagctataaatccctatgaacagctgcctatttatggagaagatattattaatgcatacagtggtcagaacatgggtgatatggatccacatatctttgcagtagctgaagaagcttacaagcaaatggccagagatgaacgaaatcagtccatcatcgtaagtggagagtctggggcaggaaaaacagtctcagctaagtatgccatgcgatactttgcaactgtgagtggttctgccagtgaggccaatgtggaggaaaaggtcttggcctccaaccccatcatggagtccattggaaatgctaaaacaaccaggaatgataatagcagccgttttgggaagtatattgagattggttttgataagagatatcgaatcattggtgccaatatgagaacttatcttttagagaaatccagagtggtattccaggcagaagaggagagaaactatcatatcttctatcagctttgtgcctcagcaaagttacctgaatttaaaatgctacgattaggaaatgcagataactttaattacacaaaacaaggaggcagtcctgtgattgaaggagtggatgatgcaaaggagatggcacatactaggcaggcctgcactttgctaggaattagtgaatctcatcaaatgggaattttccgaatacttgctggcatccttcacttaggcaatgttggatttacatcccgagatgcagacagctgcacaatacctcccaagcatgaacctctctgcatcttctgtgaactcatgggtgtggactatgaggagatgtgtcactggctctgccatcggaaactggctactgccacagagacatacatcaagcccatctccaagctgcaggccacaaatgcccgcgatgctttggccaagcacatctatgccaagctctttaactggattgtagataatgtcaatcaggctctccattctgctgtcaaacagcactcttttattggtgtgctagacatttacggatttgaaacatttgagataaatagttttgaacagttttgcataaattatgcaaatgaaaaactacagcaacaattcaatatgcatgtcttcaaattggagcaagaagaatatatgaaggaacaaattccatggacactcatagatttttatgataatcagccttgtattaatcttatagaatcaaaactaggcattctagatttactggatgaggaatgcaagatgcctaaaggcacagatgacacctgggcccaaaaattgtacaacacacatttgaacaaatgtgcactctttgaaaagcctcgtctatcaaacaaagctttcatcatccaacattttgctgacaaagtggaataccagtgtgaaggatttctcgaaaagaataaagacaccgtttttgaagaacaaattaaagttcttaaatcaagcaagtttaagatgctaccagaactatttcaagatgatgagaaggccatcagtccaacttcagccacctcctcagggcgcacacccctcacacgaactcctgcaaagcccaccaaaggcagaccaggccaaatggccaaagagcacaagaaaacagtggggcatcagttcagaaactccctgcacctgcttatggagacactcaatgccactacccctcactatgtgcgctgtatcaagcctaatgacttcaagttcccattcacgtttgatgagaagagggcagtgcagcagctgagagcatgtggtgtcctggaaaccatccgaatcagtgcggccggtttcccctcacggtggacttaccaagaatttttcagccgctaccgtgtcctaatgaagcagaaagatgtgctgagtgacagaaagcaaacatgcaagaatgtgttagagaaactgatactggacaaggacaaataccagtttggtaagacaaagatctttttccgtgccggtcaagtggcctatctagaaaaattgagagctgacaaactgagagctgcctgcatccggatccagaagaccatccgagggtggctgctgagaaagaagtacctacgcatgcggaaggcagccatcaccatgcagagatacgtgcggggctaccaggcccgatgctatgctaagtttctgcgcagaaccaaggcagcaaccatcattcaaaagtactggcgcatgtatgtggtccgcaggaggtacaagattagacgagctgccactatcgttcttcagtcttacttgcgaggcttcttggccagaaataggtatcgcaagatactccgtgagcacaaagcagtcatcattcagaagcgagtccggggctggctggcccgcacacactacaagaggagcatgcatgccatcatctaccttcagtgctgcttcaggcggatgatggccaagcgtgagctaaagaagctcaaaatcgaggctcgctcagtggagcgctataagaagctgcacatcggcatggagaacaagatcatgcagctgcagcgcaaagttgatgagcagaacaaagactacaaatgccttgtggagaaactaaccaatctggaaggaatatacaactctgagactgagaaactacgaagtgacttagaacgtcttcaactaagtgaagaggaagcgaaagttgccactgggcgggtccttagtctgcaggaagaaattgccaagctccggaaagacctggagcaaactcgttcagagaaaaaatgcattgaggaacatgcagatcgatacaaacaagaaacagagcagctggtatcaaatctgaaggaagaaaatactttgctgaagcaagaaaaagaagccctcaatcaccgcatcgtgcagcaggctaaggagatgacagaaactatggagaagaagttagtagaagaaacgaaacaactggaactcgaccttaatgatgaaaggctgagatatcagaaccttctgaatgagttcagtcgcctggaagaaagatatgatgacctcaaggaagagatgacccttatggtgcatgtgcctaagcctggacacaagagaacagactccacccacagcagcaacgagtctgaatatatctttagctctgaaattgcagaaatggaagacattccatcaaggacagaggaaccaagtgagaagaaggtacctctggacatgtcattgttccttaagctccagaagcgggtcacagagctggagcaggagaagcaggtgatgcaggatgagctggaccgcaaggaggagcaggtgctccgcagcaaggccaaggaagaagaaagaccacaaattagaggtgcagaactggaatatgagtcactcaagcgtcaagaactagaatcagaaaacaaaaaactgaagaatgagctaaatgagttgcgcaaggccctcagtgagaaaagtgccccagaggtgaccgccccaggtgcacctgcctaccgtgtcctcatggagcagctgacctctgtgagcgaggagcttgatgtccgcaaggaggaagtcctcatcttaaggtctcaactggtgagccagaaagaggccatccaacccaagttacatgagaatacaatgacagattccacaatacttttggaagatgtacaaaaaatgaaagataaaggtgaaatagcacaagcatacattggtttgaaagaaacaaataggctcctggaatcccagctgcagtcacagaagaggagccatgagaatgaggccgaggccctccgtggggagatccagagcctgaaggaggagaacaaccgacagcagcagctgctggcccagaacctgcagctgcccccagaggcccgcattgaggccagcctgcagcacgagatcacccggctgaccaacgaaaacttggatttgatggaacaacttgaaaaacaggataagacggtccgtaaactgaaaaaacaactgaaagtatttgccaaaaaaattggcgaactagaagtgggccagatggagaacatatccccaggacagatcattgatgaacccatccgaccagtcaacattcccaggaaagaaaaggatttccaagggatgctggaatacaagaaggaggatgagcaaaaacttgttaagaacctgattctggaactgaagccacgtggtgtagcagtcaatttgattccaggattaccggcatatatcctgttcatgtgtgttcgacatgctgactacctgaatgatgatcagaaagtaaggtcgttgctaacatcaacaattaacagcatcaaaaaagtattgaagaaaagaggtgatgattttgaaaccgtctccttctggctctctaacacatgccgatttttgcactgcttgaaacagtacagtggagaagagggctttatgaagcacaacacatctcgccagaatgaacactgcctcaccaattttgacctggctgagtatcggcaggtgctgagtgacttggccattcagatctaccagcagctcgtgcgggtgttagagaacatccttcagccaatgattgtctcaggcatgctggaacatgaaacgattcagggcgtgtctggggtgaagcccacagggttgagaaagcgaacctccagtatcgccgatgagggcacctacacactggactccatcctccggcagctcaactccttccactcggtcatgtgtcagcatggcatggaccctgaactgatcaagcaggtggtcaagcagatgttctacatcataggggccatcaccctgaacaaccttctcctgcggaaggacatgtgctcctggagtaaaggcatgcagatcaggtacaatgtcagtcaactggaagaatggctgcgtgacaagaatctgatgaatagtggggctaaagaaaccctggaacctctcattcaggctgctcaacttttgcaagtgaaaaagaaaacagatgatgatgcagaagccatttgttctatgtgcaatgctttaactactgcccagattgtgaaagtgttgaatttgtatactccagttaatgagtttgaagaaagagtctctgtgtcgttcattcgtactatacagatgcgtttacgagacaggaaagactctccccagctgctcatggatgctaaacacatctttcctgtcacctttcctttcaacccatcttccctcgcactagaaaccatccagattccagccagcctcggcctgggcttcatttcacgggtctgaaagtgatgtccaggcaaaaattgacaatacatttcttgcccgaaataagaacccattatttccagtgagttactgaaaatacatttttaaagagaaagtactgattatctcccaaatgagaagtcattaactggaaatctccctagaatactttcatcactttggaaacaaagataggctctttcgtgctgtgttatctttatagcaacactcatccttaaccaactaggtaccgtgagtttacatacaggagaatgatggaaggaagggaggaaggaaaggaggagaaaaatgtgtcttcagctggcagcatttattttaaatccttagcactgagtttgaatggtataaaaagtataacttccatagatgagctgttgttaggaaggcaccaaagaacctcctctgcactaaacaggagaatggaaagaaaagtctccattgagtacatatcatgtcagtttagtaatcaattatgttgatattgttaaactggttcaaagaaataaactggcaatatgtaaagtaattcctcatttgtgtcactatgatatagagatattaaaggaatgttggtttgctaaatagtatagatgtccatttgtactatagtttactgagcattttaaattgctgctacatactgtcttcttaaaatgtaagtgatattaggcactacaataagtttctcttgtcaattctgtttacaattcaatcagatcacagttttaactggattatatgcaaatacctacagattcacctgcacaagtagcagacactggaaagtcatgtagtaatatgacaaaatgcttgacatttaggggtaggattagacaaagtggctattgttgatgtcattatttattcaggatgtattacattgatgtgctcattaattttccctgggtggatattgcgtcagggtacagtgttctgtgaagtgacttatttttaactaccagatctgattccttcagtgcatattttcaaccttgacaggttttctctcttcttaatttattaagaattaatctcggctgggcgcggtggctcacgcctgtaatcccagcactttgggaagccaaggtgggcggatcacttcaggttaggagttggagaccagcctggccaacatggcgaaaccctgtctctactaaaaatacaaaaattagccgggcgtggtggcacttgcctgtaatcccagctactcgggaggctgaggcacgagaatcgattaaacctgggaggcggagattgcaatgagatcgaaccactgcactccagcctgggtgacagagagagacactgccttggaaaaaaaaagaatctcactcactatctagagaggattgtcagaatattcacgattcaggtcttgaaactttgattatgcaaaagaaggtatataataaatatttcattatgattcagtttttaaggctttgcagcttctataagtgttctcagatgccactagataattttaaaagcatcatattagaaatactttaagaagacttatataagaaatagaagattgttgaattttacagaggatttggttcattaagacccagattctgtaagttttcattctgaaattctagttaaacatattcaccatttttcttaggaatcttatacaataaatccttcaggttgcacaaaagcaaattattagttttcattagaaactctggttctgaattacaatcataggttatataaatttaactgttagatggtctataaatcttattaaaatatgtgcaatatttatggaagtcaaacagcttcatatcagtgataaagattgttattaaaagataaatactgtctgttaatttacatgggcctcaagttcctcgtttataaaataagagagttggacactgattcttaacatctcctccacatttaaaattctctcttctcagcccttagattctagagagaaaaagctgcagttactcagtaagtccattctctgatggaaagaccagtgtgtagtgcctgtcaattccttaggattaatcaaatgtaaaatcacaagtttgtgtagctgtaacctttcttaaatgtacatgatttatgtacatgcttttagaaggtcctactatatttgtattataattagtttaagtaatttttattacatcatgtattgctttattcagtttgaatacatttatttatttatttgcagtatcaaccagaaacactaccaattgcatcaaattctcccagtttttcctggttgtcaatgcggttttcaatgcacaattaagtcatagccatttggttcgtaccaaatgtgtcagaatctaacagcatccgataggctgtaagttggggagttgctaagaaaatgcaacgtggtacaggctgtccgcctcagccctggaaatctcccagacctcccccagcttcatcctgtgtagcacgactcaacgtgcaccctgaatcttctcaggtcttccaggtcatgctgtagctgtcactgccatgcagcccttttttttactccggacagctcatgtactgaagcgtcatgaaagaaaggctgtggtctgagcccttctctcccatctcctgtctttgtcctgtcaagtgctggagccagagctcctacagctgcccttggtggtttctcctgttcagcgatggtggcacaaaggttctgctattccagggctccagcttcctcccaggtctacccagagctccagatgggggtctgaattaacctctcttggtggcctggagatttttagtcattgacaagaataccttgtaaccagggaaccccaaggcccagtaaatgattctgtataccattttcttgaaggtacaagaagattctgccgactatggggatctttgggccagtttgaggattgctttccctctgaggttctttctctctgtcagccacactttctcacccaacttcagacacaccctgccagcctttcccctactcattcactcttccccttccctcaacttaatcgtctatcccgttgcctgctgtttgactgtgcactgaaggcaggtggatggagtcagtcctcagttgcccctgctggccttcctggtgcttaccatcagcccaatctttgcacagtccttgttgttcttacttctctgcatgcattccttcagaagatcagtcatcaactttttcttaattcctctgtgacacacaatgggaattcaaaggaagagatcttaaaagtcacaacagttctttatcttaataatcccctccccattcaccttactacatgcagactcacctcacacccttacaacttgaagctgaaaatttaaaagtaatttccctttttgcagcttttcctcaggttaaggctttgatctgcctgagagtaactctaaaaggagggaagataaatatgggataaaatccacaaagtgtagcttctaattcctttggaagtttaaaaaatttccacatatctgatgcttcttttgtcaggtgcagaagcacaaaaacatattccgaagccaactgatagggaatttggggattattgtcagtttggagaatttgctgtgttatttcttcatttccatggatagctcatagttggctctttctgggtgagtaattatgtgtaatatagatcaaatcttttactaaggttacagctacatgttaggggaggctatgaaaatactatattattataatttcagtgcagtgattgttgtgagaaataactttcatggtaaccctaggaaaatgggcacctgccaccatcctgagaagtcctcacacaatgccctttctctcttacacacacacacacacacatacacacacacacacccccgtcactaattcatagagttccttagcaggcatagtcaaggatcctctgggtaatgtcagctgcttagtgataaaacagagccaaaactagtgcatcctgttgaaagtaatgcagaaacagtacctgggtccagatatgctttcctgcggcgctttcctctgttacctcgtttcatcctcacagcagcatggacggtaggtggggtcgcttctacaatcatttctgatgatagcttgggaatagagataggggcagtgacttgcctgatgtcgcacagccctctggctgtcctgctttcccatatggagcagtggtggtgtgggcacctgtgatgcaggagactttaaaaatgtcgtgaggtcacgtgctgcccctcctggtacgtgtggaatgcccctggccagcaaggggtgcttttttatcagagttggcagctggcatgtgggaaccgagcaagtgctgcgtaccaagttacttgttttaaggagaccaagtgctcagcgccaggtggttttcttttttgtcatagttacttgctataactcagcttgacttctgtcatgaatcagtgctctctgggaggatgcaatactctgtttgggcattaattggtagcaggttgtctcaaccaaaaagacaggaaacagcaaaagcctctctgaaattaagaggaaagttactctccccacacccatcagagtctttattggagccaccaggtgagctgtgcagcctggacaggcctgcagctataggccaccttcccagtttaggtcctcagcacaggggagcccaagtcactgggtgccttccgagggctgtcactgggcaggccatatacaagtcagtgtgtgcgtgggcactgcagtgtgtgcatgccgtaggtgttgatgggtgctaggaggggtgtcgtgtgcatgcgcgttgaagaggatctgtattgccgtgacctctgttcatggatgagtgcattgtaatttgttctcaggctgtgctgtgagggccgccttaacccttgctcccttcccttctagagctgccttaagttctccagaacttttcttctgtaaaggatatcttgcctggaagggatatcttgccctgtttctcaaggttttgtgagagttttgactggatgtggccctgcatgaccctccttctcctgtacttcctctttcctttccaaatgggaattagaactgtggggcagcaacagtctcagagccagtgagaggccagcttagagaatgcttctgagttagtgggactctgtgtcacaagtaagcaaatgaatatatgaaagaaattatggagataagttagattcttggtaatacttaaatgtcttgctttctactaaccttttgttactaaaggtaaagggtataactcaaactttttgtggacattcttttcaaaattttttaagaaccctgtactataaaaggttgagtaaaaacaggaaagcgtgctataagttcaaatctgttgtattaccctaaattagataaaccaacctgaattatagtagatttctcaatagatgaggaactgaaaaatactatgtaaaatatcttccaaaatgctttttatactttttttatttgtaatttggtctatctaaaatgttcgttagcttaacttaatgggcgttattggattcatatgactaacgtttcctcagtattgtaatgcttgaaatatttgaaagaaaaaatgttgttttttagttgaaactggtatatataattcagtgcttggcaggttagtatatttttatgcatttttcagagtcagcagtttcaaatcttattgttatcatgttataaaattttagcccacatttcaggctccgtaaatcatttgagccattattttttcccaacaaatggtgaattttttctttaaatgtggatatatatgttgtaatttatgattcctggttatgtatttttgtgggatcctgcagtaaaattgacttttttgtgtctttgggagatttaaattgcgctaacagtgttgcgcaaaaatgagttcatgccatttaacatattgtattttaattattaactgtattaatttactatgaaatggacatccttttaactaaaatggaattgaacattgcagttttcaaatatttttccttgttgggtctggaaaaggaattctactttgatctgcatagaaaattttgatacaattttttgaaagttcttaggtgaaacatttacccattaaaaaggaagcagaaatactgagacatgaaaggcattatcaactaactctagactctagaacccattctagcatatctcacgtgcaatttttaaaaataagttaataattcatctcatatcaacaaaagcctttgaaacatgggttttcactagatatcacctagtgctaagataaaaaccaaaacaatatcagaattacatttatgctctaaatttgtagttgtccattgttgtgcttagtaaatgtgtgtcattaatgctgtattctcctagctattatggaaacttgtttaaataaagatatggat

SEQ ID NO: 19190 - DNA, 5989 bp, Homo sapiens
  source 1..5989: mol_type = unassigned DNA
gcacaggcggggggcgtaggcgcgcggggcccgccatggctgcgtcggagctctacacaaagtttgccagggtttggatacctgatccagaggaagtctggaagtcagcagagctgctcaaagattataagccaggagataaagtcctcctgcttcacctcgaggaaggaaaggatttggaataccatctagatccaaagaccaaggagctgcctcacttacgaaatcctgacatacttgttggtgaaaatgacctcacagccctcagctatcttcatgagcctgctgtgctccataatctcagagtccgctttattgattccaaacttatttatacgtattgtggtatagtcctagtagctataaatccctatgaacagctgcctatttatggagaagatattattaatgcatacagtggtcagaacatgggtgatatggatccacatatctttgcagtagctgaagaagcttacaagcaaatggccagagatgaacgaaatcagtccatcatcgtaagtggagagtctggggcaggaaaaacagtctcagctaagtatgccatgcgatactttgcaactgtgagtggttctgccagtgaggccaatgtggaggaaaaggtcttggcctccaaccccatcatggagtccattggaaatgctaaaacaaccaggaatgataatagcagccgttttgggaagtatattgagattggttttgataagagatatcgaatcattggtgccaatatgagaacttatcttttagagaaatccagagtggtattccaggcagaagaggagagaaactatcatatcttctatcagctttgtgcctcagcaaagttacctgaatttaaaatgctacgattaggaaatgcagataactttaattacacaaaacaaggaggcagtcctgtgattgaaggagtggatgatgcaaaggagatggcacatactaggcaggcctgcactttgctaggaattagtgaatctcatcaaatgggaattttccgaatacttgctggcatccttcacttaggcaatgttggatttacatcccgagatgcagacagctgcacaatacctcccaagcatgaacctctctgcatcttctgtgaactcatgggtgtggactatgaggagatgtgtcactggctctgccatcggaaactggctactgccacagagacatacatcaagcccatctccaagctgcaggccacaaatgcccgcgatgctttggccaagcacatctatgccaagctctttaactggattgtagataatgtcaatcaggctctccattctgctgtcaaacagcactcttttattggtgtgctagacatttacggatttgaaacatttgagataaatagttttgaacagttttgcataaattatgcaaatgaaaaactacagcaacaattcaatatgcatgtcttcaaattggagcaagaagaatatatgaaggaacaaattccatggacactcatagatttttatgataatcagccttgtattaatcttatagaatcaaaactaggcattctagatttactggatgaggaatgcaagatgcctaaaggcacagatgacacctgggcccaaaaattgtacaacacacatttgaacaaatgtgcactctttgaaaagcctcgtctatcaaacaaagctttcatcatccaacattttgctgacaaagtggaataccagtgtgaaggatttctcgaaaagaataaagacaccgtttttgaagaacaaattaaagttcttaaatcaagcaagtttaagatgctaccagaactatttcaagatgatgagaaggccatcagtccaacttcagccacctcctcagggcgcacacccctcacacgaactcctgcaaagcccaccaaaggcagaccaggccaaatggccaaagagcacaagaaaacagtggggcatcagttcagaaactccctgcacctgcttatggagacactcaatgccactacccctcactatgtgcgctgtatcaagcctaatgacttcaagttcccattcacgtttgatgagaagagggcagtgcagcagctgagagcatgtggtgtcctggaaaccatccgaatcagtgcggccggtttcccctcacggtggacttaccaagaatttttcagccgctaccgtgtcctaatgaagcagaaagatgtgctgagtgacagaaagcaaacatgcaagaatgtgttagagaaactgatactggacaaggacaaataccagtttggtaagacaaagatctttttccgtgccggtcaagtggcctatctagaaaaattgagagctgacaaactgagagctgcctgcatccggatccagaagaccatccgagggtggctgctgagaaagaagtacctacgcatgcggaaggcagccatcaccatgcagagatacgtgcggggctaccaggcccgatgctatgctaagtttctgcgcagaaccaaggcagcaaccatcattcaaaagtactggcgcatgtatgtggtccgcaggaggtacaagattagacgagctgccactatcgttcttcagtcttacttgcgaggcttcttggccagaaataggtatcgcaagatactccgtgagcacaaagcagtcatcattcagaagcgagtccggggctggctggcccgcacacactacaagaggagcatgcatgccatcatctaccttcagtgctgcttcaggcggatgatggccaagcgtgagctaaagaagctcaaaatcgaggctcgctcagtggagcgctataagaagctgcacatcggcatggagaacaagatcatgcagctgcagcgcaaagttgatgagcagaacaaagactacaaatgccttgtggagaaactaaccaatctggaaggaatatacaactctgagactgagaaactacgaagtgacttagaacgtcttcaactaagtgaagaggaagcgaaagttgccactgggcgggtccttagtctgcaggaagaaattgccaagctccggaaagacctggagcaaactcgttcagagaaaaaatgcattgaggaacatgcagatcgatacaaacaagaaacagagcagctggtatcaaatctgaaggaagaaaatactttgctgaagcaagaaaaagaagccctcaatcaccgcatcgtgcagcaggctaaggagatgacagaaactatggagaagaagttagtagaagaaacgaaacaactggaactcgaccttaatgatgaaaggctgagatatcagaaccttctgaatgagttcagtcgcctggaagaaagatatgatgacctcaaggaagagatgacccttatggtgcatgtgcctaagcctggacacaagagaacagactccacccacagcagcaacgagtctgaatatatctttagctctgaaattgcagaaatggaagacattccatcaaggacagaggaaccaagtgagaagaaggtacctctggacatgtcattgttccttaagctccagaagcgggtcacagagctggagcaggagaagcaggtgatgcaggatgagctggaccgcaaggaggagcaggtgctccgcagcaaggccaaggaagaagaaagaccacaaattagaggtgcagaactggaatatgagtcactcaagcgtcaagaactagaatcagaaaacaaaaaactgaagaatgagctaaatgagttgcgcaaggccctcagtgagaaaagtgccccagaggtgaccgccccaggtgcacctgcctaccgtgtcctcatggagcagctgacctctgtgagcgaggagcttgatgtccgcaaggaggaagtcctcatcttaaggtctcaactggtgagccagaaagaggccatccaacccaaggatgacaagaatacaatgacagattccacaatacttttggaagatgtacaaaaaatgaaagataaaggtgaaatagcacaagcatacattggtttgaaagaaacaaataggctcctggaatcccagctgcagtcacagaagaggagccatgagaatgaggccgaggccctccgtggggagatccagagcctgaaggaggagaacaaccgacagcagcagctgctggcccagaacctgcagctgcccccagaggcccgcattgaggccagcctgcagcacgagatcacccggctgaccaacgaaaacttgtattttgaggaattatatgcagatgaccctaagaagtatcaatcatatcggatttccctttacaaacggatgattgatttgatggaacaacttgaaaaacaggataagacggtccgtaaactgaaaaaacaactgaaagtatttgccaaaaaaattggcgaactagaagtgggccagatggagaacatatccccaggacagatcattgatgaacccatccgaccagtcaacattcccaggaaagaaaaggatttccaagggatgctggaatacaagaaggaggatgagcaaaaacttgttaagaacctgattctggaactgaagccacgtggtgtagcagtcaatttgattccaggattaccggcatatatcctgttcatgtgtgttcgacatgctgactacctgaatgatgatcagaaagtaaggtcgttgctaacatcaacaattaacagcatcaaaaaagtattgaagaaaagaggtgatgattttgaaaccgtctccttctggctctctaacacatgccgatttttgcactgcttgaaacagtacagtggagaagagggctttatgaagcacaacacatctcgccagaatgaacactgcctcaccaattttgacctggctgagtatcggcaggtgctgagtgacttggccattcagatctaccagcagctcgtgcgggtgttagagaacatccttcagccaatgattgtctcaggcatgctggaacatgaaacgattcagggcgtgtctggggtgaagcccacagggttgagaaagcgaacctccagtatcgccgatgagggcacctacacactggactccatcctccggcagctcaactccttccactcggtcatgtgtcagcatggcatggaccctgaactgatcaagcaggtggtcaagcagatgttctacatcataggggccatcaccctgaacaaccttctcctgcggaaggacatgtgctcctggagtaaaggcatgcagatcaggtacaatgtcagtcaactggaagaatggctgcgtgacaagaatctgatgaatagtggggctaaagaaaccctggaacctctcattcaggctgctcaacttttgcaagtgaaaaagaaaacagatgatgatgcagaagccatttgttctatgtgcaatgctttaactactgcccagattgtgaaagtgttgaatttgtatactccagttaatgagtttgaagaaagagtctctgtgtcgttcattcgtactatacagatgcgtttacgagacaggaaagactctccccagctgctcatggatgctaaacacatctttcctgtcacctttcctttcaacccatcttccctcgcactagaaaccatccagattccagccagcctcggcctgggcttcatttcacgggtctgaaagtgatgtccaggcaaaaattgacaatacatttcttgcccgaaataagaacccattatttccagtgagttactgaaaatacatttttaaagagaaagtactgattatctcccaaatgagaagtcattaactggaaatctccctagaatactttcatcactttggaaacaaagataggctctttcgtgctgtgttatctttatagcaacactcatccttaaccaactaggtaccgtgagtttacatacaggagaatgatggaaggaagggaggaaggaaaggaggagaaaaatgtgtcttcagctggcagcatttattttaaatccttagcactgagtttgaatggtataaaaagtataacttccatagatgagctgttgttaggaaggcac

SEQ ID NO: 19191 - DNA, 9520 bp, Homo sapiens
  source 1..9520: mol_type = unassigned DNA
gcctcctccccacacctgggaggggagtggtgcggcgcggcctcctcccccggcgctcgcaactcctgtccggccgtagctgcgccgccgcggcgggagtaaaggtcgcgccgccgggagcgagccggccgcggcgcctgcgggaagccggcggggcaggtcggagaagagcgagaagatcgagaaactccaggccagcccgggaacatggcgccaggcgggccagccgcggactgagagccgcggggcagccaggagccggggcccgagccccgcccggcccgggccatgtcggtgggcgagctctacagccagtgcacaagggtctggatccctgaccctgatgaggtatggcgctcagctgagttaaccaaggactacaaagaaggagacaagagcctacagctcagactggaggatgaaacgattctggaatacccaattgatgtacaacgcaaccagctgcccttcttacggaatccagatatcttggtgggagaaaatgacctgactgcccttagctatcttcatgagcctgcagttttgcataatttgaaggtccgtttcctggagtccaaccatatctacacttactgtggtatcgtacttgttgccattaatccttatgaacagttgccaatctatggacaagatgtcatctatacctacagtggccaaaacatgggagacatggacccccacatctttgctgtggcagaagaagcctacaagcagatggccagagatgagaagaatcagtccatcatagtcagtggggagtctggagccgggaagacggtatcagccaagtatgccatgcgctatttcgccaccgttggtggctcggccagtgaaaccaacatcgaagagaaggtgctggcatccagtcccatcatggaggccattggaaatgccaagaccacccgcaatgacaacagcagccgttttggcaagtacatccagattggctttgacaaaaggtaccacatcatcggggccaacatgaggacttacctcttggagaagtccagagtggtcttccaggcagatgatgagaggaattaccacatcttttaccagctctgtgctgctgccggtcttccagaatttaaagagcttgcactaacaagtgcagaggactttttctatacatcacagggaggagacacttccatcgagggtgtggacgatgctgaggactttgagaagactcgacaagccttcacactcctcggagtgaaagagtcccatcagatgagcatttttaagataattgcttctatcttgcaccttggaagtgtggcgattcaggctgagcgtgatggtgattcctgtagtatatcaccccaggatgtatacctaagcaacttctgccgactgctaggggtggagcacagtcagatggagcactggctgtgtcatcgcaagctggtcaccacctcggagacctacgtcaagaccatgtccctgcagcaggtgatcaatgcgcgcaacgccctggcgaagcacatctatgcccagttgttcggctggattgtggagcacatcaacaaggccctgcacacctccctcaagcagcactccttcatcggggtcctggacatctatgggtttgagacatttgaggtaaacagctttgagcagttctgtatcaactatgcaaatgaaaagctccagcagcagttcaactcgcatgttttcaaactggagcaagaagaatacatgaaggaacagatcccttggaccctgattgatttttatgataaccaaccttgtatcgacctcattgaagccaagctgggtatcttggacctgttggatgaagaatgtaaggtccccaaaggaactgaccagaactgggctcagaagctctatgaccggcactccagcagccagcacttccagaagccccgcatgtccaacacggccttcatcatcgtccactttgcagacaaggtggagtacctctctgatggttttctggagaaaaacagagacacggtgtatgaagagcagatcaatatcctgaaggccagcaagttcccactagtggctgacttgtttcatgatgacaaggaccctgttcctgccaccacccctgggaaggggtcatcttcgaagatcagcgtccgttctgccagaccccccatgaaagtctccaacaaggagcacaagaaaaccgttggccaccagttccgtacctccctgcatctgctcatggagaccctgaatgccacgacacctcactatgtccgctgcatcaagcccaacgatgagaagctcccctttcactttgacccaaagagagcagtgcagcaactcagagcctgcggggtgttggagacgattcgaatcagtgcagctggctacccatccaggtgggcctaccatgactttttcaaccggtatcgggtgctggtcaagaagagagagctcgccaacacagacaaaaaggccatctgcaggtctgtcctggagaacctcatcaaggaccccgacaagttccagtttggccgcaccaagatcttctttcgagcaggccaggtggcctacctggagaagctgcgggctgacaagttccggacagccaccatcatgatccagaaaactgtccggggatggctgcagaaggtgaaatatcacaggctgaagggggctaccttaaccctgcagaggtactgccggggacacctggcccgcaggctggctgagcacctgcggaggatcagagcggctgtggtgctccagaaacattaccgcatgcagagggcccgccaggcctaccagagggtccgcagagctgccgttgttatccaggccttcacccgggccatgtttgtgcggagaacctaccgccaggtcctcatggagcacaaggccaccaccatccagaagcacgtgcggggctggatggcacgcaggcacttccagcggctgcgggatgcagccattgtcatccagtgtgccttccggatgctcaaggccaggcgggagctgaaggccctcaggattgaggcccgctcagcagagcatctgaaacgtctcaacgtgggcatggagaacaaggtggtccagctgcagcggaagatcgatgagcagaacaaagagttcaagacactttcagagcagttgtccgtgaccacctcaacatacaccatggaggtagagcggctgaagaaggagctggtgcactaccagcagagcccaggtgaggacaccagcctcaggctgcaggaggaggtggagagcctgcgcacagagctgcagagggcccactcggagcgcaagatcttggaggacgcccacagcagggagaaagatgagctgaggaagcgagttgcagacctggagcaagaaaatgctctcttgaaagatgagaaagaacagctcaacaaccaaatcctgtgccagtctaaagatgaatttgcccagaactctgtgaaggaaaatctcatgaagaaagaactggaggaggagcgatcccggtaccagaaccttgtgaaggaatattcacagttggagcagagatacgacaaccttcgggatgaaatgaccatcataaagcaaactccaggtcataggcggaacccatcaaaccaaagtagcttagaatctgactccaattacccctccatctccacatctgagatcggagacactgaggatgccctccagcaggtggaggaaattggcctggagaaggcagccatggacatgacggtcttcctgaagctgcagaagagagtacgggagctggagcaggagaggaaaaagctgcaagtgcagctggagaagagagaacagcaggacagcaagaaagtccaggcggaaccaccacagactgacatagatttggacccgaatgcagatctggcctacaatagtctgaagaggcaagagctggagtcagagaacaaaaagctgaagaatgacctgaatgagctgaggaaagccgtggccgaccaagccacgcagaataactccagccacggctccccagatagctacagcctcctgctgaaccagctcaagctggcccacgaggagctcgaggtgcgcaaggaggaggtgctcatcctcaggacccagatcgtgagcgccgaccagcggcgactcgccggcaggaacgcggagccgaacattaatgccagatcaagttggcctaacagtgaaaagcatgttgaccaggaggatgccattgaggcctatcacggggtctgccagacaaacagcaagactgaggattggggatatttaaatgaagatggagaactcggcttggcctaccaaggcctaaagcaagttgccaggctgctggaggctcagctgcaggcccagagcctggagcatgaggaggaggtggagcatctcaaggctcagctcgaggccctgaaggaggagatggacaaacagcagcagaccttctgccagacgctactgctctccccagaggcccaggtggaattcggcgttcagcaggaaatatcccggctgaccaacgagaatctggaccttaaagaactggtagaaaagctggaaaagaatgagaggaagctcaaaaagcaactgaagatttacatgaagaaagcccaggacctagaagctgcccaggcattggcccagagtgagaggaagcgccatgagctcaacaggcaggtcacggtccagcggaaagagaaggatttccagggcatgctggagtaccacaaagaggacgaggccctcctcatccggaacctggtgacagacttgaagccccagatgctgtcgggcacagtgccctgtctccccgcctacatcctctacatgtgcatccggcacgcggactacaccaacgacgatctcaaggtgcactccctgctgacctccaccatcaacggcattaagaaagtcctgaaaaagcacaatgatgactttgagatgacgtcattctggttatccaacacctgccgccttcttcactgtctgaagcagtacagcggggatgagggcttcatgactcagaacactgcaaagcagaatgaacactgtcttaagaattttgacctcaccgaataccgtcaggtgctgagtgacctttccattcagatctaccagcagctcattaaaattgccgagggcgtgttacagccgatgatagtttctgccatgttggaaaatgagagcattcagggtctatctggtgtgaagcccaccggctaccggaagcgctcctccagcatggcagatggggataactcatactgcctggaagctatcatccgccagatgaatgcctttcatacagtcatgtgtgaccagggcttggaccctgagatcatcctgcaggtattcaaacagctcttctacatgatcaacgcagtgactcttaacaacctgctcttgcggaaggacgtctgctcttggagcacaggcatgcaactcaggtacaatataagtcagcttgaggagtggcttcggggaagaaaccttcaccagagtggagcagttcagaccatggaacctctgatccaagcagcccagctcctgcaattaaagaagaaaacccaggaggacgcagaggctatctgctccctgtgtacctccctcagcacccagcagattgtcaaaattttaaacctttatactcccctgaatgaatttgaagaacgggtaacagtggcctttatacgaacaatccaggcacaactacaagagcggaatgaccctcagcaactgctattagatgccaagcacatgtttcctgttttgtttccatttaatccatcttctctaaccatggactcaatccacatcccagcgtgtctcaatctggaattcctcaatgaagtctgaagatgcatgtttccagcattagtttgattcccaatgtgagcaagaaggaagtatatacagtaaagtaaattcaaggatctgttaaatctggtaaaagtagatcaaatcagagattgacagcctgtggagggtgctgaactatacagaattagacacaactatgtcattattttttgtacctactgctcagaataaaaacacttgaaatatggaagattttaagtttgatttcagtccaacacatatacataatttatagacaccaagcagtccccatagacatataaaaggtgtcaattctataaaacgaagctgcctagttttgatctttgcatagaactagagaatgtccaaattaaaataccaaatatatataagtcacataaattgccttcaaagggctttaacaaataatggtactaataaccatgataatggcatatactgacatttcccaaagtttgcaaaccataggtgtggttgagtttgtggtgagatgttttaagaacaaaaatatggggatgagacttctgagaaatattcccaaaatattttttaatggctgattatacacagacagtggtgtaactgacctccagaccagacattttgagtactggtttctgaagcaaaattagaagtgccagtcctcagtgtgctcaaacgcttttgtgttatcttgatttaatggaagagattattaaaatgctgctatcccaaactccaagtgagaaagatggaaaaatattttgtttctgatgctagtccatacactttccaagtcccacaaaactttcacaaaaatgtatataagctaaatattagaaacggataacaaacttgttttatttatagatgtaaaaaccaaacaagtcaatatgaaagcttttaatctcttaataccattaagcttccagtaagagcatcacataatgctctactgttccagaaaccaaatagtaaaacaaactaaagttcgcacatcagatcatctgaaaaaccttcaaaaataatcagttcagggatattatacaaaagtttgggttttttttttttaagagaataaaatggcttaggtcaactttcccttttcaggttattttcaacgtttttcaaatttagcacacaaaaaattgtaaatatctctcccacaaaataaggattttaaaaaagtaattcagtaatataacaggcttagatgtttgctgctcttagaattttttttaacttgtttttggtttcttcaaaagcaagcattcaattggaaacccatattctttccacacttttttttactgtcttttctgtatttcttgatagcagtatgctgttcccataagaaaaaaatggtatttgcaaatcatggaagaacagcctctgtattacattgagaaaataagatttatccatgaattggaagtagaacagcctgccttcaccctcttttactcaaccacccaacttaaaaggctcttggaaacacagcacactccacgctaccttctgcactgtgcccttagagcacagcttcctcagttgttctctgcatctcctggggcttaggccagtcttagcctgggttaaggctgctgacattgtgttccaatcagttgtcatgggcattatcccctctacatccacattaaacatgccggcttctcttgggcatcggcagagctgtgcctttttctttcagttacagttacataatcactgacgtccatgacacttacccatggatccatgtgctgacttcatttagaaggccaatctaaaacaactgggtttgtggctacctctttaaagttgtttgtgaaggataatttgttttttaatgcactttagtttgaaagtgagtctcttatgtaaggaccatccttaaaagaccaaaaatgccttgttagagtgttaaggagttttgacatgcagtggttccacaaacacagtggcttactatccttatacactgtcttataccatcattctctccatctctcttggtcactactctctgctgtcactggttaatcactaggtgccaagagcttactgaataaaagcttggcaattagaataaatggggagggaaggaccttatgaatagtccatttagcctaagaaatggcagatttagttcttctcttccaaaagataaaggtatatcctggaattgtacttaaaacttacagatgactaacaaatatatactttatatgtagttaatatttagatctgtcttatttaatacttggaggctagaagaagcatctttaggggaactatataatcttttgttagcattttctctgcattttaaaaaatcatttcaattcaaacatttatcagtgtcatgaaatcagtaatgactctttaacaattcaggtttgaactctgcattagatgtctctttaattttttaatatttaaaatttagttgacatttttttcaccaggtgcctttagcggttactaagataactgacatcagttgtttctctgaaataagtgttgctgtgggaataattttaatgttcaaggtgatatcatgggggagttttgtcttttaaaacattagaagcattttaaatattaagaatcaaatatttatagatcaaaacttgtgttttaagtattatacgggacctgtttacttatagtaaatgtgaatgtacacatgagttgttgctgaagctgacaagcatattacatacatgcattttccctgtgccctcatagttgcagttagagttccagtacctgtaggctcacctgggaggcagattagacccaaaggtagatgtttttcccctttccatgaagcatgtcagtgggagttgcttcctttgatttccctagtactaaattttaaggcttttgtaaaaacaaaacaaaactaggagcttggaacagttaaaaatcaacactgctaccatcaattcatcaaatatttacttagagctttcatacattaagattccagtaaccaataaattagaattcatttcttctgcataaagtaaattttcatacacttgacctactaagacagcaagggtgtcctaaattgaggcatttgtataatgcctgcataactaaatggtcactaaaatgggacagcatggggcaagaccttgtagttcttcacagaatatttgtggtcagtttctccaattaatttgctgcatgagccaaataaccataattcactttttatacccactggtgccataattagagaattagagggtgtagacagaggttaatgccaatgagaaacacaggacagggttttttttattataaaggtcattagatacaaaagattgtttttcaaaaaatttctaattctaacaaaggggatcaatcagaaatgaaactaagctactttctaaagtgacactgtatcagaataatccagatttgaatataacattttgccaccaactgacatttagatgaaggactgcctctctgaaagagttcagatcatattcaggggtgaatccaacaccatggaagaaagactactgatgaaaatattttcccactttgcacaaatctgtaaactacacctttgtttatagaaaaatgcttgtaatagtcactgtaatatttagctgtggataaaaatttgtggaaataaatacttttgaataaagaggtgtgccaaatctaaatgaaattt

SEQ ID NO: 19192 - DNA, 3111 bp, Homo sapiens
  source 1..3111: mol_type = unassigned DNA
aggtcctcatggagcacaaggccaccaccatccagaagcacgtgcggggctggatggcacgcaggcacttccagcggctgcgggatgcagccattgtcatccagtgtgccttccggatgctcaaggccaggcgggagctgaaggccctcaggattgaggcccgctcagcagagcatctgaaacgtctcaacgtgggcatggagaacaaggtggtccagctgcagcggaagatcgatgagcagaacaaagagttcaagacactttcagagcagttgtccgtgaccacctcaacatacaccatggaggtagagcggctgaagaaggagctggtgcactaccagcagagcccaggtgaggacaccagcctcaggctgcaggaggaggtggagagcctgcgcacagagctgcagagggcccactcggagcgcaagatcttggaggacgcccacagcagggagaaagatgagctgaggaagcgagttgcagacctggagcaagaaaatgctctcttgaaagatgagaaagaacagctcaacaaccaaatcctgtgccagtctaaagatgaatttgcccagaactctgtgaaggaaaatctcatgaagaaagaactggaggaggagcgatcccggtaccagaaccttgtgaaggaatattcacagttggagcagagatacgacaaccttcgggatgaaatgaccatcataaagcaaactccaggtcataggcggaacccatcaaaccaaagtagcttagaatctgactccaattacccctccatctccacatctgagatcggagacactgaggatgccctccagcaggtggaggaaattggcctggagaaggcagccatggacatgacggtcttcctgaagctgcagaagagagtacgggagctggagcaggagaggaaaaagctgcaagtgcagctggagaagagagaacagcaggacagcaagaaagtccaggcggaaccaccacagactgacatagatttggacccgaatgcagatctggcctacaatagtctgaagaggcaagagctggagtcagagaacaaaaagctgaagaatgacctgaatgagctgaggaaagccgtggccgaccaagccacgcagaataactccagccacggctccccagatagctacagcctcctgctgaaccagctcaagctggcccacgaggagctcgaggtgcgcaaggaggaggtgctcatcctcaggacccagatcgtgagcgccgaccagcggcgactcgccggcaggaacgcggagccgaacattaatgccagatcaagttggcctaacagtgaaaagcatgttgaccaggaggatgccattgaggcctatcacggggtctgccagacaaacaggctgctggaggctcagctgcaggcccagagcctggagcatgaggaggaggtggagcatctcaaggctcagctcgaggccctgaaggaggagatggacaaacagcagcagaccttctgccagacgctactgctctccccagaggcccaggtggaattcggcgttcagcaggaaatatcccggctgaccaacgagaatctggaccttaaagaactggtagaaaagctggaaaagaatgagaggaagctcaaaaagcaactgaagatttacatgaagaaagcccaggacctagaagctgcccaggcattggcccagagtgagaggaagcgccatgagctcaacaggcaggtcacggtccagcggaaagagaaggatttccagggcatgctggagtaccacaaagaggacgaggccctcctcatccggaacctggtgacagacttgaagccccagatgctgtcgggcacagtgccctgtctccccgcctacatcctctacatgtgcatccggcacgcggactacaccaacgacgatctcaaggtgcactccctgctgacctccaccatcaacggcattaagaaagtcctgaaaaagcacaatgatgactttgagatgacgtcattctggttatccaacacctgccgccttcttcactgtctgaagcagtacagcggggatgagggcttcatgactcagaacactgcaaagcagaatgaacactgtcttaagaattttgacctcaccgaataccgtcaggtgctgagtgacctttccattcagatctaccagcagctcattaaaattgccgagggcgtgttacagccgatgatagtttctgccatgttggaaaatgagagcattcagggtctatctggtgtgaagcccaccggctaccggaagcgctcctccagcatggcagatggggataactcatactgcctggaagctatcatccgccagatgaatgcctttcatacagtcatgtgtgaccagggcttggaccctgagatcatcctgcaggtattcaaacagctcttctacatgatcaacgcagtgactcttaacaacctgctcttgcggaaggacgtctgctcttggagcacaggcatgcaactcaggtacaatataagtcagcttgaggagtggcttcggggaagaaaccttcaccagagtggagcagttcagaccatggaacctctgatccaagcagcccagctcctgcaattaaagaagaaaacccaggaggacgcagaggctatctgctccctgtgtacctccctcagcacccagcagattgtcaaaattttaaacctttatactcccctgaatgaatttgaagaacgggtaacagtggcctttatacgaacaatccaggcacaactacaagagcggaatgaccctcagcaactgctattagatgccaagcacatgtttcctgttttgtttccatttaatccatcttctctaaccatggactcaatccacatcccagcgtgtctcaatctggaattcctcaatgaagtctgaagatgcatgtttccagcattagtttgattcccaatgtgagcaagaaggaagtatatacagtaaagtaaattcaaggatctgttaaatctggtaaaagtagatcaaatcagagattgacagcctgtggagggtgctgaactatacagaattagacacaactatgtcattattttttgtacctactgctcagaataaaaacacttgaaatatg

SEQ ID NO: 19193 - DNA, 2726 bp, Homo sapiens
  source 1..2726: mol_type = unassigned DNA
agccctacattctgctgctgctgcagagtgatgatttttaacagaccagaacttacacatctaaatgagtgttgttgttcagtgaagtcaccttaggacaatgatttaaataacaccgcgatttctcaagaagtttggaacttctcttatggttgagttcaaagccattttatgttatatgtggcccaaacaagttttattagtacaattaaatctttattgaggacttttgatggaccacatagtgaacttggactgggaatcaaaagaatggtaaggcagggtgtctgccttcactgtgcctgcagtctggctgagatgcacatgtgagccacactagcacaagccagcatgcactggcctgtcacaagagagtgcacaagggtctggatccctgaccctgatgaggtatggcgctcagctgagttaaccaaggactacaaagaaggagacaagagcctacagctcagactggaggatgaaacgattctggaatacccaattgatgtacaacgcaaccagctgcccttcttacggaatccagatatcttggtgggagaaaatgacctgactgcccttagctatcttcatgagcctgcagttttgcataatttgaaggtccgtttcctggagtccaaccatatctacacttactgtggtatcgtacttgttgccattaatccttatgaacagttgccaatctatggacaagatgtcatctatacctacagtggccaaaacatgggagacatggacccccacatctttgctgtggcagaagaagcctacaagcagatggccagagatgagaagaatcagtccatcatagtcagtggggagtctggagccgggaagacggtatcagccaagtatgccatgcgctatttcgccaccgttggtggctcggccagtgaaaccaacatcgaagagaaggtgctggcatccagtcccatcatggaggccattggaaatgccaagaccacccgcaatgacaacagcagccgttttggcaagtacatccagattggctttgacaaaaggtaccacatcatcggggccaacatgaggacttacctcttggagaagtccagagtggtcttccaggcagatgatgagaggaattaccacatcttttaccagctctgtgctgctgccggtcttccagaatttaaagagcttgcactaacaagtgcagaggactttttctatacatcacagggaggagacacttccatcgagggtgtggacgatgctgaggactttgagaagactcgacaagccttcacactcctcggagtgaaagagtcccatcagatgagcatttttaagataattgcttctatcttgcaccttggaagtgtggcgattcaggctgagcgtgatggtgattcctgtagtatatcaccccaggatgtatacctaagcaacttctgccgactgctaggggtggagcacagtcagatggagcactggctgtgtcatcgcaagctggtcaccacctcggagacctacgtcaagaccatgtccctgcagcaggtgatcaatgcgcgcaacgccctggcgaagcacatctatgcccagttgttcggctggattgtggagcacatcaacaaggccctgcacacctccctcaagcagcactccttcatcggggtcctggacatctatgggtttgagacatttgaggtaaacagctttgagcagttctgtatcaactatgcaaatgaaaagctccagcagcagttcaactcgcatgttttcaaactggagcaagaagaatacatgaaggaacagatcccttggaccctgattgatttttatgataaccaaccttgtatcgacctcattgaagccaagctgggtatcttggacctgttggatgaagaatgtaaggtccccaaaggaactgaccagaactgggctcagaagctctatgaccggcactccagcagccagcacttccagaagccccgcatgtccaacacggccttcatcatcgtccactttgcagacaaggtggagtacctctctgatggttttctggagaaaaacagagacacggtgtatgaagagcagatcaatatcctgaaggccagcaagttcccactagtggctgacttgtttcatgatgacaaggaccctgttcctgccaccacccctgggaaggggtcatcttcgaagatcagcgtccgttctgccagaccccccatgaaagtctccaacaaggagcacaagaaaaccgttggccaccagttccgtacctccctcagcacccagcagattgtcaaaattttaaacctttatactcccctgaatgaatttgaagaacgggtaacagtggcctttatacgaacaatccaggcacaactacaagagcggaatgaccctcagcaactgctattagatgccaagcacatgtttcctgttttgtttccatttaatccatcttctctaaccatggactcaatccacatcccagcgtgtctcaatctggaattcctcaatgaagtctgaagatgcatgtttccagcattagtttgattcccaatgtgagcaagaaggaagtatatacagtaaagtaaattcaaggatctgttaaatctggtaaaagtagatcaaatcagagattgacagcctgtggagggtgctgaactatacagaattagacacaactatgtcattattttttgtacctactgctcagaataaaaacacttgaaatatgg

SEQ ID NO: 19194 - DNA, 6971 bp, Homo sapiens
  source 1..6971: mol_type = unassigned DNA
aactcgggaacgggaacaggaggccgttggaaaactttgggcaagatggcccggcggtgatttccgcggcggtctctcctgcgcccggcctctgcggcgcaggcccagcccccgagcctcgcacgttcggcagccccggcctggccccggcccctcctgcccatggcggtggccgagctgtacacgcagtacaacagggtctggattcccgatcctgaagaagtttggaagtctgctgaaatagccaaggactacagagttggtgacaaggtcctgcgactcctgctggaggatggaacggagctggattattctgtcaatccagaatctctgcctccacttcggaatcctgacatcctcgtgggcgagaatgacctcacggctctcagctatcttcacgagcccgcggtgctccacaacctcagaatccgctttgcagaatccaaactcatttacacctacagtggaatcattttggtggccatgaatccttacaagcagttgccaatatacggagatgccatcatccacgcctacagcgggcagaacatgggcgatatggacccacacatatttgccgtggcagaagaggcatacaagcagatggccagaaacaacagaaaccagtccataattgtaagtggggagtcaggtgctggaaagacagtgtcggctcgctatgccatgaggtactttgccaccgtcagcaaatcgggcagcaacgctcacgtggaagacaaggtcctggcatccaatcccatcaccgaggccgttggaaatgccaagaccacccgcaatgacaatagtagtcggtttgggaaatacacagaaatcagttttgatgaacaaaatcaaattataggagccaacatgagcacttacctcctggagaaatccagagttgtctttcaatcggaaaatgaacgaaattaccacattttctatcagctttgtgcatctgcacagcagtcggaatttaaacatcttaaattggggagtgccgaagaatttaattatacaagaatgggaggcaatactgtcattgagggtgtgaatgatcgagctgaaatggtagagactcaaaagaccttcacgcttctgggtttcaaggaggattttcagatggacgtttttaaaatcctggcagccatcctacatctgggcaatgtgcagatcaccgcggtgggcaacgagaggtcctcagttagtgaggatgacagtcacctgaaggtgttctgtgagctcctgggcctggagagtggcagagttgctcagtggctgtgcaatcgcaaaatcgtcacaagctctgagacggtggtaaaacccatgaccaggcctcaggctgtcaacgccagggatgcactggccaaaaagatctatgctcacctgttcgacttcattgtggagagaattaaccaagcgttgcagttttcaggcaagcagcacacttttattggtgttttggacatttatggttttgaaacctttgatgtgaacagctttgaacaattttgcatcaattacgctaatgaaaaactgcaacaacagtttaacatgcatgtcttcaaactggaacaagaagaatacatgaaggaagatataccttggacgctgatagatttttatgacaatcaaccagttattgacctgattgaagcaaaaatgggaattctggagttactggatgaagaatgtttgttaccacatggaactgatgaaaactggcttcaaaagctgtataataattttgtcaacaggaaccctttgtttgaaaagcctagaatgtcaaacacatcctttgtcatccagcactttgctgataaggtagagtataaatgtgaaggtttcctggagaaaaacagagacaccgtctatgacatgctggttgaaatcctgagagcaagcaagtttcatctctgtgccaacttttttcaagaaaatccaactcctccttctccttttggttcaatgattacagttaaatctgcaaagcaagtcatcaagccaaacagcaagcatttccggaccacagttgggagcaagttccgcagctctctgtacttgctcatggagaccctcaatgcgacgacgccccactacgttcgatgcatcaagccaaatgatgagaagttaccctttgaatttgactccaaaagaattgttcagcagctgcgagcctgcggcgttttagaaacgattcgcattagtgcacagagctacccttccaggtggacatacatcgagttctacagtcgctacggcattctcatgaccaagcaagagctttccttcagcgataaaaaggaggtgtgcaaggtggttttacacagactcatccaggattctaatcagtaccagtttggtaaaaccaaaattttcttcagagcaggacaagtggcttatttagagaaacttcgattggataaactgaggcagagttgtgttatggtacaaaagcacatgcgtggctggctccagaggaaaaaattcctccgagagagacgagccgccctgataatccagcagtacttccggggtcagcaaactgtgaggaaagctattactgcagtggccttaaaagaagcttgggcagccataatcattcagaagcactgccgcgggtatcttgttcgcagcctgtatcagttgattcgcatggccaccatcacaatgcaggcctacagccgaggattcctggcaaggaggaggtatcgaaagatgctggaggaacataaggctgtgatcctacagaaatacgcacgggcgtggctggccagacgcagattccagagtatccgacgattcgtgcttaatattcagcttacttacagggtccagcgtttgcagaaaaagttggaagatcagaacaaagaaaaccatgggctggtggagaagctgactagcctggctgctcttcgagctggggatgtggaaaagattcagaagctggaagcagaactagaaaaagcagccactcacaggcgaaattacgaggagaaggggaagagatacagggatgctgtggaagagaaattggcaaagcttcagaagcataattcagaactggaaacacagaaagaacaaatacagctgaagcttcaagagaagactgaagagttaaaagaaaaaatggacaacctcaccaagcagctctttgatgatgtacaaaaggaagaacggcaaagaatgcttcttgaaaaaagttttgaactgaaaacacaagactatgagaagcagattcagtctttgaaagaagaaattaaagctctcaaggatgagaagatgcaactccaacacctggtggagggggagcacgtcacttctgatggcttgaaggcggaagtggcccgcctgagcaagcaggtcaagacaatctctgagttcgaaaaagagatagaactacttcaggcacagaagatagatgtggagaaacatgtgcagtcacaaaaacgggaaatgagagaaaagatgtcagagatcaccaaacaacttctcgaaagctatgacattgaagatgtaagaagcaggctctctgtggaagatctggaacatttaaatgaggatggagaactttggtttgcttatgaaggactaaagaaagcaacacgtgttttggagagccatttccagtctcagaaggattgctatgaaaaggagattgaagctttgaacttcaaagtggtgcatctcagtcaagaaatcaaccacctgcagaagttattcagagaagaaaatgacatcaatgaaagcatccgtcatgaagttaccaggctaacatcagagaacatgatgatcccagactttaaacagcaaatttcagaattggagaaacagaagcaagatcttgaaatccgcctgaatgaacaagctgagaaaatgaaaggaaaactagaagaattgtctaatcagttacatcgcagtcaagaggaggaaggaacacaaagaaaggccttggaagcccaaaatgaaatacataccaaagagaaggagaagctgattgataagattcaagaaatgcaggaggccagtgaccacttgaagaaacaatttgaaactgaaagtgaagtcaagtgtaacttccggcaggaagcatcccggctcactttggaaaacagggatcttgaagaagaattagacatgaaagacagagtgattaaaaagctacaagatcaagtcaagacactaagcaagacaattggaaaagccaatgatgtgcactcgtcctcaggacccaaggagtaccttggaatgctgcaatacaagagagaagacgaggccaagctcattcagaacctcattcttgacttgaagccccgtggcgtggtggtgaacatgatccccgggctgccggctcatatcctgttcatgtgtgtgcgctacgcagactctctgaatgatgccaacatgctgaagtccctcatgaacagcaccattaatggcatcaagcaggtggttaaggaacatttagaagactttgaaatgctgtccttttggctttccaacacttgtcattttctcaattgcctgaagcagtacagcggagaagaggaattcatgaagcataatagtccacagcagaataagaattgcttgaacaattttgacctttcagaatacagacagattctcagtgatgtggctatacgaatatatcatcaatttattatcataatggaaaagaatatccaaccgataatagttccgggaatgctggagtatgagagcctgcagggcatttccggcctgaagcccacaggcttccggaagcgctcctctagcatagacgacacggacggctacaccatgacctccgtcctgcaacagctgagctacttttacaccaccatgtgccagaacggcctggaccccgagcttgtgaggcaggcggtgaagcagctcttcttcttgatcggggcggtcacgctgaacagcctcttcctgcgcaaggacatgtgctcctgcagaaaagggatgcagatcaggtgcaatatcagctacttagaagaatggcttaaagataagaacttgcagaacagcttagcaaaggaaactttggagcccctctctcaggcagcctggttgcttcaggtcaagaagaccacagacagtgatgccaaggagatctacgaacgctgcacctcactgtctgctgtgcagatcataaagatccttaattcatacacacctatagatgactttgagaagagagtgactccatcctttgttcgcaaagtacaggctctcctaaatagccgggaggattcatcacagctgatgttggataccaaatatctctttcaagtcacatttccttttaccccctctccacatgctctggaaatgattcagatccccagcagtttcaagctaggctttctgaataggttatagcaggagaaaaagtcaatgcactttttcttcaaaagctaagtgaaggttcaatatgagggatgtgttttattaattggcagtggaaattggaatgtgatttaaggaagaaaacagacttttctcaaatggaccacatcatctctcactcacagtgacaatgctgctcctgtaattttgtaagaattcacacacaccagctgtatttggaaaagccatgtctcactctcgaatctcagctggttttcactgaaattcctggagggctcatattttcttccacgtgcctcttgatctgttctgtcttgtggcagggctctaccaggagggagtgagatctggggacacagtggcttccaagttttctaaggttcatgtgaaacctgagtacatttacaaagctgcaagtggattctagtgctgagtcttccaggaaaaaatcccgtttggccaccgtgacctgccaaaagttctcttgccccatgcctgctggggacagaaggttttcatgaactctttttactgaaaatgccctgcatttaaaaatgtttattttagacccttctaaatttttttttttttttttttttgagactccggagtctcgctctatcgccaggctggagtgtagtggcatgatctcggcttattgcaacctccgcttcctgggttcaaacaattctcctgcctcagcctcctgagtagctgggactacaggcacctgccaccacgcccagctaatttttgtatttttagtggagacaggtttcaccatgttggccaggatggcctcgatctcttgacctcgtgatccgcccacctcagcctcccaaagtgctaggattacaggcgtgtgccaccgcgcccggctgacccttttaatttttaagagtgttcaatccgagatgaatcatttgaagtatttttatatgtatatctatttaaaactaatatattattaaagcttaattgccatgccgtttatcttctctgaaagaacttcaaatcttacctgccaacatattcaccataatttttttattttttaatacctttcatacaataacttttttaaaacaacctcagattgaaaaagcaacctaaattactttcgctctctaatcagcatttcaatgtatttatttttaaattttctcaaaaagtaactaaaaaattgtgtcggaccctacttttgagaaatctacgtttcccaagttttatgggaactggctattccttgtcccggcacaccttctcattccttcctttcagagcctaaaacctcatttgataagcactcctagtctctggcctgtggatccagtgctattctgtcaccaacctaagaatcccaattgcaccttctgtttctgacagtcacaggtgacagctgtgattctataatacagactggtgtcttagaggtaggaataatacatgattatgaagcatcaccctgctaatacataataatgtctttttatattataagtgattgagtttagttcatttcaatacattgtacatgaaaaaatgaaaagtagaactttgtaatactttaatcaataaaattaattaccaaa

SEQ ID NO: 19195 - DNA, 3074 bp, Homo sapiens
  source 1..3074: mol_type = unassigned DNA
gaaaactttgggcaagatggcccggcggtgatttccgcggcggtctctcctgcgcccggcctctgcggcgcaggcccagcccccgagcctcgcacgttcggcagccccggcctggccccggcccctcctgcccatggcggtggccgagctgtacacgcagtacaacagggtctggattcccgatcctgaagaagtttggaagtctgctgaaatagccaaggactacagagttggtgacaaggtcctgcgactcctgctggaggatggaacggagctggattattctgtcaatccagaatctctgcctccacttcggaatcctgacatcctcgtgggcgagaatgacctcacggctctcagctatcttcacgagcccgcggtgctccacaacctcagaatccgctttgcagaatccaaactcatttacacctacagtggaatcattttggtggccatgaatccttacaagcagttgccaatatacggagatgccatcatccacgcctacagcgggcagaacatgggcgatatggacccacacatatttgccgtggcagaagaggcatacaagcagatggccagatgggaaatctgaggcacaggacctggacctgctgactctttacctaaatctttactgcataaccccagccgcagctcctgagctccctccgctttatgtcttcgtctgtgagctggactctcagagggcacccattcctggttctgatgcttataatgagggagcaggtggtgcttacatgagaaacaacagaaaccagtccataattgtaagtggggagtcaggtgctggaaagacagtgtcggctcgctatgccatgaggtactttgccaccgtcagcaaatcgggcagcaacgctcacgtggaagacaaggtcctggcatccaatcccatcaccgaggccgttggaaatgccaagaccacccgcaatgacaatagtagtcggtttgggaaatacacagaaatcagttttgatgaacaaaatcaaattataggagccaacatgagcacttacctcctggagaaatccagagttgtctttcaatcggaaaatgaacgaaattaccacattttctatcagctttgtgcatctgcacagcagtcggaatttaaacatcttaaattggggagtgccgaagaatttaattatacaagaatgggaggcaatactgtcattgagggtgtgaatgatcgagctgaaatggtagagactcaaaagaccttcacgcttctgggtttcaaggaggattttcagatggacgtttttaaaatcctggcagccatcctacatctgggcaatgtgcagatcaccgcggtgggcaacgagaggtcctcagttagtgaggatgacagtcacctgaaggtgttctgtgagctcctgggcctggagagtggcagagttgctcagtggctgtgcaatcgcaaaatcgtcacaagctctgagacggtggtaaaacccatgaccaggcctcaggctgtcaacgccagggatgcactggccaaaaagatctatgctcacctgttcgacttcattgtggagagaattaaccaagcgttgcagttttcagttttgaaacctttgatgtgaacagctttgaacaattttgcatcaattacgctaatgaaaaactgcaacaacagtttaacatgcatgtcttcaaactggaacaagaagaatacatgaaggaagatataccttggacgctgatagatttttatgacaatcaaccagttattgacctgattgaagcaaaaatgggaattctggagttactggatgaagaatgtttgttaccacatggaactgatgaaaactggcttcaaaagctgtataataattttgtcaacaggaaccctttgtttgaaaagcctagaatgtcaaacacatcctttgtcatccagcactttgctgataaggtagagtataaatgtgaaggtttcctggagaaaaacagagacaccgtctatgacatgctggttgaaatcctgagagcaagcaagtttcatctctgtgccaacttttttcaagaaaatccaactcctccttctccttttggttcaatgattacagttaaatctgcaaagcaagtcatcaagccaaacagcaagcatttccggaccacagttgggagcaagttccgcagctctctgtacttgctcatggagaccctcaatgcgacgacgccccactacgttcgatgcatcaagccaaatgatgagaagttaccctttgaatttgactccaaaagaattgttcagcagctgcgagcctgcggcgttttagaaacgattcgcattagtgcacagagctacccttccaggtggacatacatcgagttctacagtcgctacggcattctcatgaccaagcaagagctttccttcagcgataaaaaggaggtgtgcaaggtggttttacacagactcatccaggattctaatcagtaccagtttggtaaaaccaaaattttcttcagagcaggacaagtggcttatttagagaaacttcgattggataaactgaggcagagttgtgttatggtacaaaagcacatgcgtggctggctccagaggaaaaaattcctccgagagagacgagccgccctgataatccagcagtacttccggggtcagcaaactgtgagaacaaagaaaaccatgggctggtggagaagctgactagcctggctgctcttcgagctggggatgtggaaaagattcagaagctggaagcagaactagaaaaagcagccactcacaggcgaaattacgaggagaaggggaagagatacagggatgctgtggaagagaaattggcaaagcttcagaagcataattcagaactggaaacacagaaagaacaaatacagctgaagcttcaagagaagactgaagagttaaaagaaaaaatggacaacctcaccaagcagctctttgatgatgtacaaaaggaagaacggcaaagaatgcttcttgaaaaaagttttgaactgaaaacacaagactatgagaagcagattcagtctttgaaagaagaaattaaagctctcaa

SEQ ID NO: 19196 - DNA, 770 bp, Homo sapiens
  source 1..770: mol_type = unassigned DNA
gttggaaaactttgggcaagatggcccggcggtgatttccgcggcggtctctcctgcgcccggcctctgcggcgcaggcccagcccccgagcctcgcacgttcggcagccccggcctggccccggcccctcctgcccatggcggtggccgagctgtacacgcagggtctggattcccgatcctgaagaagtttggaagtctgctgaaatagccaaggactacagagttggtgacaaggtcctgcgactcctgctggaggatggaacggagctggattattctgtcaatccagaatctctgcctccacttcggaatcctgacatcctcgtgggcgagaatgacctcacggctctcagctatcttcacgagcccgcggtgctccacaacctcagaatccgctttgcagaatccaaactcatttacacctacagtggaatcattttggtggccatgaatccttacaagcagttgccaatatacggagatgccatcatccacgcctacagcgggcagaacatgggcgatatggacccacacatatttgccgtggcagaagaggcatacaagcagatggccagaaacaacagaaaccagtccataattgtaagtggggagtcaggtgctggaaagacagtgtcggctcgctatgccatgaggtactttgccaccgtcagcaaatcgggcagcaacgctcacgtggaagacaaggtcctggcatccaatcccatcaccgaggccgttggaaatgccaagaccacccgcaatgacaa

SEQ ID NO: 19197 - DNA, 2129 bp, Homo sapiens
  source 1..2129: mol_type = unassigned DNA
cggtgatttccgcggcggtctctcctgcgcccggcctctgcggcgcaggcccagcccccgagcctcgcacgttcggcagccccggcctggccccggcccctcctgcccatggcggtggccgagctgtacacgcagtacaacagggtctggattcccgatcctgaagaagtttggaagtctgctgaaatagccaaggactacagagttggtgacaaggtcctgcgactcctgctggaggatggaacggagctggattattctgtcaatccagaatctctgcctccacttcggaatcctgacatcctcgtgggcgagaatgacctcacggctctcagctatcttcacgagcccgcggtgctccacaacctcagaatccgctttgcagaatccaaactcatttacacctacagtggaatcattttggtggccatgaatccttacaagcagttgccaatatacggagatgccatcatccacgcctacagcgggcagaacatgggcgatatggacccacacatatttgccgtggcagaagaggcatacaagcagatggccagaaacaacagaaaccagtccataattgtaagtggggagtcaggtgctggaaagacagtgtcggctcgctatgccatgaggtactttgccaccgtcagcaaatcgggcagcaacgctcacgtggaagacaaggtcctggcatccaatcccatcaccgaggccgttggaaatgccaagaccacccgcaatgacaatagtagtcggtttgggaaatacacagaaatcagttttgatgaacaaaatcaaattataggagccaacatgagcacttacctcctggagaaatccagagttgtctttcaatcggaaaatgaacgaaattaccacattttctatcagctttgtgcatctgcacagcagtcggaatttaaacatcttaaattggggagtgccgaagaatttaattatacaagaatgggaggcaatactgtcattgagggtgtgaatgatcgagctgaaatggtagagactcaaaagaccttcacgcttctgggtttcaaggaggattttcagatggacgtttttaaaatcctggcagccatcctacatctgggcaatgtgcagatcaccgcggtgggcaacgagaggtcctcagttagtgaggatgacagtcacctgaaggtgttctgtgagctcctgggcctggagagtggcagagttgctcagtggctgtgcaatcgcaaaatcgtcacaagctctgagacggtggtaaaacccatgaccaggcctcaggctgtcaacgccagggatgcactggccaaaaagatctatgctcacctgttcgacttcattgtggagagaattaaccaagcgttgcagttttcagttttgaaacctttgatgtgaacagctttgaacaattttgcatcaattacgctaatgaaaaactgcaacaacagtttaacatgcatgtcttcaaactggaacaagaagaatacatgaaggaagatataccttggacgctgatagatttttatgacaatcaaccagttattgacctgattgaagcaaaaatgggaattctggagttactggatgaagaatgtttgttaccacatggaactgatgaaaactggcttcaaaagctgtataataattttgtcaacaggaaccctttgtttgaaaagcctagaatgtcaaacacatcctttgtcatccagcactttgctgataaggtaccgtgaaggtctccatcaatgctgtcaaccccggaacctgtacagcctccagaaggagtaggcaggccaggaatgtttctgatcagattcaagtcatacttaacatgtagctttgatgagtgtgtgtttaacagttccttatttgtttttgtggcgagatacatgagttccaactgtactactttaaagacgaatgtgttgttagaagaccacacttctgattttggatgtactgaagttactgaatttcattaacctcttatcagtttattttctatatgaaattgtgataatcaagacagcataattcttccttatgatgaaagctatatttttttctgaagttctatttgattaaactggactatattacagtggcaacataggttaactcaa

SEQ ID NO: 19198 - DNA, 6076 bp, Homo sapiens
  source 1..6076: mol_type = unassigned DNA
ggccccggcccctcctgcccatggcggtggccgagctgtacacgcagtacaacagggtctggattcccgatcctgaagaagtttggaagtctgctgaaatagccaaggactacagagttggtgacaaggtcctgcgactcctgctggaggatggaacggagctggattattctgtcaatccagaatctctgcctccacttcggaatcctgacatcctcgtgggcgagaatgacctcacggctctcagctatcttcacgagcccgcggtgctccacaacctcagaatccgctttgcagaatccaaactcatttacacctacagtggaatcattttggtggccatgaatccttacaagcagttgccaatatacggagatgccatcatccacgcctacagcgggcagaacatgggcgatatggacccacacatatttgccgtggcagaagaggcatacaagcagatggccagaaacaacagaaaccagtccataattgtaagtggggagtcaggtgctggaaagacagtgtcggctcgctatgccatgaggtactttgccaccgtcagcaaatcgggcagcaacgctcacgtggaagacaaggtcctggcatccaatcccatcaccgaggccgttggaaatgccaagaccacccgcaatgacaatagtagtcggtttgggaaatacacagaaatcagttttgatgaacaaaatcaaattataggagccaacatgagcacttacctcctggagaaatccagagttgtctttcaaggagtgccgaagaatttaattatacaagaatgggaggcaatactgtcattgagggtgtgaatgatcgagctgaaatggtagagactcaaaagaccttcacgcttctgggaaatgtgctaatcccctcacggtgactgaatatggtttcaaggaggattttcagatggacgtttttaaaatcctggcagccatcctacatctgggcaatgtgcagatcaccgcggtgggcaacgagaggtcctcagttagtgaggatgacagtcacctgaaggtgttctgtgagctcctgggcctggagagtggcagagttgctcagtggctgtgcaatcgcaaaatcgtcacaagctctgagacggtggtaaaacccatgaccaggcctcaggctgtcaacgccagggatgcactggccaaaaagatctatgctcacctgttcgacttcattgtggagagaattaaccaagcgttgcagttttcagttttgaaacctttgatgtgaacagctttgaacaattttgcatcaattacgctaatgaaaaactgcaacaacagtttaacatgcatgtcttcaaactggaacaagaagaatacatgaaggaagatataccttggacgctgatagatttttatgacaatcaaccagttattgacctgattgaagcaaaaatgggaattctggagttactggatgaagaatgtttgttaccacatggaactgatgaaaactggcttcaaaagctgtataataattttgtcaacaggaaccctttgtttgaaaagcctagaatgtcaaacacatcctttgtcatccagcactttgctgataaggtagagtataaatgtgaaggtttcctggagaaaaacagagacaccgtctatgacatgctggttgaaatcctgagagcaagcaagtttcatctctgtgccaacttttttcaagaaaatccaactcctccttctccttttggttcaatgattacagttaaatctgcaaagcaagtcatcaagccaaacagcaagcatttccggaccacagttgggagcaagttccgcagctctctgtacttgctcatggagaccctcaatgcgacgacgccccactacgttcgatgcatcaagccaaatgatgagaagttaccctttgaatttgactccaaaagaattgttcagcagctgcgagcctgcggcgttttagaaacgattcgcattagtgcacagagctacccttccaggtggacatacatcgagttctacagtcgctacggcattctcatgaccaagcaagagctttccttcagcgataaaaaggaggtgtgcaaggtggttttacacagactcatccaggattctaatcagtaccagtttggtaaaaccaaaattttcttcagagcaggacaagtggcttatttagagaaacttcgattggataaactgaggcagagttgtgttatggtacaaaagcacatgcgtggctggctccagaggaaaaaattcctccgagagagacgagccgccctgataatccagcagtacttccggggtcagcaaactgtgagatgctggaggaacataaggctgtgatcctacagaaatacgcacgggcgtggctggccagacgcagattccagagtatccgacgattcgtgcttaatattcagcttacttacagggtccagcgtttgcagaaaaagttggaagatcagaacaaagaaaaccatgggctggtggagaagctgactagcctggctgctcttcgagctggggatgtggaaaagattcagaagctggaagcagaactagaaaaagcagccactcacaggcgaaattacgaggagaaggggaagagatacagggatgctgtggaagagaaattggcaaagcttcagaagcataattcagaactggaaacacagaaagaacaaatacagctgaagcttcaagagaagactgaagagttaaaaggcttcttgaaaaaagttttgaactgaaaacacaagactatgagaagcagattcagtctttgaaagaagaaattaaagctctcaaggatgagaagatgcaactccaacacctggtggagggggagcacgtcacttctgatggcttgaaggcggaagtggcccgcctgagcaagcaggtcaagacaatctctgagttcgaaaaagagatagaactacttcaggcacagaagatagatgtggagaaacatgtgcagtcacaaaaacgggaaatgagagaaaagatgtcagagatcaccaaacaacttctcgaaagctatgacattgaagatgtaagaagcaggctctctgtggaagatctggaacatttaaatgaggatggagaactttggtttgcttatgaaggactaaagaaagcaacacgtgttttggagagccatttccagtctcagaaggattgctatgaaaaggagattgaagctttgaacttcaaagtggtgcatctcagtcaagaaatcaaccacctgcagaagttattcagagaagaaaatgacatcaatgaaagcatccgtcatgaagttaccaggctaacatcagagaacatgatgatcccagactttaaacagcaaatttcagaattggagaaacagaagcaagatcttgaaatccgcctgaatgaacaagctgagaaaatgaaaggaaaactagaagaattgtctaatcagttacatcgcagtcaagaggaggaaggaacacaaagaaaggccttggaagcccaaaatgaaatacataccaaagagaaggagaagctgattgataagattcaagaaatgcaggaggccagtgaccacttgaagaaacaatttgaaactgaaagtgaagtcaagtgtaacttccggcaggaagcatcccggctcactttggaaaacagggatcttgaagaagaattagacatgaaagacagagtgattaaaaagctacaagatcaagtcaagacactaagcaagacaattggaaaagacttgaagccccgtggcgtggtggtgaacatgatccccgggctgccggctcatatcctgttcatgtgtgtgcgctacgcagactctctgaatgatgccaacatgctgaagtccctcatgaacagcaccattaatggcatcaagcaggtggttaaggaacatttagaagactttgaaatgctgtccttttggctttccaacacttgtcattttctcaattgcctgaagcagtacagcggagaagaggaattcatgaagcataatagtccacagcagaataagaattgcttgaacaattttgacctttcagaatacagacagattctcagtgatgtggctatacgaatatatcatcaatttattatcataatggaaaagaatatccaaccgataatagttccgggaatgctggagtatgagagcctgcagggcatttccggcctgaagcccacaggcttccggaagcgctcctctagcatagacgacacggacggctacaccatgacctccgtcctgcaacagctgagctacttttacaccaccatgtgccagaacggcctggaccccgagcttgtgaggcaggcggtgaagcagctcttcttcttgatcggggcggtcacgctgaacagcctcttcctgcgcaaggacatgtgctcctgcagaaaagggatgcagatcaggtgcaatatcagctacttagaagaatggcttaaagataagaacttgcagaacagcttagcaaaggaaactttggagcccctctctcaggcagcctggttgcttcaggtcaagaagaccacagacagtgatgccaaggagatctacgaacgctgcacctcactgtctgctgtgcagatcataaagatccttaattcatacacacctatagatgactttgagaagagagtgactccatcctttgttcgcaaagtacaggctctcctaaatagccgggaggattcatcacagctgatgttggataccaaatatctctttcaagtcacatttccttttaccccctctccacatgctctggaaatgattcagatccccagcagtttcaagctaggctttctgaataggttatagcaggagaaaaagtcaatgcactttttcttcaaaagctaagtgaaggttcaatatgagggatgtgttttattaattggcagtggaaattggaatgtgatttaaggaagaaaacagacttttctcaaatggaccacatcatctctcactcacagtgacaatgctgctcctgtaattttgtaagaattcacacacaccagctgtatttggaaaagccatgtctcactctcgaatctcagctggttttcactgaaattcctggagggctcatattttcttccacgtgcctcttgatctgttctgtcttgtggcagggctctaccaggagggagtgagatctggggacacagtggcttccaagttttctaaggttcatgtgaaacctgagtacatttacaaagctgcaagtggattctagtgctgagtcttccaggaaaaaatcccgtttggccaccgtgacctgccaaaagttctcttgccccatgcctgctggggacagaaggttttcatgaactctttttactgaaaatgccctgcatttaaaaatgtttattttagacccttctaaatttttttttttttttttttttgagactccggagtctcgctctatcgccaggctggagtgtagtggcatgatctcggcttattgcaacctccgcttcctgggttcaaacaattctcctgcctcagcctcctgagtagctgggactacaggcacctgccaccacgcccagctaatttttgtatttttagtggagacaggtttcaccatgttggccaggatggcctcgatctcttgacctcgtgatccgcccacctcagcctcccaaagtgctaggattacaggcgtgtgccaccgcgcccggctgacccttttaatttttaagagtgttcaatccgagatgaatcatttgaagtatttttatatgtatatctatttaaaactaatatattattaaagcttaattgccatgccgtttatcttctctgaaagaacttcaaatcttacctgccaacatattcaccataatttttttattttttaatacctttcatacaataacttttttaaaacaacctcagattgaaaaagcaacctaaattactttcgctctctaatcagcatttcaatgtatttatttttaaattttctcaaaaagtaactaaaaaattgtgtcggaccctacttttgagaaatctacgtttcccaagttttatgggaactggctattccttgtcccgg

SEQ ID NO: 19199 - DNA, 5387 bp, Homo sapiens
  source 1..5387: mol_type = unassigned DNA
ggagatcgtggatcctccttcaaaaatggaggatggaaagcccgtttgggcgccacaccctacagatggatttcagatgggcaatattgtggatattggccccgacagcttaacaattgaacccttgaatcagaaaggcaagacatttttggctctcataaaccaagtgtttcctgcagaagaggacagtaaaaaagatgtggaagataactgttcactaatgtatttaaatgaagccacactgctccataatatcaaagttcgatatagtaaagacagaatttatacatatgtcgccaacattctgattgcagtgaatccatactttgacatacctaaaatatattcttcagaagcaataaagtcatatcaaggaaaatctcttgggacaagaccacctcatgtctttgcaattgctgataaagcttttcgagacatgaaggtgctcaagatgagtcagtctatcattgtatctggagaatcaggagccggcaaaacagaaaatacaaaatttgttctaagatacctgactgaatcctatggaacaggtcaagatattgatgacagaattgttgaagctaacccactcctagaagcctttggaaatgcgaagactgttcgcaacaataatagcagtcgatttgggaaatttgtagaaatacattttaatgaaaagagctcagttgttggaggatttgtttcacattatctcctagagaaatctaggatctgtgttcaaggcaaagaggaaagaaattatcatatcttttataggttgtgtgctggtgcttctgaagatattagagaaaaacttcatttgagttcaccagataattttcggtatttaaaccgaggctgcactagatactttgctaacaaagaaactgacaaacagattttacagaaccgcaaaagtcctgagtaccttaaggcaggttctatgaaagatcctctgctagatgaccatggtgattttattagaatgtgcacggctatgaaaaaaattggtttggatgatgaagaaaagcttgatctcttccgggtagtagctggcgtcctgcaccttggaaatattgattttgaggaagctggcagcacttcaggtggttgtaatctgaagaataaatctgctcagtctttggaatattgtgctgaattactgggtttggaccaagatgatcttcgagtaagtttgaccacaagagtcatgctaacaacagcagggggcaccaaaggaacagttataaaggtacctctgaaagtggagcaagcaaacaatgctcgtgatgccctggcaaagacagtgtatagccatctttttgatcatgtggtaaacagagtaaatcagtgttttccttttgaaacatcatcctattttattggagtcctagatattgctggttttgagtactttgagcataacagttttgaacaattttgcatcaactattgcaatgaaaaacttcaacaattttttaatgaaaggattctgaaggaggaacaagaactctatcaaaaagaaggtttaggtgttaatgaagtgcattatgtggataatcaggactgtatagatttaattgaagccaaattagtgggaatactggatattttggatgaagaaaatcgccttccccagccaagtgatcaacactttacatctgcagttcaccaaaagcacaaggatcattttcgactcactattcccagaaaatctaagctggcagttcataggaatatcagagacgacgaaggcttcattatcaggcattttgcgggggcagtgtgctatgaaacaacccagtttgtggagaaaaataatgatgctttacatatgtctcttgaatccttaatatgtgaatccagagataagtttatacgggaattatttgaatcatccacaaataacaacaaagatactaaacaaaaagcaggaaaacttagcttcatcagcgtgggaaacaagtttaagacacagttaaatttgcttctggataaacttcgaagtactggagcaagctttattcgttgcatcaaacctaacttaaagatgacaagccaccactttgaaggtgctcaaattctgtctcagcttcagtgttcagggatggtgtctgttttggacttgatgcagggtggttacccatcacgagcttcatttcatgaactctacaacatgtacaaaaagtatatgccagataaacttgcaagattggatccaagactattttgtaaggctttgtttaaagctttgggcttaaatgaaaatgactacaagtttgggttaaccaaagtattttttagacctggcaagtttgcagaatttgatcagatcatgaagtctgaccctgaccacttagcagagttggttaaaagagtcaatcactggctcacatgcagtcgctggaagaaagttcagtggtgctcactctcagtcatcaaattgaaaaacaaaataaaatatcgagctgaagcctgcattaaaatgcaaaaaactattcgaatgtggctttgcaagaggagacacaaacctcgcattgatggtctggttaaggtgggcacactgaaaaaacgacttgataaatttaatgaggtagtcagtgtgttgaaagatggaaaacccgagatgaataaacagatcaagaatctggaaatttctattgatactttgatggccaaaattaagtccactatgatgacgcaggaacaaatccagaaagaatatgatgcactggttaaaagctcagaggaactcctcagtgcattacagaaaaaaaaacagcaggaagaggaagcagaaaggctgaggcgtattcaagaagaaatggaaaaggaaagaaaaagacgtgaagaagacgaaaaacgtcgaagaaaggaagaggaggaaaggcggatgaaacttgagatggaagcaaagagaaaacaagaagaagaagagagaaagaaaagggaagatgatgaaaaacgcattcaagctgaagtggaggcacagctggcccgacagaaggaggaggaatcccaacagcaagcagttctggagcaggagcgcagggaccgggagctggccctgaggattgcccagagtgaagccgagctcatcagtgatgaggcccaggccgacctggcgctgcggagaggtcctgctgtactagccaccaaagcagctgctggtactaagaaatatgatcttagtaaatggaaatatgcagaactacgtgataccatcaatacttcttgtgatattgagctcctggcagcttgcagagaagaatttcataggagactaaaagtgtatcatgcttggaaatctaagaacaagaagagaaatactgaaacagagcaacgtgctccaaagtctgttactgattatgctcagcaaaacccagcagctcagattcctgccaggcagcgggagattgaaatgaaccgacagcaacgcttcttccgcatcccattcatccgccctgccgaccagtacaaagaccctcagagtaagaaaaaaggctggtggtatgcccattttgatggaccatggattgcccggcaaatggaactccatcctgacaagccacccatcctacttgtggctggtaaggacgacatggagatgtgtgagctgaatcttgaggagactggcctgactcggaagcgtggtgctgagatcttgccaagacagtttgaagaaatctgggaacgctgtggaggcatccagtaccttcagaatgcgattgagagcagacaggctcggcccacctatgcaacagccatgctgcagagtctgttaaagtagatgttgcacaccagccttacagctgggagcctttgccatggtacttaggtagggtgtgtgcccccagatttaaccattccataatcatgttagagttacttctataaagtgaacagattttattaatcacggcttttggtgaatttgtttaaggttaattatggtagcaaattttggacctaaacattatttttctgtatcccgctgtaattcccaaaactctcattattctctaactattacacatgggcatattctgatgtttctcatcctttgccagaagactaccttacatccatcgtaattgttctctaggaaaagagaacttttttcaaaattcaaaatactttttaaggatggcacagtaccatataactggagtaataaaacatgagcttacattcttacaataactaaaccacttaaaatgatcaaggcactaatgttttggtctgaaaagctgtgtactttatagacattttcagacatttttggaaatttccattaaaggtggaaaatctatttttttcctcctttgcagtgtcttagtttgaatgaaacacttcgaagttctagaattctagaaagagccttaatgtatttgatgtattctgtgataagaggtactaatagtatccagcacagatttgcttttctttgctagcacaatgtgtgttgctgtcagaatattctttttatattctgtggaaaaataaaggaaattcagattgtttaaatgcctaaaagttttgagataagttttgtttcaattagaaaaggaaataggttttaggtggcatagtggcttaactggactgaattcaaatattctttcaacttcatctcaatagtgatttttgtatcagaatcttgtccaagttgtttcattgatttagtaagtgttctgcttccaacatctttctttttaagaaattcctagtgtcttttttggcctttgaggttttggtaattgtagacctgtttcataagctttgtaattcagaaatccttgtatttagtaagtgcttgttttacataactgataattttaaaatgttttctttgtgtgctgttagtattgattcaaatgtcagcagctttaagcctaatatttatgactttcacatttggaatttaaagacaaaaatacatcaaggagttatgctgacataattctaaggagttttgttgtattttagaataaaattataaagtaaaatgattctctgtactgctttttcccccagtttttagagaccctaacctttgaaatgaaattccagtgatttcttttttccctagaaagattacctcagttagggaagtatttcccagctgactagtgtttgtgagccacagacactgtcttcagaattgcttctctcatgtcttagtagagaaatatttatttattatgatacattcaaatgattgtcaagttaaattaaatggttgtgtctgtgctattgagaatgcaaatgtgattatcttttgaaggctgtattactgcatagcttcacccaccctcgggtcatttcgtccctgtgattggggacagaaggtgtagctactgaagtaaatgacctattctctctcttcc

SEQ ID NO: 19200 - DNA, 5597 bp, Homo sapiens
  source 1..5597: mol_type = unassigned DNA
cttcactggccctcatcacttctcaccgcgccctccagcttcacccgtacaggtagccccgccgccgcgcacctgccttcgctcccgcaccggtgacagtggatagtggaaacaggagatcgtggatcctccttcaaaaatggaggatggaaagcccgtttgggcgccacaccctacagatggatttcagatgggcaatattgtggatattggccccgacagcttaacaattgaacccttgaatcagaaaggcaagacatttttggctctcataaaccaagtgtttcctgcagaagaggacagtaaaaaagatgtggaagataactgttcactaatgtatttaaatgaagccacactgctccataatatcaaagttcgatatagtaaagacagaatttatacatatgtcgccaacattctgattgcagtgaatccatactttgacatacctaaaatatattcttcagaagcaataaagtcatatcaaggaaaatctcttgggacaagaccacctcatgtctttgcaattgctgataaagcttttcgagacatgaaggtgctcaagatgagtcagtctatcattgtatctggagaatcaggagccggcaaaacagaaaatacaaaatttgttctaagatacctgactgaatcctatggaacaggtcaagatattgatgacagaattgttgaagctaacccactcctagaagcctttggaaatgcgaagactgttcgcaacaataatagcagtcgatttgggaaatttgtagaaatacattttaatgaaaagagctcagttgttggaggatttgtttcacattatctcctagagaaatctaggatctgtgttcaaggcaaagaggaaagaaattatcatatcttttataggttgtgtgctggtgcttctgaagatattagagaaaaacttcatttgagttcaccagataattttcggtatttaaaccgaggctgcactagatactttgctaacaaagaaactgacaaacagattttacagaaccgcaaaagtcctgagtaccttaaggcaggttctatgaaagatcctctgctagatgaccatggtgattttattagaatgtgcacggctatgaaaaaaattggtttggatgatgaagaaaagcttgatctcttccgggtagtagctggcgtcctgcaccttggaaatattgattttgaggaagctggcagcacttcaggtggttgtaatctgaagaataaatctgctcagtctttggaatattgtgctgaattactgggtttggaccaagatgatcttcgagtaagtttgaccacaagagtcatgctaacaacagcagggggcaccaaaggaacagttataaaggtacctctgaaagtggagcaagcaaacaatgctcgtgatgccctggcaaagacagtgtatagccatctttttgatcatgtggtaaacagagtaaatcagtgttttccttttgaaacatcatcctattttattggagtcctagatattgctggttttgagtactttgagcataacagttttgaacaattttgcatcaactattgcaatgaaaaacttcaacaattttttaatgaaaggattctgaaggaggaacaagaactctatcaaaaagaaggtttaggtgttaatgaagtgcattatgtggataatcaggactgtatagatttaattgaagccaaattagtgggaatactggatattttggatgaagaaaatcgccttccccagccaagtgatcaacactttacatctgcagttcaccaaaagcacaaggatcattttcgactcactattcccagaaaatctaagctggcagttcataggaatatcagagacgacgaaggcttcattatcaggcattttgcgggggcagtgtgctatgaaacaacccagtttgtggagaaaaataatgatgctttacatatgtctcttgaatccttaatatgtgaatccagagataagtttatacgggaattatttgaatcatccacaaataacaacaaagatactaaacaaaaagcaggaaaacttagcttcatcagcgtgggaaacaagtttaagacacagttaaatttgcttctggataaacttcgaagtactggagcaagctttattcgttgcatcaaacctaacttaaagatgacaagccaccactttgaaggtgctcaaattctgtctcagcttcagtgttcagggatggtgtctgttttggacttgatgcagggtggttacccatcacgagcttcatttcatgaactctacaacatgtacaaaaagtatatgccagataaacttgcaagattggatccaagactattttgtaaggctttgtttaaagctttgggcttaaatgaaaatgactacaagtttgggttaaccaaagtattttttagacctggcaagtttgcagaatttgatcagatcatgaagtctgaccctgaccacttagcagagttggttaaaagagtcaatcactggctcacatgcagtcgctggaagaaagttcagtggtgctcactctcagtcatcaaattgaaaaacaaaataaaatatcgagctgaagcctgcattaaaatgcaaaaaactattcgaatgtggctttgcaagaggagacacaaacctcgcattgatggtctggttaaggtgggcacactgaaaaaacgacttgataaatttaatgaggtagtcagtgtgttgaaagatggaaaacccgagatgaataaacagatcaagaatctggaaatttctattgatactttgatggccaaaattaagtccactatgatgacgcaggaacaaatccagaaagaatatgatgcactggttaaaagctcagaggaactcctcagtgcattacagaaaaaaaaacagcaggaagaggaagcagaaaggctgaggcgtattcaagaagaaatggaaaaggaaagaaaaagacgtgaagaagacgaaaaacgtcgaagaaaggaagaggaggaaaggcggatgaaacttgagatggaagcaaagagaaaacaagaagaagaagagagaaagaaaagggaagatgatgaaaaacgcattcaagctgaagtggaggcacagctggcccgacagaaggaggaggaatcccaacagcaagcagttctggagcaggagcgcagggaccgggagctggccctgaggattgcccagagtgaagccgagctcatcagtgatgaggcccaggccgacctggcgctgcggagaaatgatggaacaagacccaaaatgacaccggaacaaatggccaaagaaatgtcagaatttttgagtagaggtcctgctgtactagccaccaaagcagctgctggtactaagaaatatgatcttagtaaatggaaatatgcagaactacgtgataccatcaatacttcttgtgatattgagctcctggcagcttgcagagaagaatttcataggagactaaaagtgtatcatgcttggaaatctaagaacaagaagagaaatactgaaacagagcaacgtgctccaaagtctgttactgattatgattttgcaccatttttgaacaattcacctcagcaaaacccagcagctcagattcctgccaggcagcgggagattgaaatgaaccgacagcaacgcttcttccgcatcccattcatccgccctgccgaccagtacaaagaccctcagagtaagaaaaaaggctggtggtatgcccattttgatggaccatggattgcccggcaaatggaactccatcctgacaagccacccatcctacttgtggctggtaaggacgacatggagatgtgtgagctgaatcttgaggagactggcctgactcggaagcgtggtgctgagatcttgccaagacagtttgaagaaatctgggaacgctgtggaggcatccagtaccttcagaatgcgattgagagcagacaggctcggcccacctatgcaacagccatgctgcagagtctgttaaagtagatgttgcacaccagccttacagctgggagcctttgccatggtacttaggtagggtgtgtgcccccagatttaaccattccataatcatgttagagttacttctataaagtgaacagattttattaatcacggcttttggtgaatttgtttaaggttaattatggtagcaaattttggacctaaacattatttttctgtatcccgctgtaattcccaaaactctcattattctctaactattacacatgggcatattctgatgtttctcatcctttgccagaagactaccttacatccatcgtaattgttctctaggaaaagagaacttttttcaaaattcaaaatactttttaaggatggcacagtaccatataactggagtaataaaacatgagcttacattcttacaataactaaaccacttaaaatgatcaaggcactaatgttttggtctgaaaagctgtgtactttatagacattttcagacatttttggaaatttccattaaaggtggaaaatctatttttttcctcctttgcagtgtcttagtttgaatgaaacacttcgaagttctagaattctagaaagagccttaatgtatttgatgtattctgtgataagaggtactaatagtatccagcacagatttgcttttctttgctagcacaatgtgtgttgctgtcagaatattctttttatattctgtggaaaaataaaggaaattcagattgtttaaatgcctaaaagttttgagataagttttgtttcaattagaaaaggaaataggttttaggtggcatagtggcttaactggactgaattcaaatattctttcaacttcatctcaatagtgatttttgtatcagaatcttgtccaagttgtttcattgatttagtaagtgttctgcttccaacatctttctttttaagaaattcctagtgtcttttttggcctttgaggttttggtaattgtagacctgtttcataagctttgtaattcagaaatccttgtatttagtaagtgcttgttttacataactgataattttaaaatgttttctttgtgtgctgttagtattgattcaaatgtcagcagctttaagcctaatatttatgactttcacatttggaatttaaagacaaaaatacatcaaggagttatgctgacataattctaaggagttttgttgtattttagaataaaattataaagtaaaatgattctctgtactgctttttcccccagtttttagagaccctaacctttgaaatgaaattccagtgatttcttttttccctagaaagattacctcagttagggaagtatttcccagctgactagtgtttgtgagccacagacactgtcttcagaattgcttctctcatgtcttagtagagaaatatttatttattatgatacattcaaatgattgtcaagttaaattaaatggttgtgtctgtgctattgagaatgcaaatgtgattatcttttgaaggctgtattactgcatagcttcacccaccctcgggtcatttcgtccctgtgattggggacagaaggtgtagctactgaagtaaatgacctattctctctcttcc

SEQ ID NO: 19201 - DNA, 8665 bp, Homo sapiens
  source 1..8665: mol_type = unassigned DNA
gtgcacgccgcagtgccggggactcggcggggcgccggccggcgggcggagaccgactcgggatctgtccgagcaggaagccagcctcagcccggccgctgtcgccgccctgtcctggtgcccgtccgcgtcgtcgccctcttcactggccctcatcacttctcaccgcgccctccagcttcacccgtacaggtagccccgccgccgcgcacctgccttcgctcccgcaccggtgacagtggatagtggaaacaggagatcgtggatcctccttcaaaaatggaggatggaaagcccgtttgggcgccacaccctacagatggatttcagatgggcaatattgtggatattggccccgacagcttaacaattgaacccttgaatcagaaaggcaagacatttttggctctcataaaccaagtgtttcctgcagaagaggacagtaaaaaagatgtggaagataactgttcactaatgtatttaaatgaagccacactgctccataatatcaaagttcgatatagtaaagacagaatttatacatatgtcgccaacattctgattgcagtgaatccatactttgacatacctaaaatatattcttcagaagcaataaagtcatatcaaggaaaatctcttgggacaagaccacctcatgtctttgcaattgctgataaagcttttcgagacatgaaggtgctcaagatgagtcagtctatcattgtatctggagaatcaggagccggcaaaacagaaaatacaaaatttgttctaagatacctgactgaatcctatggaacaggtcaagatattgatgacagaattgttgaagctaacccactcctagaagcctttggaaatgcgaagactgttcgcaacaataatagcagtcgatttgggaaatttgtagaaatacattttaatgaaaagagctcagttgttggaggatttgtttcacattatctcctagagaaatctaggatctgtgttcaaggcaaagaggaaagaaattatcatatcttttataggttgtgtgctggtgcttctgaagatattagagaaaaacttcatttgagttcaccagataattttcggtatttaaaccgaggctgcactagatactttgctaacaaagaaactgacaaacagattttacagaaccgcaaaagtcctgagtaccttaaggcaggttctatgaaagatcctctgctagatgaccatggtgattttattagaatgtgcacggctatgaaaaaaattggtttggatgatgaagaaaagcttgatctcttccgggtagtagctggcgtcctgcaccttggaaatattgattttgaggaagctggcagcacttcaggtggttgtaatctgaagaataaatctgctcagtctttggaatattgtgctgaattactgggtttggaccaagatgatcttcgagtaagtttgaccacaagagtcatgctaacaacagcagggggcaccaaaggaacagttataaaggtacctctgaaagtggagcaagcaaacaatgctcgtgatgccctggcaaagacagtgtatagccatctttttgatcatgtggtaaacagagtaaatcagtgttttccttttgaaacatcatcctattttattggagtcctagatattgctggttttgagtactttgagcataacagttttgaacaattttgcatcaactattgcaatgaaaaacttcaacaattttttaatgaaaggattctgaaggaggaacaagaactctatcaaaaagaaggtttaggtgttaatgaagtgcattatgtggataatcaggactgtatagatttaattgaagccaaattagtgggaatactggatattttggatgaagaaaatcgccttccccagccaagtgatcaacactttacatctgcagttcaccaaaagcacaaggatcattttcgactcactattcccagaaaatctaagctggcagttcataggaatatcagagacgacgaaggcttcattatcaggcattttgcgggggcagtgtgctatgaaacaacccagtttgtggagaaaaataatgatgctttacatatgtctcttgaatccttaatatgtgaatccagagataagtttatacgggaattatttgaatcatccacaaataacaacaaagatactaaacaaaaagcaggaaaacttagcttcatcagcgtgggaaacaagtttaagacacagttaaatttgcttctggataaacttcgaagtactggagcaagctttattcgttgcatcaaacctaacttaaagatgacaagccaccactttgaaggtgctcaaattctgtctcagcttcagtgttcagggatggtgtctgttttggacttgatgcagggtggttacccatcacgagcttcatttcatgaactctacaacatgtacaaaaagtatatgccagataaacttgcaagattggatccaagactattttgtaaggctttgtttaaagctttgggcttaaatgaaaatgactacaagtttgggttaaccaaagtattttttagacctggcaagtttgcagaatttgatcagatcatgaagtctgaccctgaccacttagcagagttggttaaaagagtcaatcactggctcacatgcagtcgctggaagaaagttcagtggtgctcactctcagtcatcaaattgaaaaacaaaataaaatatcgagctgaagcctgcattaaaatgcaaaaaactattcgaatgtggctttgcaagaggagacacaaacctcgcattgatggtctggttaaggtgggcacactgaaaaaacgacttgataaatttaatgaggtagtcagtgtgttgaaagatggaaaacccgagatgaataaacagatcaagaatctggaaatttctattgatactttgatggccaaaattaagtccactatgatgacgcaggaacaaatccagaaagaatatgatgcactggttaaaagctcagaggaactcctcagtgcattacagaaaaaaaaacagcaggaagaggaagcagaaaggctgaggcgtattcaagaagaaatggaaaaggaaagaaaaagacgtgaagaagacgaaaaacgtcgaagaaaggaagaggaggaaaggcggatgaaacttgagatggaagcaaagagaaaacaagaagaagaagagagaaagaaaagggaagatgatgaaaaacgcattcaagctgaagtggaggcacagctggcccgacagaaggaggaggaatcccaacagcaagcagttctggagcaggagcgcagggaccgggagctggccctgaggattgcccagagtgaagccgagctcatcagtgatgaggcccaggccgacctggcgctgcggaggtacttggattcctatccggtaacttctaaaaatgatggaacaagacccaaaatgacaccggaacaaatggccaaagaaatgtcagaatttttgagtagaggtcctgctgtactagccaccaaagcagctgctggtactaagaaatatgatcttagtaaatggaaatatgcagaactacgtgataccatcaatacttcttgtgatattgagctcctggcagcttgcagagaagaatttcataggagactaaaagtgtatcatgcttggaaatctaagaacaagaagagaaatactgaaacagagcaacgtgctccaaagtctgttactgattatgctcagcaaaacccagcagctcagattcctgccaggcagcgggagattgaaatgaaccgacagcaacgcttcttccgcatcccattcatccgccctgccgaccagtacaaagaccctcagagtaagaaaaaaggctggtggtatgcccattttgatggaccatggattgcccggcaaatggaactccatcctgacaagccacccatcctacttgtggctggtaaggacgacatggagatgtgtgagctgaatcttgaggagactggcctgactcggaagcgtggtgctgagatcttgccaagacagtttgaagaaatctgggaacgctgtggaggcatccagtaccttcagaatgcgattgagagcagacaggctcggcccacctatgcaacagccatgctgcagagtctgttaaagtagatgttgcacaccagccttacagctgggagcctttgccatggtacttaggtagggtgtgtgcccccagatttaaccattccataatcatgttagagttacttctataaagtgaacagattttattaatcacggcttttggtgaatttgtttaaggttaattatggtagcaaattttggacctaaacattatttttctgtatcccgctgtaattcccaaaactctcattattctctaactattacacatgggcatattctgatgtttctcatcctttgccagaagactaccttacatccatcgtaattgttctctaggaaaagagaacttttttcaaaattcaaaatactttttaaggatggcacagtaccatataactggagtaataaaacatgagcttacattcttacaataactaaaccacttaaaatgatcaaggcactaatgttttggtctgaaaagctgtgtactttatagacattttcagacatttttggaaatttccattaaaggtggaaaatctatttttttcctcctttgcagtgtcttagtttgaatgaaacacttcgaagttctagaattctagaaagagccttaatgtatttgatgtattctgtgataagaggtactaatagtatccagcacagatttgcttttctttgctagcacaatgtgtgttgctgtcagaatattctttttatattctgtggaaaaataaaggaaattcagattgtttaaatgcctaaaagttttgagataagttttgtttcaattagaaaaggaaataggttttaggtggcatagtggcttaactggactgaattcaaatattctttcaacttcatctcaatagtgatttttgtatcagaatcttgtccaagttgtttcattgatttagtaagtgttctgcttccaacatctttctttttaagaaattcctagtgtcttttttggcctttgaggttttggtaattgtagacctgtttcataagctttgtaattcagaaatccttgtatttagtaagtgcttgttttacataactgataattttaaaatgttttctttgtgtgctgttagtattgattcaaatgtcagcagctttaagcctaatatttatgactttcacatttggaatttaaagacaaaaatacatcaaggagttatgctgacataattctaaggagttttgttgtattttagaataaaattataaagtaaaatgattctctgtactgctttttcccccagtttttagagaccctaacctttgaaatgaaattccagtgatttcttttttccctagaaagattacctcagttagggaagtatttcccagctgactagtgtttgtgagccacagacactgtcttcagaattgcttctctcatgtcttagtagagaaatatttatttattatgatacattcaaatgattgtcaagttaaattaaatggttgtgtctgtgctattgagaatgcaaatgtgattatcttttgaaggctgtattactgcatagcttcacccaccctcgggtcatttcgtccctgtgattggggacagaaggtgtagctactgaagtaaatgacctattctctctcttccatctctcgcctttaactggtgtttttatttgtgtaggatagtgaatgataagcttttttcctaaccagtagtgagtaaagttcttgaacaaaatttagtagccaaattgttttttaatgacatgtctctttagtacaatagttttgtgtatcttttagatacattaataggcactagatggaaaattaaagagttaaacatatttaaatgagagaatctaatgtttcagaaatttgtaagaaatgtatcacagcaaagggttgttataagtccttagtttttgactctaatagttaatacaattatagttaatcttaagccataatgtttctaatcatgtcacacagctgtcctagaacttatctatttaaaatagtttcctgagttaattttggccagcagggcaactgccctaattcagatagatttacagtaacctacgtacagtagatgcacatacacacagacacccctttgctggagaaacttaggaccctgtcagccttttaaaggaaacagcaggagtggtgtcctaaatgatgttcatgcagctgctttaccatgttcacagtcaagcccatgcatgccaggttaaaactgtggaaatcaaaagtaaattcactcatattttaatcattttaactgagatttaaaattagaagtttaaaccactatatataaagaactaatcttttcttaataccagttctttccatagcatatgctttgcaaaggcagcatgcataaaatatttaaaatgagaggacagaatgttttcacatttgattcaattttaatataattcctaattgtggtaacacagttgagatatgtattatgagttatgggaactaattgagaaaaggaagttactctaatccacgtatgttaagagaatattgagttttcttagttgtaaagttggggagatggcaccttctcagaggattgtgaaaatatgaggaagaaacaaaacagtgcatgtaggagcacagggccacacaaaggcattctattgttatgctcattctgcttctgtaatgacttttcataggtcattcttgtgaaccattttgttttgcaagcaaccaaggaaagaacatcttaagtggaaaatcagtggtggttgtgaacacttagagaatagcaatccacaggcaagaataatggtattgtttgtagagctttattaattggatattttttaaaagacattttcattcacaggtcattactatggttctcagcgatccaaatatgtagatcattggtttttttttttacctgaagtagcttaagagtacttggatcagtagaataaatatttattgaatcaatcagtcagccaattaatatgatgttagtgatagacctgcctccttttatggaagaggtaacagatccagagaggtcaagtaatttagttgtagactgaaaaatatatcaaagcctttgctgcaatcatatgtaacaaaaagaaccaaaacaaacactttttagtggcacctgtggatttacaaagggttgcctctctgtcattccacaacttcagaaggtgtgacaggttttccctatttatcattaccaataataacaagtattgagagttttaaaatttctcccagaagataaactaacaaggatggaaggggagggcaaaggatatctaaacatgagaataaggacatgttagagggggggaaacagttgtaacaataaggaaagagaagagcaacagtggaagagacaggttgtgtgcccctaaagattctgcacccccagtttggaaacactgatacattttaggacacagagcactcctagatctctacgaaattttagaatgaataatgtgtaatttataggatcagaacgtatggttattaaaacttggatcaagatatgcccggtgtatacattcttagcacataggaatggcactgccatactggagaaggtcagcagtaaataggcattctgtacataagcctcatggaagggtaagatggagagactggcagaagtagcacctactctgctgggagcacttctctgagtacgctttagttcaattcaaatcactgtattctttccccattgctaacctaatatatgaaacaagcttagctgtctcagaagtttttcaagagatgatcaggaaaaattaatgcacattcaaaaggagaatcttcagtacaaatttgtttttttaaaaatagatttagggctgggcgcggtggctcacgcctgtaatcccagcactttgggaggccgaggcgggtggatcacgaggtcaagacttcgagaccagcctggccaacatggtgaaaccctgtctctactaaaaatacaaaacattagccaggcgtggtagtgggtgcctgtaatccctgctacttgggaggctgaggcaggagaatcacttgaacgcgggaggcagaggttgcagggagccgagatggcgccattgcactccatcctgggcaacaagagcgaaattccatctcaaaaaataaaatagatttagggggtacaagtgcagttttgttacatgggtatattgcatagtggtaaaatgtgggcttttagtgtacctaacacccagagaagcatacattgtgcccagtaggtaatttttcatccctaaaccttttctcagcctcccactttctggagtctccaatgtcggttattccactctttatgtccatatctacacattcaatcctaatttgtaccaagtagcatctcacctttaaatcacaggcttattagttgggtgttttctttttacttatgaaaattcatctagtcaaactgtcaattaatttttcctcatttcattaaaagtgtatatctaatgctttctctaaaaattgatgtactggaaatacaaataaataaatgctccctgtgtagaatttc

SEQ ID NO: 19202 - DNA, 5651 bp, Homo sapiens
  source 1..5651: mol_type = unassigned DNA
ggggactcggcggggcgccggccggcgggcggagaccgactcgggatctgtccgagcaggaagccagcctcagcccggccgctgtcgccgccctgtcctggtgcccgtccgcgtcgtcgccctcttcactggccctcatcacttctcaccgcgccctccagcttcacccgtacaggtagccccgccgccgcgcacctgccttcgctcccgcaccggtgacagtggatagtggaaacaggagatcgtggatcctccttcaaaaatggaggatggaaagcccgtttgggcgccacaccctacagatggatttcagatgggcaatattgtggatattggccccgacagcttaacaattgaacccttgaatcagaaaggcaagacatttttggctctcataaaccaagtgtttcctgcagaagaggacagtaaaaaagatgtggaagataactgttcactaatgtatttaaatgaagccacactgctccataatatcaaagttcgatatagtaaagacagaatttatacatatgtcgccaacattctgattgcagtgaatccatactttgacatacctaaaatatattcttcagaagcaataaagtcatatcaaggaaaatctcttgggacaagaccacctcatgtctttgcaattgctgataaagcttttcgagacatgaaggtgctcaagatgagtcagtctatcattgtatctggagaatcaggagccggcaaaacagaaaatacaaaatttgttctaagatacctgactgaatcctatggaacaggtcaagatattgatgacagaattgttgaagctaacccactcctagaagcctttggaaatgcgaagactgttcgcaacaataatagcagtcgatttgggaaatttgtagaaatacattttaatgaaaagagctcagttgttggaggatttgtttcacattatctcctagagaaatctaggatctgtgttcaaggcaaagaggaaagaaattatcatatcttttataggttgtgtgctggtgcttctgaagatattagagaaaaacttcatttgagttcaccagataattttcggtatttaaaccgaggctgcactagatactttgctaacaaagaaactgacaaacagattttacagaaccgcaaaagtcctgagtaccttaaggcaggttctatgaaagatcctctgctagatgaccatggtgattttattagaatgtgcacggctatgaaaaaaattggtttggatgatgaagaaaagcttgatctcttccgggtagtagctggcgtcctgcaccttggaaatattgattttgaggaagctggcagcacttcaggtggttgtaatctgaagaataaatctgctcagtctttggaatattgtgctgaattactgggtttggaccaagatgatcttcgagtaagtttgaccacaagagtcatgctaacaacagcagggggcaccaaaggaacagttataaaggtacctctgaaagtggagcaagcaaacaatgctcgtgatgccctggcaaagacagtgtatagccatctttttgatcatgtggtaaacagagtaaatcagtgttttccttttgaaacatcatcctattttattggagtcctagatattgctggttttgagtactttgagcataacagttttgaacaattttgcatcaactattgcaatgaaaaacttcaacaattttttaatgaaaggattctgaaggaggaacaagaactctatcaaaaagaaggtttaggtgttaatgaagtgcattatgtggataatcaggactgtatagatttaattgaagccaaattagtgggaatactggatattttggatgaagaaaatcgccttccccagccaagtgatcaacactttacatctgcagttcaccaaaagcacaaggatcattttcgactcactattcccagaaaatctaagctggcagttcataggaatatcagagacgacgaaggcttcattatcaggcattttgcgggggcagtgtgctatgaaacaacccagtttgtggagaaaaataatgatgctttacatatgtctcttgaatccttaatatgtgaatccagagataagtttatacgggaattatttgaatcatccacaaataacaacaaagatactaaacaaaaagcaggaaaacttagcttcatcagcgtgggaaacaagtttaagacacagttaaatttgcttctggataaacttcgaagtactggagcaagctttattcgttgcatcaaacctaacttaaagatgacaagccaccactttgaaggtgctcaaattctgtctcagcttcagtgttcagggatggtgtctgttttggacttgatgcagggtggttacccatcacgagcttcatttcatgaactctacaacatgtacaaaaagtatatgccagataaacttgcaagattggatccaagactattttgtaaggctttgtttaaagctttgggcttaaatgaaaatgactacaagtttgggttaaccaaagtattttttagacctggcaagtttgcagaatttgatcagatcatgaagtctgaccctgaccacttagcagagttggttaaaagagtcaatcactggctcacatgcagtcgctggaagaaagttcagtggtgctcactctcagtcatcaaattgaaaaacaaaataaaatatcgagctgaagcctgcattaaaatgcaaaaaactattcgaatgtggctttgcaagaggagacacaaacctcgcattgatggtctggttaaggtgggcacactgaaaaaacgacttgataaatttaatgaggtagtcagtgtgttgaaagatggaaaacccgagatgaataaacagatcaagaatctggaaatttctattgatactttgatggccaaaattaagtccactatgatgacgcaggaacaaatccagaaagaatatgatgcactggttaaaagctcagaggaactcctcagtgcattacagaaaaaaaaacagcaggaagaggaagcagaaaggctgaggcgtattcaagaagaaatggaaaaggaaagaaaaagacgtgaagaagacgaaaaacgtcgaagaaaggaagaggaggaaaggcggatgaaacttgagatggaagcaaagagaaaacaagaagaagaagagagaaagaaaagggaagatgatgaaaaacgcattcaagctgaagtggaggcacagctggcccgacagaaggaggaggaatcccaacagcaagcagttctggagcaggagcgcagggaccgggagctggccctgaggattgcccagagtgaagccgagctcatcagtgatgaggcccaggccgacctggcgctgcggagaggtcctgctgtactagccaccaaagcagctgctggtactaagaaatatgatcttagtaaatggaaatatgcagaactacgtgataccatcaatacttcttgtgatattgagctcctggcagcttgcagagaagaatttcataggagactaaaagtgtatcatgcttggaaatctaagaacaagaagagaaatactgaaacagagcaacgtgctccaaagtctgttactgattatgattttgcaccatttttgaacaattcacctcagcaaaacccagcagctcagattcctgccaggcagcgggagattgaaatgaaccgacagcaacgcttcttccgcatcccattcatccgccctgccgaccagtacaaagaccctcagagtaagaaaaaaggctggtggtatgcccattttgatggaccatggattgcccggcaaatggaactccatcctgacaagccacccatcctacttgtggctggtaaggacgacatggagatgtgtgagctgaatcttgaggagactggcctgactcggaagcgtggtgctgagatcttgccaagacagtttgaagaaatctgggaacgctgtggaggcatccagtaccttcagaatgcgattgagagcagacaggctcggcccacctatgcaacagccatgctgcagagtctgttaaagtagatgttgcacaccagccttacagctgggagcctttgccatggtacttaggtagggtgtgtgcccccagatttaaccattccataatcatgttagagttacttctataaagtgaacagattttattaatcacggcttttggtgaatttgtttaaggttaattatggtagcaaattttggacctaaacattatttttctgtatcccgctgtaattcccaaaactctcattattctctaactattacacatgggcatattctgatgtttctcatcctttgccagaagactaccttacatccatcgtaattgttctctaggaaaagagaacttttttcaaaattcaaaatactttttaaggatggcacagtaccatataactggagtaataaaacatgagcttacattcttacaataactaaaccacttaaaatgatcaaggcactaatgttttggtctgaaaagctgtgtactttatagacattttcagacatttttggaaatttccattaaaggtggaaaatctatttttttcctcctttgcagtgtcttagtttgaatgaaacacttcgaagttctagaattctagaaagagccttaatgtatttgatgtattctgtgataagaggtactaatagtatccagcacagatttgcttttctttgctagcacaatgtgtgttgctgtcagaatattctttttatattctgtggaaaaataaaggaaattcagattgtttaaatgcctaaaagttttgagataagttttgtttcaattagaaaaggaaataggttttaggtggcatagtggcttaactggactgaattcaaatattctttcaacttcatctcaatagtgatttttgtatcagaatcttgtccaagttgtttcattgatttagtaagtgttctgcttccaacatctttctttttaagaaattcctagtgtcttttttggcctttgaggttttggtaattgtagacctgtttcataagctttgtaattcagaaatccttgtatttagtaagtgcttgttttacataactgataattttaaaatgttttctttgtgtgctgttagtattgattcaaatgtcagcagctttaagcctaatatttatgactttcacatttggaatttaaagacaaaaatacatcaaggagttatgctgacataattctaaggagttttgttgtattttagaataaaattataaagtaaaatgattctctgtactgctttttcccccagtttttagagaccctaacctttgaaatgaaattccagtgatttcttttttccctagaaagattacctcagttagggaagtatttcccagctgactagtgtttgtgagccacagacactgtcttcagaattgcttctctcatgtcttagtagagaaatatttatttattatgatacattcaaatgattgtcaagttaaattaaatggttgtgtctgtgctattgagaatgcaaatgtgattatcttttgaaggctgtattactgcatagcttcacccaccctcgggtcatttcgtccctgtgattggggacagaaggtgtagctactgaagtaaatgacctattctctctcttcc

SEQ ID NO: 19203 - DNA, 8692 bp, Homo sapiens
  source 1..8692: mol_type = unassigned DNA
gtgcacgccgcagtgccggggactcggcggggcgccggccggcgggcggagaccgactcgggatctgtccgagcaggaagccagcctcagcccggccgctgtcgccgccctgtcctggtgcccgtccgcgtcgtcgccctcttcactggccctcatcacttctcaccgcgccctccagcttcacccgtacaggtagccccgccgccgcgcacctgccttcgctcccgcaccggtgacagtggatagtggaaacaggagatcgtggatcctccttcaaaaatggaggatggaaagcccgtttgggcgccacaccctacagatggatttcagatgggcaatattgtggatattggccccgacagcttaacaattgaacccttgaatcagaaaggcaagacatttttggctctcataaaccaagtgtttcctgcagaagaggacagtaaaaaagatgtggaagataactgttcactaatgtatttaaatgaagccacactgctccataatatcaaagttcgatatagtaaagacagaatttatacatatgtcgccaacattctgattgcagtgaatccatactttgacatacctaaaatatattcttcagaagcaataaagtcatatcaaggaaaatctcttgggacaagaccacctcatgtctttgcaattgctgataaagcttttcgagacatgaaggtgctcaagatgagtcagtctatcattgtatctggagaatcaggagccggcaaaacagaaaatacaaaatttgttctaagatacctgactgaatcctatggaacaggtcaagatattgatgacagaattgttgaagctaacccactcctagaagcctttggaaatgcgaagactgttcgcaacaataatagcagtcgatttgggaaatttgtagaaatacattttaatgaaaagagctcagttgttggaggatttgtttcacattatctcctagagaaatctaggatctgtgttcaaggcaaagaggaaagaaattatcatatcttttataggttgtgtgctggtgcttctgaagatattagagaaaaacttcatttgagttcaccagataattttcggtatttaaaccgaggctgcactagatactttgctaacaaagaaactgacaaacagattttacagaaccgcaaaagtcctgagtaccttaaggcaggttctatgaaagatcctctgctagatgaccatggtgattttattagaatgtgcacggctatgaaaaaaattggtttggatgatgaagaaaagcttgatctcttccgggtagtagctggcgtcctgcaccttggaaatattgattttgaggaagctggcagcacttcaggtggttgtaatctgaagaataaatctgctcagtctttggaatattgtgctgaattactgggtttggaccaagatgatcttcgagtaagtttgaccacaagagtcatgctaacaacagcagggggcaccaaaggaacagttataaaggtacctctgaaagtggagcaagcaaacaatgctcgtgatgccctggcaaagacagtgtatagccatctttttgatcatgtggtaaacagagtaaatcagtgttttccttttgaaacatcatcctattttattggagtcctagatattgctggttttgagtactttgagcataacagttttgaacaattttgcatcaactattgcaatgaaaaacttcaacaattttttaatgaaaggattctgaaggaggaacaagaactctatcaaaaagaaggtttaggtgttaatgaagtgcattatgtggataatcaggactgtatagatttaattgaagccaaattagtgggaatactggatattttggatgaagaaaatcgccttccccagccaagtgatcaacactttacatctgcagttcaccaaaagcacaaggatcattttcgactcactattcccagaaaatctaagctggcagttcataggaatatcagagacgacgaaggcttcattatcaggcattttgcgggggcagtgtgctatgaaacaacccagtttgtggagaaaaataatgatgctttacatatgtctcttgaatccttaatatgtgaatccagagataagtttatacgggaattatttgaatcatccacaaataacaacaaagatactaaacaaaaagcaggaaaacttagcttcatcagcgtgggaaacaagtttaagacacagttaaatttgcttctggataaacttcgaagtactggagcaagctttattcgttgcatcaaacctaacttaaagatgacaagccaccactttgaaggtgctcaaattctgtctcagcttcagtgttcagggatggtgtctgttttggacttgatgcagggtggttacccatcacgagcttcatttcatgaactctacaacatgtacaaaaagtatatgccagataaacttgcaagattggatccaagactattttgtaaggctttgtttaaagctttgggcttaaatgaaaatgactacaagtttgggttaaccaaagtattttttagacctggcaagtttgcagaatttgatcagatcatgaagtctgaccctgaccacttagcagagttggttaaaagagtcaatcactggctcacatgcagtcgctggaagaaagttcagtggtgctcactctcagtcatcaaattgaaaaacaaaataaaatatcgagctgaagcctgcattaaaatgcaaaaaactattcgaatgtggctttgcaagaggagacacaaacctcgcattgatggtctggttaaggtgggcacactgaaaaaacgacttgataaatttaatgaggtagtcagtgtgttgaaagatggaaaacccgagatgaataaacagatcaagaatctggaaatttctattgatactttgatggccaaaattaagtccactatgatgacgcaggaacaaatccagaaagaatatgatgcactggttaaaagctcagaggaactcctcagtgcattacagaaaaaaaaacagcaggaagaggaagcagaaaggctgaggcgtattcaagaagaaatggaaaaggaaagaaaaagacgtgaagaagacgaaaaacgtcgaagaaaggaagaggaggaaaggcggatgaaacttgagatggaagcaaagagaaaacaagaagaagaagagagaaagaaaagggaagatgatgaaaaacgcattcaagctgaagtggaggcacagctggcccgacagaaggaggaggaatcccaacagcaagcagttctggagcaggagcgcagggaccgggagctggccctgaggattgcccagagtgaagccgagctcatcagtgatgaggcccaggccgacctggcgctgcggaggtacttggattcctatccggtaacttctaaaaatgatggaacaagacccaaaatgacaccggaacaaatggccaaagaaatgtcagaatttttgagtagaggtcctgctgtactagccaccaaagcagctgctggtactaagaaatatgatcttagtaaatggaaatatgcagaactacgtgataccatcaatacttcttgtgatattgagctcctggcagcttgcagagaagaatttcataggagactaaaagtgtatcatgcttggaaatctaagaacaagaagagaaatactgaaacagagcaacgtgctccaaagtctgttactgattatgattttgcaccatttttgaacaattcacctcagcaaaacccagcagctcagattcctgccaggcagcgggagattgaaatgaaccgacagcaacgcttcttccgcatcccattcatccgccctgccgaccagtacaaagaccctcagagtaagaaaaaaggctggtggtatgcccattttgatggaccatggattgcccggcaaatggaactccatcctgacaagccacccatcctacttgtggctggtaaggacgacatggagatgtgtgagctgaatcttgaggagactggcctgactcggaagcgtggtgctgagatcttgccaagacagtttgaagaaatctgggaacgctgtggaggcatccagtaccttcagaatgcgattgagagcagacaggctcggcccacctatgcaacagccatgctgcagagtctgttaaagtagatgttgcacaccagccttacagctgggagcctttgccatggtacttaggtagggtgtgtgcccccagatttaaccattccataatcatgttagagttacttctataaagtgaacagattttattaatcacggcttttggtgaatttgtttaaggttaattatggtagcaaattttggacctaaacattatttttctgtatcccgctgtaattcccaaaactctcattattctctaactattacacatgggcatattctgatgtttctcatcctttgccagaagactaccttacatccatcgtaattgttctctaggaaaagagaacttttttcaaaattcaaaatactttttaaggatggcacagtaccatataactggagtaataaaacatgagcttacattcttacaataactaaaccacttaaaatgatcaaggcactaatgttttggtctgaaaagctgtgtactttatagacattttcagacatttttggaaatttccattaaaggtggaaaatctatttttttcctcctttgcagtgtcttagtttgaatgaaacacttcgaagttctagaattctagaaagagccttaatgtatttgatgtattctgtgataagaggtactaatagtatccagcacagatttgcttttctttgctagcacaatgtgtgttgctgtcagaatattctttttatattctgtggaaaaataaaggaaattcagattgtttaaatgcctaaaagttttgagataagttttgtttcaattagaaaaggaaataggttttaggtggcatagtggcttaactggactgaattcaaatattctttcaacttcatctcaatagtgatttttgtatcagaatcttgtccaagttgtttcattgatttagtaagtgttctgcttccaacatctttctttttaagaaattcctagtgtcttttttggcctttgaggttttggtaattgtagacctgtttcataagctttgtaattcagaaatccttgtatttagtaagtgcttgttttacataactgataattttaaaatgttttctttgtgtgctgttagtattgattcaaatgtcagcagctttaagcctaatatttatgactttcacatttggaatttaaagacaaaaatacatcaaggagttatgctgacataattctaaggagttttgttgtattttagaataaaattataaagtaaaatgattctctgtactgctttttcccccagtttttagagaccctaacctttgaaatgaaattccagtgatttcttttttccctagaaagattacctcagttagggaagtatttcccagctgactagtgtttgtgagccacagacactgtcttcagaattgcttctctcatgtcttagtagagaaatatttatttattatgatacattcaaatgattgtcaagttaaattaaatggttgtgtctgtgctattgagaatgcaaatgtgattatcttttgaaggctgtattactgcatagcttcacccaccctcgggtcatttcgtccctgtgattggggacagaaggtgtagctactgaagtaaatgacctattctctctcttccatctctcgcctttaactggtgtttttatttgtgtaggatagtgaatgataagcttttttcctaaccagtagtgagtaaagttcttgaacaaaatttagtagccaaattgttttttaatgacatgtctctttagtacaatagttttgtgtatcttttagatacattaataggcactagatggaaaattaaagagttaaacatatttaaatgagagaatctaatgtttcagaaatttgtaagaaatgtatcacagcaaagggttgttataagtccttagtttttgactctaatagttaatacaattatagttaatcttaagccataatgtttctaatcatgtcacacagctgtcctagaacttatctatttaaaatagtttcctgagttaattttggccagcagggcaactgccctaattcagatagatttacagtaacctacgtacagtagatgcacatacacacagacacccctttgctggagaaacttaggaccctgtcagccttttaaaggaaacagcaggagtggtgtcctaaatgatgttcatgcagctgctttaccatgttcacagtcaagcccatgcatgccaggttaaaactgtggaaatcaaaagtaaattcactcatattttaatcattttaactgagatttaaaattagaagtttaaaccactatatataaagaactaatcttttcttaataccagttctttccatagcatatgctttgcaaaggcagcatgcataaaatatttaaaatgagaggacagaatgttttcacatttgattcaattttaatataattcctaattgtggtaacacagttgagatatgtattatgagttatgggaactaattgagaaaaggaagttactctaatccacgtatgttaagagaatattgagttttcttagttgtaaagttggggagatggcaccttctcagaggattgtgaaaatatgaggaagaaacaaaacagtgcatgtaggagcacagggccacacaaaggcattctattgttatgctcattctgcttctgtaatgacttttcataggtcattcttgtgaaccattttgttttgcaagcaaccaaggaaagaacatcttaagtggaaaatcagtggtggttgtgaacacttagagaatagcaatccacaggcaagaataatggtattgtttgtagagctttattaattggatattttttaaaagacattttcattcacaggtcattactatggttctcagcgatccaaatatgtagatcattggtttttttttttacctgaagtagcttaagagtacttggatcagtagaataaatatttattgaatcaatcagtcagccaattaatatgatgttagtgatagacctgcctccttttatggaagaggtaacagatccagagaggtcaagtaatttagttgtagactgaaaaatatatcaaagcctttgctgcaatcatatgtaacaaaaagaaccaaaacaaacactttttagtggcacctgtggatttacaaagggttgcctctctgtcattccacaacttcagaaggtgtgacaggttttccctatttatcattaccaataataacaagtattgagagttttaaaatttctcccagaagataaactaacaaggatggaaggggagggcaaaggatatctaaacatgagaataaggacatgttagagggggggaaacagttgtaacaataaggaaagagaagagcaacagtggaagagacaggttgtgtgcccctaaagattctgcacccccagtttggaaacactgatacattttaggacacagagcactcctagatctctacgaaattttagaatgaataatgtgtaatttataggatcagaacgtatggttattaaaacttggatcaagatatgcccggtgtatacattcttagcacataggaatggcactgccatactggagaaggtcagcagtaaataggcattctgtacataagcctcatggaagggtaagatggagagactggcagaagtagcacctactctgctgggagcacttctctgagtacgctttagttcaattcaaatcactgtattctttccccattgctaacctaatatatgaaacaagcttagctgtctcagaagtttttcaagagatgatcaggaaaaattaatgcacattcaaaaggagaatcttcagtacaaatttgtttttttaaaaatagatttagggctgggcgcggtggctcacgcctgtaatcccagcactttgggaggccgaggcgggtggatcacgaggtcaagacttcgagaccagcctggccaacatggtgaaaccctgtctctactaaaaatacaaaacattagccaggcgtggtagtgggtgcctgtaatccctgctacttgggaggctgaggcaggagaatcacttgaacgcgggaggcagaggttgcagggagccgagatggcgccattgcactccatcctgggcaacaagagcgaaattccatctcaaaaaataaaatagatttagggggtacaagtgcagttttgttacatgggtatattgcatagtggtaaaatgtgggcttttagtgtacctaacacccagagaagcatacattgtgcccagtaggtaatttttcatccctaaaccttttctcagcctcccactttctggagtctccaatgtcggttattccactctttatgtccatatctacacattcaatcctaatttgtaccaagtagcatctcacctttaaatcacaggcttattagttgggtgttttctttttacttatgaaaattcatctagtcaaactgtcaattaatttttcctcatttcattaaaagtgtatatctaatgctttctctaaaaattgatgtactggaaatacaaataaataaatgctccctgtgtagaatttc

SEQ ID NO: 19204 - DNA, 522 bp, Homo sapiens
  source 1..522: mol_type = unassigned DNA
aaaagacgtgaagaagacgaaaaacgtcgaagaaaggaagaggaggaaaggcggatgaaacttgagatggaagcaaagagaaaacaagaagaagaagagagaaagaaaagggaagatgatgaaaaacgcattcaagctgaagtggaggcacagctggcccgacagaaggaggaggaatcccaacagcaagcagttctggagcaggagcgcagggaccgggagctggccctgaggattgcccagagtgaagccgagctcatcagtgatgaggcccaggccgacctggcgctgcggagcttggattcctatccggtaacttctaaaaatgatggaacaagacccaaaatgacaccaggtcctgctgtactagccaccaaagcagctgctggtactaagaaatatgatcttagtaaatggaaatatgcagaactacgtgataccatcaatacttcttgtgatattgagctcctggcagcttgcagagaagaatttcataggagactaaaagtgtatcatgcttgg

SEQ ID NO: 19205 - DNA, 6534 bp, Homo sapiens
  source 1..6534: mol_type = unassigned DNA
gcactgctccagaagggggaccatgtgtggatggacctgagattggggcaggagttcgacgtgcccatcggggcggtggtgaagctctgcgactctgggcaggtccaggtggtggatgatgaagacaatgaacactggatctctccgcagaacgcaacgcacatcaagcctatgcaccccacgtcggtccacggcgtggaggacatgatccgcctgggggacctcaacgaggcgggcatcttgcgcaacctgcttatccgctaccgggaccacctcatctacacgtatacgggctccatcctggtggctgtgaacccctaccagctgctctccatctactcgccagagcacatccgccagtataccaacaagaagattggggagatgcccccccacatctttgccattgctgacaactgctacttcaacatgaaacgcaacagccgagaccagtgctgcatcatcagtggggaatctggggccgggaagacggagagcacaaagctgatcctgcagttcctggcagccatcagtgggcagcactcgtggattgagcagcaggtcttggaggccacccccattctggaagcatttgggaatgccaagaccatccgcaatgacaactcaagccgtttcggaaagtacatcgacatccacttcaacaagcggggcgccatcgagggcgcgaagattgagcagtacctgctggaaaagtcacgtgtctgtcgccaggccctggatgaaaggaactaccacgtgttctactgcatgctggagggtatgagtgaggatcagaagaagaagctgggcttgggccaggcctctgactacaactacttggccatggtgaaccccccagacctgatgagctgcctgactagccgcaccctcatcacccgcggggagacggtgtccaccccactgagcagggaacaggcactggacgtgcgcgacgccttcgtaaaggggatctacgggcggctgttcgtgtggattgtggacaagatcaacgcagcaatttacaagcctccctcccaggatgtgaagaactctcgcaggtccatcggcctcctggacatctttgggtttgagaactttgctgtgaacagctttgagcagctctgcatcaacttcgccaatgagcacctgcagcagttctttgtgcggcacgtgttcaagctggagcaggaggaatatgacctggagagcattgactggctgcacatcgagttcactgacaaccaggatgccctggacatgattgccaacaagcccatgaacatcatctccctcatcgatgaggagagcaagttccccaagttcctggagaagaaccgagacaccctgcatggggacattatccagctggtccactcctccaggaacaagttcatcaagcagatcttccaggccgatgtcgccatgggcgccgagaccaggaagcgctcgcccacacttagcagccagttcaagcggtcactggagctgctgatgcgcacgctgggtgcctgccagcccttctttgtgcgatgcatcaagcccaatgagttcaagaagcccatgctgttcgaccggcacctgtgcgtgcgccagctgcggtactcaggaatgatggagaccatccgaatccgccgagctggctaccccatccgctacagcttcgtagagtttgtggagcggtaccgtgtgctgctgccaggtgtgaagccggcctacaagcagggcgacctccgcgggacttgccagcgcatggctgaggctgtgctgggcacccacgatgactggcagataggcaaaaccaagatctttctgaaggaccaccatgacatgctgctggaagtggagcgggacaaagccatcaccgacagagtcatcctccttcagaaagtcatccggggattcaaagacaggtctaactttctgaagctgaagaacgctgccacactgatccagaggcactggcggggtcacaactgtaggaagaactacgggctgatgcgtctgggcttcctgcggctgcaggccctgcaccgctcccggaagctgcaccagcagtaccgcctggcccgccagcgcatcatccagttccaggcccgctgccgcgcctatctggtgcgcaaggccttccgccaccgcctctgggctgtgctcaccgtgcaggcctatgcccggggcatgatcgcccgcaggctgcaccaacgcctcagggctgagtatctgtggcgcctcgaggctgagaaaatgcggctggcggaggaagagaagcttcggaaggagatgagcgccaagaaggccaaggaggaggccgagcgcaagcatcaggagcgcctggcccagctggctcgtgaggacgctgagcgggagctgaaggagaaggaggccgctcggcggaagaaggagctcctggagcagatggaaagggcccgccatgagcctgtcaatcactcagacatggtggacaagatgtttggcttcctggggacttcaggtggcctgccaggccaggagggccaggcacctagtggctttgaggacctggagcgagggcggagggagatggtggaggaggacctggatgcagccctgcccctgcctgacgaggatgaggaggacctctctgagtataaatttgccaagttcgcggccacctacttccaggggacaaccacgcactcctacacccggcggccactcaaacagccactgctctaccatgacgacgagggtgaccagctggcagccctggcggtctggatcaccatcctccgcttcatgggggacctccctgagcccaagtaccacacagccatgagtgatggcagtgagaagatccctgtgatgaccaagatttatgagaccctgggcaagaagacgtacaagagggagctgcaggccctgcagggcgagggcgaggcccagctccccgagggccagaagaagagcagtgtgaggcacaagctggtgcatttgactctgaaaaagaagtccaagctcacagaggaggtgaccaagaggctgcatgacggggagtccacagtgcagggcaacagcatgctggaggaccggcccacctccaacctggagaagctgcacttcatcatcggcaatggcatcctgcggccagcactccgggacgagatctactgccagatcagcaagcagctgacccacaacccctccaagagcagctatgcccggggctggattctcgtgtctctctgcgtgggctgtttcgccccctccgagaagtttgtcaagtacctgcggaacttcatccacgggggcccgcccggctacgccccgtactgtgaggagcgcctgagaaggacctttgtcaatgggacacggacacagccgcccagctggctggagctgcaggccaccaagtccaagaagccaatcatgttgcccgtgacattcatggatgggaccaccaagaccctgctgacggactcggcaaccacggccaaggagctctgcaacgcgctggccgacaagatctctctcaaggaccggttcgggttctccctctacattgccctgtttgacaaggtgtcctccctgggcagcggcagtgaccacgtcatggacgccatctcccagtgcgagcagtacgccaaggagcagggcgcccaggagcgcaacgccccctggaggctcttcttccgcaaagaggtcttcacgccctggcacagcccctccgaggacaacgtggccaccaacctcatctaccagcaggtggtgcgaggagtcaagtttggggagtacaggtgtgagaaggaggacgacctggctgagctggcctcccagcagtactttgtagactatggctctgagatgatcctggagcgcctcctgaacctcgtgcccacctacatccccgaccgcgagatcacgcccctgaagacgctggagaagtgggcccagctggccatcgccgcccacaagaaggggatttatgcccagaggagaactgatgcccagaaggtcaaagaggatgtggtcagttatgcccgcttcaagtggcccttgctcttctccaggttttatgaagcctacaaattctcaggccccagtctccccaagaacgacgtcatcgtggccgtcaactggacgggtgtgtactttgtggatgagcaggagcaggtacttctggagctgtccttcccagagatcatggccgtgtccagcagcagggagtgccgtgtctggctctcactgggctgctctgatcttggctgtgctgcgcctcactcaggctgggcaggactgaccccggcggggccctgttctccgtgttggtcctgcaggggagcgaaaacgacggcccccagcttcacgctggccaccatcaagggggacgaatacaccttcacctccagcaatgctgaggacattcgtgacctggtggtcaccttcctagaggggctccggaagagatctaagtatgttgtggccctgcaggataaccccaaccccgcaggcgaggagtcaggcttcctcagctttgccaagggagacctcatcatcctggaccatgacacgggcgagcaggtcatgaactcgggctgggccaacggcatcaatgagaggaccaagcagcgtggggacttccccaccgacagtgtgtacgtcatgcccactgtcaccatgccaccgcgggagattgtggccctggtcaccatgactcccgatcagaggcaggacgttgtccggctcttgcagctgcgaacggcggagcccgaggtgcgtgccaagccctacacgctggaggagttttcctatgactacttcaggcccccacccaagcacacgctgagccgtgtcatggtgtccaaggcccgaggcaaggaccggctgtggagccacacgcgggaaccgctcaagcaggcgctgctcaagaagctcctgggcagtgaggagctctcgcaggaggcctgcctggccttcattgctgtgctcaagtacatgggcgactacccgtccaagaggacacgctccgtcaacgagctcaccgaccagatctttgagggtcccctgaaagccgagcccctgaaggacgaggcatatgtgcagatcctgaagcagctgaccgacaaccacatcaggtacagcgaggagcggggttgggagctgctctggctgtgcacgggccttttcccacccagcaacatcctcctgccccacgtgcagcgcttcctgcagtcccgaaagcactgcccactcgccatcgactgcctgcaacggctccagaaagccctgagaaacgggtcccggaagtaccctccgcacctggtggaggtggaggccatccagcacaagaccacccagattttccacaaagtctacttccctgatgacactgacgaggccttcgaagtggagtccagcaccaaggccaaggacttctgccagaacatcgccaccaggctgctcctcaagtcctcagagggattcagcctctttgtcaaaattgcagacaaggtcctcagcgttcctgagaatgacttcttctttgactttgttcgacacttgacagactggataaagaaagctcggcccatcaaggacggaattgtgccctcactcacctaccaggtgttcttcatgaagaagctgtggaccaccacggtgccagggaaggatcccatggccgattccatcttccactattaccaggagttgcccaagtatctccgaggctaccacaagtgcacgcgggaggaggtgctgcagctgggggcgctgatctacagggtcaagttcgaggaggacaagtcctacttccccagcatccccaagctgctgcgggagctggtgccccaggaccttatccggcaggtctcacctgatgactggaagcggtccatcgtcgcctacttcaacaagcacgcagggaagtccaaggaggaggccaagctggccttcctgaagctcatcttcaagtggcccacctttggctcagccttcttcgaggtgaagcaaactacggagccaaacttccctgagatcctcctaattgccatcaacaagtatggggtcagcctcatcgatcccaaaacgaaggatatcctcaccactcatcccttcaccaagatctccaactggagcagcggcaacacctacttccacatcaccattgggaacttggtgcgcgggagcaaactgctctgcgagacgtcactgggctacaagatggatgacctcctgacttcctacattagccagatgctcacagccatgagcaaacagcggggctccaggagcggcaagtgaacagtcacggggaggtgctggttccatgcctgctctcgaggcagcagtgggttcaggcccatcagctacccctgcagctggggaagacttatgccatcccggcagcgaggctgggctggccagccaccactgactataccaactgggcctctgatgttcttccagtgaggcatctctctgggatgcagaacttccctccatccacccctctggcacctgggttggtctaatcctagtttgctgtggccttcccggttg

SEQ ID NO: 19206 - DNA, 6813 bp, Homo sapiens
  source 1..6813: mol_type = unassigned DNA
gcactgctccagaagggggaccatgtgtggatggacctgagattggggcaggagttcgacgtgcccatcggggcggtggtgaagctctgcgactctgggcaggtccaggtggtggatgatgaagacaatgaacactggatctctccgcagaacgcaacgcacatcaagcctatgcaccccacgtcggtccacggcgtggaggacatgatccgcctgggggacctcaacgaggcgggcatcttgcgcaacctgcttatccgctaccgggaccacctcatctacacgtatacgggctccatcctggtggctgtgaacccctaccagctgctctccatctactcgccagagcacatccgccagtataccaacaagaagattggggagatgcccccccacatctttgccattgctgacaactgctacttcaacatgaaacgcaacagccgagaccagtgctgcatcatcagtggggaatctggggccgggaagacggagagcacaaagctgatcctgcagttcctggcagccatcagtgggcagcactcgtggattgagcagcaggtcttggaggccacccccattctggaagcatttgggaatgccaagaccatccgcaatgacaactcaagccgtttcggaaagtacatcgacatccacttcaacaagcggggcgccatcgagggcgcgaagattgagcagtacctgctggaaaagtcacgtgtctgtcgccaggccctggatgaaaggaactaccacgtgttctactgcatgctggagggtatgagtgaggatcagaagaagaagctgggcttgggccaggcctctgactacaactacttggccatgggtaactgcataacctgtgagggccgggtggacagccaggagtacgccaacatccgctccgccatgaaggtgctcatgttcactgacaccgagaactgggagatctcgaagctcctggctgccatcctgcacctgggcaacctgcagtatgaggcacgcacatttgaaaacctggatgcctgtgaggttctcttctccccatcgctggccacagctgcatccctgcttgaggtgaaccccccagacctgatgagctgcctgactagccgcaccctcatcacccgcggggagacggtgtccaccccactgagcagggaacaggcactggacgtgcgcgacgccttcgtaaaggggatctacgggcggctgttcgtgtggattgtggacaagatcaacgcagcaatttacaagcctccctcccaggatgtgaagaactctcgcaggtccatcggcctcctggacatctttgggtttgagaactttgctgtgaacagctttgagcagctctgcatcaacttcgccaatgagcacctgcagcagttctttgtgcggcacgtgttcaagctggagcaggaggaatatgacctggagagcattgactggctgcacatcgagttcactgacaaccaggatgccctggacatgattgccaacaagcccatgaacatcatctccctcatcgatgaggagagcaagttccccaagggcacagacaccaccatgttacacaagctgaactcccagcacaagctcaacgccaactacatcccccccaagaacaaccatgagacccagtttggcatcaaccattttgcaggcatcgtctactatgagacccaaggcttcctggagaagaaccgagacaccctgcatggggacattatccagctggtccactcctccaggaacaagttcatcaagcagatcttccaggccgatgtcgccatgggcgccgagaccaggaagcgctcgcccacacttagcagccagttcaagcggtcactggagctgctgatgcgcacgctgggtgcctgccagcccttctttgtgcgatgcatcaagcccaatgagttcaagaagcccatgctgttcgaccggcacctgtgcgtgcgccagctgcggtactcaggaatgatggagaccatccgaatccgccgagctggctaccccatccgctacagcttcgtagagtttgtggagcggtaccgtgtgctgctgccaggtgtgaagccggcctacaagcagggcgacctccgcgggacttgccagcgcatggctgaggctgtgctgggcacccacgatgactggcagataggcaaaaccaagatctttctgaaggaccaccatgacatgctgctggaagtggagcgggacaaagccatcaccgacagagtcatcctccttcagaaagtcatccggggattcaaagacaggtctaactttctgaagctgaagaacgctgccacactgatccagaggcactggcggggtcacaactgtaggaagaactacgggctgatgcgtctgggcttcctgcggctgcaggccctgcaccgctcccggaagctgcaccagcagtaccgcctggcccgccagcgcatcatccagttccaggcccgctgccgcgcctatctggtgcgcaaggccttccgccaccgcctctgggctgtgctcaccgtgcaggcctatgcccggggcatgatcgcccgcaggctgcaccaacgcctcagggctgagtatctgtggcgcctcgaggctgagaaaatgcggctggcggaggaagagaagcttcggaaggagatgagcgccaagaaggccaaggaggaggccgagcgcaagcatcaggagcgcctggcccagctggctcgtgaggacgctgagcgggagctgaaggagaaggaggccgctcggcggaagaaggagctcctggagcagatggaaagggcccgccatgagcctgtcaatcactcagacatggtggacaagatgtttggcttcctggggacttcaggtggcctgccaggccaggagggccaggcacctagtggctttgaggacctggagcgagggcggagggagatggtggaggaggacctggatgcagccctgcccctgcctgacgaggatgaggaggacctctctgagtataaatttgccaagttcgcggccacctacttccaggggacaaccacgcactcctacacccggcggccactcaaacagccactgctctaccatgacgacgagggtgaccagctggcagccctggcggtctggatcaccatcctccgcttcatgggggacctccctgagcccaagtaccacacagccatgagtgatggcagtgagaagatccctgtgatgaccaagatttatgagaccctgggcaagaagacgtacaagagggagctgcaggccctgcagggcgagggcgaggtgaccaagaggctgcatgacggggagtccacagtgcagggcaacagcatgctggaggaccggcccacctccaacctggagaagctgcacttcatcatcggcaatggcatcctgcggccagcactccgggacgagatctactgccagatcagcaagcagctgacccacaacccctccaagagcagctatgcccggggctggattctcgtgtctctctgcgtgggctgtttcgccccctccgagaagtttgtcaagtacctgcggaacttcatccacgggggcccgcccggctacgccccgtactgtgaggagcgcctgagaaggacctttgtcaatgggacacggacacagccgcccagctggctggagctgcaggccaccaagtccaagaagccaatcatgttgcccgtgacattcatggatgggaccaccaagaccctgctgacggactcggcaaccacggccaaggagctctgcaacgcgctggccgacaagatctctctcaaggaccggttcgggttctccctctacattgccctgtttgacaaggtgtcctccctgggcagcggcagtgaccacgtcatggacgccatctcccagtgcgagcagtacgccaaggagcagggcgcccaggagcgcaacgccccctggaggctcttcttccgcaaagaggtcttcacgccctggcacagcccctccgaggacaacgtggccaccaacctcatctaccagcaggtggtgcgaggagtcaagtttggggagtacaggtgtgagaaggaggacgacctggctgagctggcctcccagcagtactttgtagactatggctctgagatgatcctggagcgcctcctgaacctcgtgcccacctacatccccgaccgcgagatcacgcccctgaagacgctggagaagtgggcccagctggccatcgccgcccacaagaaggggatttatgcccagaggagaactgatgcccagaaggtcaaagaggatgtggtcagttatgcccgcttcaagtggcccttgctcttctccaggttttatgaagcctacaaattctcaggccccagtctccccaagaacgacgtcatcgtggccgtcaactggacgggtgtgtactttgtggatgagcaggagcaggtacttctggagctgtccttcccagagatcatggccgtgtccagcagcagggagtgccgtgtctggctctcactgggctgctctgatcttggctgtgctgcgcctcactcaggctgggcaggactgaccccggcggggccctgttctccgtgttggtcctgcaggggagcgaaaacgacggcccccagcttcacgctggccaccatcaagggggacgaatacaccttcacctccagcaatgctgaggacattcgtgacctggtggtcaccttcctagaggggctccggaagagatctaagtatgttgtggccctgcaggataaccccaaccccgcaggcgaggagtcaggcttcctcagctttgccaagggagacctcatcatcctggaccatgacacgggcgagcaggtcatgaactcgggctgggccaacggcatcaatgagaggaccaagcagcgtggggacttccccaccgacagtgtgtacgtcatgcccactgtcaccatgccaccgcgggagattgtggccctggtcaccatgactcccgatcagaggcaggacgttgtccggctcttgcagctgcgaacggcggagcccgaggtgcgtgccaagccctacacgctggaggagttttcctatgactacttcaggcccccacccaagcacacgctgagccgtgtcatggtgtccaaggcccgaggcaaggaccggctgtggagccacacgcgggaaccgctcaagcaggcgctgctcaagaagctcctgggcagtgaggagctctcgcaggaggcctgcctggccttcattgctgtgctcaagtacatgggcgactacccgtccaagaggacacgctccgtcaacgagctcaccgaccagatctttgagggtcccctgaaagccgagcccctgaaggacgaggcatatgtgcagatcctgaagcagctgaccgacaaccacatcaggtacagcgaggagcggggttgggagctgctctggctgtgcacgggccttttcccacccagcaacatcctcctgccccacgtgcagcgcttcctgcagtcccgaaagcactgcccactcgccatcgactgcctgcaacggctccagaaagccctgagaaacgggtcccggaagtaccctccgcacctggtggaggtggaggccatccagcacaagaccacccagattttccacaaagtctacttccctgatgacactgacgaggccttcgaagtggagtccagcaccaaggccaaggacttctgccagaacatcgccaccaggctgctcctcaagtcctcagagggattcagcctctttgtcaaaattgcagacaaggtcctcagcgttcctgagaatgacttcttctttgactttgttcgacacttgacagactggataaagaaagctcggcccatcaaggacggaattgtgccctcactcacctaccaggtgttcttcatgaagaagctgtggaccaccacggtgccagggaaggatcccatggccgattccatcttccactattaccaggagttgcccaagtatctccgaggctaccacaagtgcacgcgggaggaggtgctgcagctgggggcgctgatctacagggtcaagttcgaggaggacaagtcctacttccccagcatccccaagctgctgcgggagctggtgccccaggaccttatccggcaggtctcacctgatgactggaagcggtccatcgtcgcctacttcaacaagcacgcagggaagtccaaggaggaggccaagctggccttcctgaagctcatcttcaagtggcccacctttggctcagccttcttcgaggtgaagcaaactacggagccaaacttccctgagatcctcctaattgccatcaacaagtatggggtcagcctcatcgatcccaaaacgaaggatatcctcaccactcatcccttcaccaagatctccaactggagcagcggcaacacctacttccacatcaccattgggaacttggtgcgcgggagcaaactgctctgcgagacgtcactgggctacaagatggatgacctcctgacttcctacattagccagatgctcacagccatgagcaaacagcggggctccaggagcggcaagtgaacagtcacggggaggtgctggttccatgcctgctctcgaggcagcagtgggttcaggcccatcagctacccctgcagctggggaagacttatgccatcccggcagcgaggctgggctggccagccaccactgactataccaactgggcctctgatgttcttccagtgaggcatctctctgggatgcagaacttccctccatccacccctctggcacctgggttggtctaatcctagtttgctgtggccttcccggttg

SEQ ID NO: 19207 - DNA, 3609 bp, Homo sapiens
  source 1..3609: mol_type = unassigned DNA
gcactgctccagaagggggaccatgtgtggatggacctgagattggggcaggagttcgacgtgcccatcggggcggtggtgaagctctgcgactctgggcaggtccaggtggtggatgatgaagacaatgaacactggatctctccgcagaacgcaacgcacatcaagcctatgcaccccacgtcggtccacggcgtggaggacatgatccgcctgggggacctcaacgaggcgggcatcttgcgcaacctgcttatccgctaccgggaccacctcatctacacgtatacgggctccatcctggtggctgtgaacccctaccagctgctctccatctactcgccagagcacatccgccagtataccaacaagaagattggggagatgcccccccacatctttgccattgctgacaactgctacttcaacatgaaacgcaacagccgagaccagtgctgcatcatcagtggggaatctggggccgggaagacggagagcacaaagctgatcctgcagttcctggcagccatcagtgggcagcactcgtggattgagcagcaggtcttggaggccacccccattctggaagcatttgggaatgccaagaccatccgcaatgacaactcaagccgtttcggaaagtacatcgacatccacttcaacaagcggggcgccatcgagggcgcgaagattgagcagtacctgctggaaaagtcacgtgtctgtcgccaggccctggatgaaaggaactaccacgtgttctactgcatgctggagggtatgagtgaggatcagaagaagaagctgggcttgggccaggcctctgactacaactacttggccatgggtaactgcataacctgtgagggccgggtggacagccaggagtacgccaacatccgctccgccatgaaggtgctcatgttcactgacaccgagaactgggagatctcgaagctcctggctgccatcctgcacctgggcaacctgcagtatgaggcacgcacatttgaaaacctggatgcctgtgaggttctcttctccccatcgctggccacagctgcatccctgcttgaggtgaaccccccagacctgatgagctgcctgactagccgcaccctcatcacccgcggggagacggtgtccaccccactgagcagggaacaggcactggacgtgcgcgacgccttcgtaaaggggatctacgggcggctgttcgtgtggattgtggacaagatcaacgcagcaatttacaagcctccctcccaggatgtgaagaactctcgcaggtccatcggcctcctggacatctttgggtttgagaactttgctgtgaacagctttgagcagctctgcatcaacttcgccaatgagcacctgcagcagttctttgtgcggcacgtgttcaagctggagcaggaggaatatgacctggagagcattgactggctgcacatcgagttcactgacaaccaggatgccctggacatgattgccaacaagcccatgaacatcatctccctcatcgatgaggagagcaagttccccaagggcacagacaccaccatgttacacaagctgaactcccagcacaagctcaacgccaactacatcccccccaagaacaaccatgagacccagtttggcatcaaccattttgcaggcatcgtctactatgagacccaaggcttcctggagaagaaccgagacaccctgcatggggacattatccagctggtccactcctccaggaacaagttcatcaagcagatcttccaggccgatgtcgccatgggcgccgagaccaggaagcgctcgcccacacttagcagccagttcaagcggtcactggagctgctgatgcgcacgctgggtgcctgccagcccttctttgtgcgatgcatcaagcccaatgagttcaagaagcccatgctgttcgaccggcacctgtgcgtgcgccagctgcggtactcaggaatgatggagaccatccgaatccgccgagctggctaccccatccgctacagcttcgtagagtttgtggagcggtaccgtgtgctgctgccaggtgtgaagccggcctacaagcagggcgacctccgcgggacttgccagcgcatggctgaggctgtgctgggcacccacgatgactggcagataggcaaaaccaagatctttctgaaggaccaccatgacatgctgctggaagtggagcgggacaaagccatcaccgacagagtcatcctccttcagaaagtcatccggggattcaaagacaggtctaactttctgaagctgaagaacgctgccacactgatccagaggcactggcggggtcacaactgtaggaagaactacgggctgatgcgtctgggcttcctgcggctgcaggccctgcaccgctcccggaagctgcaccagcagtaccgcctggcccgccagcgcatcatccagttccaggcccgctgccgcgcctatctggtgcgcaaggccttccgccaccgcctctgggctgtgctcaccgtgcaggcctatgcccggggcatgatcgcccgcaggctgcaccaacgcctcagggctgagtatctgtggcgcctcgaggctgagaaaatgcggctggcggaggaagagaagcttcggaaggagatgagcgccaagaaggccaaggaggaggccgagcgcaagcatcaggagcgcctggcccagctggctcgtgaggacgctgagcgggagctgaaggagaaggaggccgctcggcggaagaaggagctcctggagcagatggaaagggcccgccatgagcctgtcaatcactcagacatggtggacaagatgtttggcttcctggggacttcaggtggcctgccaggccaggagggccaggcacctagtggctttgaggacctggagcgagggcggagggagatggtggaggaggacctggatgcagccctgcccctgcctgacgaggatgaggaggacctctctgagtataaatttgccaagttcgcggccacctacttccaggggacaaccacgcactcctacacccggcggccactcaaacagccactgctctaccatgacgacgagggtgaccagctggcagccctggcggtctggatcaccatcctccgcttcatgggggacctccctgagcccaagtaccacacagccatgagtgatggcagtgagaagatccctgtgatgaccaagatttatgagaccctgggcaagaagacgtacaagagggagctgcaggccctgcagggcgagggcgaggtcctgcaggcccagctccccgagggccagaagaagagcagtgtgaggcacaagctggtgcatttgactctgaaaaagaagtccaagctcacagaggaggtgaccaagaggctgcatgacggggagtccacagtgcagggcaacagcatgctggaggaccggcccacctccaacctggagaagctgcacttcatcatcggcaatggcatcctgcggccagcactccggtcagtgccgcctgaaagtcttttggtggctgagtggtgcctctgtcaacctagcaagagattaagccaagcacctgggtttggcttcgctgctagctag

SEQ ID NO: 19208 - DNA, 6903 bp, Homo sapiens
  source 1..6903: mol_type = unassigned DNA
gcactgctccagaagggggaccatgtgtggatggacctgagattggggcaggagttcgacgtgcccatcggggcggtggtgaagctctgcgactctgggcaggtccaggtggtggatgatgaagacaatgaacactggatctctccgcagaacgcaacgcacatcaagcctatgcaccccacgtcggtccacggcgtggaggacatgatccgcctgggggacctcaacgaggcgggcatcttgcgcaacctgcttatccgctaccgggaccacctcatctacacgtatacgggctccatcctggtggctgtgaacccctaccagctgctctccatctactcgccagagcacatccgccagtataccaacaagaagattggggagatgcccccccacatctttgccattgctgacaactgctacttcaacatgaaacgcaacagccgagaccagtgctgcatcatcagtggggaatctggggccgggaagacggagagcacaaagctgatcctgcagttcctggcagccatcagtgggcagcactcgtggattgagcagcaggtcttggaggccacccccattctggaagcatttgggaatgccaagaccatccgcaatgacaactcaagccgtttcggaaagtacatcgacatccacttcaacaagcggggcgccatcgagggcgcgaagattgagcagtacctgctggaaaagtcacgtgtctgtcgccaggccctggatgaaaggaactaccacgtgttctactgcatgctggagggtatgagtgaggatcagaagaagaagctgggcttgggccaggcctctgactacaactacttggccatgggtaactgcataacctgtgagggccgggtggacagccaggagtacgccaacatccgctccgccatgaaggtgctcatgttcactgacaccgagaactgggagatctcgaagctcctggctgccatcctgcacctgggcaacctgcagtatgaggcacgcacatttgaaaacctggatgcctgtgaggttctcttctccccatcgctggccacagctgcatccctgcttgaggtgaaccccccagacctgatgagctgcctgactagccgcaccctcatcacccgcggggagacggtgtccaccccactgagcagggaacaggcactggacgtgcgcgacgccttcgtaaaggggatctacgggcggctgttcgtgtggattgtggacaagatcaacgcagcaatttacaagcctccctcccaggatgtgaagaactctcgcaggtccatcggcctcctggacatctttgggtttgagaactttgctgtgaacagctttgagcagctctgcatcaacttcgccaatgagcacctgcagcagttctttgtgcggcacgtgttcaagctggagcaggaggaatatgacctggagagcattgactggctgcacatcgagttcactgacaaccaggatgccctggacatgattgccaacaagcccatgaacatcatctccctcatcgatgaggagagcaagttccccaagggcacagacaccaccatgttacacaagctgaactcccagcacaagctcaacgccaactacatcccccccaagaacaaccatgagacccagtttggcatcaaccattttgcaggcatcgtctactatgagacccaaggcttcctggagaagaaccgagacaccctgcatggggacattatccagctggtccactcctccaggaacaagttcatcaagcagatcttccaggccgatgtcgccatgggcgccgagaccaggaagcgctcgcccacacttagcagccagttcaagcggtcactggagctgctgatgcgcacgctgggtgcctgccagcccttctttgtgcgatgcatcaagcccaatgagttcaagaagcccatgctgttcgaccggcacctgtgcgtgcgccagctgcggtactcaggaatgatggagaccatccgaatccgccgagctggctaccccatccgctacagcttcgtagagtttgtggagcggtaccgtgtgctgctgccaggtgtgaagccggcctacaagcagggcgacctccgcgggacttgccagcgcatggctgaggctgtgctgggcacccacgatgactggcagataggcaaaaccaagatctttctgaaggaccaccatgacatgctgctggaagtggagcgggacaaagccatcaccgacagagtcatcctccttcagaaagtcatccggggattcaaagacaggtctaactttctgaagctgaagaacgctgccacactgatccagaggcactggcggggtcacaactgtaggaagaactacgggctgatgcgtctgggcttcctgcggctgcaggccctgcaccgctcccggaagctgcaccagcagtaccgcctggcccgccagcgcatcatccagttccaggcccgctgccgcgcctatctggtgcgcaaggccttccgccaccgcctctgggctgtgctcaccgtgcaggcctatgcccggggcatgatcgcccgcaggctgcaccaacgcctcagggctgagtatctgtggcgcctcgaggctgagaaaatgcggctggcggaggaagagaagcttcggaaggagatgagcgccaagaaggccaaggaggaggccgagcgcaagcatcaggagcgcctggcccagctggctcgtgaggacgctgagcgggagctgaaggagaaggaggccgctcggcggaagaaggagctcctggagcagatggaaagggcccgccatgagcctgtcaatcactcagacatggtggacaagatgtttggcttcctggggacttcaggtggcctgccaggccaggagggccaggcacctagtggctttgaggacctggagcgagggcggagggagatggtggaggaggacctggatgcagccctgcccctgcctgacgaggatgaggaggacctctctgagtataaatttgccaagttcgcggccacctacttccaggggacaaccacgcactcctacacccggcggccactcaaacagccactgctctaccatgacgacgagggtgaccagctggcagccctggcggtctggatcaccatcctccgcttcatgggggacctccctgagcccaagtaccacacagccatgagtgatggcagtgagaagatccctgtgatgaccaagatttatgagaccctgggcaagaagacgtacaagagggagctgcaggccctgcagggcgagggcgaggcccagctccccgagggccagaagaagagcagtgtgaggcacaagctggtgcatttgactctgaaaaagaagtccaagctcacagaggaggtgaccaagaggctgcatgacggggagtccacagtgcagggcaacagcatgctggaggaccggcccacctccaacctggagaagctgcacttcatcatcggcaatggcatcctgcggccagcactccgggacgagatctactgccagatcagcaagcagctgacccacaacccctccaagagcagctatgcccggggctggattctcgtgtctctctgcgtgggctgtttcgccccctccgagaagtttgtcaagtacctgcggaacttcatccacgggggcccgcccggctacgccccgtactgtgaggagcgcctgagaaggacctttgtcaatgggacacggacacagccgcccagctggctggagctgcaggccaccaagtccaagaagccaatcatgttgcccgtgacattcatggatgggaccaccaagaccctgctgacggactcggcaaccacggccaaggagctctgcaacgcgctggccgacaagatctctctcaaggaccggttcgggttctccctctacattgccctgtttgacaaggtgtcctccctgggcagcggcagtgaccacgtcatggacgccatctcccagtgcgagcagtacgccaaggagcagggcgcccaggagcgcaacgccccctggaggctcttcttccgcaaagaggtcttcacgccctggcacagcccctccgaggacaacgtggccaccaacctcatctaccagcaggtggtgcgaggagtcaagtttggggagtacaggtgtgagaaggaggacgacctggctgagctggcctcccagcagtactttgtagactatggctctgagatgatcctggagcgcctcctgaacctcgtgcccacctacatccccgaccgcgagatcacgcccctgaagacgctggagaagtgggcccagctggccatcgccgcccacaagaaggggatttatgcccagaggagaactgatgcccagaaggtcaaagaggatgtggtcagttatgcccgcttcaagtggcccttgctcttctccaggttttatgaagcctacaaattctcaggccccagtctccccaagaacgacgtcatcgtggccgtcaactggacgggtgtgtactttgtggatgagcaggagcaggtacttctggagctgtccttcccagagatcatggccgtgtccagcagcagggagtgccgtgtctggctctcactgggctgctctgatcttggctgtgctgcgcctcactcaggctgggcaggactgaccccggcggggccctgttctccgtgttggtcctgcaggggagcgaaaacgacggcccccagcttcacgctggccaccatcaagggggacgaatacaccttcacctccagcaatgctgaggacattcgtgacctggtggtcaccttcctagaggggctccggaagagatctaagtatgttgtggccctgcaggataaccccaaccccgcaggcgaggagtcaggcttcctcagctttgccaagggagacctcatcatcctggaccatgacacgggcgagcaggtcatgaactcgggctgggccaacggcatcaatgagaggaccaagcagcgtggggacttccccaccgacagtgtgtacgtcatgcccactgtcaccatgccaccgcgggagattgtggccctggtcaccatgactcccgatcagaggcaggacgttgtccggctcttgcagctgcgaacggcggagcccgaggtgcgtgccaagccctacacgctggaggagttttcctatgactacttcaggcccccacccaagcacacgctgagccgtgtcatggtgtccaaggcccgaggcaaggaccggctgtggagccacacgcgggaaccgctcaagcaggcgctgctcaagaagctcctgggcagtgaggagctctcgcaggaggcctgcctggccttcattgctgtgctcaagtacatgggcgactacccgtccaagaggacacgctccgtcaacgagctcaccgaccagatctttgagggtcccctgaaagccgagcccctgaaggacgaggcatatgtgcagatcctgaagcagctgaccgacaaccacatcaggtacagcgaggagcggggttgggagctgctctggctgtgcacgggccttttcccacccagcaacatcctcctgccccacgtgcagcgcttcctgcagtcccgaaagcactgcccactcgccatcgactgcctgcaacggctccagaaagccctgagaaacgggtcccggaagtaccctccgcacctggtggaggtggaggccatccagcacaagaccacccagattttccacaaagtctacttccctgatgacactgacgaggccttcgaagtggagtccagcaccaaggccaaggacttctgccagaacatcgccaccaggctgctcctcaagtcctcagagggattcagcctctttgtcaaaattgcagacaaggtcctcagcgttcctgagaatgacttcttctttgactttgttcgacacttgacagactggataaagaaagctcggcccatcaaggacggaattgtgccctcactcacctaccaggtgttcttcatgaagaagctgtggaccaccacggtgccagggaaggatcccatggccgattccatcttccactattaccaggagttgcccaagtatctccgaggctaccacaagtgcacgcgggaggaggtgctgcagctgggggcgctgatctacagggtcaagttcgaggaggacaagtcctacttccccagcatccccaagctgctgcgggagctggtgccccaggaccttatccggcaggtctcacctgatgactggaagcggtccatcgtcgcctacttcaacaagcacgcagggaagtccaaggaggaggccaagctggccttcctgaagctcatcttcaagtggcccacctttggctcagccttcttcgaggtgaagcaaactacggagccaaacttccctgagatcctcctaattgccatcaacaagtatggggtcagcctcatcgatcccaaaacgaaggatatcctcaccactcatcccttcaccaagatctccaactggagcagcggcaacacctacttccacatcaccattgggaacttggtgcgcgggagcaaactgctctgcgagacgtcactgggctacaagatggatgacctcctgacttcctacattagccagatgctcacagccatgagcaaacagcggggctccaggagcggcaagtgaacagtcacggggaggtgctggttccatgcctgctctcgaggcagcagtgggttcaggcccatcagctacccctgcagctggggaagacttatgccatcccggcagcgaggctgggctggccagccaccactgactataccaactgggcctctgatgttcttccagtgaggcatctctctgggatgcagaacttccctccatccacccctctggcacctgggttggtctaatcctagtttgctgtggccttcccggttg

SEQ ID NO: 19209 - DNA, 7462 bp, Homo sapiens
  source 1..7462: mol_type = unassigned DNA
gctctgggcaggagagagagggagagacaagagacacacacagagagacggcgaggaagggaaagacccagagggacgcctagaacgagacttggagccagacagaggaagaggggacgtgtgtttgcagactggctgggcccgtgacccagcttcctgagtcctccgtgcaggtggcagctgtaccaggctggcaggtcactgagagtgggcagctgggccccagaactgtgcctggcccagtgggcagcaggagctcctgacttgggaccatggtgattcttcagcagggggaccatgtgtggatggacctgagattggggcaggagttcgacgtgcccatcggggcggtggtgaagctctgcgactctgggcaggtccaggtggtggatgatgaagacaatgaacactggatctctccgcagaacgcaacgcacatcaagcctatgcaccccacgtcggtccacggcgtggaggacatgatccgcctgggggacctcaacgaggcgggcatcttgcgcaacctgcttatccgctaccgggaccacctcatctacacgtatacgggctccatcctggtggctgtgaacccctaccagctgctctccatctactcgccagagcacatccgccagtataccaacaagaagattggggagatgcccccccacatctttgccattgctgacaactgctacttcaacatgaaacgcaacagccgagaccagtgctgcatcatcagtggggaatctggggccgggaagacggagagcacaaagctgatcctgcagttcctggcagccatcagtgggcagcactcgtggattgagcagcaggtcttggaggccacccccattctggaagcatttgggaatgccaagaccatccgcaatgacaactcaagccgtttcggaaagtacatcgacatccacttcaacaagcggggcgccatcgagggcgcgaagattgagcagtacctgctggaaaagtcacgtgtctgtcgccaggccctggatgaaaggaactaccacgtgttctactgcatgctggagggtatgagtgaggatcagaagaagaagctgggcttgggccaggcctctgactacaactacttggccatgggtaactgcataacctgtgagggccgggtggacagccaggagtacgccaacatccgctccgccatgaaggtgctcatgttcactgacaccgagaactgggagatctcgaagctcctggctgccatcctgcacctgggcaacctgcagtatgaggcacgcacatttgaaaacctggatgcctgtgaggttctcttctccccatcgctggccacagctgcatccctgcttgaggtgaaccccccagacctgatgagctgcctgactagccgcaccctcatcacccgcggggagacggtgtccaccccactgagcagggaacaggcactggacgtgcgcgacgccttcgtaaaggggatctacgggcggctgttcgtgtggattgtggacaagatcaacgcagcaatttacaagcctccctcccaggatgtgaagaactctcgcaggtccatcggcctcctggacatctttgggtttgagaactttgctgtgaacagctttgagcagctctgcatcaacttcgccaatgagcacctgcagcagttctttgtgcggcacgtgttcaagctggagcaggaggaatatgacctggagagcattgactggctgcacatcgagttcactgacaaccaggatgccctggacatgattgccaacaagcccatgaacatcatctccctcatcgatgaggagagcaagttccccaagggcacagacaccaccatgttacacaagctgaactcccagcacaagctcaacgccaactacatcccccccaagaacaaccatgagacccagtttggcatcaaccattttgcaggcatcgtctactatgagacccaaggcttcctggagaagaaccgagacaccctgcatggggacattatccagctggtccactcctccaggaacaagttcatcaagcagatcttccaggccgatgtcgccatgggcgccgagaccaggaagcgctcgcccacacttagcagccagttcaagcggtcactggagctgctgatgcgcacgctgggtgcctgccagcccttctttgtgcgatgcatcaagcccaatgagttcaagaagcccatgctgttcgaccggcacctgtgcgtgcgccagctgcggtactcaggaatgatggagaccatccgaatccgccgagctggctaccccatccgctacagcttcgtagagtttgtggagcggtaccgtgtgctgctgccaggtgtgaagccggcctacaagcagggcgacctccgcgggacttgccagcgcatggctgaggctgtgctgggcacccacgatgactggcagataggcaaaaccaagatctttctgaaggaccaccatgacatgctgctggaagtggagcgggacaaagccatcaccgacagagtcatcctccttcagaaagtcatccggggattcaaagacaggtctaactttctgaagctgaagaacgctgccacactgatccagaggcactggcggggtcacaactgtaggaagaactacgggctgatgcgtctgggcttcctgcggctgcaggccctgcaccgctcccggaagctgcaccagcagtaccgcctggcccgccagcgcatcatccagttccaggcccgctgccgcgcctatctggtgcgcaaggccttccgccaccgcctctgggctgtgctcaccgtgcaggcctatgcccggggcatgatcgcccgcaggctgcaccaacgcctcagggctgagtatctgtggcgcctcgaggctgagaaaatgcggctggcggaggaagagaagcttcggaaggagatgagcgccaagaaggccaaggaggaggccgagcgcaagcatcaggagcgcctggcccagctggctcgtgaggacgctgagcgggagctgaaggagaaggaggccgctcggcggaagaaggagctcctggagcagatggaaagggcccgccatgagcctgtcaatcactcagacatggtggacaagatgtttggcttcctggggacttcaggtggcctgccaggccaggagggccaggcacctagtggctttgaggacctggagcgagggcggagggagatggtggaggaggacctggatgcagccctgcccctgcctgacgaggatgaggaggacctctctgagtataaatttgccaagttcgcggccacctacttccaggggacaaccacgcactcctacacccggcggccactcaaacagccactgctctaccatgacgacgagggtgaccagctggcagccctggcggtctggatcaccatcctccgcttcatgggggacctccctgagcccaagtaccacacagccatgagtgatggcagtgagaagatccctgtgatgaccaagatttatgagaccctgggcaagaagacgtacaagagggagctgcaggccctgcagggcgagggcgaggcccagctccccgagggccagaagaagagcagtgtgaggcacaagctggtgcatttgactctgaaaaagaagtccaagctcacagaggaggtgaccaagaggctgcatgacggggagtccacagtgcagggcaacagcatgctggaggaccggcccacctccaacctggagaagctgcacttcatcatcggcaatggcatcctgcggccagcactccgggacgagatctactgccagatcagcaagcagctgacccacaacccctccaagagcagctatgcccggggctggattctcgtgtctctctgcgtgggctgtttcgccccctccgagaagtttgtcaagtacctgcggaacttcatccacgggggcccgcccggctacgccccgtactgtgaggagcgcctgagaaggacctttgtcaatgggacacggacacagccgcccagctggctggagctgcaggccaccaagtccaagaagccaatcatgttgcccgtgacattcatggatgggaccaccaagaccctgctgacggactcggcaaccacggccaaggagctctgcaacgcgctggccgacaagatctctctcaaggaccggttcgggttctccctctacattgccctgtttgacaaggtgtcctccctgggcagcggcagtgaccacgtcatggacgccatctcccagtgcgagcagtacgccaaggagcagggcgcccaggagcgcaacgccccctggaggctcttcttccgcaaagaggtcttcacgccctggcacagcccctccgaggacaacgtggccaccaacctcatctaccagcaggtggtgcgaggagtcaagtttggggagtacaggtgtgagaaggaggacgacctggctgagctggcctcccagcagtactttgtagactatggctctgagatgatcctggagcgcctcctgaacctcgtgcccacctacatccccgaccgcgagatcacgcccctgaagacgctggagaagtgggcccagctggccatcgccgcccacaagaaggggatttatgcccagaggagaactgatgcccagaaggtcaaagaggatgtggtcagttatgcccgcttcaagtggcccttgctcttctccaggttttatgaagcctacaaattctcaggccccagtctccccaagaacgacgtcatcgtggccgtcaactggacgggtgtgtactttgtggatgagcaggagcaggtacttctggagctgtccttcccagagatcatggccgtgtccagcagcagggagtgccgtgtctggctctcactgggctgctctgatcttggctgtgctgcgcctcactcaggctgggcaggactgaccccggcggggccctgttctccgtgttggtcctgcaggggagcgaaaacgacggcccccagcttcacgctggccaccatcaagggggacgaatacaccttcacctccagcaatgctgaggacattcgtgacctggtggtcaccttcctagaggggctccggaagagatctaagtatgttgtggccctgcaggataaccccaaccccgcaggcgaggagtcaggcttcctcagctttgccaagggagacctcatcatcctggaccatgacacgggcgagcaggtcatgaactcgggctgggccaacggcatcaatgagaggaccaagcagcgtggggacttccccaccgacagtgtgtacgtcatgcccactgtcaccatgccaccgcgggagattgtggccctggtcaccatgactcccgatcagaggcaggacgttgtccggctcttgcagctgcgaacggcggagcccgaggtgcgtgccaagccctacacgctggaggagttttcctatgactacttcaggcccccacccaagcacacgctgagccgtgtcatggtgtccaaggcccgaggcaaggaccggctgtggagccacacgcgggaaccgctcaagcaggcgctgctcaagaagctcctgggcagtgaggagctctcgcaggaggcctgcctggccttcattgctgtgctcaagtacatgggcgactacccgtccaagaggacacgctccgtcaacgagctcaccgaccagatctttgagggtcccctgaaagccgagcccctgaaggacgaggcatatgtgcagatcctgaagcagctgaccgacaaccacatcaggtacagcgaggagcggggttgggagctgctctggctgtgcacgggccttttcccacccagcaacatcctcctgccccacgtgcagcgcttcctgcagtcccgaaagcactgcccactcgccatcgactgcctgcaacggctccagaaagccctgagaaacgggtcccggaagtaccctccgcacctggtggaggtggaggccatccagcacaagaccacccagattttccacaaagtctacttccctgatgacactgacgaggccttcgaagtggagtccagcaccaaggccaaggacttctgccagaacatcgccaccaggctgctcctcaagtcctcagagggattcagcctctttgtcaaaattgcagacaaggtcctcagcgttcctgagaatgacttcttctttgactttgttcgacacttgacagactggataaagaaagctcggcccatcaaggacggaattgtgccctcactcacctaccaggtgttcttcatgaagaagctgtggaccaccacggtgccagggaaggatcccatggccgattccatcttccactattaccaggagttgcccaagtatctccgaggctaccacaagtgcacgcgggaggaggtgctgcagctgggggcgctgatctacagggtcaagttcgaggaggacaagtcctacttccccagcatccccaagctgctgcgggagctggtgccccaggaccttatccggcaggtctcacctgatgactggaagcggtccatcgtcgcctacttcaacaagcacgcagggaagtccaaggaggaggccaagctggccttcctgaagctcatcttcaagtggcccacctttggctcagccttcttcgaggtgaagcaaactacggagccaaacttccctgagatcctcctaattgccatcaacaagtatggggtcagcctcatcgatcccaaaacgaaggatatcctcaccactcatcccttcaccaagatctccaactggagcagcggcaacacctacttccacatcaccattgggaacttggtgcgcgggagcaaactgctctgcgagacgtcactgggctacaagatggatgacctcctgacttcctacattagccagatgctcacagccatgagcaaacagcggggctccaggagcggcaagtgaacagtcacggggaggtgctggttccatgcctgctctcgaggcagcagtgggttcaggcccatcagctacccctgcagctggggaagacttatgccatcccggcagcgaggctgggctggccagccaccactgactataccaactgggcctctgatgttcttccagtgaggcatctctctgggatgcagaacttccctccatccacccctctggcacctgggttggtctaatcctagtttgctgtggccttcccggttgtgagagcctgtgatccttagatgtgtctcctgtttcagaccagccccaccatgcaacttcctttgactttctgtgtaccactgggatagaggaatcaagaggacaatctagctctccatactttgaacaaccaaatgtgcattgaatactctgaaaccgaagggactggatctgcaggtgggatgagggagacagaccacttttctatattgcagtgtgaatgctgggcccctgctcaagtctaccctgatcacctcagggcataaagcatgtttcattctctg

SEQ ID NO: 19210 - DNA, 4050 bp, Homo sapiens
  source 1..4050: mol_type = unassigned DNA
ggcaggagagagagggagagacaagagacacacacagagagacggcgaggaagggaaagacccagagggacgcctagaacgagacttggagccagacagaggaagaggggacgtgtgtttgcagactggctgggcccgtgacccagcttcctgagtcctccgtgcaggtggcagctgtaccaggctggcaggtcactgagagtgggcagctgggccccagaactgtgcctggcccagtgggcagcaggagctcctgacttgggaccatggtgattcttcagcagggggaccatgtgtggatggacctgagattggggcaggagttcgacgtgcccatcggggcggtggtgaagctctgcgactctgggcaggtccaggtggtggatgatgaagacaatgaacactggatctctccgcagaacgcaacgcacatcaagcctatgcaccccacgtcggtccacggcgtggaggacatgatccgcctgggggacctcaacgaggcgggcatcttgcgcaacctgcttatccgctaccgggaccacctcatctacacgtatacgggctccatcctggtggctgtgaacccctaccagctgctctccatctactcgccagagcacatccgccagtataccaacaagaagattggggagatgcccccccacatctttgccattgctgacaactgctacttcaacatgaaacgcaacagccgagaccagtgctgcatcatcagtggggaatctggggccgggaagacggagagcacaaagctgatcctgcagttcctggcagccatcagtgggcagcactcgtggattgagcagcaggtcttggaggccacccccattctggaagcatttgggaatgccaagaccatccgcaatgacaactcaagccgtttcggaaagtacatcgacatccacttcaacaagcggggcgccatcgagggcgcgaagattgagcagtacctgctggaaaagtcacgtgtctgtcgccaggccctggatgaaaggaactaccacgtgttctactgcatgctggagggtatgagtgaggatcagaagaagaagctgggcttgggccaggcctctgactacaactacttggccatgggtaactgcataacctgtgagggccgggtggacagccaggagtacgccaacatccgctccgccatgaaggtgctcatgttcactgacaccgagaactgggagatctcgaagctcctggctgccatcctgcacctgggcaacctgcagtatgaggcacgcacatttgaaaacctggatgcctgtgaggttctcttctccccatcgctggccacagctgcatccctgcttgaggtgaaccccccagacctgatgagctgcctgactagccgcaccctcatcacccgcggggagacggtgtccaccccactgagcagggaacaggcactggacgtgcgcgacgccttcgtaaaggggatctacgggcggctgttcgtgtggattgtggacaagatcaacgcagcaatttacaagcctccctcccaggatgtgaagaactctcgcaggtccatcggcctcctggacatctttgggtttgagaactttgctgtgaacagctttgagcagctctgcatcaacttcgccaatgagcacctgcagcagttctttgtgcggcacgtgttcaagctggagcaggaggaatatgacctggagagcattgactggctgcacatcgagttcactgacaaccaggatgccctggacatgattgccaacaagcccatgaacatcatctccctcatcgatgaggagagcaagttccccaagggcacagacaccaccatgttacacaagctgaactcccagcacaagctcaacgccaactacatcccccccaagaacaaccatgagacccagtttggcatcaaccattttgcaggcatcgtctactatgagacccaaggcttcctggagaagaaccgagacaccctgcatggggacattatccagctggtccactcctccaggaacaagttcatcaagcagatcttccaggccgatgtcgccatgggcgccgagaccaggaagcgctcgcccacacttagcagccagttcaagcggtcactggagctgctgatgcgcacgctgggtgcctgccagcccttctttgtgcgatgcatcaagcccaatgagttcaagaagcccatgctgttcgaccggcacctgtgcgtgcgccagctgcggtactcaggaatgatggagaccatccgaatccgccgagctggctaccccatccgctacagcttcgtagagtttgtggagcggtaccgtgtgctgctgccaggtgtgaagccggcctacaagcagggcgacctccgcgggacttgccagcgcatggctgaggctgtgctgggcacccacgatgactggcagataggcaaaaccaagatctttctgaaggaccaccatgacatgctgctggaagtggagcgggacaaagccatcaccgacagagtcatcctccttcagaaagtcatccggggattcaaagacaggtctaactttctgaagctgaagaacgctgccacactgatccagaggcactggcggggtcacaactgtaggaagaactacgggctgatgcgtctgggcttcctgcggctgcaggccctgcaccgctcccggaagctgcaccagcagtaccgcctggcccgccagcgcatcatccagttccaggcccgctgccgcgcctatctggtgcgcaaggccttccgccaccgcctctgggctgtgctcaccgtgcaggcctatgcccggggcatgatcgcccgcaggctgcaccaacgcctcagggctgagtatctgtggcgcctcgaggctgagaaaatgcggctggcggaggaagagaagcttcggaaggagatgagcgccaagaaggccaaggaggaggccgagcgcaagcatcaggagcgcctggcccagctggctcgtgaggacgctgagcgggagctgaaggagaaggaggccgctcggcggaagaaggagctcctggagcagatggaaagggcccgccatgagcctgtcaatcactcagacatggtggacaagatgtttggcttcctggggacttcaggtggcctgccaggccaggagggccaggcacctagtggctttgaggacctggagcgagggcggagggagatggtggaggaggacctggatgcagccctgcccctgcctgacgaggatgaggaggacctctctgagtataaatttgccaagttcgcggccacctacttccaggggacaaccacgcactcctacacccggcggccactcaaacagccactgctctaccatgacgacgagggtgaccagctggcagccctggcggtctggatcaccatcctccgcttcatgggggacctccctgagcccaagtaccacacagccatgagtgatggcagtgagaagatccctgtgatgaccaagatttatgagaccctgggcaagaagacgtacaagagggagctgcaggccctgcagggcgagggcgaggcccagctccccgagggccagaagaagagcagtgtgaggcacaagctggtgcatttgactctgaaaaagaagtccaagctcacagaggaggtgaccaagaggctgcatgacggggagtccacagtgcagggcaacagcatgctggaggaccggcccacctccaacctggagaagctgcacttcatcatcggcaatggcatcctgcggccagcactccggtcagtgccgggaggcggggacaccagggcctgaaagtcttttggtggctgagtggtgcctctgtcaacctagcaagagattaagccaagcaggcctgggtttggcttcgctgctagctagttggtggagttaggaccttggtggagttatttcatctttctaagcctctgattccttgtctgtaaagggggaatcctaaaacaggcatcccttggagatattgcaggttcagttgaaggccacagaaataaatatcacaataaagagagctgcagaaata

SEQ ID NO: 19211 - DNA, 7336 bp, Homo sapiens
  source 1..7336: mol_type = unassigned DNA
ggcaggagagagagggagagacaagagacacacacagagagacggcgaggaagggaaagacccagagggacgcctagaacgagacttggagccagacagaggaagaggggacgtgtgtttgcagactggctgggcccgtgacccagcttcctgagtcctccgtgcaggtggcagctgtaccaggctggcaggtcactgagagtgggcagctgggccccagaactgtgcctggcccagtgggcagcaggagctcctgacttgggaccatggtgattcttcagcagggggaccatgtgtggatggacctgagattggggcaggagttcgacgtgcccatcggggcggtggtgaagctctgcgactctgggcaggtccaggtggtggatgatgaagacaatgaacactggatctctccgcagaacgcaacgcacatcaagcctatgcaccccacgtcggtccacggcgtggaggacatgatccgcctgggggacctcaacgaggcgggcatcttgcgcaacctgcttatccgctaccgggaccacctcatctacacgtatacgggctccatcctggtggctgtgaacccctaccagctgctctccatctactcgccagagcacatccgccagtataccaacaagaagattggggagatgcccccccacatctttgccattgctgacaactgctacttcaacatgaaacgcaacagccgagaccagtgctgcatcatcagtggggaatctggggccgggaagacggagagcacaaagctgatcctgcagttcctggcagccatcagtgggcagcactcgtggattgagcagcaggtcttggaggccacccccattctggaagcatttgggaatgccaagaccatccgcaatgacaactcaagccgtttcggaaagtacatcgacatccacttcaacaagcggggcgccatcgagggcgcgaagattgagcagtacctgctggaaaagtcacgtgtctgtcgccaggccctggatgaaaggaactaccacgtgttctactgcatgctggagggtatgagtgaggatcagaagaagaagctgggcttgggccaggcctctgactacaactacttggccatgggtaactgcataacctgtgagggccgggtggacagccaggagtacgccaacatccgctccgccatgaaggtgctcatgttcactgacaccgagaactgggagatctcgaagctcctggctgccatcctgcacctgggcaacctgcagtatgaggcacgcacatttgaaaacctggatgcctgtgaggttctcttctccccatcgctggccacagctgcatccctgcttgaggtgaaccccccagacctgatgagctgcctgactagccgcaccctcatcacccgcggggagacggtgtccaccccactgagcagggaacaggcactggacgtgcgcgacgccttcgtaaaggggatctacgggcggctgttcgtgtggattgtggacaagatcaacgcagcaatttacaagcctccctcccaggatgtgaagaactctcgcaggtccatcggcctcctggacatctttgggtttgagaactttgctgtgaacagctttgagcagctctgcatcaacttcgccaatgagcacctgcagcagttctttgtgcggcacgtgttcaagctggagcaggaggaatatgacctggagagcattgactggctgcacatcgagttcactgacaaccaggatgccctggacatgattgccaacaagcccatgaacatcatctccctcatcgatgaggagagcaagttccccaagggcacagacaccaccatgttacacaagctgaactcccagcacaagctcaacgccaactacatcccccccaagaacaaccatgagacccagtttggcatcaaccattttgcaggcatcgtctactatgagacccaaggcttcctggagaagaaccgagacaccctgcatggggacattatccagctggtccactcctccaggaacaagttcatcaagcagatcttccaggccgatgtcgccatgggcgccgagaccaggaagcgctcgcccacacttagcagccagttcaagcggtcactggagctgctgatgcgcacgctgggtgcctgccagcccttctttgtgcgatgcatcaagcccaatgagttcaagaagcccatgctgttcgaccggcacctgtgcgtgcgccagctgcggtactcaggaatgatggagaccatccgaatccgccgagctggctaccccatccgctacagcttcgtagagtttgtggagcggtaccgtgtgctgctgccaggtgtgaagccggcctacaagcagggcgacctccgcgggacttgccagcgcatggctgaggctgtgctgggcacccacgatgactggcagataggcaaaaccaagatctttctgaaggaccaccatgacatgctgctggaagtggagcgggacaaagccatcaccgacagagtcatcctccttcagaaagtcatccggggattcaaagacaggtctaactttctgaagctgaagaacgctgccacactgatccagaggcactggcggggtcacaactgtaggaagaactacgggctgatgcgtctgggcttcctgcggctgcaggccctgcaccgctcccggaagctgcaccagcagtaccgcctggcccgccagcgcatcatccagttccaggcccgctgccgcgcctatctggtgcgcaaggccttccgccaccgcctctgggctgtgctcaccgtgcaggcctatgcccggggcatgatcgcccgcaggctgcaccaacgcctcagggctgagtatctgtggcgcctcgaggctgagaaaatgcggctggcggaggaagagaagcttcggaaggagatgagcgccaagaaggccaaggaggaggccgagcgcaagcatcaggagcgcctggcccagctggctcgtgaggacgctgagcgggagctgaaggagaaggaggccgctcggcggaagaaggagctcctggagcagatggaaagggcccgccatgagcctgtcaatcactcagacatggtggacaagatgtttggcttcctggggacttcaggtggcctgccaggccaggagggccaggcacctagtggctttgaggacctggagcgagggcggagggagatggtggaggaggacctggatgcagccctgcccctgcctgacgaggatgaggaggacctctctgagtataaatttgccaagttcgcggccacctacttccaggggacaaccacgcactcctacacccggcggccactcaaacagccactgctctaccatgacgacgagggtgaccagctggcagccctggcggtctggatcaccatcctccgcttcatgggggacctccctgagcccaagtaccacacagccatgagtgatggcagtgagaagatccctgtgatgaccaagatttatgagaccctgggcaagaagacgtacaagagggagctgcaggccctgcagggcgagggcgaggcccagctccccgagggccagaagaagagcagtgtgaggcacaagctggtgcatttgactctgaaaaagaagtccaagctcacagaggaggtgaccaagaggctgcatgacggggagtccacagtgcagggcaacagcatgctggaggaccggcccacctccaacctggagaagctgcacttcatcatcggcaatggcatcctgcggccagcactccgggacgagatctactgccagatcagcaagcagctgacccacaacccctccaagagcagctatgcccggggctggattctcgtgtctctctgcgtgggctgtttcgccccctccgagaagtttgtcaagtacctgcggaacttcatccacgggggcccgcccggctacgccccgtactgtgaggagcgcctgagaaggacctttgtcaatgggacacggacacagccgcccagctggctggagctgcaggccaccaagtccaagaagccaatcatgttgcccgtgacattcatggatgggaccaccaagaccctgctgacggactcggcaaccacggccaaggagctctgcaacgcgctggccgacaagatctctctcaaggaccggttcgggttctccctctacattgccctgtttgacaaggtgtcctccctgggcagcggcagtgaccacgtcatggacgccatctcccagtgcgagcagtacgccaaggagcagggcgcccaggagcgcaacgccccctggaggctcttcttccgcaaagaggtcttcacgccctggcacagcccctccgaggacaacgtggccaccaacctcatctaccagcaggtggtgcgaggagtcaagtttggggagtacaggtgtgagaaggaggacgacctggctgagctggcctcccagcagtactttgtagactatggctctgagatgatcctggagcgcctcctgaacctcgtgcccacctacatccccgaccgcgagatcacgcccctgaagacgctggagaagtgggcccagctggccatcgccgcccacaagaaggggatttatgcccagaggagaactgatgcccagaaggtcaaagaggatgtggtcagttatgcccgcttcaagtggcccttgctcttctccaggttttatgaagcctacaaattctcaggccccagtctccccaagaacgacgtcatcgtggccgtcaactggacgggtgtgtactttgtggatgagcaggagcaggtacttctggagctgtccttcccagagatcatggccgtgtccagcagcaggggagcgaaaacgacggcccccagcttcacgctggccaccatcaagggggacgaatacaccttcacctccagcaatgctgaggacattcgtgacctggtggtcaccttcctagaggggctccggaagagatctaagtatgttgtggccctgcaggataaccccaaccccgcaggcgaggagtcaggcttcctcagctttgccaagggagacctcatcatcctggaccatgacacgggcgagcaggtcatgaactcgggctgggccaacggcatcaatgagaggaccaagcagcgtggggacttccccaccgacagtgtgtacgtcatgcccactgtcaccatgccaccgcgggagattgtggccctggtcaccatgactcccgatcagaggcaggacgttgtccggctcttgcagctgcgaacggcggagcccgaggtgcgtgccaagccctacacgctggaggagttttcctatgactacttcaggcccccacccaagcacacgctgagccgtgtcatggtgtccaaggcccgaggcaaggaccggctgtggagccacacgcgggaaccgctcaagcaggcgctgctcaagaagctcctgggcagtgaggagctctcgcaggaggcctgcctggccttcattgctgtgctcaagtacatgggcgactacccgtccaagaggacacgctccgtcaacgagctcaccgaccagatctttgagggtcccctgaaagccgagcccctgaaggacgaggcatatgtgcagatcctgaagcagctgaccgacaaccacatcaggtacagcgaggagcggggttgggagctgctctggctgtgcacgggccttttcccacccagcaacatcctcctgccccacgtgcagcgcttcctgcagtcccgaaagcactgcccactcgccatcgactgcctgcaacggctccagaaagccctgagaaacgggtcccggaagtaccctccgcacctggtggaggtggaggccatccagcacaagaccacccagattttccacaaagtctacttccctgatgacactgacgaggccttcgaagtggagtccagcaccaaggccaaggacttctgccagaacatcgccaccaggctgctcctcaagtcctcagagggattcagcctctttgtcaaaattgcagacaaggtcctcagcgttcctgagaatgacttcttctttgactttgttcgacacttgacagactggataaagaaagctcggcccatcaaggacggaattgtgccctcactcacctaccaggtgttcttcatgaagaagctgtggaccaccacggtgccagggaaggatcccatggccgattccatcttccactattaccaggagttgcccaagtatctccgaggctaccacaagtgcacgcgggaggaggtgctgcagctgggggcgctgatctacagggtcaagttcgaggaggacaagtcctacttccccagcatccccaagctgctgcgggagctggtgccccaggaccttatccggcaggtctcacctgatgactggaagcggtccatcgtcgcctacttcaacaagcacgcagggaagtccaaggaggaggccaagctggccttcctgaagctcatcttcaagtggcccacctttggctcagccttcttcgagcaaactacggagccaaacttccctgagatcctcctaattgccatcaacaagtatggggtcagcctcatcgatcccaaaacgaaggatatcctcaccactcatcccttcaccaagatctccaactggagcagcggcaacacctacttccacatcaccattgggaacttggtgcgcgggagcaaactgctctgcgagacgtcactgggctacaagatggatgacctcctgacttcctacattagccagatgctcacagccatgagcaaacagcggggctccaggagcggcaagtgaacagtcacggggaggtgctggttccatgcctgctctcgaggcagcagtgggttcaggcccatcagctacccctgcagctggggaagacttatgccatcccggcagcgaggctgggctggccagccaccactgactataccaactgggcctctgatgttcttccagtgaggcatctctctgggatgcagaacttccctccatccacccctctggcacctgggttggtctaatcctagtttgctgtggccttcccggttgtgagagcctgtgatccttagatgtgtctcctgtttcagaccagccccaccatgcaacttcctttgactttctgtgtaccactgggatagaggaatcaagaggacaatctagctctccatactttgaacaaccaaatgtgcattgaatactctgaaaccgaagggactggatctgcaggtgggatgagggagacagaccacttttctatattgcagtgtgaatgctgggcccctgctcaagtctaccctgatcacctcagggcataaagcatgtttcattctctg

SEQ ID NO: 19212 - DNA, 2532 bp, Homo sapiens
  source 1..2532: mol_type = unassigned DNA
gggctgagtgtgcagtggctgctcgatgggctggcttgtttctttgcatcacttcatgtgcccctgggcagagtccagctccatgccagtgccagagggatccaggagaaggaggacgacctggctgagctggcctcccagcagtactttgtagactatggctctgagatgatcctggagcgcctcctgaacctcgtgcccacctacatccccgaccgcgagatcacgcccctgaagacgctggagaagtgggcccagctggccatcgccgcccacaagaaggggatttatgcccagaggagaactgatgcccagaaggtcaaagaggatgtggtcagttatgcccgcttcaagtggcccttgctcttctccaggttttatgaagcctacaaattctcaggccccagtctccccaagaacgacgtcatcgtggccgtcaactggacgggtgtgtactttgtggatgagcaggagcaggtacttctggagctgtccttcccagagatcatggccgtgtccagcagcaggggagcgaaaacgacggcccccagcttcacgctggccaccatcaagggggacgaatacaccttcacctccagcaatgctgaggacattcgtgacctggtggtcaccttcctagaggggctccggaagagatctaagtatgttgtggccctgcaggataaccccaaccccgcaggcgaggagtcaggcttcctcagctttgccaagggagacctcatcatcctggaccatgacacgggcgagcaggtcatgaactcgggctgggccaacggcatcaatgagaggaccaagcagcgtggggacttccccaccgacagtgtgtacgtcatgcccactgtcaccatgccaccgcgggagattgtggccctggtcaccatgactcccgatcagaggcaggacgttgtccggctcttgcagctgcgaacggcggagcccgaggtgcgtgccaagccctacacgctggaggagttttcctatgactacttcaggcccccacccaagcacacgctgagccgtgtcatggtgtccaaggcccgaggcaaggaccggctgtggagccacacgcgggaaccgctcaagcaggcgctgctcaagaagctcctgggcagtgaggagctctcgcaggaggcctgcctggccttcattgctgtgctcaagtacatgggcgactacccgtccaagaggacacgctccgtcaacgagctcaccgaccagatctttgagggtcccctgaaagccgagcccctgaaggacgaggcatatgtgcagatcctgaagcagctgaccgacaaccacatcaggtacagcgaggagcggggttgggagctgctctggctgtgcacgggccttttcccacccagcaacatcctcctgccccacgtgcagcgcttcctgcagtcccgaaagcactgcccactcgccatcgactgcctgcaacggctccagaaagccctgagaaacgggtcccggaagtaccctccgcacctggtggaggtggaggccatccagcacaagaccacccagattttccacaaagtctacttccctgatgacactgacgaggccttcgaagtggagtccagcaccaaggccaaggacttctgccagaacatcgccaccaggctgctcctcaagtcctcagagggattcagcctctttgtcaaaattgcagacaaggtcctcagcgttcctgagaatgacttcttctttgactttgttcgacacttgacagactggataaagaaagctcggcccatcaaggacggaattgtgccctcactcacctaccaggtgttcttcatgaagaagctgtggaccaccacggtgccagggaaggatcccatggccgattccatcttccactattaccaggagttgcccaagtatctccgaggctaccacaagtgcacgcgggaggaggtgctgcagctgggggcgctgatctacagggtcaagttcgaggaggacaagtcctacttccccagcatccccaagctgctgcgggagctggtgccccaggaccttatccggcaggtctcacctgatgactggaagcggtccatcgtcgcctacttcaacaagcacgcagggaagtccaaggaggaggccaagctggccttcctgaagctcatcttcaagtggcccacctttggctcagccttcttcgaggtgaaggtacaccatgggcttctcagagcagaggaggaggggaacagggcattgataaagcacagagactcctccctaggactgtgggaaagagccatggccttggacacctgccctggtgagggaaggagggcagcaccctcagccttgtcccagcttagcgtcttagctggggtaagtcctggggacagagggaccagaagaagctcagcctggcagtggaggcagacatgtaaacaggctggggtaatggaggatggcctgtgttctgacactggggagccctcgcccaggtggcagagctcgggaggctctgccgggtgtgagaaggcctcttag

SEQ ID NO: 19213 - DNA, 7106 bp, Homo sapiens
  source 1..7106: mol_type = unassigned DNA
cacagagagacggcgaggaagggaaagacccagagggacgcctagaacgagacttggagccagacagaggaagaggggacgtgtgtttgcagactggctgggcccgtgacccagcttcctgagtcctccgtgcaggtggcagctgtaccaggctggcaggtcactgagagtgggcagctgggccccagaactgtgcctggcccagtgggcagcaggagctcctgacttgggaccatggtgattcttcagcaggagaaaagctgggacttgccccacgttacacagccacactgaggcatgtgtcgtgtcacaaacgagatcttccattcaagggggaccatgtgtggatggacctgagattggggcaggagttcgacgtgcccatcggggcggtggtgaagctctgcgactctgggcaggtccaggtggtggatgatgaagacaatgaacactggatctctccgcagaacgcaacgcacatcaagcctatgcaccccacgtcggtccacggcgtggaggacatgatccgcctgggggacctcaacgaggcgggcatcttgcgcaacctgcttatccgctaccgggaccacctcatctacacgtatacgggctccatcctggtggctgtgaacccctaccagctgctctccatctactcgccagagcacatccgccagtataccaacaagaagattggggagatgcccccccacatctttgccattgctgacaactgctacttcaacatgaaacgcaacagccgagaccagtgctgcatcatcagtggggaatctggggccgggaagacggagagcacaaagctgatcctgcagttcctggcagccatcagtgggcagcactcgtggattgagcagcaggtcttggaggccacccccattctggaagcatttgggaatgccaagaccatccgcaatgacaactcaagccgtttcggaaagtacatcgacatccacttcaacaagcggggcgccatcgagggcgcgaagattgagcagtacctgctggaaaagtcacgtgtctgtcgccaggccctggatgaaaggaactaccacgtgttctactgcatgctggagggtatgagtgaggatcagaagaagaagctgggcttgggccaggcctctgactacaactacttggccatgggtaactgcataacctgtgagggccgggtggacagccaggagtacgccaacatccgctccgccatgaaggtgctcatgttcactgacaccgagaactgggagatctcgaagctcctggctgccatcctgcacctgggcaacctgcagtatgaggcacgcacatttgaaaacctggatgcctgtgaggttctcttctccccatcgctggccacagctgcatccctgcttgaggtgaaccccccagacctgatgagctgcctgactagccgcaccctcatcacccgcggggagacggtgtccaccccactgagcagggaacaggcactggacgtgcgcgacgccttcgtaaaggggatctacgggcggctgttcgtgtggattgtggacaagatcaacgcagcaatttacaagcctccctcccaggatgtgaagaactctcgcaggtccatcggcctcctggacatctttgggtttgagaactttgctgtgaacagctttgagcagctctgcatcaacttcgccaatgagcacctgcagcagttctttgtgcggcacgtgttcaagctggagcaggaggaatatgacctggagagcattgactggctgcacatcgagttcactgacaaccaggatgccctggacatgattgccaacaagcccatgaacatcatctccctcatcgatgaggagagcaagttccccaagggcacagacaccaccatgttacacaagctgaactcccagcacaagctcaacgccaactacatcccccccaagaacaaccatgagacccagtttggcatcaaccattttgcaggcatcgtctactatgagacccaaggcttcctggagaagaaccgagacaccctgcatggggacattatccagctggtccactcctccaggaacaagttcatcaagcagatcttccaggccgatgtcgccatgggcgccgagaccaggaagcgctcgcccacacttagcagccagttcaagcggtcactggagctgctgatgcgcacgctgggtgcctgccagcccttctttgtgcgatgcatcaagcccaatgagttcaagaagcccatgctgttcgaccggcacctgtgcgtgcgccagctgcggtactcaggaatgatggagaccatccgaatccgccgagctggctaccccatccgctacagcttcgtagagtttgtggagcggtaccgtgtgctgctgccaggtgtgaagccggcctacaagcagggcgacctccgcgggacttgccagcgcatggctgaggctgtgctgggcacccacgatgactggcagataggcaaaaccaagatctttctgaaggaccaccatgacatgctgctggaagtggagcgggacaaagccatcaccgacagagtcatcctccttcagaaagtcatccggggattcaaagacaggtctaactttctgaagctgaagaacgctgccacactgatccagaggcactggcggggtcacaactgtaggaagaactacgggctgatgcgtctgggcttcctgcggctgcaggccctgcaccgctcccggaagctgcaccagcagtaccgcctggcccgccagcgcatcatccagttccaggcccgctgccgcgcctatctggtgcgcaaggccttccgccaccgcctctgggctgtgctcaccgtgcaggcctatgcccggggcatgatcgcccgcaggctgcaccaacgcctcagggctgagtatctgtggcgcctcgaggctgagaaaatgcggctggcggaggaagagaagcttcggaaggagatgagcgccaagaaggccaaggaggaggccgagcgcaagcatcaggagcgcctggcccagctggctcgtgaggacgctgagcgggagctgaaggagaaggaggccgctcggcggaagaaggagctcctggagcagatggaaagggcccgccatgagcctgtcaatcactcagacatggtggacaagatgtttggcttcctggggacttcaggtggcctgccaggccaggagggccaggcacctagtggctttgaggacctggagcgagggcggagggagatggtggaggaggacctggatgcagccctgcccctgcctgacgaggatgaggaggacctctctgagtataaatttgccaagttcgcggccacctacttccaggggacaaccacgcactcctacacccggcggccactcaaacagccactgctctaccatgacgacgagggtgaccagctggcagccctggcggtctggatcaccatcctccgcttcatgggggacctccctgagcccaagtaccacacagccatgagtgatggcagtgagaagatccctgtgatgaccaagatttatgagaccctgggcaagaagacgtacaagagggagctgcaggccctgcagggcgagggcgaggcccagctccccgagggccagaagaagagcagtgtgaggcacaagctggtgcatttgactctgaaaaagaagtccaagctcacagaggaggtgaccaagaggctgcatgacggggagtccacagtgcagggcaacagcatgctggaggaccggcccacctccaacctggagaagctgcacttcatcatcggcaatggcatcctgcggccagcactccgggacgagatctactgccagatcagcaagcagctgacccacaacccctccaagagcagctatgcccggggctggattctcgtgtctctctgcgtgggctgtttcgccccctccgagaagtttgtcaagtacctgcggaacttcatccacgggggcccgcccggctacgccccgtactgtgaggagcgcctgagaaggacctttgtcaatgggacacggacacagccgcccagctggctggagctgcaggccaccaagtccaagaagccaatcatgttgcccgtgacattcatggatgggaccaccaagaccctgctgacggactcggcaaccacggccaaggagctctgcaacgcgctggccgacaagatctctctcaaggaccggttcgggttctccctctacattgccctgtttgacaaggtgtcctccctgggcagcggcagtgaccacgtcatggacgccatctcccagtgcgagcagtacgccaaggagcagggcgcccaggagcgcaacgccccctggaggctcttcttccgcaaagaggtcttcacgccctggcacagcccctccgaggacaacgtggccaccaacctcatctaccagcaggtggtgcgaggagtcaagtttggggagtacaggtgtgagaaggaggacgacctggctgagctggcctcccagcagtactttgtagactatggctctgagatgatcctggagcgcctcctgaacctcgtgcccacctacatccccgaccgcgagatcacgcccctgaagacgctggagaagtgggcccagctggccatcgccgcccacaagaaggggatttatgcccagaggagaactgatgcccagaaggtcaaagaggatgtggtcagttatgcccgcttcaagtggcccttgctcttctccaggttttatgaagcctacaaattctcaggccccagtctccccaagaacgacgtcatcgtggccgtcaactggacgggtgtgtactttgtggatgagcaggagcaggtacttctggagctgtccttcccagagatcatggccgtgtccagcagcaggggagcgaaaacgacggcccccagcttcacgctggccaccatcaagggggacgaatacaccttcacctccagcaatgctgaggacattcgtgacctggtggtcaccttcctagaggggctccggaagagatctaagtatgttgtggccctgcaggataaccccaaccccgcaggcgaggagtcaggcttcctcagctttgccaagggagacctcatcatcctggaccatgacacgggcgagcaggtcatgaactcgggctgggccaacggcatcaatgagaggaccaagcagcgtggggacttccccaccgacagtgtgtacgtcatgcccactgtcaccatgccaccgcgggagattgtggccctggtcaccatgactcccgatcagaggcaggacgttgtccggctcttgcagctgcgaacggcggagcccgaggtgcgtgccaagccctacacgctggaggagttttcctatgactacttcaggcccccacccaagcacacgctgagccgtgtcatggtgtccaaggcccgaggcaaggaccggctgtggagccacacgcgggaaccgctcaagcaggcgctgctcaagaagctcctgggcagtgaggagctctcgcaggaggcctgcctggccttcattgctgtgctcaagtacatgggcgactacccgtccaagaggacacgctccgtcaacgagctcaccgaccagatctttgagggtcccctgaaagccgagcccctgaaggacgaggcatatgtgcagatcctgaagcagctgaccgacaaccacatcaggtacagcgaggagcggggttgggagctgctctggctgtgcacgggccttttcccacccagcaacatcctcctgccccacgtgcagcgcttcctgcagtcccgaaagcactgcccactcgccatcgactgcctgcaacggctccagaaagccctgagaaacgggtcccggaagtaccctccgcacctggtggaggtggaggccatccagcacaagaccacccagattttccacaaagtctacttccctgatgacactgacgaggccttcgaagtggagtccagcaccaaggccaaggacttctgccagaacatcgccaccaggctgctcctcaagtcctcagagggattcagcctctttgtcaaaattgcagacaaggtcctcagcgttcctgagaatgacttcttctttgactttgttcgacacttgacagactggataaagaaagctcggcccatcaaggacggaattgtgccctcactcacctaccaggtgttcttcatgaagaagctgtggaccaccacggtgccagggaaggatcccatggccgattccatcttccactattaccaggagttgcccaagtatctccgaggctaccacaagtgcacgcgggaggaggtgctgcagctgggggcgctgatctacagggtcaagttcgaggaggacaagtcctacttccccagcatccccaagctgctgcgggagctggtgccccaggaccttatccggcaggtctcacctgatgactggaagcggtccatcgtcgcctacttcaacaagcacgcagggaagtccaaggaggaggccaagctggccttcctgaagctcatcttcaagtggcccacctttggctcagccttcttcgaggtgaagcaaactacggagccaaacttccctgagatcctcctaattgccatcaacaagtatggggtcagcctcatcgatcccaaaacgaaggatatcctcaccactcatcccttcaccaagatctccaactggagcagcggcaacacctacttccacatcaccattgggaacttggtgcgcgggagcaaactgctctgcgagacgtcactgggctacaagatggatgacctcctgacttcctacattagccagatgctcacagccatgagcaaacagcggggctccaggagcggcaagtgaacagtcacggggaggtgctggttccatgcctgctctcgaggcagcagtgggttcaggcccatcagctacccctgcagctggggaagacttatgccatcccggcagcgaggctgggctggccagccaccactgactataccaactgggcctctgatgttcttccagtgaggcatctctctgggatgcagaacttccctccatccacccctctggcacctgggttggtctaatcctagtttgctgtggccttcccggttg

SEQ ID NO: 19214 - DNA, 5077 bp, Homo sapiens
  source 1..5077: mol_type = unassigned DNA
ggccaggctggccctggctgcctgcggcgcgggcgcctccctcgcagccgctgctgccgacgccgctgcgctcccgcctcctgtcggttcccgggttcccgctgcggctgcggttctggcagccgagcccccgcggtgctgcagcccagctttagcgcgcagaccgacccgcgccccttcttcgccgccggcagcctctaatccacgcggcgcgttgcggcaggtgccctgggcgtactgaggcgcggtggcctgagcccggccgccatcgatgaccccggtcgcggacttgcttcaggctggccaccccccgtcttgtttcatcatctgtgttgagtaaccatggggaggaagctggacctgtctggtttgactgatgatgaaacagagcatgttcttcaggtggttcaaagagacttcaatcttcgcaaaaaagaagaagaacgactaagtgagctgaagcagaagctggatgaggaaggcagcaagtgcagcatcctctcgaagcaccagcagtttgtggagcactgctgcatgcgctgctgctcgcccttcaccttcctcgtcaacaccaagcgccagtgtggagattgcaaattcaatgtctgcaagagctgctgctcctaccagaagcacgaaaaggcctgggtctgctgcgtctgccagcaagcgaggcttctgagggcccaatctctggaatggttctacaataatgtgaagagccgcttcaagcgctttggcagtgccaaggttctgaagaacctgtacaggaagcaccggctggagagtggcgcgtgcttcgacattctaggaggaagcctttttgagtcaaacctggagaatgaaggaagcatttctggcagtgattcaacattttataggcagtcagaaggacatagtgtgatggacaccttggctgtggccctacgggtggctgaagaggccattgaggaagcaatttccaaagcagaggcatatggggacagcctggacaagcaaaatgaggccagttacctgcgggaccacaaggaggagctaactgaggaactggccacgacaatcctgcagaagattatacgaaaacagaagagcaaaagtgagcagcaagtggaagaagagccaggatggccacatccccagagttgcagcacaaaggtggcagatgaggggacctcagcatcccctggaggctaccgtgctcccgctgccctctggaggtcccagtctgccttctcaatcactggagaagaagccctgaagacccctccagtggaggctccatcgaggcagccaagggaccaaggccaacacccgagagcagagtctgctctgcccagctggaagagtgtggacaggctggatgaaacaaacctggccccagttttgcagagccccgacgggaactgggtggccctgaaggatggcgctccaccccccacccgactactggccaaacctaagagcgggacgtttcaggccctggaggtggcctccagtgtggcatctgcctacgatgagatgggctccgatagcgaggaagactttgactggagtgaggccttgagcaagctgtgtcccaggtcccgggccctgcccaggaacccccagcctcagcccacacaggcccagagctctgaccaaggccccatagctgcctccccatcctctgcactctcccccaaccctgaggccatgtgctctgactcggagacctcctccgcaggctcttcccgagaagttgggcaccaggccagactgtcctggttgcagaggaaggcccccaggaaccctgcagctgagaagatgcgcttgcatggagagctggacgtgaacttcaacccccagttggccagcagggagacctcggacagcagcgagccggaggaggccccccacaccacagaccggcgggccaggaggtggagaagagcccgactgggctcagaagagccaagcaaagaaccatcttcccccagcgcccagctccgggatctagacacacatcaggtgtcggatgatttatcagagacagacatcagcaatgaggctcgggatccccagactctcacagacaccacagaggagaaacggagaaacaggctgtacgagttagcaatgaaaatgagtgaaaaggagacttcttcaggggaggatcaggagtctgagcccaagacagaatctgagaaccagaaggaaagtctgtcctctgaagacaacagccagagtgtccaggaagagctgaagaagaagttttctgctgtttctctctgcaacatctccacagaagtcctgaaagtcatcaatgccacagaggagttgatagcaggatctacagggccctgggagtccccacaagtccctcctgacagacagaaggggatgtttcctcgtgggacagaccaagtgagactggatgagcagctgacttccctggaagaaaatgtatacctggcagcaggcactgtgtatggactggagacccagctgactgagctagaagatgccgcccgctgcatccacagtggcactgatgagacccatctggcggatctggaggaccaggtggccacggctgcagcccaagtccaccatgctgaactccagatttcagatattgagagccggatttcagccctgaccattgcaggattaaacatagcaccatgtgtgcgcttcacaagaagacgggatcagaagcaaaggacccaggtacaaaccatagatacatcaaggcagcaaaggaggaaactgcctgctccaccggtgaaagctgaaaaaattgagacatcttcagtgactaccattaaaacatttaaccacaacttcattctccaaggctcctcaacaaacaggactaaggaaaggaaaggcaccaccaaggatttgatggagcctgctctggagtcagctgtgatgtactgacaccatggaattccactgccagtgacccactgcctccggccgtacacgacagtgccttgacccaacagccatcgagtactgtatgtatttccacctgaggagaaggcctggggaggccacagtgcaccattgcacagggctgtcctgatacctcatccagaaagccgtctcagacttcagcactgcggtcttgcccactctctgccttaggctcccaggggaatccaagacagaaaatgaagacactggcttccaacagcagcgctccatgtttaagatacatattttccctgtttgctttgctactgtatgttgactttaagatctttttttaaatacatttgattcagctagtattccatgtcaacaatttgtccaaaggaaaactgctggagggaggtggagggaggaaggtgggaattattatttaatacatcattaatgcttattaatctctcacaagcatctttgtcttgcaaatcctaagggaaaagcaagtccctgcagtgagcactagggacagtctaatttggggattgctcaaccatcaagactgcaggtctcccttcagccacctccttcctgctaaaagcttagcctaccacactaccagtcattcccatcgctttgcaatcacaagccacaggatgagaagttctgactcactcatgccatgcccagggctatctgaaacaatgtctcattaagaatttagggttcttccatgggcttactgacagttgcccagatctgaaggggaaagggtcttgagaaagaccatcactggctcaactttagggcactgtccagagtcaacatgatgtggtttagcagtgatcacatctaaacaaagtttaggtaaatgaattatcgcagagaaaaaccacatgagaaaatttttgtactccaaatttacttcccaataaatattcagcaaagtagtaaaatgaccttaaagataaaaatgattagggaatagccttagaaaatttataggtataaaaaattcaaggacaaactgtgcatttaatggacacaagaattgactctaactccatgtctgtggtttctttgaacccatatcaaatgtatgactatttagagtgtttataagagataatggaactgaactttcactcaattaattgggcattaacaaccttcttttatgtttgttcctgatatagtctgaatcttaggaagaaggtaaaagaaaggaggcaagagaatagttatgatgaatatgtgttaagtgcctgctctgaaggaggcaatgttcttctcatttgaatccttatggcaaccttattcaataggttttcccatatttcagatttaataactgaaggccagagagattaatttgccaaagccacacctttatgctaattatgattggaatgcatcacaaaagcctaactctgttgttttcaacctctacgttattttgctgctatgtgcatttccagatctgattttctgctaacttgtgtgctatgatccactcctgatgggggtctacattaatcttccagtactccttgctgatgctgtgttatgtgtcatctaacagaaatgactcctttgaaataagtaaatctttggctttttgttctgttggtgtgattcaaagcaaaacaaacaaacaaaaacaaattttaagaacacaacaaaaaagatttgacttccgaatagaatgttttctttaagaggcatgaaaagcaactattgttgtgttacagtgttaaaaatattcagttttctttgacaaaaatgtgtactgtgtaagccttgcaaacaaaaaacaacaaaaaagaagcagcagcagcagcctgctgtgtggcatctgaacttttataaaggtttccttgtgccaaataagtgcaaagatttaatttactattaaaaaccataagcatatgttatagttccagaagaattattttgtcatcaagtgattttgatctttagtgtcaatatttatatttagattaatttttataaatgaaaatattttaatggtttaagaaaatgaggacaacaggataatatctttgatgacttctgaaagttatgcttcccttcatgttatatgcacattgccaagaattactgtcaagagaaatgataagtaaaagtcatttatgaaaataaa

SEQ ID NO: 19215 - DNA, 3144 bp, Homo sapiens
  source 1..3144: mol_type = unassigned DNA
cctgggcgtactgaggcgcggtggcctgagcccggccgccatcgatgaccccggtcgcggacttgcttcaggctggccaccccccgtcttgtttcatcatctgtgttgagtaaccatggggaggaagctggacctgtctggtttgactgatgatgaaacagagcatgttcttcaggtggttcaaagagacttcaatcttcgcaaaaaagaagaagaacgactaagtgagctgaagcagaagctggatgaggaaggcagcaagtgcagcatcctctcgaagcaccagcagtttgtggagcactgctgcatgcgctgctgctcgcccttcaccttcctcgtcaacaccaagcgccagtgtggagattgcaaattcaatgtctgcaagagctgctgctcctaccagaagcacgaaaaggcctgggtctgctgcgtctgccagcaagcgaggaggaagcctttttgagtcaaacctggagaatgaaggaagcatttctggcagtgattcaacattttataggcagtcagaaggacatagtgtgatggacaccttggctgtggccctacgggtggctgaagaggccattgaggaagcaatttccaaagcagaggcatatggggacagcctggacaagcaaaatgaggccagttacctgcgggaccacaaggaggagctaactgaggaactggccacgacaatcctgcagaagattatacgaaaacagaagagcaaaagtgagcagcaagtggaagaagagccaggatggccacatccccagagttgcagcacaaaggtggcagatgaggggacctcagcatcccctggaggctaccgtgctcccgctgccctctggaggtcccagtctgccttctcaatcactggagaagaagccctgaagacccctccagtggaggctccatcgaggcagccaagggaccaaggccaacacccgagagcagagtctgctctgcccagctggaagagtgtggacaggctggatgaaacaaacctggccccagttttgcagagccccgacgggaactgggtggccctgaaggatggcgctccaccccccacccgactactggccaaacctaagagcgggacgtttcaggccctggaggtggcctccagtgtggcatctgcctacgatgagatgggctccgatagcgaggaagactttgactggagtgaggccttgagcaagctgtgtcccaggtcccgggccctgcccaggaacccccagcctcagcccacacaggcccagagctctgaccaaggccccatagctgcctccccatcctctgcactctcccccaaccctgaggccatgtgctctgactcggagacctcctccgcaggctcttcccgagaagttgggcaccaggccagactgtcctggttgcagaggaaggcccccaggaaccctgcagctgagaagatgcgcttgcatggagagctggacgtgaacttcaacccccagttggccagcagggagacctcggacagcagcgagccggaggaggccccccacaccacagaccggcgggccaggaggtggagaagagcccgactgggctcagaagagccaagcaaagaaccatcttcccccagcgcccagctccgggatctagacacacatcaggtgtcggatgatttatcagagacagacatcagcaatgaggctcgggatccccagactctcacagacaccacagaggagaaacggagaaacaggctgtacgagttagcaatgaaaatgagtgaaaaggagacttcttcaggggaggatcaggagtctgagcccaagacagaatctgagaaccagaaggaaagtctgtcctctgaagacaacagccagagtgtccaggaagagctgaagaagaagttttctgctgtttctctctgcaacatctccacagaagtcctgaaagtcatcaatgccacagaggagttgatagcaggatctacagggccctgggagtccccacaagtccctcctgacagacagaaggggatgtttcctcgtgggacagaccaagtgagactggatgagcagctgacttccctggaagaaaatgtatacctggcagcaggcactgtgtatggactggagacccagctgactgagctagaagatgccgcccgctgcatccacagtggcactgatgagacccatctggcggatctggaggaccaggtggccacggctgcagcccaagtccaccatgctgaactccagatttcagatattgagagccggatttcagccctgaccattgcaggattaaacatagcaccatgtgtgcgcttcacaagaagacgggatcagaagcaaaggacccaggtacaaaccatagatacatcaaggcagcaaaggaggaaactgcctgctccaccggtgaaagctgaaaaaattgagacatcttcagtgactaccattaaaacatttaaccacaacttcattctccaaggctcctcaacaaacaggactaaggaaaggaaaggcaccaccaaggatttgatggagcctgctctggagtcagctgtgatgtactgacaccatggaattccactgccagtgacccactgcctccggccgtacacgacagtgccttgacccaacagccatcgagtactgtatgtatttccacctgaggagaaggcctggggaggccacagtgcaccattgcacagggctgtcctgatacctcatccagaaagccgtctcagacttcagcactgcggtcttgcccactctctgccttaggctcccaggggaatccaagacagaaaatgaagacactggcttccaacagcagcgctccatgtttaagatacatattttccctgtttgctttgctactgtatgttgactttaagatctttttttaaatacatttgattcagctagtattccatgtcaacaatttgtccaaaggaaaactgctggagggaggtggagggaggaaggtgggaattattatttaatacatcattaatgcttattaatctctcacaagcatctttgtcttgcaaatcctaagggaaaagcaagtccctgcagtgagcactagggacagtctaatttggggattgctcaaccatcaagactgcaggtctcccttcagccacctccttcctgc

SEQ ID NO: 19216 - DNA, 2678 bp, Homo sapiens
  source 1..2678: mol_type = unassigned DNA
aacccggcggttccgcagctgtgtttgggagacttgggggcgcattagcctggacagctccctgatcggtcttgtttcatcatctgtgttgagtaaccatggggaggaagctggacctgtctggtttgactgatgatgaaacagagcatgttcttcaggtggttcaaagagacttcaatcttcgcaaaaaagaagaagaacgactaagtgagctgaagcagaagctggatgaggaaggcagcaagtgcagcatcctctcgaagcaccagcagtttgtggagcactgctgcatgcgctgctgctcgcccttcaccttcctcgtcaacaccaagcgccagtgtggagattgcaaattcaatgtctgcaagagctgctgctcctaccagaagcacgaaaaggcctgggtctgctgcgtctgccagcaagcgaggcttctgagggcccaatctctggaatggttctacaataatgtgaagagccgcttcaagcgctttggcagtgccaaggttctgaagaacctgtacaggaagcaccggctggagagtggcgcgtgcttcgacattctaggaggaagcctttttgagtcaaacctggagaatgaaggaagcatttctggcagtgattcaacattttataggcagtcagaaggacatagtgtgatggacaccttggctgtggccctacgggtggctgaagaggccattgaggaagcaatttccaaagcagaggcatatggggacagcctggacaagcaaaatgaggccagttacctgcgggaccacaaggaggagctaactgaggaactggccacgacaatcctgcagaagattatacgaaaacagaagagcaaaagtgagcagcaagtggaagaagagccaggatggccacatccccagagttgcagcacaaaggtggcagatgaggggacctcagcatcccctggaggctaccgtgctcccgctgccctctggaggtcccagtctgccttctcaatcactggagaagaagccctgaagacccctccagtggaggctccatcgaggcagccaagggaccaaggccaacacccgagagcagagtctgctctgcccagctggaagagtgtggacaggctggatgaaacaaacctggccccagttttgcagagccccgacgggaactgggtggccctgaaggatggcgctccaccccccacccgactactggccaaacctaagagcgggacgtttcaggccctggaggtggcctccagtgtggcatctgcctacgatgagatgggctccgatagcgaggaagactttgactggagtgaggccttgagcaagctgtgtcccaggtcccgggccctgcccaggaacccccagcctcagcccacacaggcccagagctctgaccaaggccccatagctgcctccccatcctctgcactctcccccaaccctgaggccatgtgctctgactcggagacctcctccgcaggctcttcccgagaagttgggcaccaggccagactgtcctggttgcagaggaaggcccccaggaaccctgcagctgagaagatgcgcttgcatggagagctggacgtgaacttcaacccccagttggccagcagggagacctcggacagcagcgagccggaggaggccccccacaccacagaccggcgggccaggaggtggagaagagcccgactgggctcagaagagccaagcaaagaaccatcttcccccagcgcccagctccgggatctagacacacatcaggtgtcggatgatttatcagagacagacatcagcaatgaggctcgggatccccagactctcacagacaccacagaggagaaacggagaaacaggctgtacgagttagcaatgaaaatgagtgaaaaggagacttcttcaggggaggatcaggagtctgagcccaagacagaatctgagaaccagaaggaaagtctgtcctctgaagacaacagccagagtgtccaggaagagctgaagaagaagttttctgctgtttctctctgcaacatctccacagaagtcctgaaagtcatcaatgccacagaggagttgatagcaggatctacagggccctgggagtccccacaagtccctcctgacagacagaaggggatgtttcctcgtgggacagaccaagtgagactggatgagcagctgacttccctggaagaaaatgtatacctggcagcaggcactgtgtatggactggagacccagctgactgagctagaagatgccgcccgctgcatccacagtggcactgatgagacccatctggcggatctggaggaccaggtggccacggctgcagcccaagtccaccatgctgaactccagatttcagatattgagagccggatttcagccctgaccattgcaggattaaacatagcaccatgtgtgcgcttcacaagaagacgggatcagaagcaaaggacccaggtacaaaccatagatacatcaaggcagcaaaggaggaaactgcctgctccaccggtgaaagctgaaaaaattgagacatcttcagtgactaccattaaaacatttaaccacaacttcattctccaaggctcctcaacaaacaggactaaggaaaggaaaggcaccaccaaggatttgatggagcctgctctggagtcagctgtgatgtactga

SEQ ID NO: 19217 - DNA, 2664 bp, Homo sapiens
  source 1..2664: mol_type = unassigned DNA
agaaacgagcagtagcactgtgctgttccttcactctggtattgctctctacccagagccctgtgtcttttcttaagaagactacctggcttatcctctgtctgggcttttctggccatgaggacatggagtgaagattttggagctctgtgccctgtgtcctggcgtttaattatttctcaagacacgtgagctaaatttgagtagaagagcttggcagaaagaaaaccaccagttacggcttctgagggcccaatctctggaatggttctacaataatgtgaagagccgcttcaagcgctttggcagtgccaaggttctgaagaacctgtacaggaagcaccggctggagagtggcgcgtgcttcgacattctaggaggaagcctttttgagtcaaacctggagaatgaaggaagcatttctggcagtgattcaacattttataggcagtcagaaggacatagtgtgatggacaccttggctgtggccctacgggtggctgaagaggccattgaggaagcaatttccaaagcagaggcatatggggacagcctggacaagcaaaatgaggccagttacctgcgggaccacaaggaggagctaactgaggaactggccacgacaatcctgcagaagattatacgaaaacagaagagcaaaagtgagcagcaagtggaagaagagccaggatggccacatccccagagttgcagcacaaaggtggcagatgaggggacctcagcatcccctggaggctaccgtgctcccgctgccctctggaggtcccagtctgccttctcaatcactggagaagaagccctgaagacccctccagtggaggctccatcgaggcagccaagggaccaaggccaacacccgagagcagagtctgctctgcccagctggaagagtgtggacaggctggatgaaacaaacctggccccagttttgcagagccccgacgggaactgggtggccctgaaggatggcgctccaccccccacccgactactggccaaacctaagagcgggacgtttcaggccctggaggtggcctccagtgtggcatctgcctacgatgagatgggctccgatagcgaggaagactttgactggagtgaggccttgagcaagctgtgtcccaggtcccgggccctgcccaggaacccccagcctcagcccacacaggcccagagctctgaccaaggccccatagctgcctccccatcctctgcactctcccccaaccctgaggccatgtgctctgactcggagacctcctccgcaggctcttcccgagaagttgggcaccaggccagactgtcctggttgcagaggaaggcccccaggaaccctgcagctgagaagatgcgcttgcatggagagctggacgtgaacttcaacccccagttggccagcagggagacctcggacagcagcgagccggaggaggccccccacaccacagaccggcgggccaggaggtggagaagagcccgactgggctcagaagagccaagcaaagaaccatcttcccccagcgcccagctccgggatctagacacacatcaggtgtcggatgatttatcagagacagacatcagcaatgaggctcgggatccccagactctcacagacaccacagaggagaaacggagaaacaggctgtacgagttagcaatgaaaatgagtgaaaaggagacttcttcaggggaggatcaggagtctgagcccaagacagaatctgagaaccagaaggaaagtctgtcctctgaagacaacagccagagtgtccaggaagagctgaagaagaagttttctgctgtttctctctgcaacatctccacagaagtcctgaaagtcatcaatgccacagaggagttgatagcaggatctacagggccctgggagtccccacaagtccctcctgacagacagaaggggatgtttcctcgtgggacagaccaagtgagactggatgagcagctgacttccctggaagaaaatgtatacctggcagcaggcactgtgtatggactggagacccagctgactgagctagaagatgccgcccgctgcatccacagtggcactgatgagacccatctggcggatctggaggaccaggtggccacggctgcagcccaagtccaccatgctgaactccagatttcagatattgagagccggatttcagccctgaccattgcaggattaaacatagcaccatgtgtgcgcttcacaagaagacgggatcagaagcaaaggacccaggtacaaaccatagatacatcaaggcagcaaaggaggaaactgcctgctccaccggtgaaagctgaaaaaattgagacatcttcagtgactaccattaaaacatttaaccacaacttcattctccaaggctcctcaacaaacaggactaaggaaaggaaaggcaccaccaaggatttgatggagcctgctctggagtcagctgtgatgtactgacaccatggaattccactgccagtgacccactgcctccggccgtacacgacagtgccttgacccaacagccatcgagtactgtatgtatttccacctgaggagaaggcctggggaggccacagtgcaccattgcacagggctgtcctgatacctcatccagaaagccgtctcagact

SEQ ID NO: 19218 - DNA, 7444 bp, Homo sapiens
  source 1..7444: mol_type = unassigned DNA
gggagtcagccagacccccatcctgacaaggcttgtggaactgctgactcaggatgtcggggttcaggctgggtgaccacgtgtggctggagcctccctccacccacaagaccggcgtggccatcgggggcatcatcaaagaggcaaagccaggcaaagtcttggttgaagatgacgagggcaaggaacactggatccgagcagaggactttggtgtcctcagtcccatgcaccccaactcagtccagggtgtggacgacatgatccgcctgggggacctgaacgaggcaggcatggtgcacaacctcctgatccgctaccagcagcacaagatctatacatacacaggctccatcctggtggccgtcaacccgttccaggtgctgccgctctacaccctggagcaggtacagctctactacagccgccatatgggcgagctgcccccgcatgtctttgccatcgccaacaactgctacttcagcatgaagaggaacaagagggaccagtgctgcatcatcagcggcgagtctggggctggcaagacggagaccaccaagctcatcctgcagttcctggccaccatcagtggccagcattcgtggattgagcagcaggtcctggaagccaaccccatcctggaggcctttggaaatgccaagacaatccgcaacgacaactcaagccgctttgggaagtacattgacatctactttaaccccagcggggtgatcgagggcgcgcgcatcgagcaatttctcctggagaagtcccgggtctgccggcaggctcccgaggagcggaactaccatatcttctactgcatgctcatgggggtgagtgctgaggacaagcagctgctgagcctgggcacgccctccgagtaccactacctgaccatggggaactgcacttcctgtgaggggctcaacgacgccaaggactacgcccacatccgctcggccatgaagatcctccagttctccgactccgagagctgggacgtcatcaagctgctggctgccattctccacctggggaatgtggggttcatggcttcggtcttcgagaacctggacgcctcagacgtgatggagacgcccgcctttcccaccgtgatgaagttactggaggtgcagcaccaggagctccgggactgtctgatcaagcacaccatcctcatccgaggggaatttgtcaccaggtccctgaacattgcccaggctgctgaccggagggacgcctttgtcaagggcatctatgggcacctcttcctgtggattgtcaagaagatcaatgccgccatcttcacaccaccagcccaggaccccaaaaatgtgcggagggccatcggcctcctggacatatttggctttgaaaatttcgagaacaatagcttcgagcagctctgcatcaacttcgccaacgagcacctgcagcagttctttgtgcagcacgtgttcaccatggagcaagaggagtaccgctcggagaacatctcctgggactatatccactacaccgacaatcggcccaccctggacctgctggccctcaagcccatgagcatcatctccctcctggacgaagaaagccgcttcccgcaggggacagatctcaccatgctgcaaaagctgaacagcgtccatgccaacaacaaggccttcctacagcccaagaacatccacgatgccagatttggcattgcccattttgccggcgaggtgtactaccaagcagaaggcttcctggagaagaaccgagacgtgctgagcacagatatcctcaccctggtttactcctccaaaaacaagtttctgagggagatattcaacttggagttagcagagaccaagctgggccatgggaccatccgccaggcaaaggcaggaaaccatctcttcaagtctgcagactcaaataaacggccctccaccttaggaagccagttcaaacagtctctggaccagctgatgaaaatcctgaccaactgccagccttacttcatccgctgcatcaaacctaatgagtacaagaagccgctgctgttcgaccgggagctgtgcctgcggcagctgcgatactcgggcatgatggagaccgtgcacatccgcaagtcgggcttccccatccgctacacgttcgaggagttctcgcagaggttcggcgtgttgctgcccaacgccatgcggatgcagctgcaaggcaagctccgccagatgaccctgggcatcactgacgtgtggctgcggacagacaaagactggaaagcggggaagacaaaaattttcctgagggatcatcaggacactctgctggaggtacagagaagccaggtgctagacagagcggcgctcagcatccagaaagtccttcggggctacagatacaggaaggagttcctgaggcagaggcgggcagctgtgaccctgcaggcctggtggagaggctactgcaacaggaggaatttcaagctgatcctcgtgggctttgagcgcctgcaggctattgcccggagccagccgctggcgaggcagtaccaggccatgcggcagaggacagtccagctgcaggccctgtgcaggggatacctggtgcgccagcaagtccaggccaagaggagggcagtggtggtcattcaggcccatgccaggggcatggctgcccggcgcaacttccagcaaaggaaggccaatgcgccgctggtcatcccggccgaggggcagaaaagccaaggcgctctccctgccaagaagcgcagatccatctacgacaccgtcactgacacggagatggtggagaaggtgttcggcttcctccctgccatgattgggggccaggagggccaggcctcgccgcactttgaggatctggaatcgaagacccagaagctgcttgaggttgacctggacacagtccccatggcggaggagcctgaggaggatgtggatggcctggccgagtacaccttccccaagtttgctgtgacttacttccagaaatcagccagccacacacacatccggcggcccctccgatacccgttgctttaccacgaagatgacactgactgcttggccgccctggtcatatggaacgtcatcctgaggttcatgggtgatctcccagagccagtgctgtatgccaggagcagccagcagggcagctcagtgatgcggcagatccatgacacgctgggcagggagcacggtgcccaggttccacagcacagtagatctgcacaggtggccagccagctgaacattggagaggaggcattggagcctgatggccttggtgcagaccggcccatgtccaacctggagaaggtgcacttcatcgtgggctacgccatcctgcggcccagcctcagggatgagatttactgccagatctgcaagcagctctcggagaacttcaaaacaagcagcctggcccggggctggatcctgctcagcctctgcctcggctgcttcccaccctcagagaggttcatgaagtatctactgaacttcatcggccaagggccggcgacctacggccccttctgtgccgagcgcctgagacgcacctatgccaatggggtgcgtgcggagccccccacctggctggagctgcaggctgtcaagtccaagaagcacatccccatccaagtcatcttggccactggagagagcctaaccgtccccgtggactcagcctccacatctcgggaaatgtgcatgcacatcgctcacaagcagggcctcagcgaccacctgggcttctccctccaggtcgccgtgtacgacaagttctggtccctgggcagcgggcgcgaccacatgatggatgccatcgcccggtgtgagcagatggcccaggagaggggcgagagccagcgccagtcaccctggcgcatctacttccggaaggaattcttcaccccctggcacgactcccgggaggaccctgtcagcaccgagcttatttaccgccaagtcctccgaggagtctggtctggcgagtacagcttcgagaaggaggaagagctggttgagctgctggcccggcactgctacgtgcagctcggcgcctcagcagagagcaaggctgtccaggagctgctgcccagctgcatcccccacaagctgtacaggaccaagcccccagacaggtgggcgagcctcgtcactgccgcctgcgccaaggccccatacactcagaagcaagtcacaccactggccgtgcgagagcaggtggtggacgccgcccgcctgcagtggccgctgctcttctcccggctcttcgaagtcatcacactctcagccttcacactgccgtctctcctggccaggcccccgcctgcccaagacgcaggaccagcaggagaagatgctgctggaactctctttcccagaggtcatgggtctggccaccaacaggtgcgggccctgagggaagatctcttcttacacacggagccccaccctcctgcaccaggccgtactgcccatgaagtactccattggggcatcacgcgttgcactggcagcttctctttgaaacccaggtccacccggaaggggcagggaagcgtgcagcctctggcgggcacttatttagaaggctcctttctttgtcatggacgagaactggtggcctggagggtacaggttgtctgggaaggcgacaagggacagtgcctggctggggctgacccccactcccatgggtctccatggatctcattgactgggaacttttccatgccctttgggaagtccacacaacagagtggcacatgcatctctgggctgtgccaggtgtacagtggccaccactccccactggccacctcgccacgaagtaccgacagcatcacccattctgcagatgagcggatgagtaaactgaagcacgccgaggttaggtggctcagagtaagcacatggcagagccggcagctcatctcagctctgacctttgcagtgtccctgcggtgtcactgcacaccagccacctcattatctgcccacagccaaccccacacatgggctgcaccactctcagcctccgagagacccacagtggtgtctggcctagtcctggccctggcagagcagctctgtgtcctcataaggtggagggggctcctggtcacgctgtccttcatctccagggaggcccagggcgggcagaggctgctgctctccacgatgcatgaggagtacgagtttgtgtcacccagcagtgtggccatcgctgagctggtggccctgttcctggagggcctgaaggagaggtccattttcgccatggccctgcaggacaggaaggccacagatgacaccaccctcctggccttcaagaagggggacctgttggtcctcacaaagaagcaggggctgctggcctctgagaactggaccctcggccagaacgacaggacaggcaagacggggctggtgcccatggcctgcctctacaccatccccacggtcactaagccctcggcacagctgctgagcttgcttgccatgtcaccagagaagaggaagctggcggctcaggaggggcagttcacagagccacgtcctgaggagccacccaaggaaaagctgcacaccctggaggagttctcctatgagttcttcagggctccagagaaggacatggtgagcatggccgtgctgcccctggcccgtgcccgtggccacctgtgggcctattcctgcgagccgctgcgacagccgctgctcaagcgagtccacgccaacgtcgacctctgggacatcgcctgccagatctttgccacacccatcctccggtacatgggcgactacccttctcggcaggcctggcccaccctggagctcaccgaccagatcttcacactggccctgcagcacccggccctccaggacgaggtctactgccagatcctgaagcagctgacgcacaactccaacaggcacagcgaagagcggggctggcagctgctgtggctgtgcacgggcctcttcccgcccagcaaggggctgctgccccatgcccagaagtttatagacactcggagggggaagctgctggcccccgactgcagccgccgaatccagaaggtcctgaggacggggccccggaagcagcccccgcaccaggtggaggtggaggccgcagagcagaacgtctcccgcatctgccacaagatctacttccccaatgacaccagtgagatgctggaggtggttgccaacacacgggtgcgggatgtgtgtgacagcattgccaccaggctgcagctggcctcctgggagggctgcagcctcttcatcaagatttcagacaaggtcatcagccagaaggagggagacttcttctttgattccttgagggaggtgtctgactgggtgaagaagaacaagccccagaaagaaggggcccccgtgacgctcccctaccaggtgtacttcatgcggaaattgtggctcaacatatctccagggaaggatgtgaatgcagacaccatactccattaccaccaggagctgcccaagtacctgcgcggattccacaagtgttcgcgggaggatgccatccacctggcgggcctcatctacaaggcccagttcaacaacgaccggtcccagctggctagtgtccccaagatcctgagggaactggtgcctgagaacctcacacgcctgatgtcctcggaggagtggaaaaagagcatccttctagcctatgacaagcataaggacaagacagtggaggaggccaaggtggccttcctgaagtggatctgccggtggcccaccttcggatccgccttcttcgaggtgaagcaaacctcggagccttcctacccggacgtcatcctcatcgccatcaaccgacatggggttctgctcatccaccccaagaccaaggacctgctcaccacctatcccttcaccaagatctccagctggagcagcggcagcacctacttccacatggcgctggggagcctgggccgtggcagccgcctgctgtgcgagacctccctgggctataagatggatgacctgctgacctcatatgtgcagcagctcctgagtgccatgaacaagcagcggggctccaaggccccagccctggccagcacctagcagcggatgctggcgtgtctgctcaggcgcccttcccgacctctagcctggcggcaccttcccaggccctctcaacccagggcctgtccttggcgggcagccttccatgctgccccccatacaaagcccactcagccccgcaggcggccccctctgtcctgggcgctgcccagggaggccaaaagacgggcccagaatggggtcgggagtctcggacccccaggctattggtggatgactgactgacaggacacctcccaaccccaccccaccccaccagaatgttcaataaaaactcctggagcaggaga

SEQ ID NO: 19219 - DNA, 6718 bp, Homo sapiens
  source 1..6718: mol_type = unassigned DNA
gggagtcagccagacccccatcctgacaaggcttgtggaactgctgactcaggatgtcggggttcaggctgggtgaccacgtgtggctggagcctccctccacccacaagaccggcgtggccatcgggggcatcatcaaagaggcaaagccaggcaaagtcttggttgaagatgacgagggcaaggaacactggatccgagcagaggactttggtgtcctcagtcccatgcaccccaactcagtccagggtgtggacgacatgatccgcctgggggacctgaacgaggcaggcatggtgcacaacctcctgatccgctaccagcagcacaagatctatacatacacaggctccatcctggtggccgtcaacccgttccaggtgctgccgctctacaccctggagcaggtacagctctactacagccgccatatgggcgagctgcccccgcatgtctttgccatcgccaacaactgctacttcagcatgaagaggaacaagagggaccagtgctgcatcatcagcggcgagtctggggctggcaagacggagaccaccaagctcatcctgcagttcctggccaccatcagtggccagcattcgtggattgagcagcaggtcctggaagccaaccccatcctggaggcctttggaaatgccaagacaatccgcaacgacaactcaagccgctttgggaagtacattgacatctactttaaccccagcggggtgatcgagggcgcgcgcatcgagcaatttctcctggagaagtcccgggtctgccggcaggctcccgaggagcggaactaccatatcttctactgcatgctcatgggggtgagtgctgaggacaagcagctgctgagcctgggcacgccctccgagtaccactacctgaccatggggaactgcacttcctgtgaggggctcaacgacgccaaggactacgcccacatccgctcggccatgaagatcctccagttctccgactccgagagctgggacgtcatcaagctgctggctgccattctccacctggggaatgtggggttcatggcttcggtcttcgagaacctggacgcctcagacgtgatggagacgcccgcctttcccaccgtgatgaagttactggaggtgcagcaccaggagctccgggactgtctgatcaagcacaccatcctcatccgaggggaatttgtcaccaggtccctgaacattgcccaggctgctgaccggagggacgcctttgtcaagggcatctatgggcacctcttcctgtggattgtcaagaagatcaatgccgccatcttcacaccaccagcccaggaccccaaaaatgtgcggagggccatcggcctcctggacatatttggctttgaaaatttcgagaacaatagcttcgagcagctctgcatcaacttcgccaacgagcacctgcagcagttctttgtgcagcacgtgttcaccatggagcaagaggagtaccgctcggagaacatctcctgggactatatccactacaccgacaatcggcccaccctggacctgctggccctcaagcccatgagcatcatctccctcctggacgaagaaagccgcttcccgcaggggacagatctcaccatgctgcaaaagctgaacagcgtccatgccaacaacaaggccttcctacagcccaagaacatccacgatgccagatttggcattgcccattttgccggcgaggtgtactaccaagcagaaggcttcctggagaagaaccgagacgtgctgagcacagatatcctcaccctggtttactcctccaaaaacaagtttctgagggagatattcaacttggagttagcagagaccaagctgggccatgggaccatccgccaggcaaaggcaggaaaccatctcttcaagtctgcagactcaaataaacggccctccaccttaggaagccagttcaaacagtctctggaccagctgatgaaaatcctgaccaactgccagccttacttcatccgctgcatcaaacctaatgagtacaagaagccgctgctgttcgaccgggagctgtgcctgcggcagctgcgatactcgggcatgatggagaccgtgcacatccgcaagtcgggcttccccatccgctacacgttcgaggagttctcgcagaggttcggcgtgttgctgcccaacgccatgcggatgcagctgcaaggcaagctccgccagatgaccctgggcatcactgacgtgtggctgcggacagacaaagactggaaagcggggaagacaaaaattttcctgagggatcatcaggacactctgctggaggtacagagaagccaggtgctagacagagcggcgctcagcatccagaaagtccttcggggctacagatacaggaaggagttcctgaggcagaggcgggcagctgtgaccctgcaggcctggtggagaggctactgcaacaggaggaatttcaagctgatcctcgtgggctttgagcgcctgcaggctattgcccggagccagccgctggcgaggcagtaccaggccatgcggcagaggacagtccagctgcaggccctgtgcaggggatacctggtgcgccagcaagtccaggccaagaggagggcagtggtggtcattcaggcccatgccaggggcatggctgcccggcgcaacttccagcaaaggaaggccaatgcgccgctggtcatcccggccgaggggcagaaaagccaaggcgctctccctgccaagaagcgcagatccatctacgacaccgtcactgacacggagatggtggagaaggtgttcggcttcctccctgccatgattgggggccaggagggccaggcctcgccgcactttgaggatctggaatcgaagacccagaagctgcttgaggttgacctggacacagtccccatggcggaggagcctgaggaggatgtggatggcctggccgagtacaccttccccaagtttgctgtgacttacttccagaaatcagccagccacacacacatccggcggcccctccgatacccgttgctttaccacgaagatgacactgactgcttggccgccctggtcatatggaacgtcatcctgaggttcatgggtgatctcccagagccagtgctgtatgccaggagcagccagcagggcagctcagtgatgcggcagatccatgacacgctgggcagggagcacggtgcccaggttccacagcacagtagatctgcacaggtggccagccagctgaacattggagaggaggcattggagcctgatggccttggtgcagaccggcccatgtccaacctggagaaggtgcacttcatcgtgggctacgccatcctgcggcccagcctcagggatgagatttactgccagatctgcaagcagctctcggagaacttcaaaacaagcagcctggcccggggctggatcctgctcagcctctgcctcggctgcttcccaccctcagagaggttcatgaagtatctactgaacttcatcggccaagggccggcgacctacggccccttctgtgccgagcgcctgagacgcacctatgccaatggggtgcgtgcggagccccccacctggctggagctgcaggctgtcaagtccaagaagcacatccccatccaagtcatcttggccactggagagagcctaaccgtccccgtggactcagcctccacatctcgggaaatgtgcatgcacatcgctcacaagcagggcctcagcgaccacctgggcttctccctccaggtcgccgtgtacgacaagttctggtccctgggcagcgggcgcgaccacatgatggatgccatcgcccggtgtgagcagatggcccaggagaggggcgagagccagcgccagtcaccctggcgcatctacttccggaaggaattcttcaccccctggcacgactcccgggaggaccctgtcagcaccgagcttatttaccgccaagtcctccgaggagtctggtctggcgagtacagcttcgagaaggaggaagagctggttgagctgctggcccggcactgctacgtgcagctcggcgcctcagcagagagcaaggctgtccaggagctgctgcccagctgcatcccccacaagctgtacaggaccaagcccccagacaggtgggcgagcctcgtcactgccgcctgcgccaaggccccatacactcagaagcaagtcacaccactggccgtgcgagagcaggtggtggacgccgcccgcctgcagtggccgctgctcttctcccggctcttcgaagtcatcacactctcaggcccccgcctgcccaagacgcagctgatcttggctgttaactggaaggggctttgcttcctggaccagcaggagaagatgctgctggaactctctttcccagaggtcatgggtctggccaccaacagggaggcccagggcgggcagaggctgctgctctccacgatgcatgaggagtacgagtttgtgtcacccagcagtgtggccatcgctgagctggtggccctgttcctggagggcctgaaggagaggtccattttcgccatggccctgcaggacaggaaggccacagatgacaccaccctcctggccttcaagaagggggacctgttggtcctcacaaagaagcaggggctgctggcctctgagaactggaccctcggccagaacgacaggacaggcaagacggggctggtgcccatggcctgcctctacaccatccccacggtcactaagccctcggcacagctgctgagcttgcttgccatgtcaccagagaagaggaagctggcggctcaggaggggcagttcacagagccacgtcctgaggagccacccaaggaaaagctgcacaccctggaggagttctcctatgagttcttcagggctccagagaaggacatggtgagcatggccgtgctgcccctggcccgtgcccgtggccacctgtgggcctattcctgcgagccgctgcgacagccgctgctcaagcgagtccacgccaacgtcgacctctgggacatcgcctgccagatctttgccacacccatcctccggtacatgggcgactacccttctcggcaggcctggcccaccctggagctcaccgaccagatcttcacactggccctgcagcacccggccctccaggacgaggtctactgccagatcctgaagcagctgacgcacaactccaacaggcacagcgaagagcggggctggcagctgctgtggctgtgcacgggcctcttcccgcccagcaaggggctgctgccccatgcccagaagtttatagacactcggagggggaagctgctggcccccgactgcagccgccgaatccagaaggtcctgaggacggggccccggaagcagcccccgcaccaggtggaggtggaggccgcagagcagaacgtctcccgcatctgccacaagatctacttccccaatgacaccagtgagatgctggaggtggttgccaacacacgggtgcgggatgtgtgtgacagcattgccaccaggctgcagctggcctcctgggagggctgcagcctcttcatcaagatttcagacaaggtcatcagccagaaggagggagacttcttctttgattccttgagggaggtgtctgactgggtgaagaagaacaagccccagaaagaaggggcccccgtgacgctcccctaccaggtgtacttcatgcggaaattgtggctcaacatatctccagggaaggatgtgaatgcagacaccatactccattaccaccaggagctgcccaagtacctgcgcggattccacaagtgttcgcgggaggatgccatccacctggcgggcctcatctacaaggcccagttcaacaacgaccggtcccagctggctagtgtccccaagatcctgagggaactggtgcctgagaacctcacacgcctgatgtcctcggaggagtggaaaaagagcatccttctagcctatgacaagcataaggacaagacagtggaggaggccaaggtggccttcctgaagtggatctgccggtggcccaccttcggatccgccttcttcgaggtgaagcaaacctcggagccttcctacccggacgtcatcctcatcgccatcaaccgacatggggttctgctcatccaccccaagaccaaggacctgctcaccacctatcccttcaccaagatctccagctggagcagcggcagcacctacttccacatggcgctggggagcctgggccgtggcagccgcctgctgtgcgagacctccctgggctataagatggatgacctgctgacctcatatgtgcagcagctcctgagtgccatgaacaagcagcggggctccaaggccccagccctggccagcacctagcagcggatgctggcgtgtctgctcaggcgcccttcccgacctctagcctggcggcaccttcccaggccctctcaacccagggcctgtccttggcgggcagccttccatgctgccccccatacaaagcccactcagccccgcaggcggccccctctgtcctgggcgctgcccagggaggccaaaagacgggcccagaatggggtcgggagtctcggacccccaggctattggtggatgactgactgacaggacacctcccaaccccaccccaccccaccagaatgttcaataaaaactcctggagcaggaga

SEQ ID NO: 19220 - DNA, 6694 bp, Homo sapiens
  source 1..6694: mol_type = unassigned DNA
tccatacaggcttgtggaactgctgactcaggatgtcggggttcaggctgggtgaccacgtgtggctggagcctccctccacccacaagaccggcgtggccatcgggggcatcatcaaagaggcaaagccaggcaaagtcttggttgaagatgacgagggcaaggaacactggatccgagcagaggactttggtgtcctcagtcccatgcaccccaactcagtccagggtgtggacgacatgatccgcctgggggacctgaacgaggcaggcatggtgcacaacctcctgatccgctaccagcagcacaagatctatacatacacaggctccatcctggtggccgtcaacccgttccaggtgctgccgctctacaccctggagcaggtacagctctactacagccgccatatgggcgagctgcccccgcatgtctttgccatcgccaacaactgctacttcagcatgaagaggaacaagagggaccagtgctgcatcatcagcggcgagtctggggctggcaagacggagaccaccaagctcatcctgcagttcctggccaccatcagtggccagcattcgtggattgagcagcaggtcctggaagccaaccccatcctggaggcctttggaaatgccaagacaatccgcaacgacaactcaagccgctttgggaagtacattgacatctactttaaccccagcggggtgatcgagggcgcgcgcatcgagcaatttctcctggagaagtcccgggtctgccggcaggctcccgaggagcggaactaccatatcttctactgcatgctcatgggggtgagtgctgaggacaagcagctgctgagcctgggcacgccctccgagtaccactacctgaccatggggaactgcacttcctgtgaggggctcaacgacgccaaggactacgcccacatccgctcggccatgaagatcctccagttctccgactccgagagctgggacgtcatcaagctgctggctgccattctccacctggggaatgtggggttcatggcttcggtcttcgagaacctggacgcctcagacgtgatggagacgcccgcctttcccaccgtgatgaagttactggaggtgcagcaccaggagctccgggactgtctgatcaagcacaccatcctcatccgaggggaatttgtcaccaggtccctgaacattgcccaggctgctgaccggagggacgcctttgtcaagggcatctatgggcacctcttcctgtggattgtcaagaagatcaatgccgccatcttcacaccaccagcccaggaccccaaaaatgtgcggagggccatcggcctcctggacatatttggctttgaaaatttcgagaacaatagcttcgagcagctctgcatcaacttcgccaacgagcacctgcagcagttctttgtgcagcacgtgttcaccatggagcaagaggagtaccgctcggagaacatctcctgggactatatccactacaccgacaatcggcccaccctggacctgctggccctcaagcccatgagcatcatctccctcctggacgaagaaagccgcttcccgcaggggacagatctcaccatgctgcaaaagctgaacagcgtccatgccaacaacaaggccttcctacagcccaagaacatccacgatgccagatttggcattgcccattttgccggcgaggtgtactaccaagcagaaggcttcctggagaagaaccgagacgtgctgagcacagatatcctcaccctggtttactcctccaaaaacaagtttctgagggagatattcaacttggagttagcagagaccaagctgggccatgggaccatccgccaggcaaaggcaggaaaccatctcttcaagtctgcagactcaaataaacggccctccaccttaggaagccagttcaaacagtctctggaccagctgatgaaaatcctgaccaactgccagccttacttcatccgctgcatcaaacctaatgagtacaagaagccgctgctgttcgaccgggagctgtgcctgcggcagctgcgatactcgggcatgatggagaccgtgcacatccgcaagtcgggcttccccatccgctacacgttcgaggagttctcgcagaggttcggcgtgttgctgcccaacgccatgcggatgcagctgcaaggcaagctccgccagatgaccctgggcatcactgacgtgtggctgcggacagacaaagactggaaagcggggaagacaaaaattttcctgagggatcatcaggacactctgctggaggtacagagaagccaggtgctagacagagcggcgctcagcatccagaaagtccttcggggctacagatacaggaaggagttcctgaggcagaggcgggcagctgtgaccctgcaggcctggtggagaggctactgcaacaggaggaatttcaagctgatcctcgtgggctttgagcgcctgcaggctattgcccggagccagccgctggcgaggcagtaccaggccatgcggcagaggacagtccagctgcaggccctgtgcaggggatacctggtgcgccagcaagtccaggccaagaggagggcagtggtggtcattcaggcccatgccaggggcatggctgcccggcgcaacttccagcaaaggaaggccaatgcgccgctggtcatcccggccgaggggcagaaaagccaaggcgctctccctgccaagaagcgcagatccatctacgacaccgtcactgacacggagatggtggagaaggtgttcggcttcctccctgccatgattgggggccaggagggccaggcctcgccgcactttgaggatctggaatcgaagacccagaagctgcttgaggttgacctggacacagtccccatggcggaggagcctgaggaggatgtggatggcctggccgagtacaccttccccaagtttgctgtgacttacttccagaaatcagccagccacacacacatccggcggcccctccgatacccgttgctttaccacgaagatgacactgactgcttggccgccctggtcatatggaacgtcatcctgaggttcatgggtgatctcccagagccagtgctgtatgccaggagcagccagcagggcagctcagtgatgcggcagatccatgacacgctgggcagggagcacggtgcccaggttccacagcacagtagatctgcacaggtggccagccagctgaacattggagaggaggcattggagcctgatggccttggtgcagaccggcccatgtccaacctggagaaggtgcacttcatcgtgggctacgccatcctgcggcccagcctcagggatgagatttactgccagatctgcaagcagctctcggagaacttcaaaacaagcagcctggcccggggctggatcctgctcagcctctgcctcggctgcttcccaccctcagagaggttcatgaagtatctactgaacttcatcggccaagggccggcgacctacggccccttctgtgccgagcgcctgagacgcacctatgccaatggggtgcgtgcggagccccccacctggctggagctgcaggctgtcaagtccaagaagcacatccccatccaagtcatcttggccactggagagagcctaaccgtccccgtggactcagcctccacatctcgggaaatgtgcatgcacatcgctcacaagcagggcctcagcgaccacctgggcttctccctccaggtcgccgtgtacgacaagttctggtccctgggcagcgggcgcgaccacatgatggatgccatcgcccggtgtgagcagatggcccaggagaggggcgagagccagcgccagtcaccctggcgcatctacttccggaaggaattcttcaccccctggcacgactcccgggaggaccctgtcagcaccgagcttatttaccgccaagtcctccgaggagtctggtctggcgagtacagcttcgagaaggaggaagagctggttgagctgctggcccggcactgctacgtgcagctcggcgcctcagcagagagcaaggctgtccaggagctgctgcccagctgcatcccccacaagctgtacaggaccaagcccccagacaggtgggcgagcctcgtcactgccgcctgcgccaaggccccatacactcagaagcaagtcacaccactggccgtgcgagagcaggtggtggacgccgcccgcctgcagtggccgctgctcttctcccggctcttcgaagtcatcacactctcaggcccccgcctgcccaagacgcagctgatcttggctgttaactggaaggggctttgcttcctggaccagcaggagaagatgctgctggaactctctttcccagaggtcatgggtctggccaccaacagggaggcccagggcgggcagaggctgctgctctccacgatgcatgaggagtacgagtttgtgtcacccagcagtgtggccatcgctgagctggtggccctgttcctggagggcctgaaggagaggtccattttcgccatggccctgcaggacaggaaggccacagatgacaccaccctcctggccttcaagaagggggacctgttggtcctcacaaagaagcaggggctgctggcctctgagaactggaccctcggccagaacgacaggacaggcaagacggggctggtgcccatggcctgcctctacaccatccccacggtcactaagccctcggcacagctgctgagcttgcttgccatgtcaccagagaagaggaagctggcggctcaggaggggcagttcacagagccacgtcctgaggagccacccaaggaaaagctgcacaccctggaggagttctcctatgagttcttcagggctccagagaaggacatggtgagcatggccgtgctgcccctggcccgtgcccgtggccacctgtgggcctattcctgcgagccgctgcgacagccgctgctcaagcgagtccacgccaacgtcgacctctgggacatcgcctgccagatctttgtcgccatcctccggtacatgggcgactacccttctcggcaggcctggcccaccctggagctcaccgaccagatcttcacactggccctgcagcacccggccctccaggacgaggtctactgccagatcctgaagcagctgacgcacaactccaacaggcacagcgaagagcggggctggcagctgctgtggctgtgcacgggcctcttcccgcccagcaaggggctgctgccccatgcccagaagtttatagacactcggagggggaagctgctggcccccgactgcagccgccgaatccagaaggtcctgaggacggggccccggaagcagcccccgcaccaggtggaggtggaggccgcagagcagaacgtctcccgcatctgccacaagatctacttccccaatgacaccagtgagatgctggaggtggttgccaacacacgggtgcgggatgtgtgtgacagcattgccaccaggctgcagctggcctcctgggagggctgcagcctcttcatcaagatttcagacaaggtcatcagccagaaggagggagacttcttctttgattccttgagggaggtgtctgactgggtgaagaagaacaagccccagaaagaaggggcccccgtgacgctcccctaccaggtgtacttcatgcggaaattgtggctcaacatatctccagggaaggatgtgaatgcagacaccatactccattaccaccaggagctgcccaagtacctgcgcggattccacaagtgttcgcgggaggatgccatccacctggcgggcctcatctacaaggcccagttcaacaacgaccggtcccagctggctagtgtccccaagatcctgagggaactggtgcctgagaacctcacacgcctgatgtcctcggaggagtggaaaaagagcatccttctagcctatgacaagcataaggacaagacagtggaggaggccaaggtggccttcctgaagtggatctgccggtggcccaccttcggatccgccttcttcgaggtgaagcaaacctcggagccttcctacccggacgtcatcctcatcgccatcaaccgacatggggttctgctcatccaccccaagaccaaggacctgctcaccacctatcccttcaccaagatctccagctggagcagcggcagcacctacttccacatggcgctggggagcctgggccgtggcagccgcctgctgtgcgagacctccctgggctataagatggatgacctgctgacctcatatgtgcagcagctcctgagtgccatgaacaagcagcggggctccaaggccccagccctggccagcacctagcagcggatgctggcgtgtctgctcaggcgcccttcccgacctctagcctggcggcaccttcccaggccctctcaacccagggcctgtccttggcgggcagccttccatgctgccccccatacaaagcccactcagccccgcaggcggccccctctgtcctgggcgctgcccagggaggccaaaagacgggcccagaatggggtcgggagtctcggacccccaggctattggtggatgactgactgacaggacacctcccaaccccaccccaccccaccagaatgttcaataaaaactcctggagcaggaga

SEQ ID NO: 19221 - DNA, 6715 bp, Homo sapiens
  source 1..6715: mol_type = unassigned DNA
gggagtcagccagacccccatcctgacaaggcttgtggaactgctgactcaggatgtcggggttcaggctgggtgaccacgtgtggctggagcctccctccacccacaagaccggcgtggccatcgggggcatcatcaaagaggcaaagccaggcaaagtcttggttgaagatgacgagggcaaggaacactggatccgagcagaggactttggtgtcctcagtcccatgcaccccaactcagtccagggtgtggacgacatgatccgcctgggggacctgaacgaggcaggcatggtgcacaacctcctgatccgctaccagcagcacaagatctatacatacacaggctccatcctggtggccgtcaacccgttccaggtgctgccgctctacaccctggagcaggtacagctctactacagccgccatatgggcgagctgcccccgcatgtctttgccatcgccaacaactgctacttcagcatgaagaggaacaagagggaccagtgctgcatcatcagcggcgagtctggggctggcaagacggagaccaccaagctcatcctgcagttcctggccaccatcagtggccagcattcgtggattgagcagcaggtcctggaagccaaccccatcctggaggcctttggaaatgccaagacaatccgcaacgacaactcaagccgctttgggaagtacattgacatctactttaaccccagcggggtgatcgagggcgcgcgcatcgagcaatttctcctggagaagtcccgggtctgccggcaggctcccgaggagcggaactaccatatcttctactgcatgctcatgggggtgagtgctgaggacaagcagctgctgagcctgggcacgccctccgagtaccactacctgaccatggggaactgcacttcctgtgaggggctcaacgacgccaaggactacgcccacatccgctcggccatgaagatcctccagttctccgactccgagagctgggacgtcatcaagctgctggctgccattctccacctggggaatgtggggttcatggcttcggtcttcgagaacctggacgcctcagacgtgatggagacgcccgcctttcccaccgtgatgaagttactggaggtgcagcaccaggagctccgggactgtctgatcaagcacaccatcctcatccgaggggaatttgtcaccaggtccctgaacattgcccaggctgctgaccggagggacgcctttgtcaagggcatctatgggcacctcttcctgtggattgtcaagaagatcaatgccgccatcttcacaccaccagcccaggaccccaaaaatgtgcggagggccatcggcctcctggacatatttggctttgaaaatttcgagaacaatagcttcgagcagctctgcatcaacttcgccaacgagcacctgcagcagttctttgtgcagcacgtgttcaccatggagcaagaggagtaccgctcggagaacatctcctgggactatatccactacaccgacaatcggcccaccctggacctgctggccctcaagcccatgagcatcatctccctcctggacgaagaaagccgcttcccgcaggggacagatctcaccatgctgcaaaagctgaacagcgtccatgccaacaacaaggccttcctacagcccaagaacatccacgatgccagatttggcattgcccattttgccggcgaggtgtactaccaagcagaaggcttcctggagaagaaccgagacgtgctgagcacagatatcctcaccctggtttactcctccaaaaacaagtttctgagggagatattcaacttggagttagcagagaccaagctgggccatgggaccatccgccaggcaaaggcaggaaaccatctcttcaagtctgcagactcaaataaacggccctccaccttaggaagccagttcaaacagtctctggaccagctgatgaaaatcctgaccaactgccagccttacttcatccgctgcatcaaacctaatgagtacaagaagccgctgctgttcgaccgggagctgtgcctgcggcagctgcgatactcgggcatgatggagaccgtgcacatccgcaagtcgggcttccccatccgctacacgttcgaggagttctcgcagaggttcggcgtgttgctgcccaacgccatgcggatgcagctgcaaggcaagctccgccagatgaccctgggcatcactgacgtgtggctgcggacagacaaagactggaaagcggggaagacaaaaattttcctgagggatcatcaggacactctgctggaggtacagagaagccaggtgctagacagagcggcgctcagcatccagaaagtccttcggggctacagatacaggaaggagttcctgaggcagaggcgggcagctgtgaccctgcaggcctggtggagaggctactgcaacaggaggaatttcaagctgatcctcgtgggctttgagcgcctgcaggctattgcccggagccagccgctggcgaggcagtaccaggccatgcggcagaggacagtccagctgcaggccctgtgcaggggatacctggtgcgccagcaagtccaggccaagaggagggcagtggtggtcattcaggcccatgccaggggcatggctgcccggcgcaacttccagcaaaggaaggccaatgcgccgctggtcatcccggccgaggggcagaaaagccaaggcgctctccctgccaagaagcgcagatccatctacgacaccgtcactgacacggagatggtggagaaggtgttcggcttcctccctgccatgattgggggccaggagggccaggcctcgccgcactttgaggatctggaatcgaagacccagaagctgcttgaggttgacctggacacagtccccatggcggaggagcctgaggaggatgtggatggcctggccgagtacaccttccccaagtttgctgtgacttacttccagaaatcagccagccacacacacatccggcggcccctccgatacccgttgctttaccacgaagatgacactgactgcttggccgccctggtcatatggaacgtcatcctgaggttcatgggtgatctcccagagccagtgctgtatgccaggagcagccagcagggcagctcagtgatgcggcagatccatgacacgctgggcagggagcacggtgcccaggttccacagcacagtagatctgcacaggtggccagccagctgaacattggagaggaggcattggagcctgatggccttggtgcagaccggcccatgtccaacctggagaaggtgcacttcatcgtgggctacgccatcctgcggcccagcctcagggatgagatttactgccagatctgcaagcagctctcggagaacttcaaaacaagcagcctggcccggggctggatcctgctcagcctctgcctcggctgcttcccaccctcagagaggttcatgaagtatctactgaacttcatcggccaagggccggcgacctacggccccttctgtgccgagcgcctgagacgcacctatgccaatggggtgcgtgcggagccccccacctggctggagctgcaggctgtcaagtccaagaagcacatccccatccaagtcatcttggccactggagagagcctaaccgtccccgtggactcagcctccacatctcgggaaatgtgcatgcacatcgctcacaagcagggcctcagcgaccacctgggcttctccctccaggtcgccgtgtacgacaagttctggtccctgggcagcgggcgcgaccacatgatggatgccatcgcccggtgtgagcagatggcccaggagaggggcgagagccagcgccagtcaccctggcgcatctacttccggaaggaattcttcaccccctggcacgactcccgggaggaccctgtcagcaccgagcttatttaccgccaagtcctccgaggagtctggtctggcgagtacagcttcgagaaggaggaagagctggttgagctgctggcccggcactgctacgtgcagctcggcgcctcagcagagagcaaggctgtccaggagctgctgcccagctgcatcccccacaagctgtacaggaccaagcccccagacaggtgggcgagcctcgtcactgccgcctgcgccaaggccccatacactcagaagcaagtcacaccactggccgtgcgagagcaggtggtggacgccgcccgcctgcagtggccgctgctcttctcccggctcttcgaagtcatcacactctcaggcccccgcctgcccaagacgcagctgatcttggctgttaactggaaggggctttgcttcctggaccagcaggagaagatgctgctggaactctctttcccagaggtcatgggtctggccaccaacagggaggcccagggcgggcagaggctgctgctctccacgatgcatgaggagtacgagtttgtgtcacccagcagtgtggccatcgctgagctggtggccctgttcctggagggcctgaaggagaggtccattttcgccatggccctgcaggacaggaaggccacagatgacaccaccctcctggccttcaagaagggggacctgttggtcctcacaaagaagcaggggctgctggcctctgagaactggaccctcggccagaacgacaggacaggcaagacggggctggtgcccatggcctgcctctacaccatccccacggtcactaagccctcggcacagctgctgagcttgcttgccatgtcaccagagaagaggaagctggcggctcaggaggggcagttcacagagccacgtcctgaggagccacccaaggaaaagctgcacaccctggaggagttctcctatgagttcttcagggctccagagaaggacatggtgagcatggccgtgctgcccctggcccgtgcccgtggccacctgtgggcctattcctgcgagccgctgcgacagccgctgctcaagcgagtccacgccaacgtcgacctctgggacatcgcctgccagatctttgtcgccatcctccggtacatgggcgactacccttctcggcaggcctggcccaccctggagctcaccgaccagatcttcacactggccctgcagcacccggccctccaggacgaggtctactgccagatcctgaagcagctgacgcacaactccaacaggcacagcgaagagcggggctggcagctgctgtggctgtgcacgggcctcttcccgcccagcaaggggctgctgccccatgcccagaagtttatagacactcggagggggaagctgctggcccccgactgcagccgccgaatccagaaggtcctgaggacggggccccggaagcagcccccgcaccaggtggaggtggaggccgcagagcagaacgtctcccgcatctgccacaagatctacttccccaatgacaccagtgagatgctggaggtggttgccaacacacgggtgcgggatgtgtgtgacagcattgccaccaggctgcagctggcctcctgggagggctgcagcctcttcatcaagatttcagacaaggtcatcagccagaaggagggagacttcttctttgattccttgagggaggtgtctgactgggtgaagaagaacaagccccagaaagaaggggcccccgtgacgctcccctaccaggtgtacttcatgcggaaattgtggctcaacatatctccagggaaggatgtgaatgcagacaccatactccattaccaccaggagctgcccaagtacctgcgcggattccacaagtgttcgcgggaggatgccatccacctggcgggcctcatctacaaggcccagttcaacaacgaccggtcccagctggctagtgtccccaagatcctgagggaactggtgcctgagaacctcacacgcctgatgtcctcggaggagtggaaaaagagcatccttctagcctatgacaagcataaggacaagacagtggaggaggccaaggtggccttcctgaagtggatctgccggtggcccaccttcggatccgccttcttcgaggtgaagcaaacctcggagccttcctacccggacgtcatcctcatcgccatcaaccgacatggggttctgctcatccaccccaagaccaaggacctgctcaccacctatcccttcaccaagatctccagctggagcagcggcagcacctacttccacatggcgctggggagcctgggccgtggcagccgcctgctgtgcgagacctccctgggctataagatggatgacctgctgacctcatatgtgcagcagctcctgagtgccatgaacaagcagcggggctccaaggccccagccctggccagcacctagcagcggatgctggcgtgtctgctcaggcgcccttcccgacctctagcctggcggcaccttcccaggccctctcaacccagggcctgtccttggcgggcagccttccatgctgccccccatacaaagcccactcagccccgcaggcggccccctctgtcctgggcgctgcccagggaggccaaaagacgggcccagaatggggtcgggagtctcggacccccaggctattggtggatgactgactgacaggacacctcccaaccccaccccaccccaccagaatgttcaataaaaactcctggagcaggaga

SEQ ID NO: 19222 - DNA, 4812 bp, Homo sapiens
  source 1..4812: mol_type = unassigned DNA
tgcacttgctacccttctgcaggaagcttcccagccagcacagtttctctctgccctgcctcttaatccccacccctgctcccaggcctgggacactgctaaccacccctccttcctgacacctctctgaccacccctcctcctcttgactggttcctctggaggtaggcatggcctcgggttctgcccccagtttctcactcgctgggctccaaaagaaacactggcttctctccttcagctccaggctagatgccagaccagtttgaccaggcggttgtgctgaaccagctgcggtactcagggatgctggagactgtgagaatccgcaaagctgggtatgcggtccgaagaccctttcaggacttttacaaaaggtataaagtgctgatgaggaatctggctctgcctgaggacgtccgagggaagtgcacgagcctgctgcagctctatgatgcctccaacagcgagtggcagctggggaagaccaaggtctttcttcgagaatccttggaacagaaactggagaagcggagggaagaggaagtgagccacgcggccatggtgattcgggcccatgtcttgggcttcttagcacgaaaacaatacagaaaggtcctttattgtgtggtgataatacagaagaattacagagcattccttctgaggaggagatttttgcacctgaaaaaggcagccatagttttccagaagcaactcagaggtcagattgctcggagagtttacagacaattgctggcagagaaaagggagcaagaagaaaagaagaaacaggaagaggaagaaaagaagaaacgggaggaagaagaaagagaaagagagagagagcgaagagaagccgagctccgcgcccagcaggaagaagaaacgaggaagcagcaagaactcgaagccttgcagaagagccagaaggaagctgaactgacccgtgaactggagaaacagaaggaaaataagcaggtggaagagatcctccgtctggagaaagaaatcgaggacctgcagcgcatgaaggagcagcaggagctgtcgctgaccgaggcttccctgcagaagctgcaggagcggcgggaccaggagctccgcaggctggaggaggaagcgtgcagggcggcccaggagttcctcgagtccctcaatttcgacgagatcgacgagtgtgtccggaatatcgagcggtccctgtcggtgggaagcgaattttccagcgagctggctgagagcgcatgcgaggagaagcccaacttcaacttcagccagccctacccagaggaggaggtcgatgagggcttcgaagccgacgacgacgccttcaaggactcccccaaccccagcgagcacggccactcagaccagcgaacaagtggcatccggaccagcgatgactcttcagaggaggacccatacatgaacgacacggtggtgcccaccagccccagtgcggacagcacggtgctgctcgccccatcagtgcaggactccgggagcctacacaactcctccagcggcgagtccacctactgcatgccccagaacgctggggacttgccctccccagacggcgactacgactacgaccaggatgactatgaggacggtgccatcacttccggcagcagcgtgaccttctccaactcctacggcagccagtggtcccccgactaccgctgctctgtggggacctacaacagctcgggtgcctaccggttcagctctgagggggcgcagtcctcgtttgaagatagtgaagaggactttgattccaggtttgatacagatgatgagctttcataccggcgtgactctgtgtacagctgtgtcactctgccgtatttccacagctttctgtacatgaaaggtggcctgatgaactcttggaaacgccgctggtgcgtcctcaaggatgaaaccttcttgtggttccgctccaagcaggaggccctcaagcaaggctggctccacaaaaaaggggggggctcctccacgctgtccaggagaaattggaagaagcgctggtttgtcctccgccagtccaagctgatgtactttgaaaacgacagcgaggagaagctcaagggcaccgtagaagtgcgaacggcaaaagagatcatagataacaccaccaaggagaatgggatcgacatcattatggccgataggactttccacctgattgcagagtccccagaagatgccagccagtggttcagcgtgctgagtcaggtccacgcgtccacggaccaggagatccaggagatgcatgatgagcaggcaaacccacagaatgctgtgggcaccttggatgtggggctgattgattctgtgtgtgcctctgacagccctgatagacccaactcgtttgtgatcatcacggccaaccgggtgctgcactgcaacgccgacacgccggaggagatgcaccactggataaccctgctgcagaggtccaaaggggacaccagagtggagggccaggaattcatcgtgagaggatggttgcacaaagaggtgaagaacagtccaaagatgtcttcactgaaactgaagaaacggtggtttgtactcacccacaattccctggattactacaagagttcagagaagaacgcgctcaaactggggaccctggtcctcaacagcctctgctctgtcgtccccccagatgagaagatattcaaagagacaggctactggaacgtcaccgtgtacgggcgcaagcactgttaccggctctacaccaagctgctcaacgaggccacccggtggtccagtgccattcaaaacgtgactgacaccaaggccccgatcgacacccccacccagcagctgattcaagatatcaaggagaactgcctgaactcggatgtggtggaacagatttacaagcggaacccgatccttcgatacacccatcaccccttgcactccccgctcctgccccttccgtatggggacataaatctcaacttgctcaaagacaaaggctataccacccttcaggatgaggccatcaagatattcaattccctgcagcaactggagtccatgtctgacccaattccaataatccagggcatcctacagacagggcatgacctgcgacctctgcgggacgagctgtactgccagcttatcaaacagaccaacaaagtgccccaccccggcagtgtgggcaacctgtacagctggcagatcctgacatgcctgagctgcaccttcctgccgagtcgagggattctcaagtatctcaagttccatctgaaaaggatacgggaacagtttccaggaagcgagatggaaaaatacgctctcttcacttacgaatctcttaagaaaaccaaatgccgagagtttgtgccttcccgagatgaaatagaagctctgatccacaggcaggaaatgacatccacggtctattgccatggcggcggctcctgcaagatcaccatcaactcccacaccaccgctggggaggtggtggagaagctgatccgaggcctggccatggaggacagcaggaacatgtttgctttgtttgaatacaacggccacgtcgacaaagccattgaaagtcgaaccgtcgtagctgatgtcttagccaagtttgaaaagctggctgccacatccgaggttggggacctgccatggaaattctacttcaaactttactgcttcctggacacagacaacgtgccaaaagacagtgtggagtttgcatttatgtttgaacaggcccacgaagcggttatccatggccaccatccagccccggaagaaaacctccaggttcttgctgccctgcgactccagtatctgcagggggattatactctgcacgctgccatcccacctctcgaagaggtttattccctgcagagactcaaggcccgcatcagccagtcaaccaaaaccttcaccccttgtgaacggctggagaagaggcggacgagcttcctagaggggaccctgaggcggagcttccggacaggatccgtggtccggcagaaggtcgaggaggagcagatgctggacatgtggattaaggaagaagtctcctctgctcgagccagtatcattgacaagtggaggaaatttcagggaatgaaccaggaacaggccatggccaagtacatggccttgatcaaggagtggcctggctatggctcgacgctgtttgatgtggagtgcaaggaaggtggcttccctcaggaactctggttgggtgtcagcgcggacgccgtctccgtctacaagcgtggagagggaagaccactggaagtcttccagtatgaacacatcctctcttttggggcacccctggcgaatacgtataagatcgtggtcgatgagagggagctgctctttgaaaccagtgaggtggtggatgtggccaagctcatgaaagcctacatcagcatgatcgtgaagaagcgctacagcacgacacgctccgccagcagccagggcagctccaggtgaaggcgggacagagcccacctgtctttgctacctgaacgcaccaccctctggcctaggctggctccagtgtgccatgcccagccaaaacaaacacagagctgcccaggctttctggaagcttctggtctgagggaggtgtctccgaggatccttttgcctgccgccttcattgatcctgtattaagctgtcaactttaacagtctgcacagtttccaaagctttactactcttagaggacacatgccttaaaaaaggaggggaggaaccacgctgccaccaaagcagccggaagtgccttaacttgtggaacc

SEQ ID NO: 19223 - DNA, 4803 bp, Homo sapiens
  source 1..4803: mol_type = unassigned DNA
agcaaagagtgctgttcttgttctctgggtggattttccaagatcacaactaaactgcttgattttgtcctgggactttttttaaaaaaaaattattgattggcttttaaaatcaagaatctttgggccctgaaatgtaattacacatttgttgatgcgtgcatgatggttagtttgcccctgcagtcaaaagtgtcttcagcagttcctatcacgtcagcctcgccaggctggacttcctttgagtagaatcaggaatgaattaagcagcacagcccgagacgcaccacataaaaggctgggaacaccagccagccgaagaaagcccatttttgtgtctgtcagcttagatgcccttgcccggactgctaaagatgcagctatttacagtggacagaaactgaaggggtgaaagaaaacccaagatgccagaccagtttgaccaggcggttgtgctgaaccagctgcggtactcagggatgctggagactgtgagaatccgcaaagctgggtatgcggtccgaagaccctttcaggacttttacaaaaggtataaagtgctgatgaggaatctggctctgcctgaggacgtccgagggaagtgcacgagcctgctgcagctctatgatgcctccaacagcgagtggcagctggggaagaccaaggtctttcttcgagaatccttggaacagaaactggagaagcggagggaagaggaagtgagccacgcggccatggtgattcgggcccatgtcttgggcttcttagcacgaaaacaatacagaaaggtcctttattgtgtggtgataatacagaagaattacagagcattccttctgaggaggagatttttgcacctgaaaaaggcagccatagttttccagaagcaactcagaggtcagattgctcggagagtttacagacaattgctggcagagaaaagggagcaagaagaaaagaagaaacaggaagaggaagaaaagaagaaacgggaggaagaagaaagagaaagagagagagagcgaagagaagccgagctccgcgcccagcaggaagaagaaacgaggaagcagcaagaactcgaagccttgcagaagagccagaaggaagctgaactgacccgtgaactggagaaacagaaggaaaataagcaggtggaagagatcctccgtctggagaaagaaatcgaggacctgcagcgcatgaaggagcagcaggagctgtcgctgaccgaggcttccctgcagaagctgcaggagcggcgggaccaggagctccgcaggctggaggaggaagcgtgcagggcggcccaggagttcctcgagtccctcaatttcgacgagatcgacgagtgtgtccggaatatcgagcggtccctgtcggtgggaagcgaattttccagcgagctggctgagagcgcatgcgaggagaagcccaacttcaacttcagccagccctacccagaggaggaggtcgatgagggcttcgaagccgacgacgacgccttcaaggactcccccaaccccagcgagcacggccactcagaccagcgaacaagtggcatccggaccagcgatgactcttcagaggaggacccatacatgaacgacacggtggtgcccaccagccccagtgcggacagcacggtgctgctcgccccatcagtgcaggactccgggagcctacacaactcctccagcggcgagtccacctactgcatgccccagaacgctggggacttgccctccccagacggcgactacgactacgaccaggatgactatgaggacggtgccatcacttccggcagcagcgtgaccttctccaactcctacggcagccagtggtcccccgactaccgctgctctgtggggacctacaacagctcgggtgcctaccggttcagctctgagggggcgcagtcctcgtttgaagatagtgaagaggactttgattccaggtttgatacagatgatgagctttcataccggcgtgactctgtgtacagctgtgtcactctgccgtatttccacagctttctgtacatgaaaggtggcctgatgaactcttggaaacgccgctggtgcgtcctcaaggatgaaaccttcttgtggttccgctccaagcaggaggccctcaagcaaggctggctccacaaaaaaggggggggctcctccacgctgtccaggagaaattggaagaagcgctggtttgtcctccgccagtccaagctgatgtactttgaaaacgacagcgaggagaagctcaagggcaccgtagaagtgcgaacggcaaaagagatcatagataacaccaccaaggagaatgggatcgacatcattatggccgataggactttccacctgattgcagagtccccagaagatgccagccagtggttcagcgtgctgagtcaggtccacgcgtccacggaccaggagatccaggagatgcatgatgagcaggcaaacccacagaatgctgtgggcaccttggatgtggggctgattgattctgtgtgtgcctctgacagccctgatagacccaactcgtttgtgatcatcacggccaaccgggtgctgcactgcaacgccgacacgccggaggagatgcaccactggataaccctgctgcagaggtccaaaggggacaccagagtggagggccaggaattcatcgtgagaggatggttgcacaaagaggtgaagaacagtccaaagatgtcttcactgaaactgaagaaacggtggtttgtactcacccacaattccctggattactacaagagttcagagaagaacgcgctcaaactggggaccctggtcctcaacagcctctgctctgtcgtccccccagatgagaagatattcaaagagacaggctactggaacgtcaccgtgtacgggcgcaagcactgttaccggctctacaccaagctgctcaacgaggccacccggtggtccagtgccattcaaaacgtgactgacaccaaggccccgatcgacacccccacccagcagctgattcaagatatcaaggagaactgcctgaactcggatgtggtggaacagatttacaagcggaacccgatccttcgatacacccatcaccccttgcactccccgctcctgccccttccgtatggggacataaatctcaacttgctcaaagacaaaggctataccacccttcaggatgaggccatcaagatattcaattccctgcagcaactggagtccatgtctgacccaattccaataatccagggcatcctacagacagggcatgacctgcgacctctgcgggacgagctgtactgccagcttatcaaacagaccaacaaagtgccccaccccggcagtgtgggcaacctgtacagctggcagatcctgacatgcctgagctgcaccttcctgccgagtcgagggattctcaagtatctcaagttccatctgaaaaggatacgggaacagtttccaggaagcgagatggaaaaatacgctctcttcacttacgaatctcttaagaaaaccaaatgccgagagtttgtgccttcccgagatgaaatagaagctctgatccacaggcaggaaatgacatccacggtctattgccatggcggcggctcctgcaagatcaccatcaactcccacaccaccgctggggaggtggtggagaagctgatccgaggcctggccatggaggacagcaggaacatgtttgctttgtttgaatacaacggccacgtcgacaaagccattgaaagtcgaaccgtcgtagctgatgtcttagccaagtttgaaaagctggctgccacatccgaggttggggacctgccatggaaattctacttcaaactttactgcttcctggacacagacaacgtgccaaaagacagtgtggagtttgcatttatgtttgaacaggcccacgaagcggttatccatggccaccatccagccccggaagaaaacctccaggttcttgctgccctgcgactccagtatctgcagggggattatactctgcacgctgccatcccacctctcgaagaggtttattccctgcagagactcaaggcccgcatcagccagtcaaccaaaaccttcaccccttgtgaacggctggagaagaggcggacgagcttcctagaggggaccctgaggcggagcttccggacaggatccgtggtccggcagaaggtcgaggaggagcagatgctggacatgtggattaaggaagaagtctcctctgctcgagccagtatcattgacaagtggaggaaatttcagggaatgaaccaggaacaggccatggccaagtacatggccttgatcaaggagtggcctggctatggctcgacgctgtttgatgtggagtgcaaggaaggtggcttccctcaggaactctggttgggtgtcagcgcggacgccgtctccgtctacaagcgtggagagggaagaccactggaagtcttccagtatgaacacatcctctcttttggggcacccctggcgaatacgtataagatcgtggtcgatgagagggagctgctctttgaaaccagtgaggtggtggatgtggccaagctcatgaaagcctacatcagcatgatcgtgaagaagcgctacagcacgacacgctccgccagcagccagggcagctccaggtgaaggcgggacagagcccacctgtctttgctacctgaacgcaccaccctctggcctaggctggctccagtgtgccatgcccagccaaaacaaacacagagctgcccaggctttctggaagcttctggtctga

SEQ ID NO: 19224 - DNA, 4803 bp, Homo sapiens; identical to SEQ ID NO: 19223
  source 1..4803: mol_type = unassigned DNA

SEQ ID NO: 19225 - DNA, 8038 bp, Homo sapiens
  source 1..8038: mol_type = unassigned DNA
gccgcggcgcgggactgctcacctccaagcgctcgcgcggggatcgcggctcctgctcactttgcggcccgctgtcctcctgcccgccccgagggcccccggccggagcgcagagggagggggccgcgctcgccagcaccccgccgccttcccccgcctgggggaagaatgtgccaccagctgttctccgcttgcgagcgctgcgcccagtagtgaggaacttggaggaagaagagacaaaggctgccgtcgggacgggcgagttagggacttgggtttgggcgaacaaaaggtgagaaggacaagaagggaccgggcgatggcagcaggggagccccgcgggcgcgcgtcctcgggagtggcgccgtgacacgcatggtttccccggacccgcggcggcgctgacttccgcgagtcggagcggcactcggcgagtccgggactgcgctggaacaatggataacttcttcaccgagggaacacgggtctggctgagagaaaatggccagcattttccaagtactgtaaattcctgtgcagaaggcatcgtcgtcttccggacagactatggtcaggtattcacttacaagcagagcacaattacccaccagaaggtgactgctatgcaccccacgaacgaggagggcgtggatgacatggcgtccttgacagagctccatggcggctccatcatgtataacttattccagcggtataagagaaatcaaatatatacctacatcggctccatcctggcctccgtgaacccctaccagcccatcgccgggctgtacgagcctgccaccatggagcagtacagccggcgccacctgggcgagctgcccccgcacatcttcgccatcgccaacgagtgctaccgctgcctgtggaagcgccacgacaaccagtgcatcctcatcagtggtgaaagtggggcaggtaaaaccgaaagcactaaattgatcctcaagtttctgtcagtcatcagtcaacagtctttggaattgtccttaaaggagaagacatcctgtgttgaacgagctattcttgaaagcagccccatcatggaagctttcggcaatgcgaagaccgtgtacaacaacaactctagtcgctttgggaagtttgttcagctgaacatctgtcagaaaggaaatattcagggcgggagaattgtagattatttattagaaaaaaaccgagtagtaaggcaaaatcccggggaaaggaattatcacatattttatgcactgctggcagggctggaacatgaagaaagagaagaattttatttatctacgccagaaaactaccactacttgaatcagtctggatgtgtagaagacaagacaatcagtgaccaggaatcctttagggaagttattacggcaatggacgtgatgcagttcagcaaggaggaagttcgggaagtgtcgaggctgcttgctggtatactgcatcttgggaacatagaatttatcactgctggtggggcacaggtttccttcaaaacagctttgggcagatctgcggagttacttgggctggacccaacacagctcacagatgctttgacccagagatcaatgttcctcaggggagaagagatcctcacgcctctcaatgttcaacaggcagtagacagcagggactccctggccatggctctgtatgcgtgctgctttgagtgggtaatcaagaagatcaacagcaggatcaaaggcaatgaggacttcaagtctattggcatcctcgacatctttggatttgaaaactttgaggttaatcactttgaacagttcaatataaactatgcaaacgagaaacttcaggagtacttcaacaagcatattttttctttagaacaactagaatatagccgggaaggattagtgtgggaagatattgactggatagacaatggagaatgcctggacttgattgagaagaaacttggcctcctagcccttatcaatgaagaaagccattttcctcaagccacagacagcaccttattggagaagctacacagtcagcatgcgaataaccacttttatgtgaagcccagagttgcagttaacaattttggagtgaagcactatgctggagaggtgcaatatgatgtccgaggtatcttggagaagaacagagatacatttcgagatgaccttctcaatttgctaagagaaagccgatttgactttatctacgatctttttgaacatgtttcaagccgcaacaaccaggataccttgaaatgtggaagcaaacatcggcggcctacagtcagctcacagttcaaggactcactgcattccttaatggcaacgctaagctcctctaatcctttctttgttcgctgtatcaagccaaacatgcagaagatgccagaccagtttgaccaggcggttgtgctgaaccagctgcggtactcagggatgctggagactgtgagaatccgcaaagctgggtatgcggtccgaagaccctttcaggacttttacaaaaggtataaagtgctgatgaggaatctggctctgcctgaggacgtccgagggaagtgcacgagcctgctgcagctctatgatgcctccaacagcgagtggcagctggggaagaccaaggtctttcttcgagaatccttggaacagaaactggagaagcggagggaagaggaagtgagccacgcggccatggtgattcgggcccatgtcttgggcttcttagcacgaaaacaatacagaaaggtcctttattgtgtggtgataatacagaagaattacagagcattccttctgaggaggagatttttgcacctgaaaaaggcagccatagttttccagaagcaactcagaggtcagattgctcggagagtttacagacaattgctggcagagaaaagggagcaagaagaaaagaagaaacaggaagaggaagaaaagaagaaacgggaggaagaagaaagagaaagagagagagagcgaagagaagccgagctccgcgcccagcaggaagaagaaacgaggaagcagcaagaactcgaagccttgcagaagagccagaaggaagctgaactgacccgtgaactggagaaacagaaggaaaataagcaggtggaagagatcctccgtctggagaaagaaatcgaggacctgcagcgcatgaaggagcagcaggagctgtcgctgaccgaggcttccctgcagaagctgcaggagcggcgggaccaggagctccgcaggctggaggaggaagcgtgcagggcggcccaggagttcctcgagtccctcaatttcgacgagatcgacgagtgtgtccggaatatcgagcggtccctgtcggtgggaagcgaattttccagcgagctggctgagagcgcatgcgaggagaagcccaacttcaacttcagccagccctacccagaggaggaggtcgatgagggcttcgaagccgacgacgacgccttcaaggactcccccaaccccagcgagcacggccactcagaccagcgaacaagtggcatccggaccagcgatgactcttcagaggaggacccatacatgaacgacacggtggtgcccaccagccccagtgcggacagcacggtgctgctcgccccatcagtgcaggactccgggagcctacacaactcctccagcggcgagtccacctactgcatgccccagaacgctggggacttgccctccccagacggcgactacgactacgaccaggatgactatgaggacggtgccatcacttccggcagcagcgtgaccttctccaactcctacggcagccagtggtcccccgactaccgctgctctgtggggacctacaacagctcgggtgcctaccggttcagctctgagggggcgcagtcctcgtttgaagatagtgaagaggactttgattccaggtttgatacagatgatgagctttcataccggcgtgactctgtgtacagctgtgtcactctgccgtatttccacagctttctgtacatgaaaggtggcctgatgaactcttggaaacgccgctggtgcgtcctcaaggatgaaaccttcttgtggttccgctccaagcaggaggccctcaagcaaggctggctccacaaaaaaggggggggctcctccacgctgtccaggagaaattggaagaagcgctggtttgtcctccgccagtccaagctgatgtactttgaaaacgacagcgaggagaagctcaagggcaccgtagaagtgcgaacggcaaaagagatcatagataacaccaccaaggagaatgggatcgacatcattatggccgataggactttccacctgattgcagagtccccagaagatgccagccagtggttcagcgtgctgagtcaggtccacgcgtccacggaccaggagatccaggagatgcatgatgagcaggcaaacccacagaatgctgtgggcaccttggatgtggggctgattgattctgtgtgtgcctctgacagccctgatagacccaactcgtttgtgatcatcacggccaaccgggtgctgcactgcaacgccgacacgccggaggagatgcaccactggataaccctgctgcagaggtccaaaggggacaccagagtggagggccaggaattcatcgtgagaggatggttgcacaaagaggtgaagaacagtccaaagatgtcttcactgaaactgaagaaacggtggtttgtactcacccacaattccctggattactacaagagttcagagaagaacgcgctcaaactggggaccctggtcctcaacagcctctgctctgtcgtccccccagatgagaagatattcaaagagacaggctactggaacgtcaccgtgtacgggcgcaagcactgttaccggctctacaccaagctgctcaacgaggccacccggtggtccagtgccattcaaaacgtgactgacaccaaggccccgatcgacacccccacccagcagctgattcaagatatcaaggagaactgcctgaactcggatgtggtggaacagatttacaagcggaacccgatccttcgatacacccatcaccccttgcactccccgctcctgccccttccgtatggggacataaatctcaacttgctcaaagacaaaggctataccacccttcaggatgaggccatcaagatattcaattccctgcagcaactggagtccatgtctgacccaattccaataatccagggcatcctacagacagggcatgacctgcgacctctgcgggacgagctgtactgccagcttatcaaacagaccaacaaagtgccccaccccggcagtgtgggcaacctgtacagctggcagatcctgacatgcctgagctgcaccttcctgccgagtcgagggattctcaagtatctcaagttccatctgaaaaggatacgggaacagtttccaggaagcgagatggaaaaatacgctctcttcacttacgaatctcttaagaaaaccaaatgccgagagtttgtgccttcccgagatgaaatagaagctctgatccacaggcaggaaatgacatccacggtctattgccatggcggcggctcctgcaagatcaccatcaactcccacaccaccgctggggaggtggtggagaagctgatccgaggcctggccatggaggacagcaggaacatgtttgctttgtttgaatacaacggccacgtcgacaaagccattgaaagtcgaaccgtcgtagctgatgtcttagccaagtttgaaaagctggctgccacatccgaggttggggacctgccatggaaattctacttcaaactttactgcttcctggacacagacaacgtgccaaaagacagtgtggagtttgcatttatgtttgaacaggcccacgaagcggttatccatggccaccatccagccccggaagaaaacctccaggttcttgctgccctgcgactccagtatctgcagggggattatactctgcacgctgccatcccacctctcgaagaggtttattccctgcagagactcaaggcccgcatcagccagtcaaccaaaaccttcaccccttgtgaacggctggagaagaggcggacgagcttcctagaggggaccctgaggcggagcttccggacaggatccgtggtccggcagaaggtcgaggaggagcagatgctggacatgtggattaaggaagaagtctcctctgctcgagccagtatcattgacaagtggaggaaatttcagggaatgaaccaggaacaggccatggccaagtacatggccttgatcaaggagtggcctggctatggctcgacgctgtttgatgtggagtgcaaggaaggtggcttccctcaggaactctggttgggtgtcagcgcggacgccgtctccgtctacaagcgtggagagggaagaccactggaagtcttccagtatgaacacatcctctcttttggggcacccctggcgaatacgtataagatcgtggtcgatgagagggagctgctctttgaaaccagtgaggtggtggatgtggccaagctcatgaaagcctacatcagcatgatcgtgaagaagcgctacagcacgacacgctccgccagcagccagggcagctccaggtgaaggcgggacagagcccacctgtctttgctacctgaacgcaccaccctctggcctaggctggctccagtgtgccatgcccagccaaaacaaacacagagctgcccaggctttctggaagcttctggtctgagggaggtgtctccgaggatccttttgcctgccgccttcattgatcctgtattaagctgtcaactttaacagtctgcacagtttccaaagctttactactcttagaggacacatgccttaaaaaaggaggggaggaaccacgctgccaccaaagcagccggaagtgccttaacttgtggaaccaacactaatcgaccgtaactgtgctactgaagggaactgcctttcccccttctgggggagacttaacagagcgtggaaggggggcattctctgtcaatgatgcactaacctcccaacctgatttccccgaatctgagggaaggtgagggagtgggaagggggatggagagctcgaggggacagtgtgtttgagctggagtgctgcgggcagcctttctcatggaatgacatgaatcaacttttttctttgtttcatcttttaagtgtacgtgcttgcctgttcgtgcatgtgttcataaactcaacactttaatcatggtttcatgagcattaaaaagcaaagggaaaaaggatgtgtaatggtgtacacagtctgtatattttaataatgcagagctatagtctcaattgttactttataaggtggttttattaacaaacccaaatcctggattttcctgtctttgctgtattttgaaaaacacgtgttgactccattgttttacatgtagcaaagtctgccatctgtgtctgctgtattataaacagataagcagcctacaagataactgtatttataaaccactcttcaacagctggctccagtgctggttttagaacaagaatgaagtcattttggagtctttcatgtctaaaagatttaagttaaaaacaaagtgttacttggaaggttagcttctatcattctggatagattacagatataataaccatgttgactatgggggagagacgctgcattccagaaacgtcttaacacttgagtgaatcttcaaaggaccctgacattaaatgctgaggctttaatacacacatattttatcccaagtttataatggtggtctgaacaaggcacctgtaaataaatcagcatttatgaccagaagaaaaataatctggtcttggactttttatttttatatggaaaagttttaaggacttgggccaactaagtctacccacacgaaaaaagaaatttgccttgtccctttgtgtacaaccatgcaaaactgtttgttggctcacagaagttctgacaataaaagatactagctaacacgctgtgtgtttcc

SEQ ID NO: 19226 - DNA, 4839 bp, Homo sapiens
  source 1..4839: mol_type = unassigned DNA
ttctttctaatgccaggcaatcaaggctgcacttgctacccttctgcaggaagcttcccagccagcacagtttctctctgccctgcctcttaatccccacccctgctcccaggcctgggacactgctaaccacccctccttcctgacacctctctgaccacccctcctcctcttgactggttcctctggaggtaggcatggcctcgggttctgcccccagtttctcactcgctgggctccaaaagaaacactggcttctctccttcagctccaggctagatgccagaccagtttgaccaggcggttgtgctgaaccagctgcggtactcagggatgctggagactgtgagaatccgcaaagctgggtatgcggtccgaagaccctttcaggacttttacaaaaggtataaagtgctgatgaggaatctggctctgcctgaggacgtccgagggaagtgcacgagcctgctgcagctctatgatgcctccaacagcgagtggcagctggggaagaccaaggtctttcttcgagaatccttggaacagaaactggagaagcggagggaagaggaagtgagccacgcggccatggtgattcgggcccatgtcttgggcttcttagcacgaaaacaatacagaaaggtcctttattgtgtggtgataatacagaagaattacagagcattccttctgaggaggagatttttgcacctgaaaaaggcagccatagttttccagaagcaactcagaggtcagattgctcggagagtttacagacaattgctggcagagaaaagggagcaagaagaaaagaagaaacaggaagaggaagaaaagaagaaacgggaggaagaagaaagagaaagagagagagagcgaagagaagccgagctccgcgcccagcaggaagaagaaacgaggaagcagcaagaactcgaagccttgcagaagagccagaaggaagctgaactgacccgtgaactggagaaacagaaggaaaataagcaggtggaagagatcctccgtctggagaaagaaatcgaggacctgcagcgcatgaaggagcagcaggagctgtcgctgaccgaggcttccctgcagaagctgcaggagcggcgggaccaggagctccgcaggctggaggaggaagcgtgcagggcggcccaggagttcctcgagtccctcaatttcgacgagatcgacgagtgtgtccggaatatcgagcggtccctgtcggtgggaagcgaattttccagcgagctggctgagagcgcatgcgaggagaagcccaacttcaacttcagccagccctacccagaggaggaggtcgatgagggcttcgaagccgacgacgacgccttcaaggactcccccaaccccagcgagcacggccactcagaccagcgaacaagtggcatccggaccagcgatgactcttcagaggaggacccatacatgaacgacacggtggtgcccaccagccccagtgcggacagcacggtgctgctcgccccatcagtgcaggactccgggagcctacacaactcctccagcggcgagtccacctactgcatgccccagaacgctggggacttgccctccccagacggcgactacgactacgaccaggatgactatgaggacggtgccatcacttccggcagcagcgtgaccttctccaactcctacggcagccagtggtcccccgactaccgctgctctgtggggacctacaacagctcgggtgcctaccggttcagctctgagggggcgcagtcctcgtttgaagatagtgaagaggactttgattccaggtttgatacagatgatgagctttcataccggcgtgactctgtgtacagctgtgtcactctgccgtatttccacagctttctgtacatgaaaggtggcctgatgaactcttggaaacgccgctggtgcgtcctcaaggatgaaaccttcttgtggttccgctccaagcaggaggccctcaagcaaggctggctccacaaaaaaggggggggctcctccacgctgtccaggagaaattggaagaagcgctggtttgtcctccgccagtccaagctgatgtactttgaaaacgacagcgaggagaagctcaagggcaccgtagaagtgcgaacggcaaaagagatcatagataacaccaccaaggagaatgggatcgacatcattatggccgataggactttccacctgattgcagagtccccagaagatgccagccagtggttcagcgtgctgagtcaggtccacgcgtccacggaccaggagatccaggagatgcatgatgagcaggcaaacccacagaatgctgtgggcaccttggatgtggggctgattgattctgtgtgtgcctctgacagccctgatagacccaactcgtttgtgatcatcacggccaaccgggtgctgcactgcaacgccgacacgccggaggagatgcaccactggataaccctgctgcagaggtccaaaggggacaccagagtggagggccaggaattcatcgtgagaggatggttgcacaaagaggtgaagaacagtccaaagatgtcttcactgaaactgaagaaacggtggtttgtactcacccacaattccctggattactacaagagttcagagaagaacgcgctcaaactggggaccctggtcctcaacagcctctgctctgtcgtccccccagatgagaagatattcaaagagacaggctactggaacgtcaccgtgtacgggcgcaagcactgttaccggctctacaccaagctgctcaacgaggccacccggtggtccagtgccattcaaaacgtgactgacaccaaggccccgatcgacacccccacccagcagctgattcaagatatcaaggagaactgcctgaactcggatgtggtggaacagatttacaagcggaacccgatccttcgatacacccatcaccccttgcactccccgctcctgccccttccgtatggggacataaatctcaacttgctcaaagacaaaggctataccacccttcaggatgaggccatcaagatattcaattccctgcagcaactggagtccatgtctgacccaattccaataatccagggcatcctacagacagggcatgacctgcgacctctgcgggacgagctgtactgccagcttatcaaacagaccaacaaagtgccccaccccggcagtgtgggcaacctgtacagctggcagatcctgacatgcctgagctgcaccttcctgccgagtcgagggattctcaagtatctcaagttccatctgaaaaggatacgggaacagtttccaggaagcgagatggaaaaatacgctctcttcacttacgaatctcttaagaaaaccaaatgccgagagtttgtgccttcccgagatgaaatagaagctctgatccacaggcaggaaatgacatccacggtctattgccatggcggcggctcctgcaagatcaccatcaactcccacaccaccgctggggaggtggtggagaagctgatccgaggcctggccatggaggacagcaggaacatgtttgctttgtttgaatacaacggccacgtcgacaaagccattgaaagtcgaaccgtcgtagctgatgtcttagccaagtttgaaaagctggctgccacatccgaggttggggacctgccatggaaattctacttcaaactttactgcttcctggacacagacaacgtgccaaaagacagtgtggagtttgcatttatgtttgaacaggcccacgaagcggttatccatggccaccatccagccccggaagaaaacctccaggttcttgctgccctgcgactccagtatctgcagggggattatactctgcacgctgccatcccacctctcgaagaggtttattccctgcagagactcaaggcccgcatcagccagtcaaccaaaaccttcaccccttgtgaacggctggagaagaggcggacgagcttcctagaggggaccctgaggcggagcttccggacaggatccgtggtccggcagaaggtcgaggaggagcagatgctggacatgtggattaaggaagaagtctcctctgctcgagccagtatcattgacaagtggaggaaatttcagggaatgaaccaggaacaggccatggccaagtacatggccttgatcaaggagtggcctggctatggctcgacgctgtttgatgtggagtgcaaggaaggtggcttccctcaggaactctggttgggtgtcagcgcggacgccgtctccgtctacaagcgtggagagggaagaccactggaagtcttccagtatgaacacatcctctcttttggggcacccctggcgaatacgtataagatcgtggtcgatgagagggagctgctctttgaaaccagtgaggtggtggatgtggccaagctcatgaaagcctacatcagcatgatcgtgaagaagcgctacagcacgacacgctccgccagcagccagggcagctccaggtgaaggcgggacagagcccacctgtctttgctacctgaacgcaccaccctctggcctaggctggctccagtgtgccatgcccagccaaaacaaacacagagctgcccaggctttctggaagcttctggtctgagggaggtgtctccgaggatccttttgcctgccgccttcattgatcctgtattaagctgtcaactttaacagtctgcacagtttccaaagctttactactcttagaggacacatgccttaaaaaaggaggggaggaaccacgctgccaccaaagcagccggaagtgccttaacttgtggaacc

SEQ ID NO: 19227 - DNA, 11863 bp, Homo sapiens
  source 1..11863: mol_type = unassigned DNA
gggctgggcctcccttccccataacactgagctgctctgctgggccaaccgtgctcctgggccagccagaggacccccatgaggcggcatgcaggcggggagcaggccacagaacgcagggtgaaacccaaggcgctctagaggagatgaattatggatccgccctcccggaatcctggctcggccctccccacgccacccagggccagtcgggtctgctcacagcccgaggaggccgcgtgtccagccgcgggcaagagacagagcaggtccctgtgtctccaagtccctgagcccgtgacaccggccccaggccctgtagagagcaggcagccaccatggcgaaggaggaagatgaggagaagaaagccaagaaagggaagaaggggaagaaggcaccggagccggagaagcccaaacggagcctgaaggggacgtcgcggctgttcatgggcttccgcgaccgtacacccaagatctccaagaagggccagttccgcagcgcctcggccttcttctggggcctccacaccggcccccagaagaccaagcgcaagaggaaggcccgcaccgtgctcaagtccacgtcaaagctcatgacgcagatgcgcatgggcaagaagaagcgggcgatgaagggcaagaagccgtccttcatggtgatccgcttcccaggccgccgtggctacggccgcctgcggccgcgcgcccggtcactcagcaaagcgtccacggccatcaactggctcacaaaaaagttcctcctcaagaaggccgaggagtcgggcagcgaacaggccacagtggacgcctggctgcagcgctcgagctcccgcatgggctcccgcaaactccccttcccgtcgggtgccgagatcctgcggcctgggggccggctccggaggttcccccgcagccgcagcatctacgcgtcaggcgagcccctgggcttcctgcccttcgaggacgaggccccattccatcactcgggctcccgcaagtcgctgtacgggcttgagggcttccaggacctgggcgagtattatgactatcaccgcgacggcgacgactactacgaccggcagtcactccaccgctacgaggagcaggaaccctacctggcgggcctcggcccctacagcccggcctggccaccctacggcgaccactactacgggtacccgcccgaggatccctacgactactaccaccccgactattacggtggcccctttgatccggggtacacctacggctacggctacgacgattacgaacccccatatgcgcccccgtcggggtactcgtctccttacagctaccacgatgggtacgagggcgaggcgcacccttatggctactacctggatccctatgcgccgtacgacgcgccatacccaccctatgacctcccataccacactccctacgatgtaccctactttgatccctacggagtccactacaccgtcccctatgccgaaggcgtctatggcggtggggacgaggccatctacccccccgaggtgccctatttttacccggaggagtcggcttcggcctttgtgtacccctgggtaccaccgcccatcccgtcgccccacaacccgtatgcccacgccatggatgacatcgccgagctggaggaaccagaggacgcgggcgtagagcgtcaggggacctccttccgcctgcccagcgccgccttcttcgagcagcaaggcatggataagcccgccaggtccaagctgtccctcatccgcaagttccgcctcttcccgcgaccccaggtgaagctgtttgggaaggagaagctggaggtgcccctgccaccctctctggacattcctctccccttgggggatgcggacgaagaagaggacgaggaggagctgcccccggtttccgctgtgccctacggccaccctttctggggcttcctcacgccgcgccagcgcaacctccagcgcgcgctgtcggccttcggcgcccaccggggcctgggcttcggccctgagtttggccgccccgtgcctcgccctgccacctcgcttgcgcggttcctcaagaagacgctgtcggagaagaagcccatcgcgcggctcaggggcagccagaaggcccgggcgggcggccctgctgtcagggaggcggcctacaaacgcttcggctacaagctggctggcatggaccccgagaagcccggcacgcccatcgtgctgaggagggcccagccacgcgctcgcagcagcaacgacgcgcgccgcccgcccgcgccacagcccgcgcccaggaccctctcccactggagcgcgctcctgtctccgcccgtgcccccgcggcccccaagctccgggcccccgcccgcgccgccgctctccccggcgctctcgggcctgccccggccggcctcgccctacggctccctccgccgccacccgccgccctgggccgccccagcgcacgtgccaccggcgccgcaggccagctggtgggccttcgtggagccccctgccgtgagcccggaggtgccccccgacctactagccttcccagggccccgaccctcgttcaggggctcccgccggagaggggcggctttcggcttccccggggcctctccacgggcgtcgcggaggcgagcttggtcaccgctggcctcgccccagccctcgctgaggagctcgccgggcctcggctactgctcacccttggcgcccccgtcgcctcagctgtccttgcgcacgggccccttccagccgcccttcctgcccccggcccgccggccccgctcgctgcaggagtccccagccccacgccgagccgctgggcgcctgggcccacccggctcgccgctgccgggctcacccaggccgccctcgccgcccctggggctctgccacagcccgcggcgcagctccctgaatctgccctcgcgcctcccgcacacgtggcggcgcctcagcgagccacccactcgggctgtgaagccgcaagtgcgcctgcccttccaccgaccgcccagggccggggcctggcgggcgcccctggaacaccgggagagcccgcgagaacccgaggactcagagacgccctggactgtgcccccactggcccccagctgggacgtggacatgcctcccacccaacgcccaccctccccctggccaggaggtgcaggcagccgccgaggcttttccaggccaccccctgtgccggaaaacccctttctccagctcctgggccctgtgccatcccccaccctccagcctgaggatccagctgctgatatgaccagggtcttcctgggcagacaccatgagccggggcctggacagctcaccaaatcagctggcccaacccctgagaagcctgaagaagaggccaccctgggggacccccagctgccagcagagaccaagcctccaaccccagcacctcccaaggatgtcactccccccaaggatatcactccccccaaggatgtcctcccagagcaaaagacattaaggcccagcctctcatacccactggctgcgtgtgaccagaccagggccacatggccaccatggcaccgctggggaacactgccccaagccgcagcccccttggcgcccatcagggccccagagcccctgcccaaggggggtgaacggcgccaggcagcccctgggcgttttgctgtggtcatgcctcgtgtgcagaagctgagctctttccagcgagttgggcctgcaaccctgaagcctcaagtccagcccattcaggaccccaagccaagagcctgtagtcttcgctggtcctgcctctggcttcgggcagatgcctatggaccctggccacgagtacacacccatccccagtcctgccacctgggccctggagctgcctgcctgtcccttaggggctcctgggaggaggtcggcccgccaagctggcggaacaagatgcactccatccgcaacctgccatccatgcggttccgtgagcagcacggggaggatggtgtggaggacatgacacagctggaagacctccaggaaaccactgtgctgtccaacctcaagattagatttgaacggaacctcatctacacatacattgggagcatcctggtgtcggtgaacccataccaaatgtttggaatctatgggccggagcaggtgcagcagtacaacggacgggccctgggagagaatcccccgcacctctttgctgttgcaaatctcgccttcgccaaaatgctcgatgccaaacagaaccagtgcataatcattagtggagagagcggctctggcaaaactgaggccaccaagctgattctgcgctacctggccgccatgaaccagaaacgggaggtcatgcagcagataaagatcctggaggcaacacccctcttggagtccttcggtaatgccaaaaccgtcaggaacgacaactccagccgctttgggaagtttgtggaaatctttctggaagggggcgtgatctctggtgccataacctcccagtacctgcttgagaaatccaggatcgtgtttcaggccaaaaacgagaggaattaccacatcttctacgagttgctggccgggttgcctgcccagctcaggcaggcctttagcctgcaagaggctgagacctactactatctgaaccagggtgggaactgtgagatagcaggaaagagcgatgcagatgactttcgccggctcctggctgccatggaggtgttgggcttcagcagtgaggaccaggacagcatcttccgcatcctggcctccatcctgcacctgggcaacgtctactttgagaagtatgagacggatgcacaggaggtggcctcagtggtgagtgcccgagagatccaggccgtggcagagctgctgcagatctcccctgagggcctgcagaaggccatcaccttcaaagtgaccgagacaatgcgagagaagatcttcacgcccctaactgtggagagcgctgtggatgccagggacgccatcgccaaggtcttgtatgcactgctgttcagctggctcatcaccagggtcaacgcgctggtgtccccaaggcaggacacactgtccatcgccatcctggacatctatggtttcgaggacctgagcttcaacagctttgagcagctgtgtattaactacgcaaacgagaaccttcagtaccttttcaacaagatcgtcttccaggaggagcaggaggagtacatccgtgagcagatagactggcaggagatcacctttgctgacaaccagccctgcatcaacctcatctcactgaagccttatggcatcctgcggatccttgacgaccagtgttgctttccccaggctacagaccacaccttcctacagaagtgccactaccatcatggcgccaacccgctctattccaaacccaagatgccgctgcctgagttcaccatcaagcactatgcaggcaaggtcacctaccaggtgcacaagttcctggacaagaaccacgaccaagtgcgccaggatgtgctggacctgttcgtacggagccggacacgggtggtggcacacctcttctccagccatgccccacaggctgcccctcagcgcctgggcaagagcagctccgtcactcggctctacaaggcgcacactgtggccgccaagttccagcagtcactcctggatctggtggaaaagatggagaggtgcaaccccttgttcatgcgttgcctgaagcccaaccacaagaaggagccaggtctctttgagccagatgtggtaatggcacaattacgctattcaggggtgctggagaccgtgaggatccgcaaggagggatttccagtgcgcctgcctttccaggggttcatcgacaggtactgctgtctagtggccctcaagcatgacctgccggctaatggggacatgtgtgtgtcagtgctgagtcgcctgtgcaaagtcatgccaaacatgtaccgtgttggggtcagcaagctgttccttaaggaacacctataccagctgctggagagtatgcgagagcatgtcctgaatctggcagccctcactctgcagcgctgcctccgtggcttcttcattaagcggcgattccgctctctgcgccacaagatcatcctgctgcaaagccgggcccgtggctaccttgccaggcaacgctatcagcagatgaggaggagtctggtgaagttccggtccctggtacacgcatacgtgagccgccgacgctatctcaagctgagggcagagtggaggtgccaggtggagggggcgctgctgtgggagcaggaggagctgagcaagcgggaggtagtcgctgtggggcacctggaggtaccggctgagctggctgggctcttgcaagcagtggcaggcctcgggctggcccaggtgcctcaggtggcccctgtgaggactcctcgactccaggctgagccccgtgtcacactgcccctggacatcaacaactatcctatggccaagtttgtccagtgccacttcaaggaacctgcctttgggatgctgacagtgcccctgaggacacccctcacgcagctgccagccgagcaccatgcagaagccgtgagcatcttcaagctgatcctgcgcttcatgggcgacccccacctgcatggtgcccgggagaacatcttcgggaactacatcgtgcagaaggggctggcggtgcctgagctgcgggatgagatcctggcacagctggccaatcaggtgtggcacaatcacaatgcccacaatgctgagcggggctggctgctgctggccgcctgcctcagtggctttgcaccttccccgtgcttcaacaagtaccttctcaagtttgtgtctgattatgggcggaatggcttccaggctgtgtgtcagcaccgcctcatgcaggccatgggccgggcccaacagcagggctcgggggctgcccgcaccttacccccgacccagctcgagtggacagcgacctatgagaaggccagcatggcgctggacgtgggctgcttcaatggtgaccagttctcctgcccggtgcactcctggagtacgggggaagaggtggctggagacattctgaggcacagggggctggcagatggctggcgcggctggaccgtggccatgaagaatggtgtccagtgggcagagctggctggccacgactacgtgttagacctggtgtcggacctggagctgctcagggacttccctcgacagaagtcctacttcattgtgggcacagaggggcctgcagccagcaggggaggccccaaagtggtgtttgggaacagctgggactcggatgaggacatgtccactagaccccagccccaggagcacatgcccaaagtacttgactctgatgggtacagcagccacaatcaggacggtacaaatggggagactgaggcccaaagagggacagcaacccaccaagagtcagacagtcttggagagcctgctgtgccccacaaggggctggactgctacctggatagcctctttgaccctgtgctgtcctacggggatgcggacctggagaagccaacagccattgcctaccgcatgaaagggggaggccagcccggtggaggcagcagtagtggtactgaagacacccccaggagacccccagagccaaagccaatcccaggcctggatgcctccacattggctctgcagcaagccttcatccacaaacaggccgtgctgctggcccgggagatgaccctgcaggccacggcactccagcagcagcccctgagtgctgccctgagatccttgcccgcagagaaacccccagcaccagaggcacagccgacgtctgtaggcaccggtccccctgccaaacccgtgctcctgcgtgccactccaaagcccttggccccagcccctctggccaaggctccaaggctccccatcaagcctgtggctgcccctgttctagctcaggatcaggcttctccagaaaccacttcaccctccccagagctggtccggtactctacgctcaactctgagcacttcccacagcccacacagcagatcaagaatattgtcaggcagtaccagcagccgttccggggaggccggcctgaggccctcaggaaggatggcgggaaagtgttcatgaagcggccagaccctcatgaggaggccctgatgatcctgaaagggcagatgacccacctggcagctgcacctggcacccaggtgtccagagaggccgtggccctggtgaagccggtgaccagtgcaccaaggccatccatggcacccacttcagctctgccctcgcgatcgctggagccccctgaggaactcacgcagacgcggctgcaccgcctcatcaatcccaacttctacggctatcaggacgccccctggaagatcttcctgcgcaaagaggtgttttaccccaaggacagctacagccatcctgtgcagcttgacctcctgttccggcagatcctgcacgacacgctctccgaggcctgccttcgcatctctgaggatgagaggctcaggatgaaggccttgtttgcccagaaccagctggacacacagaagcctctggtaacggaaagcgtgaagcgggccgtggtcagcactgcacgagacacctgggaggtctacttctcccgcatcttccccgccacgggcagcgtgggcactggtgtgcagctcctagctgtgtcccacgtgggcatcaaactcctgaggatggtcaagggtggccaggaggccggcgggcagctgcgggtcctgcgtgcatacagctttgcagatatcctgtttgtgaccatgccctcccagaacatgctggagttcaacctggccagtgagaaggtcatcctcttctcagcccgagcgcaccaggtcaagaccctggtagatgacttcatcttggagctgaagaaggactctgactacgtggtcgctgtgaggaacttcctgcctgaggaccctgcgctgctggctttccacaagggtgacatcatacacctgcagcccctagagccacctcgagtgggctacagtgctggctgcgtggttcgcaggaaggtggtgtacctggaggagctgcgacgtagaggccccgactttggctggaggttcgggaccatccacgggcgcgtgggccgcttcccttcggagctggtgcagcccgctgctgcccccgacttcctgcagctgccaacggagccaggccgcggccgagcagccgccgtggccgctgctgtggcctctgcagccgctgcacaggaggtgggccgcaggagagagggtcccccagtcagggcccgctctgctgaccatggggaggacgccctggcgctcccaccctacacaatgctcgagtttgcccagaagtatttccgagaccctcagaggagaccccaggatggcctcaggctgaaatccaaggagcctcgggagtccagaaccttggaggacatgctttgcttcaccaagactcccctccaggaatccctcatcgaactcagcgacagcagcctcagcaagatggccaccgacatgttcctagctgtaatgaggttcatgggggatgccccactgaagggccagagtgacctggacgtgctttgtaacctcctgaagctgtgcggggaccatgaggtcatgcgggatgaatgttactgccaagttgtgaagcagatcacagacaataccagctccaagcaggacagctgccagcgaggctggaggctgctgtatatcgtgaccgcctaccacagctgctctgaggtcctccacccacacctcactcgcttcctccaagacgtgagccggaccccaggcctgccctttcaggggatcgccaaggcctgcgagcagaacctgcagaaaaccttgcgcttcggaggtcgtctggagctccccagcagcatagagcttcgggccatgttggcaggccgcagttccaagaggcaactctttcttcttcctggaggccttgaacgccatctcaaaatcaaaacatgcactgtggccctggacgtggtggaagagatatgtgctgagatggctctgacacgccctgaggccttcaatgaatatgttatcttcgttgtcaccaaccgtggccagcatgtgtgcccactcagtcgccgtgcttacatcctggatgtggcctcagagatggagcaggtggacggcggctacatgctctggttccggcgtgtgctctgggatcagccactcaagttcgagaatgagctatatgtgaccatgcactacaaccaggtcctgcctgactacctgaagggactcttcagcagtgtgccggccagccggcccagcgagcagctgctgcagcaggtgtccaagctggcttcactgcagcatcgcgccaaggaccacttctacctgccgagcgtgcgggaagtccaggagtacatcccagcccagctctaccgtacaacggcaggctcgacctggctcaacctggtcagccagcaccggcagcagacacaggcgctcagcccccaccaggcccgtgcccagtttctgggcctcctcagcgccttacctatgttcggctcctccttcttcttcatccagagctgcagcaacattgctgtgccagccccttgcatccttgccatcaaccacaatggcctcaactttctcagcacagagactcatgaattgatggtgaagttccccctgaaggagatccagtcgacgcggacccagcggcccacggccaactccagctacccctatgtggagattgcgctgggggacgtggcggcccagcgcaccttgcagctgcagctggagcagggactggaactgtgtcgtgtggtggccgtgcacgtggagaacctgctcagtgcccatgagaagcggctcacattgccccccagcgagatcaccctgctctgacccagcccccagccctccagtaccttctgccagaagactcactgtgtggcctcagagaaatcactgaacctctcaggatcaatgacccctgtaaggggccagagccttggaggacactaagaggaggcaggaggagcaactcaaatccccaagaacacaagaagacccatcctgaactgggatggaatggcagcatgcaaacttggatcagatagcaggaggaactttcaaaagtctggcccactgtgcagtggagcagaaggcaggaccatgaggcctcctgccatgtacccattgcagaccctgcccctaactcctgcctatgacacagaagccccacaccagttgcccagatgaactggcctctgcctttggtttactcagggtctgatgttggaatctgctccaactccacaccctagcccttacatgtcctcctaaggggcccctccttgtgctgccagtcagcctggatttctggtctttggttatttctgtgcaaacaaaaggtgtgcctggcagccatttctccatggagttgctaagtggccggaaaacaagcctgagggaggaggcaggagttggagttaccttaggcccctgattcactgcctatgaacagaccatcccccactccttgggtatccccaaccccagacccccatcacttgatgggccacacaagtttgagagtggtacaagggagaagtttgggaaaagccttcttggaaaatgggacattagcattgagttttgaaagatgagtaggagtttgctaagaatagatggaagacagcaggataaacattccagagaaaatcatgtttattccctgctgtatcttccagaacctaggaggatgcctaacagagagtaagcacttaaaaaatatttgtcatatgaatgaaaaaataaacgagtgaatgttgata

SEQ ID NO: 19228 - DNA, 1919 bp, Homo sapiens
  source 1..1919: mol_type = unassigned DNA
atatatatattaattaaataaaaaaacgaggtgccttctcctgactccctgatccccgcgctctccagctctgccctcgcgatcgctggagccccctgaggaactcacgcagcccgctgctgcccccgacttcctgcagctgccaacggagccaggccgcggccgagcagccgccgtggccgctgctgtggcctctgcagccgctgcacaggaggtgggccgcaggagagagggtcccccagtcagggcccgctctgctgaccatggggaggacgccctggcgctcccaccctacacaatgctcgagtttgcccagaagtatttccgagaccctcagaggagaccccaggatggcctcaggctgaaatccaaggagcctcgggagtccagaaccttggaggacatgctttgcttcaccaagactcccctccaggaatccctcatcgaactcagcgacagcagcctcagcaagatggccaccgacatgttcctagctgtaatgaggttcatgggggatgccccactgaagggccagagtgacctggacgtgctttgtaacctcctgaagctgtgcggggaccatgaggtcatgcgggatgaatgttactgccaagttgtgaagcagatcacagacaataccagctccaagcaggacagctgccagcgaggctggaggctgctgtatatcgtgaccgcctaccacagctgctctgaggtcctccacccacacctcactcgcttcctccaagacgtgagccggaccccaggcctgccctttcaggggatcgccaaggcctgcgagcagaacctgcagaaaaccttgcgcttcggaggtcgtctggagctccccagcagcatagagcttcgggccatgttggcaggccgcagttccaagaggcaactctttcttcttcctggaggccttgaacgccatctcaaaatcaaaacatgcactgtggccctggacgtggtggaagagatatgtgctgagatggctctgacacgccctgaggccttcaatgaatatgttatcttcgttgtcaccaaccgtggccagcatgtgtgcccactcagtcgccgtgcttacatcctggatgtggcctcagagatggagcaggtggacggcggctacatgctctggttccggcgtgtgctctgggatcagccactcaagttcgagaatgagctatatgtgaccatgcactacaaccaggtcctgcctgactacctgaagggactcttcagcagtgtgccggccagccggcccagcgagcagctgctgcagcaggtgtccaagctggcttcactgcagcatcgcgccaaggaccacttctacctgccgagcgtgcgggaagtccaggagtacatcccagcccagctctaccgtacaacggcaggctcgacctggctcaacctggtcagccagcaccggcagcagacacaggcgctcagcccccaccaggcccgtgcccagtttctgggcctcctcagcgccttacctatgttcggctcctccttcttcttcatccagagctgcagcaacattgctgtgccagccccttgcatccttgccatcaaccacaatggcctcaactttctcagcacagagactcatgtgagtggcctcagcctggcactgccatcgccaccctctgttccctggtccccaaccccctccaagaggccaagacctccagccgccgaagcccagttccactgcttaccaccttcatgatctcaggcaagtctcttccctcctctgagccttgctttcctcatctggaaaatgaggataagagttgagccccacccatagggctgttgtgaaggtgagatgaggtaaaacatactctatgcactcaaatagtacatctgtgtgcttaggctgccataataaaagaccacagactgagtaactt

SEQ ID NO: 19229 - DNA, 1345 bp, Homo sapiens
  source 1..1345: mol_type = unassigned DNA
atttagggggcggggccgggtgtgaagcaaggccagggggcagtcggacagtacccactgaagccccgcccctgcaggtgttttaccccaaggacagctacagccatcctgtgcagcttgacctcctgttccggcaggctggaggttcgggaccatccacgggcgcgtgggccgcttcccttcggagctggtgcagcccgctgctgcccccgacttcctgcagctgccaacggagccaggccgcggccgagcagccgccgtggccgctgctgtggcctctgcagccgctgcacaggaggtgggccgcaggagagagggacagctgccagcgaggctggaggctgctgtatatcgtgaccgcctaccacagctgctctgaggtcctccacccacacctcactcgcttcctccaagacgtgagccggaccccaggcctgccctttcaggggatcgccaaggcctgcgagcagaacctgcagaaaaccttgcgcttcggaggtcgtctggagctccccagcagcatagagcttcgggccatgttggcaggccgcagttccaagaggcaactctttcttcttcctggaggccttgaacgccatctcaaaatcaaaacatgcactgtggccctggacgtggtggaagagatatgtgctgagatggctctgacacgccctgaggccttcaatgaatatgttatcttcgttgtcaccaaccgtggtcctgcctgactacctgaagggactcttcagcagtgtgccggccagccggcccagcgagcagctgctgcagcaggtgtccaagctggcttcactgcagcatcgcgccaaggaccacttctacctgccgagcgtgcgggaagtccaggagtacatcccagcccagctctaccgtacaacggcaggctcgacctggctcaacctggtcagccagcaccggcagcagacacaggcgctcagcccccaccaggcccgtgcccagtttctgggcctcctcagcgccttacctatgttcggctcctccttcttcttcatccagagctgcagcaacattgctgtgccagccccttgcatccttgccatcaaccacaatggcctcaactttctcagcacagagactcatgtgagtggcctcagcctggcactgccatcgccaccctctgttccctggtccccaaccccctccaagaggccaagacctccagccgccgaagcccagttccactgcttaccaccttcatgatctcaggcaagtctcttccctcctctgagccttgctttcctcatctggaaaatgaggataagagttgagccccacccatagggctgttgtgaaggtgagatgaggt

SEQ ID NO: 19230 - DNA, 998 bp, Homo sapiens
  source 1..998: mol_type = unassigned DNA
ctttgtaacctcctgaagctgtgcggggaccatgaggtcatgcgggatgaatgttactgccaagttgtgaagcagatcacagacaataccagctccaagcaggacagctgccagcgaggctggaggctgctgtatatcgtgaccgcctaccacagctgctctgaggtcctccacccacacctcactcgcttcctccaagacgtgagccggaccccaggcctgccctttcaggggatcgccaaggcctgcgagcagaacctgcagaaaaccttgcgcttcggaggtcgtctggagctccccagcagcatagagcttcgggccatgttggcaggccgcagttccaagaggcaactctttcttcttcctggaggccttgaacgccatctcaaaatcaaaacatgcactgtggccctggacgtggtggaagagatatgtgctgagatggctctgacacgccctgaggccttcaatgaatatgttatcttcgttgtcaccaaccgtggcgggaagtccaggagtacatcccagcccagctctaccgtacaacggcaggctcgacctggctcaacctggtcagccagcaccggcagcagacacaggcgctcagcccccaccaggcccgtgcccagtttctgggcctcctcagcgccttacctatgttcggctcctccttcttcttcatccagagctgcagcaacattgctgtgccagccccttgcatccttgccatcaaccacaatggcctcaactttctcagcacagagactcatgtaagagctggggaagtgttggatgggcgtggactgtcactgtcacctgcagggactggaactgtgtcgtgtggtggccgtgcacgtggagaacctgctcagtgcccatgagaagcggctcacattgccccccagcgagatcaccctgctctgacccagcccccagccctccagtaccttctgccagaagactcactgtgtggcctcagagaaatcactgaacctctc

SEQ ID NO: 19231 - DNA, 1009 bp, Homo sapiens
  source 1..1009: mol_type = unassigned DNA
atttagggggcggggccgggtgtgaagcaaggccagggggcagtcggacagtacccactgaagccccgcccctgcaggtgttttaccccaaggacagctacagccatcctgtgcagcttgacctcctgttccggcagcccagaaccagctggacacacagaagcctctggtaacggaaagcgtgaagcgggccgtggtcagcactgcacgagacacctgggaggtctacttctcccgcatcttccccgccacgggcagcgtgggcactggtgtgcagctcctagctgtgtcccacgtgggcatcaaactcctgaggatggtcaagggtggccaggaggccggcgggcagctgcgggtcctgcgtgcatacagctttgcagatatcctgtttgtgaccatgccctcccagaacatgctggagttcaacctggccagtgagaaggtcatcctcttctcagcccgagcgcaccaggtcaagaccctggtagatgacttcatcttggagctgaagaaggactctgactacgtggtcgctgtgaggaacttcctgcctgaggaccctgcgctgctggctttccacaagggtgacatcatacacctgcagcccctagagccacctcgagtgggctacagtgctggctgcgtggttcgcaggaaggtggtgtacctggaggagctgcgacgtagaggccccgactttggtgtgtgccccagaacctggaaccccatacggggcgcatcctagtttcacccactcgtggtgcagatgcacagtgagggtttcttggtgcccgaaagtggcctgggctggtcaggtctcctaaggtccagccgtggcctgtcagtatctgttggtggccagacagcccagccctctgctttgcctgaggggtctccgtgggcatttccatgtttgtggcctgaatctctctttatgtctccacatgacctgagagtccacaaaccctgctttgcctttttgcttcacttcccctttatggtcctgtgg

SEQ ID NO: 19232 - DNA, 7583 bp, Homo sapiens
  source 1..7583: mol_type = unassigned DNA
tccatccctgaccgggccgaggctgctggatgccgcgtctccgcttctgctgcctgccgggcgggctccggtggccgcagcaaagtggggcaccaaggccctgtgctaagcactcataatcctctgggggtgctacccctacaaacagcacccccaccatgtttaacctaatgaagaaagacaaggacaaagatggcgggcggaaggagaagaaggagaaaaaggagaaaaaggagcggatgtcagcggcagagcttcggagcctggaggagatgagcctgcgacgtggcttcttcaacctgaaccgctcctccaagcgtgaatccaagacgcgcctggaaatctccaaccccatccccatcaaggtggccagcggctctgacctgcacctgactgacattgactccgatagtaaccggggcagcgtcatcctggactcgggccacctaagtacagccagctccagcgatgacctcaagggtgaggagggtagcttccgtggctcggtgctgcagcgggcagccaagttcggctcactggccaagcagaactcacagatgattgtcaagcgcttttccttctcccagcgtagccgggatgagagcgcctcagaaacctcgacgccctcagagcactctgccgccccctcgccacaggtggaggtgaggactctagagggacagctggtgcagcatcctggcccaggcatccctcgaccagggcaccgatcccgagcccctgagctagtgactaaaaagttcccagtcgacctgcgcctgccccccgtggtgcccctgcccccacctaccctccgggagctggagctgcaacgacggcccactggagactttggcttctccctgcggcgcacaaccatgctggatcggggccccgagggccaggcctgtcggcgtgtggtccactttgctgagcctggtgcaggcaccaaggacctggccctggggctggtgccaggagatcgactggtggagattaatgggcacaatgtggagagcaagtccagggatgagattgtggagatgatccggcagtcaggggacagcgtgcggctcaaggtgcagcccattccagagctcagcgagctcagcaggagctggctgcggagcggcgagggacctcgcagggagccatccgatgcgaaaacagaagaacagattgcagcagaagaggcctggaatgagacggagaaggtgtggctggtccatagggacggcttctcactggccagtcaactcaaatctgaggagctcaacttgcctgaggggaaggtgcgtgtgaagctggaccacgatggggccatcctggatgtggatgaggatgacgttgagaaggctaatgctccctcctgcgaccgtctggaggatctggcctcactggtgtacctcaatgagtccagcgtcctgcacaccttgcgccagcgctatggcgctagcctgctgcacacgtatgctggccccagcctgctggttcttggcccccgtggggcccctgctgtgtactctgagaaggtgatgcacatgttcaagggttgtcggcgggaggacatggcaccccacatctatgcagtggcccagaccgcatacagggcgatgctgatgagccgtcaggatcagtcaatcatcctcctgggcagtagtggcagtggcaagaccaccagctgccagcatctggtgcagtacctggccaccatcgcgggcatcagcgggaacaaggtgttttctgtggagaagtggcaggctctgtacaccctcctggaagcctttgggaacagccccaccatcattaatggcaatgccacccgcttctcccagatcctctccctggactttgaccaagctggccaggtggcctcagcctccattcagacaatgcttctggagaagctgcgtgtggctcggcgcccagccagtgaagccacattcaacgtcttctactacctgctggcctgtggggatggcaccctcaggacagagctccacctcaaccacttggcagagaacaatgtgtttgggattgtgccactggccaagcctgaggaaaagcagaaggcagctcagcagtttagtaagctgcaggcggccatgaaggtgctgggcatctcccccgatgaacagaaggcctgctggttcattctggctgccatctaccacctgggggctgcgggagccaccaaagtccactccacagctgggcgcaagcagtttgcccgccatgagtgggcccagaaggctgcgtacctactgggctgcagcctggaggagctgtcctcagccatcttcaagcaccagcacaagggtggcaccctgcagcgctccacctccttccgccagggccccgaggagagtggcctgggagatgggacaggcccgaaactgagtgcactggagtgccttgagggcatggcggccggcctctacagcgagctcttcacccttctcgtctccctggtgaatagggctctcaagtccagccagcactcactctgctccatgatgattgtcgacaccccgggcttccagaaccctgagcagggtgggtcagcccgcggagcctcctttgaggagctgtgccacaactacacccaagaccggctgcagaggctcttccacgagcgcaccttcgtgcaggagttggaaagatacaaggaggagaacatcgagctggcgtttgacgacttggaacccccgacggatgactctgtggctgctgtggaccaggcctcccatcagtccctggtccgctcgctggcccgcacagacgaggcgaggggcctgctctggctattggaagaggaggctctggtgccaggggccagtgaggacaccctcctggagcgccttttctcctattatggcccccaggaaggtgacaaaaaaggccaaagcccccttctgcacagcagcaaaccacaccactttctcctgggccacagccatggcaccaactgggtagagtacaatgtgactggctggctgaactacaccaagcagaacccagccacccagaatgccccccggctcctgcaggactcccagaaaaaaatcatcagcaacctgtttctgggccgcgcaggcagtgccacggtgctctctggctccatcgcgggcctggagggcggctcgcagctggcactgcgccgggccaccagcatgcggaaaacctttaccacaggcatggcggctgtcaaaaagaagtcactgtgcatccagatgaagctacaggtggacgccctcatcgacaccatcaagaagtcaaagctgcattttgtgcactgcttcctgcctgtagctgagggctgggctggggagccccgttccgcctcctcccgccgagtcagcagcagcagtgagctggacctgccctcgggagaccactgcgaggctgggctcctgcagctcgacgtgcccctgctccgcacccagctccgcggctcccgcctgctcgatgccatgcgcatgtaccgccaaggttaccctgaccacatggtgttttccgagttccgccgccgctttgatgtcctggccccgcacctgaccaagaaacacgggcgtaactacatcgtggtggatgaaaggcgggcagtggaggagctgctggagtgcttggatctggagaagagcagctgctgcatgggcctgagccgggtgttcttccgggcgggcaccttggcacggctggaggagcagcgggatgaacaaaccagcaggaacctaaccctgttccaagcagcctgcaggggctacctggcccgccagcacttcaagaagagaaagatccaggacctggccattcgctgtgtacagaagaacatcaagaagaacaaaggggtgaaggactggccctggtggaagctttttaccacagtgaggcccctcatcgaagtacagctgtcagaggagcagatccggaacaaagacgaggagatccagcagctgcggagcaagctcgagaaggcggagaaggagaggaacgagctgcggctcaacagtgaccggctggagagccggatctcagagctgacatcggagctgacagatgagcgtaacacaggagagtccgcctcccagctgctggacgcggagacagcagagaggctccgggctgagaaggagatgaaggaactgcagacccagtacgatgcactgaagaagcagatggaggttatggaaatggaggtgatggaggcccgtctcatccgggcagcggagatcaacggggaagtggatgatgatgatgcaggtggcgagtggcggctgaagtatgagcgggctgtgcgggaggtggacttcaccaagaaacggctccagcaggagtttgaggacaagctggaggtggagcagcagaacaagaggcagctggaacggcggctcggggacctgcaggcagatagtgaggagagtcagcgggctctgcagcagctcaagaagaagtgccagcgactgacggctgagctgcaagacaccaagctgcacctggagggccagcaggtccgcaaccacgaactggagaagaagcagaggaggtttgacagtgagctctcgcaggcgcatgaggaggcccagcgggagaagctgcagcgggagaagctgcagcgggagaaggacatgctcctcgctgaggctttcagcctgaagcagcaactagaggaaaaagacatggacattgcagggttcacccagaaggttgtgtctctagaggcagagctccaggacatttcttcccaagagtccaaggatgaggcttctctggccaaggtcaagaaacagctccgggacctggaggccaaagtcaaggatcaggaagaagagctggatgagcaggcagggaccatccagatgctggaacaggccaagctgcgtctggagatggagatggagcggatgagacagacccattctaaggagatggagagtcgggatgaggaggtggaggaggcccggcagtcgtgtcagaagaagttaaaacagatggaggtgcagctagaggaagagtatgaggacaagcagaaggttctgcgagagaagcgggagctggagggcaagctcgccaccctcagcgaccaggtgaaccggcgggactttgagtcagagaagcggctgcggaaggacctgaagcgcaccaaggccctgctggcagatgcccagctcatgctggaccacctgaagaacagtgctcccagcaagcgagagattgcccagctcaagaaccagctggaggagtcagagttcacctgtgcggcagccgtgaaagcacggaaagcaatggaggtggagatcgaagacctgcacctgcagattgatgacatcgccaaagccaagacagcgctggaggagcagctgagccgccttcagcgtgagaagaatgagatccagaaccggctggaggaagatcaggaagacatgaacgaattgatgaagaagcacaaggctgccgtggctcaggcttcccgggacctggctcagataaatgatctccaagctcagctagaagaagccaacaaagagaagcaggagctgcaggagaagctacaagccctccagagccaggtggagttcctggagcagtccatggtggacaagtccctggtgagcaggcaggaagctaagatacgggagctggagacacgcctggagtttgaaaggacgcaagtgaaacggctggagagcctggctagccgtctcaaggaaaacatggagaagctgactgaggagcgggatcagcgcattgcagccgagaaccgggagaaggaacagaacaagcggctacagaggcagctccgggacaccaaggaggagatgggcgagcttgccaggaaggaggccgaggcgagccgcaagaagcacgaactggagatggatctagaaagcctggaggctgctaaccagagcctgcaggctgacctaaagttggcattcaagcgcatcggggacctgcaggctgccattgaggatgagatggagagtgatgagaatgaggacctcatcaacagtttgcaggacatggtgacaaagtatcagaaaagaaagaataaacttgagggagactctgatgtggactcggagctggaggaccgtgttgacggggtcaagtcctggttgtcaaaaaacaagggaccttccaaggcagcttctgatgatggcagcttaaagagttccagccccaccagctactggaagtcccttgcccctgatcggtcagatgatgagcacgaccctctcgacaacacctccagaccgcgatactcccacagttatctgagtgacagcgacacagaggccaagctgacggagactaacgcatagcccaggggagtggttggcagccctctcaccccagggcctgtggctgcctgggcacctctcccaggaagtggtggggcaccggtctcccccacccgactgctgatctgcatgggaaacaccctgaccttcttctgtcaggggcactttccaggctatgggtgtctgatgtctccacgtggaagaggtgggggaaagaggagtttctgaagagaactttttgctcctctgtctcaaaatgccagactcttggcttctaccctgtgtcaccgtgggcagtggcaggtggcctggcactgcatggagccagcacgttgacctccctctcagctccctgctcagggacggtggacaggttgcctactgggacactctaggttgctgggtccatggggaggattgggggaggagaagcagtgccttccctctcgtgtggggtgggggctctctcttcttggtgcctgctgtctttctactttttaatttaaatacccaacctctccatcacagctgcatccctgagagtgggagggggctgtagtggtagctggggctcccaagaacgactcgggaatgtcatctccatcttcacccttcagagagcagtcctttctctgtgcagctggagacgctggtgaggagagccgggtccaggttcttaagaatgaggtgcggaggggctctccggtgctgctgggctgggttgagcaagcctacgcagacaagtgtgtgtgtggaccatccgcacctccagcccccaccccaccctctttgtctcagcgtgttatgtgcaatgacctatttaaggtaaacccattccaactacagcagttcagggctgatccaagcactgcctccctcctgctctgtccaggtggtctggaccataaactcaacttgagagggaaggcttggggttgaggacttgtgatcagaaaaactgaagatggaagttttggccggtgctcattagacatgagtcctcactctgtgtcctgagcccgtgtcattcttccaacctccctgcccccacacacttatcccagacacaacaccatgtggtctggaggtcccagcccccaccctaaaaaggttatccctgagaactccaccagacttgggagcccaagtgcagtgcctggtgctgctcccatctgccgccccccttctctcctgcaattggtttgtactcactgggctgtgctctcccctgtttacccgatgtatggaaataaaggcccttttcctcctggctgcgccagt

SEQ ID NO: 19233 - DNA, 7427 bp, Homo sapiens
  source 1..7427: mol_type = unassigned DNA
tccatccctgaccgggccgaggctgctggatgccgcgtctccgcttctgctgcctgccgggcgggctccggtggccgcagcaaagtggggcaccaaggccctgtgctaagcactcataatcctctgggggtgctacccctacaaacagcacccccaccatgtttaacctaatgaagaaagacaaggacaaagatggcgggcggaaggagaagaaggagaaaaaggagaaaaaggagcggatgtcagcggcagagcttcggagcctggaggagatgagcctgcgacgtggcttcttcaacctgaaccgctcctccaagcgtgaatccaagacgcgcctggaaatctccaaccccatccccatcaaggtggccagcggctctgacctgcacctgactgacattgactccgatagtaaccggggcagcgtcatcctggactcgggccacctaagtacagccagctccagcgatgacctcaagggtgaggagggtagcttccgtggctcggtgctgcagcgggcagccaagttcggctcactggccaagcagaactcacagatgattgtcaagcgcttttccttctcccagcgtagccgggatgagagcgcctcagaaacctcgacgccctcagagcactctgccgccccctcgccacaggtggaggtgaggactctagagggacagctggtgcagcatcctggcccaggcatccctcgaccagggcaccgatcccgagcccctgagctagtgactaaaaagttcccagtcgacctgcgcctgccccccgtggtgcccctgcccccacctaccctccgggagctggagctgcaacgacggcccactggagactttggcttctccctgcggcgcacaaccatgctggatcggggccccgagggccaggcctgtcggcgtgtggtccactttgctgagcctggtgcaggcaccaaggacctggccctggggctggtgccaggagatcgactggtggagattaatgggcacaatgtggagagcaagtccagggatgagattgtggagatgatccggcagtcaggggacagcgtgcggctcaaggtgcagcccattccagagctcagcgagctcagcaggagctggctgcggagcggcgagggacctcgcagggagccatccgatgcgaaaacagaagaacagattgcagcagaagaggcctggaatgagacggagaaggtgtggctggtccatagggacggcttctcactggccagtcaactcaaatctgaggagctcaacttgcctgaggggaaggtgcgtgtgaagctggaccacgatggggccatcctggatgtggatgaggatgacgttgagaaggctaatgctccctcctgcgaccgtctggaggatctggcctcactggtgtacctcaatgagtccagcgtcctgcacaccttgcgccagcgctatggcgctagcctgctgcacacgtatgctggccccagcctgctggttcttggcccccgtggggcccctgctgtgtactctgagaaggtgatgcacatgttcaagggttgtcggcgggaggacatggcaccccacatctatgcagtggcccagaccgcatacagggcgatgctgatgagccgtcaggatcagtcaatcatcctcctgggcagtagtggcagtggcaagaccaccagctgccagcatctggtgcagtacctggccaccatcgcgggcatcagcgggaacaaggtgttttctgtggagaagtggcaggctctgtacaccctcctggaagcctttgggaacagccccaccatcattaatggcaatgccacccgcttctcccagatcctctccctggactttgaccaagctggccaggtggcctcagcctccattcagacaatgcttctggagaagctgcgtgtggctcggcgcccagccagtgaagccacattcaacgtcttctactacctgctggcctgtggggatggcaccctcaggacagagctccacctcaaccacttggcagagaacaatgtgtttgggattgtgccactggccaagcctgaggaaaagcagaaggcagctcagcagtttagtaagctgcaggcggccatgaaggtgctgggcatctcccccgatgaacagaaggcctgctggttcattctggctgccatctaccacctgggggctgcgggagccaccaaagtccactccacagctgggcgcaagcagtttgcccgccatgagtgggcccagaaggctgcgtacctactgggctgcagcctggaggagctgtcctcagccatcttcaagcaccagcacaagggtggcaccctgcagcgctccacctccttccgccagggccccgaggagagtggcctgggagatgggacaggcccgaaactgagtgcactggagtgccttgagggcatggcggccggcctctacagcgagctcttcacccttctcgtctccctggtgaatagggctctcaagtccagccagcactcactctgctccatgatgattgtcgacaccccgggcttccagaaccctgagcagggtgggtcagcccgcggagcctcctttgaggagctgtgccacaactacacccaagaccggctgcagaggctcttccacgagcgcaccttcgtgcaggagttggaaagatacaaggaggagaacatcgagctggcgtttgacgacttggaacccccgacggatgactctgtggctgctgtggaccaggcctcccatcagtccctggtccgctcgctggcccgcacagacgaggcgaggggcctgctctggctattggaagaggaggctctggtgccaggggccagtgaggacaccctcctggagcgccttttctcctattatggcccccaggaaggtgacaaaaaaggccaaagcccccttctgcacagcagcaaaccacaccactttctcctgggccacagccatggcaccaactgggtagagtacaatgtgactggctggctgaactacaccaagcagaacccagccacccagaatgccccccggctcctgcaggactcccagaaaaaaatcatcagcaacctgtttctgggccgcgcaggcagtgccacggtgctctctggctccatcgcgggcctggagggcggctcgcagctggcactgcgccgggccaccagcatgcggaaaacctttaccacaggcatggcggctgtcaaaaagaagtcactgtgcatccagatgaagctacaggtggacgccctcatcgacaccatcaagaagtcaaagctgcattttgtgcactgcttcctgcctgtagctgagggctgggctggggagccccgttccgcctcctcccgccgagtcagcagcagcagtgagctggacctgccctcgggagaccactgcgaggctgggctcctgcagctcgacgtgcccctgctccgcacccagctccgcggctcccgcctgctcgatgccatgcgcatgtaccgccaaggttaccctgaccacatggtgttttccgagttccgccgccgctttgatgtcctggccccgcacctgaccaagaaacacgggcgtaactacatcgtggtggatgaaaggcgggcagtggaggagctgctggagtgcttggatctggagaagagcagctgctgcatgggcctgagccgggtgttcttccgggcgggcaccttggcacggctggaggagcagcgggatgaacaaaccagcaggaacctaaccctgttccaagcagcctgcaggggctacctggcccgccagcacttcaagaagagaaagatccaggacctggccattcgctgtgtacagaagaacatcaagaagaacaaaggggtgaaggactggccctggtggaagctttttaccacagtgaggcccctcatcgaagtacagctgtcagaggagcagatccggaacaaagacgaggagatccagcagctgcggagcaagctcgagaaggcggagaaggagaggaacgagctgcggctcaacagtgaccggctggagagccggatctcagagctgacatcggagctgacagatgagcgtaacacaggagagtccgcctcccagctgctggacgcggagacagcagagaggctccgggctgagaaggagatgaaggaactgcagacccagtacgatgcactgaagaagcagatggaggttatggaaatggaggtgatggaggcccgtctcatccgggcagcggagatcaacggggaagtggatgatgatgatgcaggtggcgagtggcggctgaagtatgagcgggctgtgcgggaggtggacttcaccaagaaacggctccagcaggagtttgaggacaagctggaggtggagcagcagaacaagaggcagctggaacggcggctcggggacctgcaggcagatagtgaggagagtcagcgggctctgcagcagctcaagaagaagtgccagcgactgacggctgagctgcaagacaccaagctgcacctggagggccagcaggtccgcaaccacgaactggagaagaagcagaggaggtttgacagtgagctctcgcaggcgcatgaggaggcccagcgggagaagctgcagcgggagaagctgcagcgggagaaggacatgctcctcgctgaggctttcagcctgaagcagcaactagaggaaaaagacatggacattgcagggttcacccagaaggttgtgtctctagaggcagagctccaggacatttcttcccaagagtccaaggatgaggcttctctggccaaggtcaagaaacagctccgggacctggaggccaaagtcaaggatcaggaagaagagctggatgagcaggcagggaccatccagatgctggaacagttaaaacagatggaggtgcagctagaggaagagtatgaggacaagcagaaggttctgcgagagaagcgggagctggagggcaagctcgccaccctcagcgaccaggtgaaccggcgggactttgagtcagagaagcggctgcggaaggacctgaagcgcaccaaggccctgctggcagatgcccagctcatgctggaccacctgaagaacagtgctcccagcaagcgagagattgcccagctcaagaaccagctggaggagtcagagttcacctgtgcggcagccgtgaaagcacggaaagcaatggaggtggagatcgaagacctgcacctgcagattgatgacatcgccaaagccaagacagcgctggaggagcagctgagccgccttcagcgtgagaagaatgagatccagaaccggctggaggaagatcaggaagacatgaacgaattgatgaagaagcacaaggctgccgtggctcaggcttcccgggacctggctcagataaatgatctccaagctcagctagaagaagccaacaaagagaagcaggagctgcaggagaagctacaagccctccagagccaggtggagttcctggagcagtccatggtggacaagtccctggtgagcaggcaggaagctaagatacgggagctggagacacgcctggagtttgaaaggacgcaagtgaaacggctggagagcctggctagccgtctcaaggaaaacatggagaagctgactgaggagcgggatcagcgcattgcagccgagaaccgggagaaggaacagaacaagcggctacagaggcagctccgggacaccaaggaggagatgggcgagcttgccaggaaggaggccgaggcgagccgcaagaagcacgaactggagatggatctagaaagcctggaggctgctaaccagagcctgcaggctgacctaaagttggcattcaagcgcatcggggacctgcaggctgccattgaggatgagatggagagtgatgagaatgaggacctcatcaacagtgagggagactctgatgtggactcggagctggaggaccgtgttgacggggtcaagtcctggttgtcaaaaaacaagggaccttccaaggcagcttctgatgatggcagcttaaagagttccagccccaccagctactggaagtcccttgcccctgatcggtcagatgatgagcacgaccctctcgacaacacctccagaccgcgatactcccacagttatctgagtgacagcgacacagaggccaagctgacggagactaacgcatagcccaggggagtggttggcagccctctcaccccagggcctgtggctgcctgggcacctctcccaggaagtggtggggcaccggtctcccccacccgactgctgatctgcatgggaaacaccctgaccttcttctgtcaggggcactttccaggctatgggtgtctgatgtctccacgtggaagaggtgggggaaagaggagtttctgaagagaactttttgctcctctgtctcaaaatgccagactcttggcttctaccctgtgtcaccgtgggcagtggcaggtggcctggcactgcatggagccagcacgttgacctccctctcagctccctgctcagggacggtggacaggttgcctactgggacactctaggttgctgggtccatggggaggattgggggaggagaagcagtgccttccctctcgtgtggggtgggggctctctcttcttggtgcctgctgtctttctactttttaatttaaatacccaacctctccatcacagctgcatccctgagagtgggagggggctgtagtggtagctggggctcccaagaacgactcgggaatgtcatctccatcttcacccttcagagagcagtcctttctctgtgcagctggagacgctggtgaggagagccgggtccaggttcttaagaatgaggtgcggaggggctctccggtgctgctgggctgggttgagcaagcctacgcagacaagtgtgtgtgtggaccatccgcacctccagcccccaccccaccctctttgtctcagcgtgttatgtgcaatgacctatttaaggtaaacccattccaactacagcagttcagggctgatccaagcactgcctccctcctgctctgtccaggtggtctggaccataaactcaacttgagagggaaggcttggggttgaggacttgtgatcagaaaaactgaagatggaagttttggccggtgctcattagacatgagtcctcactctgtgtcctgagcccgtgtcattcttccaacctccctgcccccacacacttatcccagacacaacaccatgtggtctggaggtcccagcccccaccctaaaaaggttatccctgagaactccaccagacttgggagcccaagtgcagtgcctggtgctgctcccatctgccgccccccttctctcctgcaattggtttgtactcactgggctgtgctctcccctgtttacccgatgtatggaaataaaggcccttttcctcctggctgcgccagt

SEQ ID NO: 19234 - DNA, 5294 bp, Homo sapiens
  source 1..5294: mol_type = unassigned DNA
gacagagctctgcttggccaacaaggagaacccaggatgggtaggctcttggtctgactgcccggaaaacaggtgatggaaggaccaaggactacaaagctagagggcagctcaaaggaaggcagtggcccatctaggagtcctcagcctcccaccagcccgatacccccagagacttcccagagagccaggagccctgcacccacactcgccatgaacggcccgggagctgccacagcagaaggcctaagcgaagaggcccctgctgtgtactctgagaaggtgatgcacatgttcaagggttgtcggcgggaggacatggcaccccacatctatgcagtggcccagaccgcatacagggcgatgctgatgagccgtcaggatcagtcaatcatcctcctgggcagtagtggcagtggcaagaccaccagctgccagcatctggtgcagtacctggccaccatcgcgggcatcagcgggaacaaggtgttttctgtggagaagtggcaggctctgtacaccctcctggaagcctttgggaacagccccaccatcattaatggcaatgccacccgcttctcccagatcctctccctggactttgaccaagctggccaggtggcctcagcctccattcagacaatgcttctggagaagctgcgtgtggctcggcgcccagccagtgaagccacattcaacgtcttctactacctgctggcctgtggggatggcaccctcaggacagagctccacctcaaccacttggcagagaacaatgtgtttgggattgtgccactggccaagcctgaggaaaagcagaaggcagctcagcagtttagtaagctgcaggcggccatgaaggtgctgggcatctcccccgatgaacagaaggcctgctggttcattctggctgccatctaccacctgggggctgcgggagccaccaaagaagctgctgaagctgggcgcaagcagtttgcccgccatgagtgggcccagaaggctgcgtacctactgggctgcagcctggaggagctgtcctcagccatcttcaagcaccagcacaagggtggcaccctgcagcgctccacctccttccgccagggccccgaggagagtggcctgggagatgggacaggcccgaaactgagtgcactggagtgccttgagggcatggcggccggcctctacagcgagctcttcacccttctcgtctccctggtgaatagggctctcaagtccagccagcactcactctgctccatgatgattgtcgacaccccgggcttccagaaccctgagcagggtgggtcagcccgcggagcctcctttgaggagctgtgccacaactacacccaagaccggctgcagaggctcttccacgagcgcaccttcgtgcaggagttggaaagatacaaggaggagaacatcgagctggcgtttgacgacttggaacccccgacggatgactctgtggctgctgtggaccaggcctcccatcagtccctggtccgctcgctggcccgcacagacgaggcgaggggcctgctctggctattggaagaggaggctctggtgccaggggccagtgaggacaccctcctggagcgccttttctcctattatggcccccaggaaggtgacaaaaaaggccaaagcccccttctgcacagcagcaaaccacaccactttctcctgggccacagccatggcaccaactgggtagagtacaatgtgactggctggctgaactacaccaagcagaacccagccacccagaatgccccccggctcctgcaggactcccagaaaaaaatcatcagcaacctgtttctgggccgcgcaggcagtgccacggtgctctctggctccatcgcgggcctggagggcggctcgcagctggcactgcgccgggccaccagcatgcggaaaacctttaccacaggcatggcggctgtcaaaaagaagtcactgtgcatccagatgaagctacaggtggacgccctcatcgacaccatcaagaagtcaaagctgcattttgtgcactgcttcctgcctgtagctgagggctgggctggggagccccgttccgcctcctcccgccgagtcagcagcagcagtgagctggacctgccctcgggagaccactgcgaggctgggctcctgcagctcgacgtgcccctgctccgcacccagctccgcggctcccgcctgctcgatgccatgcgcatgtaccgccaaggttaccctgaccacatggtgttttccgagttccgccgccgctttgatgtcctggccccgcacctgaccaagaaacacgggcgtaactacatcgtggtggatgaaaggcgggcagtggaggagctgctggagtgcttggatctggagaagagcagctgctgcatgggcctgagccgggtgttcttccgggcgggcaccttggcacggctggaggagcagcgggatgaacaaaccagcaggaacctaaccctgttccaagcagcctgcaggggctacctggcccgccagcacttcaagaagagaaagatccaggacctggccattcgctgtgtacagaagaacatcaagaagaacaaaggggtgaaggactggccctggtggaagctttttaccacagtgaggcccctcatcgaagtacagctgtcagaggagcagatccggaacaaagacgaggagatccagcagctgcggagcaagctcgagaaggcggagaaggagaggaacgagctgcggctcaacagtgaccggctggagagccggatctcagagctgacatcggagctgacagatgagcgtaacacaggagagtccgcctcccagctgctggacgcggagacagcagagaggctccgggctgagaaggagatgaaggaactgcagacccagtacgatgcactgaagaagcagatggaggttatggaaatggaggtgatggaggcccgtctcatccgggcagcggagatcaacggggaagtggatgatgatgatgcaggtggcgagtggcggctgaagtatgagcgggctgtgcgggaggtggacttcaccaagaaacggctccagcaggagtttgaggacaagctggaggtggagcagcagaacaagaggcagctggaacggcggctcggggacctgcaggcagatagtgaggagagtcagcgggctctgcagcagctcaagaagaagtgccagcgactgacggctgagctgcaagacaccaagctgcacctggagggccagcaggtccgcaaccacgaactggagaagaagcagaggaggtttgacagtgagctctcgcaggcgcatgaggaggcccagcgggagaagctgcagcgggagaagctgcagcgggagaaggacatgctcctcgctgaggctttcagcctgaagcagcaactagaggaaaaagacatggacattgcagggttcacccagaaggttgtgtctctagaggcagagctccaggacatttcttcccaagagtccaaggatgaggcttctctggccaaggtcaagaaacagctccgggacctggaggccaaagtcaaggatcaggaagaagagctggatgagcaggccaagctgcgtctggagatggagatggagcggatgagacagacccattctaaggagatggagagtcgggatgaggaggtggaggaggcccggcagtcgtgtcagaagaagttaaaacagatggaggtgcagctagaggaagagtatgaggacaagcagaaggttctgcgagagaagcgggagctggagggcaagctcgccaccctcagcgaccaggtgaaccggcgggactttgagtcagagaagcggctgcggaaggacctgaagcgcaccaaggccctgctggcagatgcccagctcatgctggaccacctgaagaacagtgctcccagcaagcgagagattgcccagctcaagaaccagctggaggagtcagagttcacctgtgcggcagccgtgaaagcacggaaagcaatggaggtggagatcgaagacctgcacctgcagattgatgacatcgccaaagccaagacagcgctggaggagcagctgagccgccttcagcgtgagaagaatgagatccagaaccggctggaggaagatcaggaagacatgaacgaattgatgaagaagcacaaggctgccgtggctcaggcttcccgggacctggctcagataaatgatctccaagctcagctagaagaagccaacaaagagaagcaggagctgcaggagaagctacaagccctccagagccaggtggagttcctggagcagtccatggtggacaagtccctggtgagcaggcaggaagctaagatacgggagctggagacacgcctggagtttgaaaggacgcaagtgaaacggctggagagcctggctagccgtctcaaggaaaacatggagaagctgactgaggagcgggatcagcgcattgcagccgagaaccgggagaaggaacagaacaagcggctacagaggcagctccgggacaccaaggaggagatgggcgagcttgccaggaaggaggccgaggcgagccgcaagaagcacgaactggagatggatctagaaagcctggaggctgctaaccagagcctgcaggctgacctaaagttggcattcaagcgcatcggggacctgcaggctgccattgaggatgagatggagagtgatgagaatgaggacctcatcaacagtgagggagactctgatgtggactcggagctggaggaccgtgttgacggggtcaagtcctggttgtcaaaaaacaagggaccttccaaggcagcttctgatgatggcagcttaaagagttccagccccaccagctactggaagtcccttgcccctgatcggtcagatgatgagcacgaccctctcgacaacacctccagaccgcgatactcccacagttatctgagtgacagcgacacagaggccaagctgacggagactaacgcatagcccaggggagtggttggcagccctctcaccccagggcctgtggctgcctgggcacctctcccaggaagtggtggggcaccggtctcccccacccgactgctgatctgcatgggaaacaccctgaccttcttctgtcaggggcactttccaggctatgggtgtctgatgtctccacgtggaagaggtgggggaaagaggagtttctgaagagaactttttgctcctctgtctcaaaatgccagactcttggcttctaccctgtgtcaccgtgggcagtggcaggtggcctg

SEQ ID NO: 19235 - DNA, 7597 bp, Homo sapiens
  source 1..7597: mol_type = unassigned DNA
agctgcgccgcgctgcgctctgctccatccctgaccgggccgaggctgctggatgccgcgtctccgcttctgctgcctgccgggcgggctccggtggccgcagcaaagtggggcaccaaggccctgtgctaagcactcataatcctctgggggtgctacccctacaaacagcacccccaccatgtttaacctaatgaagaaagacaaggacaaagatggcgggcggaaggagaagaaggagaaaaaggagaaaaaggagcggatgtcagcggcagagcttcggagcctggaggagatgagcctgcgacgtggcttcttcaacctgaaccgctcctccaagcgtgaatccaagacgcgcctggaaatctccaaccccatccccatcaaggtggccagcggctctgacctgcacctgactgacattgactccgatagtaaccggggcagcgtcatcctggactcgggccacctaagtacagccagctccagcgatgacctcaagggtgaggagggtagcttccgtggctcggtgctgcagcgggcagccaagttcggctcactggccaagcagaactcacagatgattgtcaagcgcttttccttctcccagcgtagccgggatgagagcgcctcagaaacctcgacgccctcagagcactctgccgccccctcgccacaggtggaggtgaggactctagagggacagctggtgcagcatcctggcccaggcatccctcgaccagggcaccgatcccgagcccctgagctagtgactaaaaagttcccagtcgacctgcgcctgccccccgtggtgcccctgcccccacctaccctccgggagctggagctgcaacgacggcccactggagactttggcttctccctgcggcgcacaaccatgctggatcggggccccgagggccaggcctgtcggcgtgtggtccactttgctgagcctggtgcaggcaccaaggacctggccctggggctggtgccaggagatcgactggtggagattaatgggcacaatgtggagagcaagtccagggatgagattgtggagatgatccggcagtcaggggacagcgtgcggctcaaggtgcagcccattccagagctcagcgagctcagcaggagctggctgcggagcggcgagggacctcgcagggagccatccgatgcgaaaacagaagaacagattgcagcagaagaggcctggaatgagacggagaaggtgtggctggtccatagggacggcttctcactggccagtcaactcaaatctgaggagctcaacttgcctgaggggaaggtgcgtgtgaagctggaccacgatggggccatcctggatgtggatgaggatgacgttgagaaggctaatgctccctcctgcgaccgtctggaggatctggcctcactggtgtacctcaatgagtccagcgtcctgcacaccttgcgccagcgctatggcgctagcctgctgcacacgtatgctggccccagcctgctggttcttggcccccgtggggcccctgctgtgtactctgagaaggtgatgcacatgttcaagggttgtcggcgggaggacatggcaccccacatctatgcagtggcccagaccgcatacagggcgatgctgatgagccgtcaggatcagtcaatcatcctcctgggcagtagtggcagtggcaagaccaccagctgccagcatctggtgcagtacctggccaccatcgcgggcatcagcgggaacaaggtgttttctgtggagaagtggcaggctctgtacaccctcctggaagcctttgggaacagccccaccatcattaatggcaatgccacccgcttctcccagatcctctccctggactttgaccaagctggccaggtggcctcagcctccattcagacaatgcttctggagaagctgcgtgtggctcggcgcccagccagtgaagccacattcaacgtcttctactacctgctggcctgtggggatggcaccctcaggacagagctccacctcaaccacttggcagagaacaatgtgtttgggattgtgccactggccaagcctgaggaaaagcagaaggcagctcagcagtttagtaagctgcaggcggccatgaaggtgctgggcatctcccccgatgaacagaaggcctgctggttcattctggctgccatctaccacctgggggctgcgggagccaccaaagaagctgctgaagctgggcgcaagcagtttgcccgccatgagtgggcccagaaggctgcgtacctactgggctgcagcctggaggagctgtcctcagccatcttcaagcaccagcacaagggtggcaccctgcagcgctccacctccttccgccagggccccgaggagagtggcctgggagatgggacaggcccgaaactgagtgcactggagtgccttgagggcatggcggccggcctctacagcgagctcttcacccttctcgtctccctggtgaatagggctctcaagtccagccagcactcactctgctccatgatgattgtcgacaccccgggcttccagaaccctgagcagggtgggtcagcccgcggagcctcctttgaggagctgtgccacaactacacccaagaccggctgcagaggctcttccacgagcgcaccttcgtgcaggagttggaaagatacaaggaggagaacatcgagctggcgtttgacgacttggaacccccgacggatgactctgtggctgctgtggaccaggcctcccatcagtccctggtccgctcgctggcccgcacagacgaggcgaggggcctgctctggctattggaagaggaggctctggtgccaggggccagtgaggacaccctcctggagcgccttttctcctattatggcccccaggaaggtgacaaaaaaggccaaagcccccttctgcacagcagcaaaccacaccactttctcctgggccacagccatggcaccaactgggtagagtacaatgtgactggctggctgaactacaccaagcagaacccagccacccagaatgccccccggctcctgcaggactcccagaaaaaaatcatcagcaacctgtttctgggccgcgcaggcagtgccacggtgctctctggctccatcgcgggcctggagggcggctcgcagctggcactgcgccgggccaccagcatgcggaaaacctttaccacaggcatggcggctgtcaaaaagaagtcactgtgcatccagatgaagctacaggtggacgccctcatcgacaccatcaagaagtcaaagctgcattttgtgcactgcttcctgcctgtagctgagggctgggctggggagccccgttccgcctcctcccgccgagtcagcagcagcagtgagctggacctgccctcgggagaccactgcgaggctgggctcctgcagctcgacgtgcccctgctccgcacccagctccgcggctcccgcctgctcgatgccatgcgcatgtaccgccaaggttaccctgaccacatggtgttttccgagttccgccgccgctttgatgtcctggccccgcacctgaccaagaaacacgggcgtaactacatcgtggtggatgaaaggcgggcagtggaggagctgctggagtgcttggatctggagaagagcagctgctgcatgggcctgagccgggtgttcttccgggcgggcaccttggcacggctggaggagcagcgggatgaacaaaccagcaggaacctaaccctgttccaagcagcctgcaggggctacctggcccgccagcacttcaagaagagaaagatccaggacctggccattcgctgtgtacagaagaacatcaagaagaacaaaggggtgaaggactggccctggtggaagctttttaccacagtgaggcccctcatcgaagtacagctgtcagaggagcagatccggaacaaagacgaggagatccagcagctgcggagcaagctcgagaaggcggagaaggagaggaacgagctgcggctcaacagtgaccggctggagagccggatctcagagctgacatcggagctgacagatgagcgtaacacaggagagtccgcctcccagctgctggacgcggagacagcagagaggctccgggctgagaaggagatgaaggaactgcagacccagtacgatgcactgaagaagcagatggaggttatggaaatggaggtgatggaggcccgtctcatccgggcagcggagatcaacggggaagtggatgatgatgatgcaggtggcgagtggcggctgaagtatgagcgggctgtgcgggaggtggacttcaccaagaaacggctccagcaggagtttgaggacaagctggaggtggagcagcagaacaagaggcagctggaacggcggctcggggacctgcaggcagatagtgaggagagtcagcgggctctgcagcagctcaagaagaagtgccagcgactgacggctgagctgcaagacaccaagctgcacctggagggccagcaggtccgcaaccacgaactggagaagaagcagaggaggtttgacagtgagctctcgcaggcgcatgaggaggcccagcgggagaagctgcagcgggagaagctgcagcgggagaaggacatgctcctcgctgaggctttcagcctgaagcagcaactagaggaaaaagacatggacattgcagggttcacccagaaggttgtgtctctagaggcagagctccaggacatttcttcccaagagtccaaggatgaggcttctctggccaaggtcaagaaacagctccgggacctggaggccaaagtcaaggatcaggaagaagagctggatgagcaggcagggaccatccagatgctggaacaggccaagctgcgtctggagatggagatggagcggatgagacagacccattctaaggagatggagagtcgggatgaggaggtggaggaggcccggcagtcgtgtcagaagaagttaaaacagatggaggtgcagctagaggaagagtatgaggacaagcagaaggttctgcgagagaagcgggagctggagggcaagctcgccaccctcagcgaccaggtgaaccggcgggactttgagtcagagaagcggctgcggaaggacctgaagcgcaccaaggccctgctggcagatgcccagctcatgctggaccacctgaagaacagtgctcccagcaagcgagagattgcccagctcaagaaccagctggaggagtcagagttcacctgtgcggcagccgtgaaagcacggaaagcaatggaggtggagatcgaagacctgcacctgcagattgatgacatcgccaaagccaagacagcgctggaggagcagctgagccgccttcagcgtgagaagaatgagatccagaaccggctggaggaagatcaggaagacatgaacgaattgatgaagaagcacaaggctgccgtggctcaggcttcccgggacctggctcagataaatgatctccaagctcagctagaagaagccaacaaagagaagcaggagctgcaggagaagctacaagccctccagagccaggtggagttcctggagcagtccatggtggacaagtccctggtgagcaggcaggaagctaagatacgggagctggagacacgcctggagtttgaaaggacgcaagtgaaacggctggagagcctggctagccgtctcaaggaaaacatggagaagctgactgaggagcgggatcagcgcattgcagccgagaaccgggagaaggaacagaacaagcggctacagaggcagctccgggacaccaaggaggagatgggcgagcttgccaggaaggaggccgaggcgagccgcaagaagcacgaactggagatggatctagaaagcctggaggctgctaaccagagcctgcaggctgacctaaagttggcattcaagcgcatcggggacctgcaggctgccattgaggatgagatggagagtgatgagaatgaggacctcatcaacagtttgcaggacatggtgacaaagtatcagaaaagaaagaataaacttgagggagactctgatgtggactcggagctggaggaccgtgttgacggggtcaagtcctggttgtcaaaaaacaagggaccttccaaggcagcttctgatgatggcagcttaaagagttccagccccaccagctactggaagtcccttgcccctgatcggtcagatgatgagcacgaccctctcgacaacacctccagaccgcgatactcccacagttatctgagtgacagcgacacagaggccaagctgacggagactaacgcatagcccaggggagtggttggcagccctctcaccccagggcctgtggctgcctgggcacctctcccaggaagtggtggggcaccggtctcccccacccgactgctgatctgcatgggaaacaccctgaccttcttctgtcaggggcactttccaggctatgggtgtctgatgtctccacgtggaagaggtgggggaaagaggagtttctgaagagaactttttgctcctctgtctcaaaatgccagactcttggcttctaccctgtgtcaccgtgggcagtggcaggtggcctggcactgcatggagccagcacgttgacctccctctcagctccctgctcagggacggtggacaggttgcctactgggacactctaggttgctgggtccatggggaggattgggggaggagaagcagtgccttccctctcgtgtggggtgggggctctctcttcttggtgcctgctgtctttctactttttaatttaaatacccaacctctccatcacagctgcatccctgagagtgggagggggctgtagtggtagctggggctcccaagaacgactcgggaatgtcatctccatcttcacccttcagagagcagtcctttctctgtgcagctggagacgctggtgaggagagccgggtccaggttcttaagaatgaggtgcggaggggctctccggtgctgctgggctgggttgagcaagcctacgcagacaagtgtgtgtgtggaccatccgcacctccagcccccaccccaccctctttgtctcagcgtgttatgtgcaatgacctatttaaggtaaacccattccaactacagcagttcagggctgatccaagcactgcctccctcctgctctgtccaggtggtctggaccataaactcaacttgagagggaaggcttggggttgaggacttgtgatcagaaaaactgaagatggaagttttggccggtgctcattagacatgagtcctcactctgtgtcctgagcccgtgtcattcttccaacctccctgcccccacacacttatcccagacacaacaccatgtggtctggaggtcccagcccccaccctaaaaaggttatccctgagaactccaccagacttgggagcccaagtgcagtgcctggtgctgctcccatctgccgccccccttctctcctgcaattggtttgtactcactgggctgtgctctcccctgtttacccgatgtatggaaataaaggcccttttcctcctggc

SEQ ID NO: 19236 - DNA, 3329 bp, Homo sapiens
  source 1..3329: mol_type = unassigned DNA
atcagagcggagtctccttgctctgggctgctccaggccaggccatgcgggcgaaaacagaagaacagattgcagcagcagtgagctggacctgccctcgggagaccactgcgaggctgggctcctgcagctcgacgtgcccctgctccgcacccagctccgcggctcccgcctgctcgatgccatgcgcatgtaccgccaaggttaccctgaccacatggtgttttccgagttccgccgccgctttgatgtcctggccccgcacctgaccaagaaacacgggcgtaactacatcgtggtggatgaaaggcgggcagtggaggagctgctggagtgcttggatctggagaagagcagctgctgcatgggcctgagccgggtgttcttccgggcgggcaccttggcacggctggaggagcagcgggatgaacaaaccagcaggaacctaaccctgttccaagcagcctgcaggggctacctggcccgccagcacttcaagaagagaaagatccaggacctggccattcgctgtgtacagaagaacatcaagaagaacaaaggggtgaaggactggccctggtggaagctttttaccacagtgaggcccctcatcgaagtacagctgtcagaggagcagatccggaacaaagacgaggagatccagcagctgcggagcaagctcgagaaggcggagaaggagaggaacgagctgcggctcaacagtgaccggctggagagccggatctcagagctgacatcggagctgacagatgagcgtaacacaggagagtccgcctcccagctgctggacgcggagacagcagagaggctccgggctgagaaggagatgaaggaactgcagacccagtacgatgcactgaagaagcagatggaggttatggaaatggaggtgatggaggcccgtctcatccgggcagcggagatcaacggggaagtggatgatgatgatgcaggtggcgagtggcggctgaagtatgagcgggctgtgcgggaggtggacttcaccaagaaacggctccagcaggagtttgaggacaagctggaggtggagcagcagaacaagaggcagctggaacggcggctcggggacctgcaggcagatagtgaggagagtcagcgggctctgcagcagctcaagaagaagtgccagcgactgacggctgagctgcaagacaccaagctgcacctggagggccagcaggtccgcaaccacgaactggagaagaagcagaggaggtttgacagtgagctctcgcaggcgcatgaggaggcccagcgggagaagctgcagcgggagaagctgcagcgggagaaggacatgctcctcgctgaggctttcagcctgaagcagcaactagaggaaaaagacatggacattgcagggttcacccagaaggttgtgtctctagaggcagagctccaggacatttcttcccaagagtccaaggatgaggcttctctggccaaggtcaagaaacagctccgggacctggaggccaaagtcaaggatcaggaagaagagctggatgagcaggcagggaccatccagatgctggaacaggccaagctgcgtctggagatggagatggagcggatgagacagacccattctaaggagatggagagtcgggatgaggaggtggaggaggcccggcagtcgtgtcagaagaagttaaaacagatggaggtgcagctagaggaagagtatgaggacaagcagaaggttctgcgagagaagcgggagctggagggcaagctcgccaccctcagcgaccaggtgaaccggcgggactttgagtcagagaagcggctgcggaaggacctgaagcgcaccaaggccctgctggcagatgcccagctcatgctggaccacctgaagaacagtgctcccagcaagcgagagattgcccagctcaagaaccagctggaggagtcagagttcacctgtgcggcagccgtgaaagcacggaaagcaatggaggtggagatcgaagacctgcacctgcagattgatgacatcgccaaagccaagacagcgctggaggagcagctgagccgccttcagcgtgagaagaatgagatccagaaccggctggaggaagatcaggaagacatgaacgaattgatgaagaagcacaaggctgccgtggctcaggcttcccgggacctggctcagataaatgatctccaagctcagctagaagaagccaacaaagagaagcaggagctgcaggagaagctacaagccctccagagccaggtggagttcctggagcagtccatggtggacaagtccctggtgagcaggcaggaagctaagatacgggagctggagacacgcctggagtttgaaaggacgcaagtgaaacggctggagagcctggctagccgtctcaaggaaaacatggagaagctgactgaggagcgggatcagcgcattgcagccgagaaccgggagaaggaacagaacaagcggctacagaggcagctccgggacaccaaggaggagatgggcgagcttgccaggaaggaggccgaggcgagccgcaagaagcacgaactggagatggatctagaaagcctggaggctgctaaccagagcctgcaggctgacctaaagttggcattcaagcgcatcggggacctgcaggctgccattgaggatgagatggagagtgatgagaatgaggacctcatcaacagtgagggagactctgatgtggactcggagctggaggaccgtgttgacggggtcaagtcctggttgtcaaaaaacaagggaccttccaaggcagcttctgatgatggcagcttaaagagttccagccccaccagctactggaagtcccttgcccctgatcggtcagatgatgagcacgaccctctcgacaacacctccagaccgcgatactcccacagttatctgagtgacagcgacacagaggccaagctgacggagactaacgcatagcccaggggagtggttggcagccctctcaccccagggcctgtggctgcctgggcacctctcccaggaagtggtggggcaccggtctcccccacccgactgctgatctgcatgggaaacaccctgaccttcttctgtcaggggcactttccaggctatgggtgtctgatgtctccacgtggaagaggtgggggaaagaggagtttctgaagagaactttttgctcctctgtctcaaaatgccagactcttggcttctaccctgtgtcaccgtgggcagtggcaggtggcctggcactgcatggagccagcacgttgacctccctctcagctccctgctc

SEQ ID NO: 19237 - DNA, 7504 bp, Homo sapiens
  source 1..7504: mol_type = unassigned DNA
ctggatgccgcgtctccgcttctgctgcctgccgggcgggctccggtggccgcagcaaagtggggcaccaaggccctgtgctaagcactcataatcctctgggggtgctacccctacaaacagcacccccaccatgtttaacctaatgaagaaagacaaggacaaagatggcgggcggaaggagaagaaggagaaaaaggagaaaaaggagcggatgtcagcggcagagcttcggagcctggaggagatgagcctgcgacgtggcttcttcaacctgaaccgctcctccaagcgtgaatccaagacgcgcctggaaatctccaaccccatccccatcaaggtggccagcggctctgacctgcacctgactgacattgactccgatagtaaccggggcagcgtcatcctggactcgggccacctaagtacagccagctccagcgatgacctcaagggtgaggagggtagcttccgtggctcggtgctgcagcgggcagccaagttcggctcactggccaagcagaactcacagatgattgtcaagcgcttttccttctcccagcgtagccgggatgagagcgcctcagaaacctcgacgccctcagagcactctgccgccccctcgccacaggtggaggtgaggactctagagggacagctggtgcagcatcctggcccaggcatccctcgaccagggcaccgatcccgagcccctgagctagtgactaaaaagttcccagtcgacctgcgcctgccccccgtggtgcccctgcccccacctaccctccgggagctggagctgcaacgacggcccactggagactttggcttctccctgcggcgcacaaccatgctggatcggggccccgagggccaggcctgtcggcgtgtggtccactttgctgagcctggtgcaggcaccaaggacctggccctggggctggtgccaggagatcgactggtggagattaatgggcacaatgtggagagcaagtccagggatgagattgtggagatgatccggcagtcaggggacagcgtgcggctcaaggtgcagcccattccagagctcagcgagctcagcaggagctggctgcggagcggcgagggacctcgcagggagccatccgatgcgaaaacagaagaacagattgcagcagaagaggcctggaatgagacggagaaggtgtggctggtccatagggacggcttctcactggccagtcaactcaaatctgaggagctcaacttgcctgaggggaaggtgcgtgtgaagctggaccacgatggggccatcctggatgtggatgaggatgacgttgagaaggctaatgctccctcctgcgaccgtctggaggatctggcctcactggtgtacctcaatgagtccagcgtcctgcacaccttgcgccagcgctatggcgctagcctgctgcacacgtatgctggccccagcctgctggttcttggcccccgtggggcccctgctgtgtactctgagaaggtgatgcacatgttcaagggttgtcggcgggaggacatggcaccccacatctatgcagtggcccagaccgcatacagggcgatgctgatgagccgtcaggatcagtcaatcatcctcctgggcagtagtggcagtggcaagaccaccagctgccagcatctggtgcagtacctggccaccatcgcgggcatcagcgggaacaaggtgttttctgtggagaagtggcaggctctgtacaccctcctggaagcctttgggaacagccccaccatcattaatggcaatgccacccgcttctcccagatcctctccctggactttgaccaagctggccaggtggcctcagcctccattcagacaatgcttctggagaagctgcgtgtggctcggcgcccagccagtgaagccacattcaacgtcttctactacctgctggcctgtggggatggcaccctcaggacagagctccacctcaaccacttggcagagaacaatgtgtttgggattgtgccactggccaagcctgaggaaaagcagaaggcagctcagcagtttagtaagctgcaggcggccatgaaggtgctgggcatctcccccgatgaacagaaggcctgctggttcattctggctgccatctaccacctgggggctgcgggagccaccaaagaagctgctgaagctgggcgcaagcagtttgcccgccatgagtgggcccagaaggctgcgtacctactgggctgcagcctggaggagctgtcctcagccatcttcaagcaccagcacaagggtggcaccctgcagcgctccacctccttccgccagggccccgaggagagtggcctgggagatgggacaggcccgaaactgagtgcactggagtgccttgagggcatggcggccggcctctacagcgagctcttcacccttctcgtctccctggtgaatagggctctcaagtccagccagcactcactctgctccatgatgattgtcgacaccccgggcttccagaaccctgagcagggtgggtcagcccgcggagcctcctttgaggagctgtgccacaactacacccaagaccggctgcagaggctcttccacgagcgcaccttcgtgcaggagttggaaagatacaaggaggagaacatcgagctggcgtttgacgacttggaacccccgacggatgactctgtggctgctgtggaccaggcctcccatcagtccctggtccgctcgctggcccgcacagacgaggcgaggggcctgctctggctattggaagaggaggctctggtgccaggggccagtgaggacaccctcctggagcgccttttctcctattatggcccccaggaaggtgacaaaaaaggccaaagcccccttctgcacagcagcaaaccacaccactttctcctgggccacagccatggcaccaactgggtagagtacaatgtgactggctggctgaactacaccaagcagaacccagccacccagaatgccccccggctcctgcaggactcccagaaaaaaatcatcagcaacctgtttctgggccgcgcaggcagtgccacggtgctctctggctccatcgcgggcctggagggcggctcgcagctggcactgcgccgggccaccagcatgcggaaaacctttaccacaggcatggcggctgtcaaaaagaagtcactgtgcatccagatgaagctacaggtggacgccctcatcgacaccatcaagaagtcaaagctgcattttgtgcactgcttcctgcctgtagctgagggctgggctggggagccccgttccgcctcctcccgccgagtcagcagcagcagtgagctggacctgccctcgggagaccactgcgaggctgggctcctgcagctcgacgtgcccctgctccgcacccagctccgcggctcccgcctgctcgatgccatgcgcatgtaccgccaaggttaccctgaccacatggtgttttccgagttccgccgccgctttgatgtcctggccccgcacctgaccaagaaacacgggcgtaactacatcgtggtggatgaaaggcgggcagtggaggagctgctggagtgcttggatctggagaagagcagctgctgcatgggcctgagccgggtgttcttccgggcgggcaccttggcacggctggaggagcagcgggatgaacaaaccagcaggaacctaaccctgttccaagcagcctgcaggggctacctggcccgccagcacttcaagaagagaaagatccaggacctggccattcgctgtgtacagaagaacatcaagaagaacaaaggggtgaaggactggccctggtggaagctttttaccacagtgaggcccctcatcgaagtacagctgtcagaggagcagatccggaacaaagacgaggagatccagcagctgcggagcaagctcgagaaggcggagaaggagaggaacgagctgcggctcaacagtgaccggctggagagccggatctcagagctgacatcggagctgacagatgagcgtaacacaggagagtccgcctcccagctgctggacgcggagacagcagagaggctccgggctgagaaggagatgaaggaactgcagacccagtacgatgcactgaagaagcagatggaggttatggaaatggaggtgatggaggcccgtctcatccgggcagcggagatcaacggggaagtggatgatgatgatgcaggtggcgagtggcggctgaagtatgagcgggctgtgcgggaggtggacttcaccaagaaacggctccagcaggagtttgaggacaagctggaggtggagcagcagaacaagaggcagctggaacggcggctcggggacctgcaggcagatagtgaggagagtcagcgggctctgcagcagctcaagaagaagtgccagcgactgacggctgagctgcaagacaccaagctgcacctggagggccagcaggtccgcaaccacgaactggagaagaagcagaggaggtttgacagtgagctctcgcaggcgcatgaggaggcccagcgggagaagctgcagcgggagaagctgcagcgggagaaggacatgctcctcgctgaggctttcagcctgaagcagcaactagaggaaaaagacatggacattgcagggttcacccagaaggttgtgtctctagaggcagagctccaggacatttcttcccaagagtccaaggatgaggcttctctggccaaggtcaagaaacagctccgggacctggaggccaaagtcaaggatcaggaagaagagctggatgagcaggcagggaccatccagatgctggaacaggccaagctgcgtctggagatggagatggagcggatgagacagacccattctaaggagatggagagtcgggatgaggaggtggaggaggcccggcagtcgtgtcagaagaagttaaaacagatggaggtgcagctagaggaagagtatgaggacaagcagaaggttctgcgagagaagcgggagctggagggcaagctcgccaccctcagcgaccaggtgaaccggcgggactttgagtcagagaagcggctgcggaaggacctgaagcgcaccaaggccctgctggcagatgcccagctcatgctggaccacctgaagaacagtgctcccagcaagcgagagattgcccagctcaagaaccagctggaggagtcagagttcacctgtgcggcagccgtgaaagcacggaaagcaatggaggtggagatcgaagacctgcacctgcagattgatgacatcgccaaagccaagacagcgctggaggagcagctgagccgccttcagcgtgagaagaatgagatccagaaccggctggaggaagatcaggaagacatgaacgaattgatgaagaagcacaaggctgccgtggctcaggcttcccgggacctggctcagataaatgatctccaagctcagctagaagaagccaacaaagagaagcaggagctgcaggagaagctacaagccctccagagccaggtggagttcctggagcagtccatggtggacaagtccctggtgagcaggcaggaagctaagatacgggagctggagacacgcctggagtttgaaaggacgcaagtgaaacggctggagagcctggctagccgtctcaaggaaaacatggagaagctgactgaggagcgggatcagcgcattgcagccgagaaccgggagaaggaacagaacaagcggctacagaggcagctccgggacaccaaggaggagatgggcgagcttgccaggaaggaggccgaggcgagccgcaagaagcacgaactggagatggatctagaaagcctggaggctgctaaccagagcctgcaggctgacctaaagttggcattcaagcgcatcggggacctgcaggctgccattgaggatgagatggagagtgatgagaatgaggacctcatcaacagtgagggagactctgatgtggactcggagctggaggaccgtgttgacggggtcaagtcctggttgtcaaaaaacaagggaccttccaaggcagcttctgatgatggcagcttaaagagttccagccccaccagctactggaagtcccttgcccctgatcggtcagatgatgagcacgaccctctcgacaacacctccagaccgcgatactcccacagttatctgagtgacagcgacacagaggccaagctgacggagactaacgcatagcccaggggagtggttggcagccctctcaccccagggcctgtggctgcctgggcacctctcccaggaagtggtggggcaccggtctcccccacccgactgctgatctgcatgggaaacaccctgaccttcttctgtcaggggcactttccaggctatgggtgtctgatgtctccacgtggaagaggtgggggaaagaggagtttctgaagagaactttttgctcctctgtctcaaaatgccagactcttggcttctaccctgtgtcaccgtgggcagtggcaggtggcctggcactgcatggagccagcacgttgacctccctctcagctccctgctcagggacggtggacaggttgcctactgggacactctaggttgctgggtccatggggaggattgggggaggagaagcagtgccttccctctcgtgtggggtgggggctctctcttcttggtgcctgctgtctttctactttttaatttaaatacccaacctctccatcacagctgcatccctgagagtgggagggggctgtagtggtagctggggctcccaagaacgactcgggaatgtcatctccatcttcacccttcagagagcagtcctttctctgtgcagctggagacgctggtgaggagagccgggtccaggttcttaagaatgaggtgcggaggggctctccggtgctgctgggctgggttgagcaagcctacgcagacaagtgtgtgtgtggaccatccgcacctccagcccccaccccaccctctttgtctcagcgtgttatgtgcaatgacctatttaaggtaaacccattccaactacagcagttcagggctgatccaagcactgcctccctcctgctctgtccaggtggtctggaccataaactcaacttgagagggaaggcttggggttgaggacttgtgatcagaaaaactgaagatggaagttttggccggtgctcattagacatgagtcctcactctgtgtcctgagcccgtgtcattcttccaacctccctgcccccacacacttatcccagacacaacaccatgtggtctggaggtcccagcccccaccctaaaaaggttatccctgagaactccaccagacttgggagcccaagtgcagtgcctggtgctgctcccatctgccgccccccttctctcctgcaattggtttgtactcactgggctgtgctctcccctgtttacccgatgtatggaaataaaggcccttttcctcctggc

SEQ ID NO: 19238 - DNA, 7522 bp, Homo sapiens
  source 1..7522: mol_type = unassigned DNA
gcagggagtcacccggcgctgcggagctcagcacagccggccgggaggaggctccccctggagcacggggccaggccaggtgctggctacccctccggccgctgctacaacccttggcgaggggcagagcgcggggagagagccggggtcccggggctggaggaaacggccgctcagggagcagcaaagtggggcaccaaggccctgtgctaagcactcataatcctctgggggtgctacccctacaaacagcacccccaccatgtttaacctaatgaagaaagacaaggacaaagatggcgggcggaaggagaagaaggagaaaaaggagaaaaaggagcggatgtcagcggcagagcttcggagcctggaggagatgagcctgcgacgtggcttcttcaacctgaaccgctcctccaagcgtgaatccaagacgcgcctggaaatctccaaccccatccccatcaaggtggccagcggctctgacctgcacctgactgacattgactccgatagtaaccggggcagcgtcatcctggactcgggccacctaagtacagccagctccagcgatgacctcaagggtgaggagggtagcttccgtggctcggtgctgcagcgggcagccaagttcggctcactggccaagcagaactcacagatgattgtcaagcgcttttccttctcccagcgtagccgggatgagagcgcctcagaaacctcgacgccctcagagcactctgccgccccctcgccacaggtggaggtgaggactctagagggacagctggtgcagcatcctggcccaggcatccctcgaccagggcaccgatcccgagcccctgagctagtgactaaaaagttcccagtcgacctgcgcctgccccccgtggtgcccctgcccccacctaccctccgggagctggagctgcaacgacggcccactggagactttggcttctccctgcggcgcacaaccatgctggatcggggccccgagggccaggcctgtcggcgtgtggtccactttgctgagcctggtgcaggcaccaaggacctggccctggggctggtgccaggagatcgactggtggagattaatgggcacaatgtggagagcaagtccagggatgagattgtggagatgatccggcagtcaggggacagcgtgcggctcaaggtgcagcccattccagagctcagcgagctcagcaggagctggctgcggagcggcgagggacctcgcagggagccatccgatgcgaaaacagaagaacagattgcagcagaagaggcctggaatgagacggagaaggtgtggctggtccatagggacggcttctcactggccagtcaactcaaatctgaggagctcaacttgcctgaggggaaggtgcgtgtgaagctggaccacgatggggccatcctggatgtggatgaggatgacgttgagaaggctaatgctccctcctgcgaccgtctggaggatctggcctcactggtgtacctcaatgagtccagcgtcctgcacaccttgcgccagcgctatggcgctagcctgctgcacacgtatgctggccccagcctgctggttcttggcccccgtggggcccctgctgtgtactctgagaaggtgatgcacatgttcaagggttgtcggcgggaggacatggcaccccacatctatgcagtggcccagaccgcatacagggcgatgctgatgagccgtcaggatcagtcaatcatcctcctgggcagtagtggcagtggcaagaccaccagctgccagcatctggtgcagtacctggccaccatcgcgggcatcagcgggaacaaggtgttttctgtggagaagtggcaggctctgtacaccctcctggaagcctttgggaacagccccaccatcattaatggcaatgccacccgcttctcccagatcctctccctggactttgaccaagctggccaggtggcctcagcctccattcagacaatgcttctggagaagctgcgtgtggctcggcgcccagccagtgaagccacattcaacgtcttctactacctgctggcctgtggggatggcaccctcaggacagagctccacctcaaccacttggcagagaacaatgtgtttgggattgtgccactggccaagcctgaggaaaagcagaaggcagctcagcagtttagtaagctgcaggcggccatgaaggtgctgggcatctcccccgatgaacagaaggcctgctggttcattctggctgccatctaccacctgggggctgcgggagccaccaaagaagctgctgaagctgggcgcaagcagtttgcccgccatgagtgggcccagaaggctgcgtacctactgggctgcagcctggaggagctgtcctcagccatcttcaagcaccagcacaagggtggcaccctgcagcgctccacctccttccgccagggccccgaggagagtggcctgggagatgggacaggcccgaaactgagtgcactggagtgccttgagggcatggcggccggcctctacagcgagctcttcacccttctcgtctccctggtgaatagggctctcaagtccagccagcactcactctgctccatgatgattgtcgacaccccgggcttccagaaccctgagcagggtgggtcagcccgcggagcctcctttgaggagctgtgccacaactacacccaagaccggctgcagaggctcttccacgagcgcaccttcgtgcaggagttggaaagatacaaggaggagaacatcgagctggcgtttgacgacttggaacccccgacggatgactctgtggctgctgtggaccaggcctcccatcagtccctggtccgctcgctggcccgcacagacgaggcgaggggcctgctctggctattggaagaggaggctctggtgccaggggccagtgaggacaccctcctggagcgccttttctcctattatggcccccaggaaggtgacaaaaaaggccaaagcccccttctgcacagcagcaaaccacaccactttctcctgggccacagccatggcaccaactgggtagagtacaatgtgactggctggctgaactacaccaagcagaacccagccacccagaatgccccccggctcctgcaggactcccagaaaaaaatcatcagcaacctgtttctgggccgcgcaggcagtgccacggtgctctctggctccatcgcgggcctggagggcggctcgcagctggcactgcgccgggccaccagcatgcggaaaacctttaccacaggcatggcggctgtcaaaaagaagtcactgtgcatccagatgaagctacaggtggacgccctcatcgacaccatcaagaagtcaaagctgcattttgtgcactgcttcctgcctgtagctgagggctgggctggggagccccgttccgcctcctcccgccgagtcagcagcagcagtgagctggacctgccctcgggagaccactgcgaggctgggctcctgcagctcgacgtgcccctgctccgcacccagctccgcggctcccgcctgctcgatgccatgcgcatgtaccgccaaggttaccctgaccacatggtgttttccgagttccgccgccgctttgatgtcctggccccgcacctgaccaagaaacacgggcgtaactacatcgtggtggatgaaaggcgggcagtggaggagctgctggagtgcttggatctggagaagagcagctgctgcatgggcctgagccgggtgttcttccgggcgggcaccttggcacggctggaggagcagcgggatgaacaaaccagcaggaacctaaccctgttccaagcagcctgcaggggctacctggcccgccagcacttcaagaagagaaagatccaggacctggccattcgctgtgtacagaagaacatcaagaagaacaaaggggtgaaggactggccctggtggaagctttttaccacagtgaggcccctcatcgaagtacagctgtcagaggagcagatccggaacaaagacgaggagatccagcagctgcggagcaagctcgagaaggcggagaaggagaggaacgagctgcggctcaacagtgaccggctggagagccggatctcagagctgacatcggagctgacagatgagcgtaacacaggagagtccgcctcccagctgctggacgcggagacagcagagaggctccgggctgagaaggagatgaaggaactgcagacccagtacgatgcactgaagaagcagatggaggttatggaaatggaggtgatggaggcccgtctcatccgggcagcggagatcaacggggaagtggatgatgatgatgcaggtggcgagtggcggctgaagtatgagcgggctgtgcgggaggtggacttcaccaagaaacggctccagcaggagtttgaggacaagctggaggtggagcagcagaacaagaggcagctggaacggcggctcggggacctgcaggcagatagtgaggagagtcagcgggctctgcagcagctcaagaagaagtgccagcgactgacggctgagctgcaagacaccaagctgcacctggagggccagcaggtccgcaaccacgaactggagaagaagcagaggaggtttgacagtgagctctcgcaggcgcatgaggaggcccagcgggagaagctgcagcgggagaagctgcagcgggagaaggacatgctcctcgctgaggctttcagcctgaagcagcaactagaggaaaaagacatggacattgcagggttcacccagaaggttgtgtctctagaggcagagctccaggacatttcttcccaagagtccaaggatgaggcttctctggccaaggtcaagaaacagctccgggacctggaggccaaagtcaaggatcaggaagaagagctggatgagcaggcagggaccatccagatgctggaacagttaaaacagatggaggtgcagctagaggaagagtatgaggacaagcagaaggttctgcgagagaagcgggagctggagggcaagctcgccaccctcagcgaccaggtgaaccggcgggactttgagtcagagaagcggctgcggaaggacctgaagcgcaccaaggccctgctggcagatgcccagctcatgctggaccacctgaagaacagtgctcccagcaagcgagagattgcccagctcaagaaccagctggaggagtcagagttcacctgtgcggcagccgtgaaagcacggaaagcaatggaggtggagatcgaagacctgcacctgcagattgatgacatcgccaaagccaagacagcgctggaggagcagctgagccgccttcagcgtgagaagaatgagatccagaaccggctggaggaagatcaggaagacatgaacgaattgatgaagaagcacaaggctgccgtggctcaggcttcccgggacctggctcagataaatgatctccaagctcagctagaagaagccaacaaagagaagcaggagctgcaggagaagctacaagccctccagagccaggtggagttcctggagcagtccatggtggacaagtccctggtgagcaggcaggaagctaagatacgggagctggagacacgcctggagtttgaaaggacgcaagtgaaacggctggagagcctggctagccgtctcaaggaaaacatggagaagctgactgaggagcgggatcagcgcattgcagccgagaaccgggagaaggaacagaacaagcggctacagaggcagctccgggacaccaaggaggagatgggcgagcttgccaggaaggaggccgaggcgagccgcaagaagcacgaactggagatggatctagaaagcctggaggctgctaaccagagcctgcaggctgacctaaagttggcattcaagcgcatcggggacctgcaggctgccattgaggatgagatggagagtgatgagaatgaggacctcatcaacagtgagggagactctgatgtggactcggagctggaggaccgtgttgacggggtcaagtcctggttgtcaaaaaacaagggaccttccaaggcagcttctgatgatggcagcttaaagagttccagccccaccagctactggaagtcccttgcccctgatcggtcagatgatgagcacgaccctctcgacaacacctccagaccgcgatactcccacagttatctgagtgacagcgacacagaggccaagctgacggagactaacgcatagcccaggggagtggttggcagccctctcaccccagggcctgtggctgcctgggcacctctcccaggaagtggtggggcaccggtctcccccacccgactgctgatctgcatgggaaacaccctgaccttcttctgtcaggggcactttccaggctatgggtgtctgatgtctccacgtggaagaggtgggggaaagaggagtttctgaagagaactttttgctcctctgtctcaaaatgccagactcttggcttctaccctgtgtcaccgtgggcagtggcaggtggcctggcactgcatggagccagcacgttgacctccctctcagctccctgctcagggacggtggacaggttgcctactgggacactctaggttgctgggtccatggggaggattgggggaggagaagcagtgccttccctctcgtgtggggtgggggctctctcttcttggtgcctgctgtctttctactttttaatttaaatacccaacctctccatcacagctgcatccctgagagtgggagggggctgtagtggtagctggggctcccaagaacgactcgggaatgtcatctccatcttcacccttcagagagcagtcctttctctgtgcagctggagacgctggtgaggagagccgggtccaggttcttaagaatgaggtgcggaggggctctccggtgctgctgggctgggttgagcaagcctacgcagacaagtgtgtgtgtggaccatccgcacctccagcccccaccccaccctctttgtctcagcgtgttatgtgcaatgacctatttaaggtaaacccattccaactacagcagttcagggctgatccaagcactgcctccctcctgctctgtccaggtggtctggaccataaactcaacttgagagggaaggcttggggttgaggacttgtgatcagaaaaactgaagatggaagttttggccggtgctcattagacatgagtcctcactctgtgtcctgagcccgtgtcattcttccaacctccctgcccccacacacttatcccagacacaacaccatgtggtctggaggtcccagcccccaccctaaaaaggttatccctgagaactccaccagacttgggagcccaagtgcagtgcctggtgctgctcccatctgccgccccccttctctcctgcaattggtttgtactcactgggctgtgctctcccctgtttacccgatgtatggaaataaaggcccttttcctcctggc

SEQ ID NO: 19239 - DNA, 3329 bp, Homo sapiens; identical to SEQ ID NO: 19236
  source 1..3329: mol_type = unassigned DNA

SEQ ID NO: 19240 - DNA, 1442 bp, Homo sapiens
  source 1..1442: mol_type = unassigned DNA
attactgggatgcggccagtacaggcagctccttgagcatcactggtcctgggacccaccccagtgggcaggccccttgggcagggaatggggcaggggaggaggctgggctgggctggtggcttcatggcccctgagctagtcacctagctgctgagagatgccaatctcacgggcttgatttatccccatgacatttgtgctcctcagcagttctcagctggaggagcagctgagccgccttcagcgtgagaagaatgagatccagaaccggctggaggaagatcaggaagacatgaacgaattgatgaagaagcacaaggctgccgtggctcaggcttcccgggacctggctcagataaatgatctccaagctcagctagaagaagccaacaaagagaagcaggagctgcaggagaagctacaagccctccagagccaggtggagttcctggagcagtccatggtggacaagtccctggtgagcaggcaggaagctaagatacgggagctggagacacgcctggagtttgaaaggacgcaagtgaaacggctggagagcctggctagccgtctcaaggaaaacatggagaagctgactgaggagcgggatcagcgcattgcagccgagaaccgggagaaggaacagaacaagcggctacagaggcagctccgggacaccaaggaggagatgggcgagcttgccaggaaggaggccgaggcgagccgcaagaagcacgaactggagatggatctagaaagcctggaggctgctaaccagagcctgcaggctgacctaaagttggcattcaagcgcatcggggacctgcaggctgccattgaggatgagatggagagtgatgagaatgaggacctcatcaacagtgagggagactctgatgtggactcggagctggaggaccgtgttgacggggtcaagtcctggttgtcaaaaaacaagggaccttccaaggcagcttctgatgatggcagcttaaagagttccagccccaccagctactggaagtcccttgcccctgatcggtcagatgatgagcacgaccctctcgacaacacctccagaccgcgatactcccacagttatctgagtgacagcgacacagaggccaagctgacggagactaacgcatagcccaggggagtggttggcagccctctcaccccagggcctgtggctgcctgggcacctctcccaggaagtggtggggcaccggtctcccccacccgactgctgatctgcatgggaaacaccctgaccttcttctgtcaggggcactttccaggctatgggtgtctgatgtctccacgtggaagaggtgggggaaagaggagtttctgaagagaactttttgctcctctgtctcaaaatgccagactcttggcttctaccctgtgtcaccgtgggcagtggcaggtggcct

SEQ ID NO: 19241 - DNA, 8565 bp, Homo sapiens
  source 1..8565: mol_type = unassigned DNA
gggaagggatgtgtgtcggtgtgtgtggagagggtgctccttcgctcctgctttcccggctcggtggggtcccttcgcggccacccggggagacgtcttagacagtcgtggttcctgtgatctgtgtcctctttgcagaagttctgtgtccatctcatgtgctgcgtgtgtctgtaaagcctcattccgtgctgtctggcaggaagctccatctcatctcatcatctcacggccctggcactgcctcagcatggccatctcatcacgcctcgccctgtgggagcagaagattcgggaagaggacaagagccctccaccatcctcgccccctcctcttttctctgtcatcccagggggcttcattaagcaactggtccgggggactgaaaaagaggccaaggaagcgagacagaggaagcagttagctgtcgcctctccagaacgagagatcccagaaatttccatcagccaacccaacagcaagtccagcagtggcaccagatctggaagccagcagatctctcaggacgaccagtcaagctctcctgggagctcagacattctgggcaaggagagcgaggggtcccgcagccccgaccctgagcagatgacaagcatcaatggtgagaaggcccaggagctgggctccagtgcgacaccaaccaaaaagactgtccccttcaagaggggcgtgaggaggggtgatgtgttgttgatggtggccaagctggacccggactcagccaagccagagaagactcatccccatgacgcccccccttgcaagacctctccccccgccacagatactggaaaggaaaagaaaggggagacctctaggactccttgtggctcccaggccagcaccgagatcttggccccgaaagctgagaagacccggactgggggtcttggggacccaggccaaggaactgtggcactgaaaaaaggcgaggagggtcaaagcatagtggggaaggggcttgggacccccaagaccacagagctgaaagaggctgagccccagggcaaagacaggcaggggaccaggccccaagcccaagggcccggcgagggggtgcgaccagggaaagcagagaaggagggagcagagcccacaaacacggtggaaaaggggaatgtctctaaggacgtagggagtgaagggaagcacgtaaggccccaaatccctgggagaaagtggggaggtttcctgggaagaaggagtaagtgggacggtccccagaataagaaggacaaagaaggggtgctcttaagtaaggcagagaagacaggtgagcctcagacccagatggagaagacaagccaagtgcagggcgagttgggggacgatctgagaatgggggagaaagcaggtgagcttcggagcacgactgggaaggcaggtgagtcctgggataagaaggaaaagatggggcaaccccagggtaagtccgggaacgcaggtgaagctcggagtcagacagagaagggctgtgaagccccaaaggaggtgagcacaatggtggagtcgccagcagctcctgggaagggaggctggccaggaagccgtgggcaggaagcagaggagccctgctcaagagcaggtgatggggctggtgccctggagacagagctggaaggacccagccagcctgctctggagaaggatgcagaaaggcctcggatacggaaggagaaccaagacgggccagccccgcaggaggagggcaaaggaggccagagcagagactcagaccaggctcctgaggacagatggtatgaggcagagaaagtctggctggctcagaaggatggatttactcttgctacggtgctaaagccagatgagggaacagcagacctgccagcaggaagggtgagactttggattgatgctgacaaaaccatcactgaggtggatgaggagcatgtccatcgggccaaccctcctgagctggaccaggtcgaggacctggcctctctcatcagtgtcaacgaatccagtgtcctgaacacgcttctgcagcgctacaaagctcagctgctgcacacctgcacagggcctgatctgattgtcctccagccccgggggccctcggtgccttctgcagggaaggtgcccaagggccgccgggatggcctgcctgcccacattggctccatggcacagcgggcatactgggcgctgctgaaccagcggagagaccagagcattgtggccctgggctggagtggcgctgggaagaccacctgctgtgagcaggtcctggaacacctggtggggatggcaggcagtgtggatggcagggtctcagtggagaagatccgagccaccttcactgtcctccgggccttcggctctgtgtccatggcccacagccgcagtgccacccggttctccatggtgatgtcgctggacttcaacgctacaggccgcatcacagctgctcagctccagacaatgcttttggagaagagccgcgtggcacggcagccggaaggggaaagtaacttcctggttttctcccagatgctggctggattggacttggatctcaggacggagctgaacctgcaccagatggcagatagcagctcctttggcatgggcgtgtggtccaagcctgaagataaacagaaggcggcagctgcctttgcccagctccagggtgccatggagatgctcggcatctcagagagcgagcagcgggctgtttggcgggtcctggcagccatctaccacctgggtgcggcgggggcctgcaaagtgggtcggaagcagttcatgaggtttgagtgggcaaactacgcagctgaggccctgggctgcgagtatgaggagctgaacacggccaccttcaagcaccaccttcgacagatcatccagcaaatgacgtttgggccaagccgatggggcctcgaggatgaggaaaccagctcagggctcaagatgacaggagtggactgtgtggaggggatggcctcgggcctgtaccaggaactctttgcggctgtggtctcactcatcaacagatccttttcctcccaccatctctccatggcctccatcatggtggtggactctccaggcttccagaacccccggcaccagggcaaggaccgggcggccacctttgaggagctgtgccacaactacgcccatgagcgcctgcagctgctgttctaccagcggacctttgtctccacgctacagcgatatcaagaggaaggtgttcctgtgcagtttgacctcccggacccctccccagggaccaccgtggctgttgtggatcaaaatccctctcaggtccgcttaccagctggaggaggtgcccaggatgccagaggccttttctgggtcttagatgaggaagtccatgtagagggctccagtgacagtgtggtgctcgagcgtctgtgtgctgctttcgagaagaaaggagctgggactgaagggtcctctgccctgcggacctgtgagcagcccctccagtgtgagattttccaccagttgggatgggaccctgtgcggtacgacctcacgggctggctccacagagccaagcccaacctctcggccctggatgcaccccaggtcctgcaccagtcaaaaagagaggagctgcggagtctattccaggcccgggccaagctgcctcctgtgtgccgggctgtggcaggcctggagggcacctcccagcaggccctgcagaggagccgcatggtgaggaggacctttgccagcagccttgccgcggtgaggaggaaagccccgtgctcccagatcaagctgcagatggatgcgctgaccagcatgatcaaaaggtcccggctgcactttatccactgcctggtaccaaaccctgtggtggaaagcaggagtgggcaggaatctccaccaccaccgcagcctggtagagacaagcctggggcaggtggacctctggccctggatatcccagcactgagggtccagcttgctgggttccacatcctggaggctctgcgtctgcataggacaggctatgctgaccacatggggctcactcgcttccgccggcaattccaggtgctggacgctccactcctgaagaagctcatgtcgacctccgagggaatagatgaaaggaaggccgtggaggagctcctggagaccctggatctggaaaagaaggcggtggctgtggggcacagccaagtttttctcaaggcaggtgtgatctccaggcttgagaagcagcgagagaagctggtatctcagagcatcgttctcttccaggcggcttgcaagggctttctgtctcgccaggaattcaagaagctgaagattcgccgactggctgcacagtgcatccagaagaatgtggctgtgttcctcgcagtcaaggactggccatggtggcagctgcttggttccctccagcctctacttagtgccaccattggaactgagcagctccgagccaaggaggaggagcttacaacgctaagacggaagctagaaaaatcagagaagttgcggaatgaactccggcagaacacagatctgctagaaagcaagattgctgacttgacctctgaccttgccgatgagcgcttcaaaggtgatgtggcctgccaggtgctggagagtgagcgggcagagcggctacaggccttccgggaggtccaggagctcaagagcaagcatgaacaagtccagaaaaaactgggagatgtgaataaacagttggaagaagcccagcagaaaattcagttgaatgacttggaaaggaatcccactggaggagcagacgagtggcagatgcgcttcgactgtgctcagatggagaacgagttcctcagaaagcgtctgcagcaatgcgaggagaggctggactcggagctgacagccaggaaagagctggagcaaaagcttggggagttgcaaagtgcttatgacggggccaagaagatggctcaccaactgaagaggaagtgccaccatcttacctgtgaccttgaggatacctgcgtcctgctagagaaccaacaaagtcgaaaccatgagctggagaagaagcagaagaagtttgacctgcagctggcccaggccctaggtgagtcagtgtttgagaagggtctccgtgagaaagtgacccaggagaacaccagtgtccggtgggagctaggccagcttcagcagcagctgaagcaaaaggagcaggaagcctcacagctgaagcagcaggtggagatgctacaggaccataaacgggagctgctggggtcaccctctctgggggaaaattgcgttgctggcttgaaggagaggctctggaagttggaatccagcgcccttgagcaacagaaaatccagagccagcaggaaaacaccatcaagcagctggagcagctccgccagcggtttgagctggagatcgagcggatgaagcagatgcaccagaaggaccgtgaggaccaggaggaggaactggaggatgtccgtcagtcctgccagaagcggcttcatcagctggaaatgcagctggagcaagagtatgaagagaagcagatggtcctccatgagaagcaagatttggaaggcttgatcggaaccctctgtgaccagattggccatcgggactttgatgtggagaagcgacttcggagagacctcaggaggacacatgcactgttgtcagacgtgcagctccttctgggcaccatggaggatggcaagacatcagtcagcaaggaggagctggagaaagtgcacagccagctggagcagagtgaagccaagtgtgaggaggccttgaagacgcagaaggtgctcacagcggacctggagagcatgcacagcgagctggagaacatgacgcggaacaagagcctggtggatgagcagctgtacaggctgcagtttgagaaggcggacctcctgaagcgcatcgatgaggaccaggatgacctgaatgagctgatgcagaagcacaaggacctcattgctcagtctgctgctgacattgggcagatccaagaactgcagctgcagctggaggaagccaagaaggagaagcacaagctacaagaacaactgcaggtggctcagatgcgcatcgagtacctggaacagtccaccgtggatcgagccatcgtcagcaggcaggaggcggtcatctgtgacctagagaacaagacagagttccagaaggtgcagattaagagatttgaggtcctggtgatccggcttcgggacagcctgatcaagatgggggaggagctttcacaggcggccacctccgagtcccagcagcgggagagcagccagtactaccagcggcgcctggaagagctgaaggccgacatggaagagctggtgcagcgggaggcagaggccagccggcggtgcatggagctggagaagtacgtggaggaacttgcagcagtgaggcaaaccctccagacagacctggagacatccattcggcggattgccgacctgcaggctgccttggaagaagtggcatccagtgacagtgatactgagagtgtccagacggcagtggattgtggcagcagcggccgaaaagagatggataacgtctccatcctcagctcccagccagagggcagcctgcagtcctggttgagctgtactctgtccctggccacagatactatgaggactccttctcgacagtcagccaccagcagccgcatcctcagccccaggataaacgaagaggctggggacactgagaggacccagtcggcattggcactgagcagagcccggtccaccaatgtccacagcaagacctcaggagacaagcctgtttctccccactttgtccgccggcaaaagtactgtcattttggggacggcgaagtgcttgccgtccagagaaagtccacagagagattagaacctgcttcctctcccctggcttctcggagtacaaatacatccccgctgtcgagggaaaagctgcccagtccttcagcggccctctcggagttcgtggaagggctccggaggaagagagcccagagaggccaggggtccacgctgggcctagaggactggcccactctccccatttaccagacgactggggcctccacactaaggaggggcagggctggcagtgacgagggaaacctctcgctgagggttggggcaaagtcacccctggaaatcgaaggggccgctggtggtctcttgaggtccaccagcctcaaatgcatctcttcagacggtgttgggggcacaaccctactccccgaaaagtcgaaaacccaattcagttcctgcgagtccctcttagaatccagaccgagcatggggagaaaactgagctctccgaccacacccagggacatgctgttgtcgcccacactgcgtcctcggaggcggtgtctggagtcctctgtggacgatgcgggctgtccagaccttggaaaggagccgcttgttttccagaaccgccagtttgcccacctgatggaggaacctctaggcagtgacccattcagctggaaactcccaagcctcgactacgaacgcaagaccaaagtggacttcgatgacttcctcccagctatccggaagccccagacacctacctccttggctggatcagccaaaggtgggcaagacggttcacagcgttcaagcatccactttgaaacggaagaggctaaccgttcctttctctcggggatcaagaccattttgaagaagagcccggagcccaaggaggatcccgctcacctgtctgactcgtcctcatcctccggctccatcgtgtccttcaaaagtgctgacagcatcaaaagtcgaccaggaatcccacgacttgcgggtgacggtggcgagcgaacgtcccccgagcggagagagccagggacggggaggaaagacgacgatgttgcgagcataatgaagaaatacctccagaagtaggaaccagttcagcctccttgaagctgcccttgaagacttcccgactctacaataacttggagacagagagactggccaggcctccccggtggccagagccagccagcatggccaccctcaagaggcgagatgagcccacagaggcatatcctgcggggatgctgggctcccagtgtggttggcctgaacaaaataaagtgttgactcctgggcatctgtgccttctctatggccttgctacctgggattccagagagttgatggggtgcagataggggtaggactgttagaatagaaccaacccaaactgtgtgtagtttggggtgtatacttctatttctcttcctacatgtctacatgccatgaccttcctcctcctcttcacttggccagtttcagctcacttcctccaggaagtctttcctgatatatcaaactgaaacaaatgctcctcctccatgctcccttaatccccatgcttgtcgattatattcctttgccaattcatttctctatcctgtgtatgtataagtgtgtacaagcattcaagaaactgatgaatgatgaatgaatgaatgagccaaagaacaaataaatgagcccacacaccc

SEQ ID NO: 19242 - DNA, 8090 bp, Homo sapiens
  source 1..8090: mol_type = unassigned DNA
cacccggggagacgtcttagacagtcgtggttcctgtgatctgtgtcctctttgcagaagttctgtgtccatctcatgtgctgcgtgtgtctgtaaagcctcattccgtgctgtctggcaggaagctccatctcatctcatcatctcacggccctggcactgcctcagcatggccatctcatcacgcctcgccctgtgggagcagaagattcgggaagaggacaagagccctccaccatcctcgccccctcctcttttctctgtcatcccagggggcttcattaagcaactggtccgggggactgaaaaagaggccaaggaagcgagacagaggaagcagttagctgtcgcctctccagaacgagagatcccagaaatttccatcagccaacccaacagcaagtccagcagtggcaccagatctggaagccagcagatctctcaggacgaccagtcaagctctcctgggagctcagacattctgggcaaggagagcgaggggtcccgcagccccgaccctgagcagatgacaagcatcaatggtgagaaggcccaggagctgggctccagtgcgacaccaaccaaaaagactgtccccttcaagaggggcgtgaggaggggtgatgtgttgttgatggtggccaagctggacccggactcagccaagccagagaagactcatccccatgacgcccccccttgcaagacctctccccccgccacagatactggaaaggaaaagaaaggggagacctctaggactccttgtggctcccaggccagcaccgagatcttggccccgaaagctgagaagacccggactgggggtcttggggacccaggccaaggaactgtggcactgaaaaaaggcgaggagggtcaaagcatagtggggaaggggcttgggacccccaagaccacagagctgaaagaggctgagccccagggcaaagacaggcaggggaccaggccccaagcccaagggcccggcgagggggtgcgaccagggaaagcagagaaggagggagcagagcccacaaacacggtggaaaaggggaatgtctctaaggacgtagggagtgaagggaagcacgtaaggccccaaatccctgggagaaagtggggaggtttcctgggaagaaggagtaagtgggacggtccccagaataagaaggacaaagaaggggtgctcttaagtaaggcagagaagacaggtgagcctcagacccagatggagaagacaagccaagtgcagggcgagttgggggacgatctgagaatgggggagaaagcaggtgagcttcggagcacgactgggaaggcaggtgagtcctgggataagaaggaaaagatggggcaaccccagggtaagtccgggaacgcaggtgaagctcggagtcagacagagaagggctgtgaagccccaaaggaggtgagcacaatggtggagtcgccagcagctcctgggaagggaggctggccaggaagccgtgggcaggaagcagaggagccctgctcaagagcaggtgatggggctggtgccctggagacagagctggaaggacccagccagcctgctctggagaaggatgcagaaaggcctcggatacggaaggagaaccaagacgggccagccccgcaggaggagggcaaaggaggccagagcagagactcagaccaggctcctgaggacagatggtatgaggcagagaaagtctggctggctcagaaggatggatttactcttgctacggtgctaaagccagatgagggaacagcagacctgccagcaggaagggtgagactttggattgatgctgacaaaaccatcactgaggtggatgaggagcatgtccatcgggccaaccctcctgagctggaccaggtcgaggacctggcctctctcatcagtgtcaacgaatccagtgtcctgaacacgcttctgcagcgctacaaagctcagctgctgcacacctgcacagggcctgatctgattgtcctccagccccgggggccctcggtgccttctgcagggaaggtgcccaagggccgccgggatggcctgcctgcccacattggctccatggcacagcgggcatactgggcgctgctgaaccagcggagagaccagagcattgtggccctgggctggagtggcgctgggaagaccacctgctgtgagcaggtcctggaacacctggtggggatggcaggcagtgtggatggcagggtctcagtggagaagatccgagccaccttcactgtcctccgggccttcggctctgtgtccatggcccacagccgcagtgccacccggttctccatggtgatgtcgctggacttcaacgctacaggccgcatcacagctgctcagctccagacaatgcttttggagaagagccgcgtggcacggcagccggaaggggaaagtaacttcctggttttctcccagatgctggctggattggacttggatctcaggacggagctgaacctgcaccagatggcagatagcagctcctttggcatgggcgtgtggtccaagcctgaagataaacagaaggcggcagctgcctttgcccagctccagggtgccatggagatgctcggcatctcagagagcgagcagcgggctgtttggcgggtcctggcagccatctaccacctgggtgcggcgggggcctgcaaagtgggtcggaagcagttcatgaggtttgagtgggcaaactacgcagctgaggccctgggctgcgagtatgaggagctgaacacggccaccttcaagcaccaccttcgacagatcatccagcaaatgacgtttgggccaagccgatggggcctcgaggatgaggaaaccagctcagggctcaagatgacaggagtggactgtgtggaggggatggcctcgggcctgtaccaggaactctttgcggctgtggtctcactcatcaacagatccttttcctcccaccatctctccatggcctccatcatggtggtggactctccaggcttccagaacccccggcaccagggcaaggaccgggcggccacctttgaggagctgtgccacaactacgcccatgagcgcctgcagctgctgttctaccagcggacctttgtctccacgctacagcgatatcaagaggaaggtgttcctgtgcagtttgacctcccggacccctccccagggaccaccgtggctgttgtggatcaaaatccctctcagcaggtccgcttaccagctggaggaggtgcccaggatgccagaggccttttctgggtcttagatgaggaagtccatgtagagggctccagtgacagtgtggtgctcgagcgtctgtgtgctgctttcgagaagaaaggagctgggactgaagggtcctctgccctgcggacctgtgagcagcccctccagtgtgagattttccaccagttgggatgggaccctgtgcggtacgacctcacgggctggctccacagagccaagcccaacctctcggccctggatgcaccccaggtcctgcaccagtcaaaaagagaggagctgcggagtctattccaggcccgggccaagctgcctcctgtgtgccgggctgtggcaggcctggagggcacctcccagcaggccctgcagaggagccgcatggtgaggaggacctttgccagcagccttgccgcggtgaggaggaaagccccgtgctcccagatcaagctgcagatggatgcgctgaccagcatgatcaaaaggtcccggctgcactttatccactgcctggtaccaaaccctgtggtggaaagcaggagtgggcaggaatctccaccaccaccgcagcctggtagagacaagcctggggcaggtggacctctggccctggatatcccagcactgagggtccagcttgctgggttccacatcctggaggctctgcgtctgcataggacaggctatgctgaccacatggggctcactcgcttccgccggcaattccaggtgctggacgctccactcctgaagaagctcatgtcgacctccgagggaatagatgaaaggaaggccgtggaggagctcctggagaccctggatctggaaaagaaggcggtggctgtggggcacagccaagtttttctcaaggcaggtgtgatctccaggcttgagaagcagcgagagaagctggtatctcagagcatcgttctcttccaggcggcttgcaagggctttctgtctcgccaggaattcaagaagctgaagattcgccgactggctgcacagtgcatccagaagaatgtggctgtgttcctcgcagtcaaggactggccatggtggcagctgcttggttccctccagcctctacttagtgccaccattggaactgagcagctccgagccaaggaggaggagcttacaacgctaagacggaagctagaaaaatcagagaagttgcggaatgaactccggcagaacacagatctgctagaaagcaagattgctgacttgacctctgaccttgccgatgagcgcttcaaaggtgatgtggcctgccaggtgctggagagtgagcgggcagagcggctacaggccttccgggaggtccaggagctcaagagcaagcatgaacaagtccagaaaaaactgggagatgtgaataaacagttggaagaagcccagcagaaaattcagttgaatgacttggaaaggaatcccactggaggagcagacgagtggcagatgcgcttcgactgtgctcagatggagaacgagttcctcagaaagcgtctgcagcaatgcgaggagaggctggactcggagctgacagccaggaaagagctggagcaaaagcttggggagttgcaaagtgcttatgacggggccaagaagatggctcaccaactgaagaggaagtgccaccatcttacctgtgaccttgaggatacctgcgtcctgctagagaaccaacaaagtcgaaaccatgagctggagaagaagcagaagaagtttgacctgcagctggcccaggccctaggtgagtcagtgtttgagaagggtctccgtgagaaagtgacccaggagaacaccagtgtccggtgggagctaggccagcttcagcagcagctgaagcaaaaggagcaggaagcctcacagctgaagcagcaggtggagatgctacaggaccataaacgggagctgctggggtcaccctctctgggggaaaattgcgttgctggcttgaaggagaggctctggaagttggaatccagcgcccttgagcaacagaaaatccagagccagcaggaaaacaccatcaagcagctggagcagctccgccagcggtttgagctggagatcgagcggatgaagcagatgcaccagaaggaccgtgaggaccaggaggaggaactggaggatgtccgtcagtcctgccagaagcggcttcatcagctggaaatgcagctggagcaagagtatgaagagaagcagatggtcctccatgagaagcaagatttggaaggcttgatcggaaccctctgtgaccagattggccatcgggactttgatgtggagaagcgacttcggagagacctcaggaggacacatgcactgttgtcagacgtgcagctccttctgggcaccatggaggatggcaagacatcagtcagcaaggaggagctggagaaagtgcacagccagctggagcagagtgaagccaagtgtgaggaggccttgaagacgcagaaggtgctcacagcggacctggagagcatgcacagcgagctggagaacatgacgcggaacaagagcctggtggatgagcagctgtacaggctgcagtttgagaaggcggacctcctgaagcgcatcgatgaggaccaggatgacctgaatgagctgatgcagaagcacaaggacctcattgctcagtctgctgctgacattgggcagatccaagaactgcagctgcagctggaggaagccaagaaggagaagcacaagctacaagaacaactgcaggtggctcagatgcgcatcgagtacctggaacagtccaccgtggatcgagccatcgtcagcaggcaggaggcggtcatctgtgacctagagaacaagacagagttccagaaggtgcagattaagagatttgaggtcctggtgatccggcttcgggacagcctgatcaagatgggggaggagctttcacaggcggccacctccgagtcccagcagcgggagagcagccagtactaccagcggcgcctggaagagctgaaggccgacatggaagagctggtgcagcgggaggcagaggccagccggcggtgcatggagctggagaagtacgtggaggaacttgcagcagtgaggcaaaccctccagacagacctggagacatccattcggcggattgccgacctgcaggctgccttggaagaagtggcatccagtgacagtgatactgagagtgtccagacggcagtggattgtggcagcagcggccgaaaagagatggataacgtctccatcctcagctcccagccagagggcagcctgcagtcctggttgagctgtactctgtccctggccacagatactatgaggactccttctcgacagtcagccaccagcagccgcatcctcagccccaggataaacgaagaggctggggacactgagaggacccagtcggcattggcactgagcagagcccggtccaccaatgtccacagcaagacctcaggagacaagcctgtttctccccactttgtccgccggcaaaagtactgtcattttggggacggcgaagtgcttgccgtccagagaaagtccacagagagattagaacctgcttcctctcccctggcttctcggagtacaaatacatccccgctgtcgagggaaaagctgcccagtccttcagcggccctctcggagttcgtggaagggctccggaggaagagagcccagagaggccaggggtccacgctgggcctagaggactggcccactctccccatttaccagacgactggggcctccacactaaggaggggcagggctggcagtgacgagggaaacctctcgctgagggttggggcaaagtcacccctggaaatcgaaggggccgctggtggtctcttgaggtccaccagcctcaaatgcatctcttcagacggtgttgggggcacaaccctactccccgaaaagtcgaaaacccaattcagttcctgcgagtccctcttagaatccagaccgagcatggggagaaaactgagctctccgaccacacccagggacatgctgttgtcgcccacactgcgtcctcggaggcggtgtctggagtcctctgtggacgatgcgggctgtccagaccttggaaaggagccgcttgttttccagaaccgccagtttgcccacctgatggaggaacctctaggcagtgacccattcagctggaaactcccaagcctcgactacgaacgcaagaccaaagtggacttcgatgacttcctcccagctatccggaagccccagacacctacctccttggctggatcagccaaaggtgggcaagacggttcacagcgttcaagcatccactttgaaacggaagaggctaaccgttcctttctctcggggatcaagaccattttgaagaagagcccggagcccaaggaggatcccgctcacctgtctgactcgtcctcatcctccggctccatcgtgtccttcaaaagtgctgacagcatcaaaagtcgaccaggaatcccacgacttgcgggtgacggtggcgagcgaacgtcccccgagcggagagagccagggacggggaggaaagacgacgatgttgcgagcataatgaagaaatacctccagaagtaggaaccagttcagcctccttgaagctgcccttgaagacttcccgactctacaataacttggagacagagagactggccaggcctccccggtggccagagccagccagcatggccaccctcaagaggcgagatgagcccacagaggcatatcctgcggggatgctgggctcccagtgtggttggcctgaacaaaataaagtgttgactcctgggca

SEQ ID NO: 19243 - DNA, 8051 bp, Homo sapiens
  source 1..8051: mol_type = unassigned DNA
ggcagtaaggggaagggatgtgtgtcggtgtgtgtggagagggtgctccttcgctcctgctttcccggctcggtggggtcccttcgcggccacccggggagacgtcttagacagtcgtggttcctgtgatctgtgtcctctttgcagaagttctgtgtccatctcatgtgctgcgtgtgtctgtaaagcctcattccgtgctgtctggcaggaagctccatctcatctcatcatctcacggccctggcactgcctcagcatggccatctcatcacgcctcgccctgtgggagcagaagattcgggaagaggacaagagccctccaccatcctcgccccctcctcttttctctgtcatcccagggggcttcattaagcaactggtccgggggactgaaaaagaggccaaggaagcgagacagaggaagcagttagctgtcgcctctccagaacgagagatcccagaaatttccatcagccaacccaacagcaagtccagcagtggcaccagatctggaagccagcagatctctcaggacgaccagtcaagctctcctgggagctcagacattctgggcaaggagagcgaggggtcccgcagccccgaccctgagcagatgacaagcatcaatggtgagaaggcccaggagctgggctccagtgcgacaccaaccaaaaagactgtccccttcaagaggggcgtgaggaggggtgatgtgttgttgatggtggccaagctggacccggactcagccaagccagagaagactcatccccatgacgcccccccttgcaagacctctccccccgccacagatactggaaaggaaaagaaaggggagacctctaggactccttgtggctcccaggccagcaccgagatcttggccccgaaagctgagaagacccggactgggggtcttggggacccaggccaaggaactgtggcactgaaaaaaggcgaggagggtcaaagcatagtggggaaggggcttgggacccccaagaccacagagctgaaagaggctgagccccagggcaaagacaggcaggggaccaggccccaagcccaagggcccggcgagggggtgcgaccagggaaagcagagaaggagggagcagagcccacaaacacggtggaaaaggggaatgtctctaaggacgtagggagtgaagggaagcacgtaaggccccaaatccctgggagaaagtggggaggtttcctgggaagaaggagtaagtgggacggtccccagaataagaaggacaaagaaggggtgctcttaagtaaggcagagaagacaggtgagcctcagacccagatggagaagacaagccaagtgcagggcgagttgggggacgatctgagaatgggggagaaagcaggtgagcttcggagcacgactgggaaggcaggtgagtcctgggataagaaggaaaagatggggcaaccccagggtaagtccgggaacgcaggtgaagctcggagtcagacagagaagggctgtgaagccccaaaggaggtgagcacaatggtggagtcgccagcagctcctgggaagggaggctggccaggaagccgtgggcaggaagcagaggagccctgctcaagagcaggtgatggggctggtgccctggagacagagctggaaggacccagccagcctgctctggagaaggatgcagaaaggcctcggatacggaaggagaaccaagacgggccagccccgcaggaggagggcaaaggaggccagagcagagactcagaccaggctcctgaggacagatggtatgaggcagagaaagtctggctggctcagaaggatggatttactcttgctacggtgctaaagccagatgagggaacagcagacctgccagcaggaagggtgagactttggattgatgctgacaaaaccatcactgaggtggatgaggagcatgtccatcgggccaaccctcctgagctggaccaggtcgaggacctggcctctctcatcagtgtcaacgaatccagtgtcctgaacacgcttctgcagcgctacaaagctcagctgctgcacacctgcacagggcctgatctgattgtcctccagccccgggggccctcggtgccttctgcagggaaggtgcccaagggccgccgggatggcctgcctgcccacattggctccatggcacagcgggcatactgggcgctgctgaaccagcggagagaccagagcattgtggccctgggctggagtggcgctgggaagaccacctgctgtgagcaggtcctggaacacctggtggggatggcaggcagtgtggatggcagggtctcagtggagaagatccgagccaccttcactgtcctccgggccttcggctctgtgtccatggcccacagccgcagtgccacccggttctccatggtgatgtcgctggacttcaacgctacaggccgcatcacagctgctcagctccagacaatgcttttggagaagagccgcgtggcacggcagccggaaggggaaagtaacttcctggttttctcccagatgctggctggattggacttggatctcaggacggagctgaacctgcaccagatggcagatagcagctcctttggcatgggcgtgtggtccaagcctgaagataaacagaaggcggcagctgcctttgcccagctccagggtgccatggagatgctcggcatctcagagagcgagcagcgggctgtttggcgggtcctggcagccatctaccacctgggtgcggcgggggcctgcaaagtgggtcggaagcagttcatgaggtttgagtgggcaaactacgcagctgaggccctgggctgcgagtatgaggagctgaacacggccaccttcaagcaccaccttcgacagatcatccagcaaatgacgtttgggccaagccgatggggcctcgaggatgaggaaaccagctcagggctcaagatgacaggagtggactgtgtggaggggatggcctcgggcctgtaccaggaactctttgcggctgtggtctcactcatcaacagatccttttcctcccaccatctctccatggcctccatcatggtggtggactctccaggcttccagaacccccggcaccagggcaaggaccgggcggccacctttgaggagctgtgccacaactacgcccatgagcgcctgcagctgctgttctaccagcggacctttgtctccacgctacagcgatatcaagaggaaggtgttcctgtgcagtttgacctcccggacccctccccagggaccaccgtggctgttgtggatcaaaatccctctcaggtccgcttaccagctggaggaggtgcccaggatgccagaggccttttctgggtcttagatgaggaagtccatgtagagggctccagtgacagtgtggtgctcgagcgtctgtgtgctgctttcgagaagaaaggagctgggactgaagggtcctctgccctgcggacctgtgagcagcccctccagtgtgagattttccaccagttgggatgggaccctgtgcggtacgacctcacgggctggctccacagagccaagcccaacctctcggccctggatgcaccccaggtcctgcaccagtcaaaaagagaggagctgcggagtctattccaggcccgggccaagctgcctcctgtgtgccgggctgtggcaggcctggagggcacctcccagcaggccctgcagaggagccgcatggtgaggaggacctttgccagcagccttgccgcggtgaggaggaaagccccgtgctcccagatcaagctgcagatggatgcgctgaccagcatgatcaaaaggtcccggctgcactttatccactgcctggtaccaaaccctgtggtggaaagcaggagtgggcaggaatctccaccaccaccgcagcctggtagagacaagcctggggcaggtggacctctggccctggatatcccagcactgagggtccagcttgctgggttccacatcctggaggctctgcgtctgcataggacaggctatgctgaccacatggggctcactcgcttccgccggcaattccaggtgctggacgctccactcctgaagaagctcatgtcgacctccgagggaatagatgaaaggaaggccgtggaggagctcctggagaccctggatctggaaaagaaggcggtggctgtggggcacagccaagtttttctcaaggcaggtgtgatctccaggcttgagaagcagcgagagaagctggtatctcagagcatcgttctcttccaggcggcttgcaagggctttctgtctcgccaggaattcaagaagctgaagattcgccgactggctgcacagtgcatccagaagaatgtggctgtgttcctcgcagtcaaggactggccatggtggcagctgcttggttccctccagcctctacttagtgccaccattggaactgagcagctccgagccaaggaggaggagcttacaacgctaagacggaagctagaaaaatcagagaagttgcggaatgaactccggcagaacacagatctgctagaaagcaagattgctgacttgacctctgaccttgccgatgagcgcttcaaaggtgatgtggcctgccaggtgctggagagtgagcgggcagagcggctacaggccttccgggaggtccaggagctcaagagcaagcatgaacaagtccagaaaaaactgggagatgtgaataaacagttggaagaagcccagcagaaaattcagttgaatgacttggaaaggaatcccactggaggagcagacgagtggcagatgcgcttcgactgtgctcagatggagaacgagttcctcagaaagcgtctgcagcaatgcgaggagaggctggactcggagctgacagccaggaaagagctggagcaaaagcttggggagttgcaaagtgcttatgacggggccaagaagatggctcaccaactgaagaggaagtgccaccatcttacctgtgaccttgaggatacctgcgtcctgctagagaaccaacaaagtcgaaaccatgagctggagaagaagcagaagaagtttgacctgcagctggcccaggccctaggtgagtcagtgtttgagaagggtctccgtgagaaagtgacccaggagaacaccagtgtccggtgggagctaggccagcttcagcagcagctgaagcaaaaggagcaggaagcctcacagctgaagcagcaggtggagatgctacaggaccataaacgggagctgctggggtcaccctctctgggggaaaattgcgttgctggcttgaaggagaggctctggaagttggaatccagcgcccttgagcaacagaaaatccagagccagcaggaaaacaccatcaagcagctggagcagctccgccagcggtttgagctggagatcgagcggatgaagcagatgcaccagaaggaccgtgaggaccaggaggaggaactggaggatgtccgtcagtcctgccagaagcggcttcatcagctggaaatgcagctggagcaagagtatgaagagaagcagatggtcctccatgagaagcaagatttggaaggcttgatcggaaccctctgtgaccagattggccatcgggactttgatgtggagaagcgacttcggagagacctcaggaggacacatgcactgttgtcagacgtgcagctccttctgggcaccatggaggatggcaagacatcagtcagcaaggaggagctggagaaagtgcacagccagctggagcagagtgaagccaagtgtgaggaggccttgaagacgcagaaggtgctcacagcggacctggagagcatgcacagcgagctggagaacatgacgcggaacaagagcctggtggatgagcagctgtacaggctgcagtttgagaaggcggacctcctgaagcgcatcgatgaggaccaggatgacctgaatgagctgatgcagaagcacaaggacctcattgctcagtctgctgctgacattgggcagatccaagaactgcagctgcagctggaggaagccaagaaggagaagcacaagctacaagaacaactgcaggtggctcagatgcgcatcgagtacctggaacagtccaccgtggatcgagccatcgtcagcaggcaggaggcggtcatctgtgacctagagaacaagacagagttccagaaggtgcagattaagagatttgaggtcctggtgatccggcttcgggacagcctgatcaagatgggggaggagctttcacaggcggccacctccgagtcccagcagcgggagagcagccagtactaccagcggcgcctggaagagctgaaggccgacatggaagagctggtgcagcgggaggcagaggccagccggcggtgcatggagctggagaagtacgtggaggaacttgcagcagtgaggcaaaccctccagacagacctggagacatccattcggcggattgccgacctgcaggctgccttggaagaagtggcatccagtgacagtgatactgagagtgtccagacggcagtggattgtggcagcagcggccgaaaagagatggataacgtctccatcctcagctcccagccagagggcagcctgcagtcctggttgagctgtactctgtccctggccacagatactatgaggactccttctcgacagtcagccaccagcagccgcatcctcagccccaggataaacgaagaggctggggacactgagaggacccagtcggcattggcactgagcagagcccggtccaccaatgtccacagcaagacctcaggagacaagcctgtttctccccactttgtccgccggcaaaagtactgtcattttggggacggcgaagtgcttgccgtccagagaaagtccacagagagattagaacctgcttcctctcccctggcttctcggagtacaaatacatccccgctgtcgagggaaaagctgcccagtccttcagcggccctctcggagttcgtggaagggctccggaggaagagagcccagagaggccaggggtccacgctgggcctagaggactggcccactctccccatttaccagacgactggggcctccacactaaggaggggcagggctggcagtgacgagggaaacctctcgctgagggttggggcaaagtcacccctggaaatcgaaggggccgctggtggtctcttgaggtccaccagcctcaaatgcatctcttcagacggtgttgggggcacaaccctactccccgaaaagtcgaaaacccaattcagttcctgcgagtccctcttagaatccagaccgagcatggggagaaaactgagctctccgaccacacccagggacatgctgttgtcgcccacactgcgtcctcggaggcggtgtctggagtcctctgtggacgatgcgggctgtccagaccttggaaaggagccgcttgttttccagaaccgccagtttgcccacctgatggaggaacctctaggcagtgacccattcagctggaaactcccaagcctcgactacgaacgcaagaccaaagtggacttcgatgacttcctcccagctatccggaagccccagacacctacctccttggctggatcagccaaaggtgggcaagacggttcacagcgttcaagcatccactttgaaacggaagaggctaaccgttcctttctctcggggatcaagaccattttgaagaagagcccggagcccaaggaggatcccgctcacctgtctgactcgtcctcatcctccggctccatcgtgtccttcaaaagtgctgacagcatcaaaagtcgaccaggaatcccacgacttgcgggtgacggtggcgagcgaacgtcccccgagcggagagagccagggacggggaggaaagacgacgatgttgcgagcataatgaagaaatacctccagaagtaggaaccagttcaggtaaaagcaacaggctggggctattcttgggggaatgagagttcaccttgcagccttggggagagcaggtgccact

SEQ ID NO: 19244 - DNA, 6024 bp, Homo sapiens
  source 1..6024: mol_type = unassigned DNA
tgtctctcctcataaagcttcaagttctgatccactttaaggtcgcatctctacgccagggtccttaactgggctaccatcaataacctgcagccatgagttccgactctgagatggccatttttggggaggctgctcctttcctccgaaagtctgaaagggagcgaattgaagcccagaacaagccttttgatgccaagacatcagtctttgtggtggaccctaaggagtcctttgtgaaagcaacagtgcagagcagggaaggggggaaggtgacagctaagaccgaagctggagctactgtaacagtgaaagatgaccaagtcttccccatgaaccctcccaaatatgacaagatcgaggacatggccatgatgactcatctacacgagcctgctgtgctgtacaacctcaaagagcgctacgcagcctggatgatctacacctactcaggcttgttctgtgtcactgtcaacccctacaagtggttgccagtgtataatgcagaggtggtgacagcctaccgaggcaaaaagcgccaggaggccccaccccacatcttctccatctctgacaatgcctatcagttcatgctgactgatcgggagaatcagtctatcttgatcaccggagaatctggcgcagggaagactgtgaacaccaagcgtgtcatccagtactttgcaacaattgcagttactggggagaagaagaaggaagaagttacttctggcaaaatgcaggggactctggaagatcaaatcatcagtgccaaccccctactggaggcctttggcaacgccaagaccgtgaggaatgacaactcctctcgctttggtaaattcatcaggatccacttcggtaccacagggaaactggcttctgctgatattgaaacatatcttctggagaagtctagagttactttccagctaaaggctgaaagaagctatcatattttttatcagatcatgtctaacaagaagccagatctaattgaaatgctcctgatcaccaccaacccatacgattatgccttcgtcagtcaaggggagatcacagtgcccagcattgatgaccaagaagagttgatggctacagatagtgccattgaaattctgggctttacttcagatgaaagagtgtccatctataagctcacaggggctgtgatgcattatgggaacatgaaattcaagcaaaagcagcgtgaggagcaagctgagccagatggcactgaagttgctgacaaggcagcctatctccaaaatctgaactctgcagatctgctcaaagccctctgctaccctagggtcaaggtcggcaatgagtatgtcaccaaaggtcaaactgtgcagcaggtgtacaatgcagtgggtgctctggccaaagctgtctacgataagatgttcttgtggatggtcacccgcatcaaccagcagctggacaccaagcagcccaggcagtacttcattggggtcttggacattgctggctttgagatctttgatttcaacagcctggagcagctgtgcatcaacttcaccaatgagaaactgcaacagtttttcaaccaccacatgttcgtgctggagcaggaggagtacaagaaggaaggcattgagtggacgttcattgactttgggatggacctggctgcctgcatcgagctcatcgagaagcctatgggcatcttctccatcctggaagaggagtgcatgttccccaaggcgacagacacctccttcaagaacaagctgtatgaacaacatcttggaaaatccaataacttccagaagcccaagcctgccaaaggcaagcctgaggcccacttctctttgattcactatgctggcaccgtggactacaacattgccggctggcttgacaagaacaaggaccccctgaatgagactgtggtggggctgtaccagaagtctgcaatgaagactctggctctcctctttgttggggcaacgggagcggaagcagaggctggcggtggaaagaaaggtggtaagaagaagggttcttctttccagactgtgtctgctctcttcagggagaatttgaataagctgatgaccaacttgaggagcactcacccccactttgtgcggtgcatcatccccaatgaaactaaaactcctggtgccatggagcatgagcttgtcctgcatcagctgaggtgtaacggtgtgctggaaggcatccgcatctgcaggaaaggcttcccaagcagaatcctttatgcagacttcaaacagagatacaaggtgttaaatgcaagtgctatccctgaaggacaattcatcgatagcaagaaggcttcagagaagctcctggggtccattgacattgaccacacccagtataaatttggtcacaccaaggtctttttcaaagctggtcttctggggctcctagaggagatgcgagatgagaagctggcccagctgattacccgaacccaggccatgtgcagagggttcttggcaagagtggagtaccagaaaatggtggaaagaagagagtccatcttctgcatccagtacaatgtccgtgccttcatgaatgtgaagcactggccctggatgaagctgtatttcaagatcaaacccctcctcaaaagtgcagagacagagaaggagatggccaacatgaaggaagaatttgagaaaaccaaagaagagctggctaagaccgaggcaaaaaggaaagagctggaagaaaaaatggttactctgatgcaagaaaaaaatgacttgcaactccaggttcaagctgaagctgacagcttggctgatgcagaggaaaggtgtgaccagctaatcaaaaccaaaatccagctagaagccaaaatcaaagaggtgactgagagagctgaggatgaggaagagatcaatgctgagctgacagccaagaagaggaaactggaggatgaatgttcagaactcaagaaagacattgatgaccttgagctgacactggccaaggttgagaaggagaaacatgccacagaaaacaaggtgaaaaacctcacagaagagatggcgggtctggatgaaaccattgctaagctgaccaaggagaagaaggctctccaggaggcccaccagcagaccctggatgacctgcaggcagaggaggacaaagtcaacaccctgaccaaagctaaaatcaaacttgaacaacaagtggatgatcttgaaggatctttggaacaagaaaagaaaatccggatggatctagaaagagcaaagagaaaactagagggagacctaaaattggctcaagaatccacaatggatatagaaaatgacaaacaacaacttgatgaaaagcttaaaaagaaagagtttgaaatgagcggtctgcaaagcaagattgaagatgaacaagcccttggtatgcagctgcagaagaaaatcaaggagttacaagcccgcattgaggagctggaggaggaaatcgaggcagagcgggcctcccgggccaaagcagagaagcagcgctctgatctctcccgggagctggaggagatcagcgagaggctggaagaagccggtggggccacctcagcccagattgagatgaacaagaagcgggaggctgagttccagaaaatgcgcagggacctggaggaggccaccctacagcatgaagccacggcggccaccctgaggaagaagcatgcagatagtgtggccgagcttggggagcagattgacaacctgcagcgagtgaagcagaagctggagaaggagaagagtgagatgaagatggagatcgatgaccttgctagtaacatggagactgtctccaaagccaagggaaaccttgaaaagatgtgccgcgctctagaagatcaactgagtgaaattaagaccaaggaagaggagcagcagcggctgatcaatgacctcacagcacagagagcgcgcctgcaaacagaatcaggtgaatattcacgccagctagatgaaaaggacacactagtttcacagctctcgaggggcaaacaagcctttacacaacagattgaggaactgaaaaggcaacttgaagaggagataaaggccaagagtgccctggcacatgccctgcagtcctcccgccatgactgtgacctgctgcgggaacagtatgaggaggagcaggaagccaaggccgagctacagagagcaatgtccaaggccaacagtgaggttgcccagtggaggaccaaatatgagacagatgccatccagcgcacagaggagctggaggaggccaagaagaagctggctcagcgtctgcaggatgctgaggaacatgtagaagctgtgaatgccaaatgtgcttcccttgagaagacgaagcagaggctccagaatgaagttgaggacctcatgattgatgttgagaggacaaatgctgcctgtgccgccctggacaaaaagcaaaggaactttgataagatcctggcagaatggaaacagaagtgtgaagaaactcatgctgaacttgaagcttctcaaaaggaatcccgctcactcagcacagaactatttaagattaagaatgcttatgaggaatctttagaccaacttgaaaccttgaaacgggaaaataagaatttgcaacaggagatttctgatctcactgaacagattgcagaaggaggaaagcgcatccatgaactggaaaaaataaagaagcaagttgagcaagaaaagtctgaacttcaggctgccttagaggaggcagaggcatctcttgaacatgaagagggaaagatcctgcgcatccagcttgagttgaaccaagtcaagtctgaggttgataggaaaattgctgaaaaagatgaggaaattgaccagatgaagagaaaccacattagaatcgtggagtccatgcagagcacactggatgctgagatcaggagcaggaatgatgccattaggctcaagaagaagatggagggagacctcaatgaaatggaaatccagctgaaccatgccaaccgcatggctgctgaggccctgaggaactataggaacacccaagccatcctcaaggatacccagctccacctggatgatgctctccggagccaggaggacctgaaggaacagctggctatggtggagcgcagagccaacctgctgcaggctgagatcgaggagctgcgggccactctggaacagacagagaggagcaggaaaatcgcagaacaggagctcctggatgccagtgagcgtgttcagctcctgcacacccagaacaccagcctgatcaacaccaagaagaagctggagacagacatttcccaaatccagggagagatggaagacatcatccaggaagcccgcaatgcagaagagaaggccaagaaggccatcactgatgctgccatgatggctgaggagctgaagaaggaacaggacaccagcgcccatctggagcggatgaagaagaacctggaacagacggtgaaggacctgcagcatcgtctggatgaggctgagcagctggccctgaagggtgggaagaagcagatccagaaactggaggccagggttcgtgaacttgaaggtgaagttgaaagtgaacagaagcgcaatgttgaagctgtcaagggtctacgcaaacatgagagaaaagtgaaggaactcacttaccaaactgaggaagaccgcaagaatattctcaggctccaggacctggtggacaaactgcaagcaaaggtgaaatcctacaagagacaagctgaagaagcggaggaacaatccaacgtcaacctctccaaattccgcaggatccagcacgagctggaggaggccgaggaacgggctgacattgctgagtcccaggtcaacaagctgagggtgaagagcagggaggttcacacaaaaatcataagtgaagagtaatttatctaactgctgaaaggtgaccaaagaaatgcacaaaatgtgaaaatctttgtcactccattttgtacttatgacttttggagataaaaaatttatctgccaaaaa

SEQ ID NO: 19245 - DNA, 3285 bp, Homo sapiens
  source 1..3285: mol_type = unassigned DNA
gtctctcctcataaagcttcaagttctgatccactttaaggtcgcatctctacgccagggtccttaactgggctaccatcaataacctgcagccatgagttccgactctgagatggccatttttggggaggctgctcctttcctccgaaagtctgaaagggagcgaattgaagcccagaacaagccttttgatgccaagacatcagtctttgtggtggaccctaaggagtcctttgtgaaagcaacagtgcagagcagggaaggggggaaggtgacagctaagaccgaagctggagctactgtaacagtgaaagatgaccaagtcttccccatgaaccctcccaaatatgacaagatcgaggacatggccatgatgactcatctacacgagcctgctgtgctgtacaacctcaaagagcgctacgcagcctggatgatctacacctactcaggcttgttctgtgtcactgtcaacccctacaagtggttgccagtgtataatgcagaggtggtgacagcctaccgaggcaaaaagcgccaggaggccccaccccacatcttctccatctctgacaatgcctatcagttcatgctgactgatcgggagaatcagtctatcttgatcaccggagaatctggcgcagggaagactgtgaacaccaagcgtgtcatccagtactttgcaacaattgcagttactggggagaagaagaaggaagaagttacttctggcaaaatgcaggggactctggaagatcaaatcatcagtgccaaccccctactggaggcctttggcaacgccaagaccgtgaggaatgacaactcctctcgctttggtaaattcatcaggatccacttcggtaccacagggaaactggcttctgctgatattgaaacatatcttctggagaagtctagagttactttccagctaaaggctgaaagaagctatcatattttttatcagatcatgtctaacaagaagccagatctaattgaaatgctcctgatcaccaccaacccatacgattatgccttcgtcagtcaaggggagatcacagtgcccagcattgatgaccaagaagagttgatggctacagatagtgccattgaaattctgggctttacttcagatgaaagagtgtccatctataagctcacaggggctgtgatgcattatgggaacatgaaattcaagcaaaagcagcgtgaggagcaagctgagccagatggcactgaagttgctgacaaggcagcctatctccaaaatctgaactctgcagatctgctcaaagccctctgctaccctagggtcaaggtcggcaatgagtatgtcaccaaaggtcaaactgtgcagcaggtgtacaatgcagtgggtgctctggccaaagctgtctacgataagatgttcttgtggatggtcacccgcatcaaccagcagctggacaccaagcagcccagggccaacagtgaggttgcccagtggaggaccaaatatgagacagatgccatccagcgcacagaggagctggaggaggccaagaagaagctggctcagcgtctgcaggatgctgaggaacatgtagaagctgtgaatgccaaatgtgcttcccttgagaagacgaagcagaggctccagaatgaagttgaggacctcatgattgatgttgagaggacaaatgctgcctgtgccgccctggacaaaaagcaaaggaactttgataagatcctggcagaatggaaacagaagtgtgaagaaactcatgctgaacttgaagcttctcaaaaggaatcccgctcactcagcacagaactatttaagattaagaatgcttatgaggaatctttagaccaacttgaaaccttgaaacgggaaaataagaatttgcaacaggagatttctgatctcactgaacagattgcagaaggaggaaagcgcatccatgaactggaaaaaataaagaagcaagttgagcaagaaaagtctgaacttcaggctgccttagaggaggcagaggcatctcttgaacatgaagagggaaagatcctgcgcatccagcttgagttgaaccaagtcaagtctgaggttgataggaaaattgctgaaaaagatgaggaaattgaccagatgaagagaaaccacattagaatcgtggagtccatgcagagcacactggatgctgagatcaggagcaggaatgatgccattaggctcaagaagaagatggagggagacctcaatgaaatggaaatccagctgaaccatgccaaccgcatggctgctgaggccctgaggaactataggaacacccaagccatcctcaaggatacccagctccacctggatgatgctctccggagccaggaggacctgaaggaacagctggctatggtggagcgcagagccaacctgctgcaggctgagatcgaggagctgcgggccactctggaacagacagagaggagcaggaaaatcgcagaacaggagctcctggatgccagtgagcgtgttcagctcctgcacacccagaacaccagcctgatcaacaccaagaagaagctggagacagacatttcccaaatccagggagagatggaagacatcatccaggaagcccgcaatgcagaagagaaggccaagaaggccatcactgatgctgccatgatggctgaggagctgaagaaggaacaggacaccagcgcccatctggagcggatgaagaagaacctggaacagacggtgaaggacctgcagcatcgtctggatgaggctgagcagctggccctgaagggtgggaagaagcagatccagaaactggaggccagggttcgtgaacttgaaggtgaagttgaaagtgaacagaagcgcaatgttgaagctgtcaagggtctacgcaaacatgagagaaaagtgaaggaactcacttaccaaactgaggaagaccgcaagaatattctcaggctccaggacctggtggacaaactgcaagcaaaggtgaaatcctacaagagacaagctgaagaagcggaggaacaatccaacgtcaacctctccaaattccgcaggatccagcacgagctggaggaggccgaggaacgggctgacattgctgagtcccaggtcaacaagctgagggtgaagagcagggaggttcacacaaaaatcataagtgaagagtaatttatctaactgctgaaaggtgaccaaagaaatgcacaaaatgtgaaaatctttgtcactccattttgtacttatgacttttggagataaaaaatttatctgcc

SEQ ID NO: 19246 - DNA, 6885 bp, Homo sapiens
  source 1..6885: mol_type = unassigned DNA
gcagggagatttggacgctccggcctgggaggtgcgtcagatccgagctcgccatccagtttcctctccactagtccccccagttggagatctgggaccaacaaggcaccatggcgcagaagggccaactcagtgacgatgagaagttcctctttgtggacaaaaacttcatcaacagcccagtggcccaggctgactgggccgccaagagactcgtctgggtcccctcggagaagcagggcttcgaggcagccagcattaaggaggagaagggggatgaggtggttgtggagctggtggagaatggcaagaaggtcacggttgggaaagatgacatccagaagatgaacccacccaagttctccaaggtggaggacatggcggagctgacgtgcctcaacgaagcctccgtgctacacaacctgagggagcggtacttctcagggctaatatatacgtactctggcctcttctgcgtggtggtcaacccctataaacacctgcccatctactcggagaagatcgtcgacatgtacaagggcaagaagaggcacgagatgccgcctcacatctacgccatcgcagacacggcctaccggagcatgcttcaagatcgggaggaccagtccattctatgcacaggcgagtctggagccgggaaaaccgaaaacaccaagaaggtcattcagtacctggccgtggtggcctcctcccacaagggcaagaaagacacaagtatcacgggagagctggaaaagcagcttctacaagcaaacccgattctggaggctttcggcaacgccaaaacagtgaagaacgacaactcctcacgattcggcaaattcatccgcatcaacttcgacgtcacgggttacatcgtgggagccaacattgagacctatctgctagaaaaatcacgggcaattcgccaagccagagacgagaggacattccacatcttttactacatgattgctggagccaaggagaagatgagaagtgacttgcttttggagggcttcaacaactacaccttcctctccaatggctttgtgcccatcccagcagcccaggatgatgagatgttccaggaaaccgtggaggccatggcaatcatgggtttcagcgaggaggagcagctatccatattgaaggtggtatcatcggtcctgcagcttggaaatatcgtcttcaagaaggaaagaaacacagaccaggcgtccatgccagataacacagctgctcagaaagtttgccacctcatgggaattaatgtgacagatttcaccagatccatcctcactcctcgtatcaaggttgggcgagatgtggtacagaaagctcagacaaaagaacaggctgactttgctgtagaggctttggccaaggcaacatatgagcgccttttccgctggatactcacccgcgtgaacaaagccctggacaagacccatcggcaaggggcttccttcctggggatcctggatatagctggatttgagatctttgaggtgaactccttcgagcagctgtgcatcaactacaccaacgagaagctgcagcagctcttcaaccacaccatgttcatcctggagcaggaggagtaccagcgcgagggcatcgagtggaacttcatcgactttgggctggacctacagccctgcatcgagctcatcgagcgaccgaacaaccctccaggtgtgctggccctgctggacgaggaatgctggttccccaaagccacggacaagtctttcgtggagaagctgtgcacggagcagggcagccaccccaagttccagaagcccaagcagctcaaggacaagactgagttctccatcatccattatgctgggaaggtggactataatgcgagtgcctggctgaccaagaatatggacccgctgaatgacaacgtgacttccctgctcaatgcctcctccgacaagtttgtggccgacctgtggaaggacgtggaccgcatcgtgggcctggaccagatggccaagatgacggagagctcgctgcccagcgcctccaagaccaagaagggcatgttccgcacagtggggcagctgtacaaggagcagctgggcaagctgatgaccacgctacgcaacaccacgcccaacttcgtgcgctgcatcatccccaaccacgagaagaggtccggcaagctggatgcgttcctggtgctggagcagctgcggtgcaatggggtgctggaaggcattcgcatctgccggcagggcttccccaaccggatcgtcttccaggagttccgccaacgctacgagatcctggcggcgaatgccatccccaaaggcttcatggacgggaagcaggcctgcattctcatgatcaaagccctggaacttgaccccaacttatacaggatagggcagagcaaaatcttcttccgaactggcgtcctggcccacctagaggaggagcgagatttgaagatcaccgatgtcatcatggccttccaggcgatgtgtcgtggctacttggccagaaaggcttttgccaagaggcagcagcagctgaccgccatgaaggtgattcagaggaactgcgccgcctacctcaagctgcggaactggcagtggtggaggcttttcaccaaagtgaagccactgctgcaggtgacacggcaggaggaggagatgcaggccaaggaggatgaactgcagaagaccaaggagcggcagcagaaggcagagaatgagcttaaggagctggaacagaagcactcgcagctgaccgaggagaagaacctgctacaggaacagctgcaggcagagacagagctgtatgcagaggctgaggagatgcgggtgcggctggcggccaagaagcaggagctggaggagatactgcatgagatggaggcccgcctggaggaggaggaagacaggggccagcagctacaggctgaaaggaagaagatggcccagcagatgctggaccttgaagaacagctggaggaggaggaagctgccaggcagaagctgcaacttgagaaggtcacggctgaggccaagatcaagaaactggaggatgagatcctggtcatggatgatcagaacaataaactatcaaaagaacgaaaactccttgaggagaggattagtgacttaacgacaaatcttgcagaagaggaagaaaaggccaagaatcttaccaagctgaaaaacaagcatgaatctatgatttcagaactggaagtgcggctaaagaaggaagagaagagccgacaggagctggagaagctgaaacggaagctggagggtgatgccagcgacttccacgagcagatcgctgacctccaggcgcagatcgcagagctcaagatgcagctggccaagaaggaggaggagctgcaggcggccctggccaggcttgacgatgaaatcgctcagaagaacaatgccctgaagaagatccgggagctggagggccacatctcagacctccaggaggacctggactcagagcgggccgccaggaacaaggctgaaaagcagaagcgagacctcggcgaggagctggaggccctaaagacagagctggaagacacactggacagcacagccactcagcaggagctcagggccaagagggagcaggaggtgacggtgctgaagaaggccctggatgaagagacgcggtcccatgaggctcaggtccaggagatgaggcagaaacacgcacaggcggtggaggagctcacagagcagcttgagcagttcaagagggccaaggcgaacctagacaagaataagcagacgctggagaaagagaacgcagacctggccggggagctgcgggtcctgggccaggccaagcaggaggtggaacataagaagaagaagctggaggcgcaggtgcaggagctgcagtccaagtgcagcgatggggagcgggcccgggcggagctcaatgacaaagtccacaagctgcagaatgaagttgagagcgtcacagggatgcttaacgaggccgaggggaaggccattaagctggccaaggacgtggcgtccctcagttcccagctccaggacacccaggagctgcttcaagaagaaacccggcagaagctcaacgtgtctacgaagctgcgccagctggaggaggagcggaacagcctgcaagaccagctggacgaggagatggaggccaagcagaacctggagcgccacatctccactctcaacatccagctctccgactcgaagaagaagctgcaggactttgccagcaccgtggaagctctggaagaggggaagaagaggttccagaaggagatcgagaacctcacccagcagtacgaggagaaggcggccgcttatgataaactggaaaagaccaagaacaggcttcagcaggagctggacgacctggttgttgatttggacaaccagcggcaactcgtgtccaacctggaaaagaagcagaggaaatttgatcagttgttagccgaggagaaaaacatctcttccaaatacgcggatgagagggacagagctgaggcagaagccagggagaaggaaaccaaggccctgtccctggctcgggcccttgaagaggccttggaagccaaagaggaactcgagcggaccaacaaaatgctcaaagccgaaatggaagacctggtcagctccaaggatgacgtgggcaagaacgtccatgagctggagaagtccaagcgggccctggagacccagatggaggagatgaagacgcagctggaagagctggaggacgagctgcaagccacggaggacgccaaactgcggctggaagtcaacatgcaggcgctcaagggccagttcgaaagggatctccaagcccgggacgagcagaatgaggagaagaggaggcaactgcagagacagcttcacgagtatgagacggaactggaagacgagcgaaagcaacgtgccctggcagctgcagcaaagaagaagctggaaggggacctgaaagacctggagcttcaggccgactctgccatcaaggggagggaggaagccatcaagcagctacgcaaactgcaggctcagatgaaggactttcaaagagagctggaagatgcccgtgcctccagagatgagatctttgccacagccaaagagaatgagaagaaagccaagagcttggaagcagacctcatgcagctacaagaggacctcgccgccgctgagagggctcgcaaacaagcggacctcgagaaggaggaactggcagaggagctggccagtagcctgtcgggaaggaacgcactccaggacgagaagcgccgcctggaggcccggatcgcccagctggaggaggagctggaggaggagcagggcaacatggaggccatgagcgaccgggtccgcaaagccacacagcaggccgagcagctcagcaacgagctggccacagagcgcagcacggcccagaagaatgagagtgcccggcagcagctcgagcggcagaacaaggagctccggagcaagctccacgagatggagggggccgtcaagtccaagttcaagtccaccatcgcggcgctggaggccaagattgcacagctggaggagcaggtcgagcaggaggccagagagaaacaggcggccaccaagtcgctgaagcagaaagacaagaagctgaaggaaatcttgctgcaggtggaggacgagcgcaagatggccgagcagtacaaggagcaggcagagaaaggcaatgccagggtcaagcagctcaagaggcagctggaggaggcagaggaggagtcccagcgcatcaacgccaaccgcaggaagctgcagcgggagctggatgaggccacggagagcaacgaggccatgggccgcgaggtgaacgcactcaagagcaagctcaggcgaggaaacgagacctctttcgttccttctagaaggtctggaggacgtagagttattgaaaatgcagatggttctgaggaggaaacggacactcgagacgcagacttcaatggaaccaaggccagtgaataagcaactttctacagttttgcaccacggcaagaaaaccaaaaaccaaaacaaacaaacaaaaaaaacccaacaacaacccagaacaaagcaaaacccagcagactgtacttagcattgtctaaatccattctcaaattccaaatatcacagacacccctcacacaaggaatataaaaaccaccaccctccagcctgggcaacgtagtaaaacctcatctatacaagaatttaaaaataagctgggcgtggtggtacacacctgtggtcccagctactagggaggctgagccaggaagaacgctccagcccaggacttcgaggctgcaatgagctataattgcatcattgcactccagcctgggcaacagagaccctgtctcaaccaccaccaccaccaccacccctactacccctgtattcaaggtaaaaattgaagtttgtatgatgtaagagatgagaaaaacccaacaggaaacacagacacatcctccagttctatcaatggattgtgcagacactgagtttttagaaaaacatatccacggtaaccggtccctggcaattctgtttacatgaaatggggagaaagtcaccgaaatgggtgccgccggcccccactcccaattcattccctaacctgcaaacctttccaacttctcacgtcaggcctttgagaattctttccccctctcctggtttccacacctcagacacgcacagttcaccaagtgccttctgtagtcacatgaattgaaaaggagacgctgctcccacggaggggagcaggaatgctgcactgtttacaccctgactgtgcttaaaaacactttcactaataaatggttataaatcacaa

SEQ ID NO: 19247 - DNA, 6924 bp, Homo sapiens
  source 1..6924: mol_type = unassigned DNA
gcagggagatttggacgctccggcctgggaggtgcgtcagatccgagctcgccatccagtttcctctccactagtccccccagttggagatctgggaccaacaaggcaccatggcgcagaagggccaactcagtgacgatgagaagttcctctttgtggacaaaaacttcatcaacagcccagtggcccaggctgactgggccgccaagagactcgtctgggtcccctcggagaagcagggcttcgaggcagccagcattaaggaggagaagggggatgaggtggttgtggagctggtggagaatggcaagaaggtcacggttgggaaagatgacatccagaagatgaacccacccaagttctccaaggtggaggacatggcggagctgacgtgcctcaacgaagcctccgtgctacacaacctgagggagcggtacttctcagggctaatatatacgtactctggcctcttctgcgtggtggtcaacccctataaacacctgcccatctactcggagaagatcgtcgacatgtacaagggcaagaagaggcacgagatgccgcctcacatctacgccatcgcagacacggcctaccggagcatgcttcaagatcgggaggaccagtccattctatgcacaggcgagtctggagccgggaaaaccgaaaacaccaagaaggtcattcagtacctggccgtggtggcctcctcccacaagggcaagaaagacacaagtatcacgggagagctggaaaagcagcttctacaagcaaacccgattctggaggctttcggcaacgccaaaacagtgaagaacgacaactcctcacgattcggcaaattcatccgcatcaacttcgacgtcacgggttacatcgtgggagccaacattgagacctatctgctagaaaaatcacgggcaattcgccaagccagagacgagaggacattccacatcttttactacatgattgctggagccaaggagaagatgagaagtgacttgcttttggagggcttcaacaactacaccttcctctccaatggctttgtgcccatcccagcagcccaggatgatgagatgttccaggaaaccgtggaggccatggcaatcatgggtttcagcgaggaggagcagctatccatattgaaggtggtatcatcggtcctgcagcttggaaatatcgtcttcaagaaggaaagaaacacagaccaggcgtccatgccagataacacagctgctcagaaagtttgccacctcatgggaattaatgtgacagatttcaccagatccatcctcactcctcgtatcaaggttgggcgagatgtggtacagaaagctcagacaaaagaacaggctgactttgctgtagaggctttggccaaggcaacatatgagcgccttttccgctggatactcacccgcgtgaacaaagccctggacaagacccatcggcaaggggcttccttcctggggatcctggatatagctggatttgagatctttgaggtgaactccttcgagcagctgtgcatcaactacaccaacgagaagctgcagcagctcttcaaccacaccatgttcatcctggagcaggaggagtaccagcgcgagggcatcgagtggaacttcatcgactttgggctggacctacagccctgcatcgagctcatcgagcgaccgaacaaccctccaggtgtgctggccctgctggacgaggaatgctggttccccaaagccacggacaagtctttcgtggagaagctgtgcacggagcagggcagccaccccaagttccagaagcccaagcagctcaaggacaagactgagttctccatcatccattatgctgggaaggtggactataatgcgagtgcctggctgaccaagaatatggacccgctgaatgacaacgtgacttccctgctcaatgcctcctccgacaagtttgtggccgacctgtggaaggacgtggaccgcatcgtgggcctggaccagatggccaagatgacggagagctcgctgcccagcgcctccaagaccaagaagggcatgttccgcacagtggggcagctgtacaaggagcagctgggcaagctgatgaccacgctacgcaacaccacgcccaacttcgtgcgctgcatcatccccaaccacgagaagaggtccggcaagctggatgcgttcctggtgctggagcagctgcggtgcaatggggtgctggaaggcattcgcatctgccggcagggcttccccaaccggatcgtcttccaggagttccgccaacgctacgagatcctggcggcgaatgccatccccaaaggcttcatggacgggaagcaggcctgcattctcatgatcaaagccctggaacttgaccccaacttatacaggatagggcagagcaaaatcttcttccgaactggcgtcctggcccacctagaggaggagcgagatttgaagatcaccgatgtcatcatggccttccaggcgatgtgtcgtggctacttggccagaaaggcttttgccaagaggcagcagcagctgaccgccatgaaggtgattcagaggaactgcgccgcctacctcaagctgcggaactggcagtggtggaggcttttcaccaaagtgaagccactgctgcaggtgacacggcaggaggaggagatgcaggccaaggaggatgaactgcagaagaccaaggagcggcagcagaaggcagagaatgagcttaaggagctggaacagaagcactcgcagctgaccgaggagaagaacctgctacaggaacagctgcaggcagagacagagctgtatgcagaggctgaggagatgcgggtgcggctggcggccaagaagcaggagctggaggagatactgcatgagatggaggcccgcctggaggaggaggaagacaggggccagcagctacaggctgaaaggaagaagatggcccagcagatgctggaccttgaagaacagctggaggaggaggaagctgccaggcagaagctgcaacttgagaaggtcacggctgaggccaagatcaagaaactggaggatgagatcctggtcatggatgatcagaacaataaactatcaaaagaacgaaaactccttgaggagaggattagtgacttaacgacaaatcttgcagaagaggaagaaaaggccaagaatcttaccaagctgaaaaacaagcatgaatctatgatttcagaactggaagtgcggctaaagaaggaagagaagagccgacaggagctggagaagctgaaacggaagctggagggtgatgccagcgacttccacgagcagatcgctgacctccaggcgcagatcgcagagctcaagatgcagctggccaagaaggaggaggagctgcaggcggccctggccaggcttgacgatgaaatcgctcagaagaacaatgccctgaagaagatccgggagctggagggccacatctcagacctccaggaggacctggactcagagcgggccgccaggaacaaggctgaaaagcagaagcgagacctcggcgaggagctggaggccctaaagacagagctggaagacacactggacagcacagccactcagcaggagctcagggccaagagggagcaggaggtgacggtgctgaagaaggccctggatgaagagacgcggtcccatgaggctcaggtccaggagatgaggcagaaacacgcacaggcggtggaggagctcacagagcagcttgagcagttcaagagggccaaggcgaacctagacaagaataagcagacgctggagaaagagaacgcagacctggccggggagctgcgggtcctgggccaggccaagcaggaggtggaacataagaagaagaagctggaggcgcaggtgcaggagctgcagtccaagtgcagcgatggggagcgggcccgggcggagctcaatgacaaagtccacaagctgcagaatgaagttgagagcgtcacagggatgcttaacgaggccgaggggaaggccattaagctggccaaggacgtggcgtccctcagttcccagctccaggacacccaggagctgcttcaagaagaaacccggcagaagctcaacgtgtctacgaagctgcgccagctggaggaggagcggaacagcctgcaagaccagctggacgaggagatggaggccaagcagaacctggagcgccacatctccactctcaacatccagctctccgactcgaagaagaagctgcaggactttgccagcaccgtggaagctctggaagaggggaagaagaggttccagaaggagatcgagaacctcacccagcagtacgaggagaaggcggccgcttatgataaactggaaaagaccaagaacaggcttcagcaggagctggacgacctggttgttgatttggacaaccagcggcaactcgtgtccaacctggaaaagaagcagaggaaatttgatcagttgttagccgaggagaaaaacatctcttccaaatacgcggatgagagggacagagctgaggcagaagccagggagaaggaaaccaaggccctgtccctggctcgggcccttgaagaggccttggaagccaaagaggaactcgagcggaccaacaaaatgctcaaagccgaaatggaagacctggtcagctccaaggatgacgtgggcaagaacgtccatgagctggagaagtccaagcgggccctggagacccagatggaggagatgaagacgcagctggaagagctggaggacgagctgcaagccacggaggacgccaaactgcggctggaagtcaacatgcaggcgctcaagggccagttcgaaagggatctccaagcccgggacgagcagaatgaggagaagaggaggcaactgcagagacagcttcacgagtatgagacggaactggaagacgagcgaaagcaacgtgccctggcagctgcagcaaagaagaagctggaaggggacctgaaagacctggagcttcaggccgactctgccatcaaggggagggaggaagccatcaagcagctacgcaaactgcaggctcagatgaaggactttcaaagagagctggaagatgcccgtgcctccagagatgagatctttgccacagccaaagagaatgagaagaaagccaagagcttggaagcagacctcatgcagctacaagaggacctcgccgccgctgagagggctcgcaaacaagcggacctcgagaaggaggaactggcagaggagctggccagtagcctgtcgggaaggaacgcactccaggacgagaagcgccgcctggaggcccggatcgcccagctggaggaggagctggaggaggagcagggcaacatggaggccatgagcgaccgggtccgcaaagccacacagcaggccgagcagctcagcaacgagctggccacagagcgcagcacggcccagaagaatgagagtgcccggcagcagctcgagcggcagaacaaggagctccggagcaagctccacgagatggagggggccgtcaagtccaagttcaagtccaccatcgcggcgctggaggccaagattgcacagctggaggagcaggtcgagcaggaggccagagagaaacaggcggccaccaagtcgctgaagcagaaagacaagaagctgaaggaaatcttgctgcaggtggaggacgagcgcaagatggccgagcagtacaaggagcaggcagagaaaggcaatgccagggtcaagcagctcaagaggcagctggaggaggcagaggaggagtcccagcgcatcaacgccaaccgcaggaagctgcagcgggagctggatgaggccacggagagcaacgaggccatgggccgcgaggtgaacgcactcaagagcaagctcagagggccccccccacaggaaacttcgcagtgatgcaccaggcgaggaaacgagacctctttcgttccttctagaaggtctggaggacgtagagttattgaaaatgcagatggttctgaggaggaaacggacactcgagacgcagacttcaatggaaccaaggccagtgaataagcaactttctacagttttgcaccacggcaagaaaaccaaaaaccaaaacaaacaaacaaaaaaaacccaacaacaacccagaacaaagcaaaacccagcagactgtacttagcattgtctaaatccattctcaaattccaaatatcacagacacccctcacacaaggaatataaaaaccaccaccctccagcctgggcaacgtagtaaaacctcatctatacaagaatttaaaaataagctgggcgtggtggtacacacctgtggtcccagctactagggaggctgagccaggaagaacgctccagcccaggacttcgaggctgcaatgagctataattgcatcattgcactccagcctgggcaacagagaccctgtctcaaccaccaccaccaccaccacccctactacccctgtattcaaggtaaaaattgaagtttgtatgatgtaagagatgagaaaaacccaacaggaaacacagacacatcctccagttctatcaatggattgtgcagacactgagtttttagaaaaacatatccacggtaaccggtccctggcaattctgtttacatgaaatggggagaaagtcaccgaaatgggtgccgccggcccccactcccaattcattccctaacctgcaaacctttccaacttctcacgtcaggcctttgagaattctttccccctctcctggtttccacacctcagacacgcacagttcaccaagtgccttctgtagtcacatgaattgaaaaggagacgctgctcccacggaggggagcaggaatgctgcactgtttacaccctgactgtgcttaaaaacactttcactaataaatggttataaatcacaa

SEQ ID NO: 19248 - DNA, 6941 bp, Homo sapiens
  source 1..6941: mol_type = unassigned DNA
gggagatttggacgctccggcctgggaggtgcgtcagatccgagctcgccatccagtttcctctccactagtccccccagttggagatctgggaccaacaaggcaccatggcgcagaagggccaactcagtgacgatgagaagttcctctttgtggacaaaaacttcatcaacagcccagtggcccaggctgactgggccgccaagagactcgtctgggtcccctcggagaagcagggcttcgaggcagccagcattaaggaggagaagggggatgaggtggttgtggagctggtggagaatggcaagaaggtcacggttgggaaagatgacatccagaagatgaacccacccaagttctccaaggtggaggacatggcggagctgacgtgcctcaacgaagcctccgtgctacacaacctgagggagcggtacttctcagggctaatatatacgtactctggcctcttctgcgtggtggtcaacccctataaacacctgcccatctactcggagaagatcgtcgacatgtacaagggcaagaagaggcacgagatgccgcctcacatctacgccatcgcagacacggcctaccggagcatgcttcaagatcgggaggaccagtccattctatgcacaggcgagtctggagccgggaaaaccgaaaacaccaagaaggtcattcagtacctggccgtggtggcctcctcccacaagggcaagaaagacacaagtatcacggagggaccgtctttttggcgaggagagctggaaaagcagcttctacaagcaaacccgattctggaggctttcggcaacgccaaaacagtgaagaacgacaactcctcacgattcggcaaattcatccgcatcaacttcgacgtcacgggttacatcgtgggagccaacattgagacctatctgctagaaaaatcacgggcaattcgccaagccagagacgagaggacattccacatcttttactacatgattgctggagccaaggagaagatgagaagtgacttgcttttggagggcttcaacaactacaccttcctctccaatggctttgtgcccatcccagcagcccaggatgatgagatgttccaggaaaccgtggaggccatggcaatcatgggtttcagcgaggaggagcagctatccatattgaaggtggtatcatcggtcctgcagcttggaaatatcgtcttcaagaaggaaagaaacacagaccaggcgtccatgccagataacacagctgctcagaaagtttgccacctcatgggaattaatgtgacagatttcaccagatccatcctcactcctcgtatcaaggttgggcgagatgtggtacagaaagctcagacaaaagaacaggctgactttgctgtagaggctttggccaaggcaacatatgagcgccttttccgctggatactcacccgcgtgaacaaagccctggacaagacccatcggcaaggggcttccttcctggggatcctggatatagctggatttgagatctttgaggtgaactccttcgagcagctgtgcatcaactacaccaacgagaagctgcagcagctcttcaaccacaccatgttcatcctggagcaggaggagtaccagcgcgagggcatcgagtggaacttcatcgactttgggctggacctacagccctgcatcgagctcatcgagcgaccgaacaaccctccaggtgtgctggccctgctggacgaggaatgctggttccccaaagccacggacaagtctttcgtggagaagctgtgcacggagcagggcagccaccccaagttccagaagcccaagcagctcaaggacaagactgagttctccatcatccattatgctgggaaggtggactataatgcgagtgcctggctgaccaagaatatggacccgctgaatgacaacgtgacttccctgctcaatgcctcctccgacaagtttgtggccgacctgtggaaggacgtggaccgcatcgtgggcctggaccagatggccaagatgacggagagctcgctgcccagcgcctccaagaccaagaagggcatgttccgcacagtggggcagctgtacaaggagcagctgggcaagctgatgaccacgctacgcaacaccacgcccaacttcgtgcgctgcatcatccccaaccacgagaagaggtccggcaagctggatgcgttcctggtgctggagcagctgcggtgcaatggggtgctggaaggcattcgcatctgccggcagggcttccccaaccggatcgtcttccaggagttccgccaacgctacgagatcctggcggcgaatgccatccccaaaggcttcatggacgggaagcaggcctgcattctcatgatcaaagccctggaacttgaccccaacttatacaggatagggcagagcaaaatcttcttccgaactggcgtcctggcccacctagaggaggagcgagatttgaagatcaccgatgtcatcatggccttccaggcgatgtgtcgtggctacttggccagaaaggcttttgccaagaggcagcagcagctgaccgccatgaaggtgattcagaggaactgcgccgcctacctcaagctgcggaactggcagtggtggaggcttttcaccaaagtgaagccactgctgcaggtgacacggcaggaggaggagatgcaggccaaggaggatgaactgcagaagaccaaggagcggcagcagaaggcagagaatgagcttaaggagctggaacagaagcactcgcagctgaccgaggagaagaacctgctacaggaacagctgcaggcagagacagagctgtatgcagaggctgaggagatgcgggtgcggctggcggccaagaagcaggagctggaggagatactgcatgagatggaggcccgcctggaggaggaggaagacaggggccagcagctacaggctgaaaggaagaagatggcccagcagatgctggaccttgaagaacagctggaggaggaggaagctgccaggcagaagctgcaacttgagaaggtcacggctgaggccaagatcaagaaactggaggatgagatcctggtcatggatgatcagaacaataaactatcaaaagaacgaaaactccttgaggagaggattagtgacttaacgacaaatcttgcagaagaggaagaaaaggccaagaatcttaccaagctgaaaaacaagcatgaatctatgatttcagaactggaagtgcggctaaagaaggaagagaagagccgacaggagctggagaagctgaaacggaagctggagggtgatgccagcgacttccacgagcagatcgctgacctccaggcgcagatcgcagagctcaagatgcagctggccaagaaggaggaggagctgcaggcggccctggccaggcttgacgatgaaatcgctcagaagaacaatgccctgaagaagatccgggagctggagggccacatctcagacctccaggaggacctggactcagagcgggccgccaggaacaaggctgaaaagcagaagcgagacctcggcgaggagctggaggccctaaagacagagctggaagacacactggacagcacagccactcagcaggagctcagggccaagagggagcaggaggtgacggtgctgaagaaggccctggatgaagagacgcggtcccatgaggctcaggtccaggagatgaggcagaaacacgcacaggcggtggaggagctcacagagcagcttgagcagttcaagagggccaaggcgaacctagacaagaataagcagacgctggagaaagagaacgcagacctggccggggagctgcgggtcctgggccaggccaagcaggaggtggaacataagaagaagaagctggaggcgcaggtgcaggagctgcagtccaagtgcagcgatggggagcgggcccgggcggagctcaatgacaaagtccacaagctgcagaatgaagttgagagcgtcacagggatgcttaacgaggccgaggggaaggccattaagctggccaaggacgtggcgtccctcagttcccagctccaggacacccaggagctgcttcaagaagaaacccggcagaagctcaacgtgtctacgaagctgcgccagctggaggaggagcggaacagcctgcaagaccagctggacgaggagatggaggccaagcagaacctggagcgccacatctccactctcaacatccagctctccgactcgaagaagaagctgcaggactttgccagcaccgtggaagctctggaagaggggaagaagaggttccagaaggagatcgagaacctcacccagcagtacgaggagaaggcggccgcttatgataaactggaaaagaccaagaacaggcttcagcaggagctggacgacctggttgttgatttggacaaccagcggcaactcgtgtccaacctggaaaagaagcagaggaaatttgatcagttgttagccgaggagaaaaacatctcttccaaatacgcggatgagagggacagagctgaggcagaagccagggagaaggaaaccaaggccctgtccctggctcgggcccttgaagaggccttggaagccaaagaggaactcgagcggaccaacaaaatgctcaaagccgaaatggaagacctggtcagctccaaggatgacgtgggcaagaacgtccatgagctggagaagtccaagcgggccctggagacccagatggaggagatgaagacgcagctggaagagctggaggacgagctgcaagccacggaggacgccaaactgcggctggaagtcaacatgcaggcgctcaagggccagttcgaaagggatctccaagcccgggacgagcagaatgaggagaagaggaggcaactgcagagacagcttcacgagtatgagacggaactggaagacgagcgaaagcaacgtgccctggcagctgcagcaaagaagaagctggaaggggacctgaaagacctggagcttcaggccgactctgccatcaaggggagggaggaagccatcaagcagctacgcaaactgcaggctcagatgaaggactttcaaagagagctggaagatgcccgtgcctccagagatgagatctttgccacagccaaagagaatgagaagaaagccaagagcttggaagcagacctcatgcagctacaagaggacctcgccgccgctgagagggctcgcaaacaagcggacctcgagaaggaggaactggcagaggagctggccagtagcctgtcgggaaggaacgcactccaggacgagaagcgccgcctggaggcccggatcgcccagctggaggaggagctggaggaggagcagggcaacatggaggccatgagcgaccgggtccgcaaagccacacagcaggccgagcagctcagcaacgagctggccacagagcgcagcacggcccagaagaatgagagtgcccggcagcagctcgagcggcagaacaaggagctccggagcaagctccacgagatggagggggccgtcaagtccaagttcaagtccaccatcgcggcgctggaggccaagattgcacagctggaggagcaggtcgagcaggaggccagagagaaacaggcggccaccaagtcgctgaagcagaaagacaagaagctgaaggaaatcttgctgcaggtggaggacgagcgcaagatggccgagcagtacaaggagcaggcagagaaaggcaatgccagggtcaagcagctcaagaggcagctggaggaggcagaggaggagtcccagcgcatcaacgccaaccgcaggaagctgcagcgggagctggatgaggccacggagagcaacgaggccatgggccgcgaggtgaacgcactcaagagcaagctcagagggcccccccacaggaaacttcgcagtgatgcaccaggcgaggaaacgagacctctttcgttccttctagaaggtctggaggacgtagagttattgaaaatgcagatggttctgaggaggaaacggacactcgagacgcagacttcaatggaaccaaggccagtgaataagcaactttctacagttttgcaccacggcaagaaaaccaaaaaccaaaacaaacaaacaaaaaaaacccaacaacaacccagaacaaagcaaaacccagcagactgtacttagcattgtctaaatccattctcaaattccaaatatcacagacacccctcacacaaggaatataaaaaccaccaccctccagcctgggcaacgtagtaaaacctcatctatacaagaatttaaaaataagctgggcgtggtggtacacacctgtggtcccagctactagggaggctgagccaggaagaacgctccagcccaggacttcgaggctgcaatgagctataattgcatcattgcactccagcctgggcaacagagaccctgtctcaaccaccaccaccaccaccacccctactacccctgtattcaaggtaaaaattgaagtttgtatgatgtaagagatgagaaaaacccaacaggaaacacagacacatcctccagttctatcaatggattgtgcagacactgagtttttagaaaaacatatccacggtaaccggtccctggcaattctgtttacatgaaatggggagaaagtcaccgaaatgggtgccgccggcccccactcccaattcattccctaacctgcaaacctttccaacttctcacgtcaggcctttgagaattctttccccctctcctggtttccacacctcagacacgcacagttcaccaagtgccttctgtagtcacatgaattgaaaaggagacgctgctcccacggaggggagcaggaatgctgcactgtttacaccctgactgtgcttaaaaacactttcactaataaatggttataaatcacaa

SEQ ID NO: 19249 - DNA, 6903 bp, Homo sapiens
  source 1..6903: mol_type = unassigned DNA
gggagatttggacgctccggcctgggaggtgcgtcagatccgagctcgccatccagtttcctctccactagtccccccagttggagatctgggaccaacaaggcaccatggcgcagaagggccaactcagtgacgatgagaagttcctctttgtggacaaaaacttcatcaacagcccagtggcccaggctgactgggccgccaagagactcgtctgggtcccctcggagaagcagggcttcgaggcagccagcattaaggaggagaagggggatgaggtggttgtggagctggtggagaatggcaagaaggtcacggttgggaaagatgacatccagaagatgaacccacccaagttctccaaggtggaggacatggcggagctgacgtgcctcaacgaagcctccgtgctacacaacctgagggagcggtacttctcagggctaatatatacgtactctggcctcttctgcgtggtggtcaacccctataaacacctgcccatctactcggagaagatcgtcgacatgtacaagggcaagaagaggcacgagatgccgcctcacatctacgccatcgcagacacggcctaccggagcatgcttcaagatcgggaggaccagtccattctatgcacaggcgagtctggagccgggaaaaccgaaaacaccaagaaggtcattcagtacctggccgtggtggcctcctcccacaagggcaagaaagacacaagtatcacgcaaggcccatcttttgcctacggagagctggaaaagcagcttctacaagcaaacccgattctggaggctttcggcaacgccaaaacagtgaagaacgacaactcctcacgattcggcaaattcatccgcatcaacttcgacgtcacgggttacatcgtgggagccaacattgagacctatctgctagaaaaatcacgggcaattcgccaagccagagacgagaggacattccacatcttttactacatgattgctggagccaaggagaagatgagaagtgacttgcttttggagggcttcaacaactacaccttcctctccaatggctttgtgcccatcccagcagcccaggatgatgagatgttccaggaaaccgtggaggccatggcaatcatgggtttcagcgaggaggagcagctatccatattgaaggtggtatcatcggtcctgcagcttggaaatatcgtcttcaagaaggaaagaaacacagaccaggcgtccatgccagataacacagctgctcagaaagtttgccacctcatgggaattaatgtgacagatttcaccagatccatcctcactcctcgtatcaaggttgggcgagatgtggtacagaaagctcagacaaaagaacaggctgactttgctgtagaggctttggccaaggcaacatatgagcgccttttccgctggatactcacccgcgtgaacaaagccctggacaagacccatcggcaaggggcttccttcctggggatcctggatatagctggatttgagatctttgaggtgaactccttcgagcagctgtgcatcaactacaccaacgagaagctgcagcagctcttcaaccacaccatgttcatcctggagcaggaggagtaccagcgcgagggcatcgagtggaacttcatcgactttgggctggacctacagccctgcatcgagctcatcgagcgaccgaacaaccctccaggtgtgctggccctgctggacgaggaatgctggttccccaaagccacggacaagtctttcgtggagaagctgtgcacggagcagggcagccaccccaagttccagaagcccaagcagctcaaggacaagactgagttctccatcatccattatgctgggaaggtggactataatgcgagtgcctggctgaccaagaatatggacccgctgaatgacaacgtgacttccctgctcaatgcctcctccgacaagtttgtggccgacctgtggaaggacgtggaccgcatcgtgggcctggaccagatggccaagatgacggagagctcgctgcccagcgcctccaagaccaagaagggcatgttccgcacagtggggcagctgtacaaggagcagctgggcaagctgatgaccacgctacgcaacaccacgcccaacttcgtgcgctgcatcatccccaaccacgagaagaggtccggcaagctggatgcgttcctggtgctggagcagctgcggtgcaatggggtgctggaaggcattcgcatctgccggcagggcttccccaaccggatcgtcttccaggagttccgccaacgctacgagatcctggcggcgaatgccatccccaaaggcttcatggacgggaagcaggcctgcattctcatgatcaaagccctggaacttgaccccaacttatacaggatagggcagagcaaaatcttcttccgaactggcgtcctggcccacctagaggaggagcgagatttgaagatcaccgatgtcatcatggccttccaggcgatgtgtcgtggctacttggccagaaaggcttttgccaagaggcagcagcagctgaccgccatgaaggtgattcagaggaactgcgccgcctacctcaagctgcggaactggcagtggtggaggcttttcaccaaagtgaagccactgctgcaggtgacacggcaggaggaggagatgcaggccaaggaggatgaactgcagaagaccaaggagcggcagcagaaggcagagaatgagcttaaggagctggaacagaagcactcgcagctgaccgaggagaagaacctgctacaggaacagctgcaggcagagacagagctgtatgcagaggctgaggagatgcgggtgcggctggcggccaagaagcaggagctggaggagatactgcatgagatggaggcccgcctggaggaggaggaagacaggggccagcagctacaggctgaaaggaagaagatggcccagcagatgctggaccttgaagaacagctggaggaggaggaagctgccaggcagaagctgcaacttgagaaggtcacggctgaggccaagatcaagaaactggaggatgagatcctggtcatggatgatcagaacaataaactatcaaaagaacgaaaactccttgaggagaggattagtgacttaacgacaaatcttgcagaagaggaagaaaaggccaagaatcttaccaagctgaaaaacaagcatgaatctatgatttcagaactggaagtgcggctaaagaaggaagagaagagccgacaggagctggagaagctgaaacggaagctggagggtgatgccagcgacttccacgagcagatcgctgacctccaggcgcagatcgcagagctcaagatgcagctggccaagaaggaggaggagctgcaggcggccctggccaggcttgacgatgaaatcgctcagaagaacaatgccctgaagaagatccgggagctggagggccacatctcagacctccaggaggacctggactcagagcgggccgccaggaacaaggctgaaaagcagaagcgagacctcggcgaggagctggaggccctaaagacagagctggaagacacactggacagcacagccactcagcaggagctcagggccaagagggagcaggaggtgacggtgctgaagaaggccctggatgaagagacgcggtcccatgaggctcaggtccaggagatgaggcagaaacacgcacaggcggtggaggagctcacagagcagcttgagcagttcaagagggccaaggcgaacctagacaagaataagcagacgctggagaaagagaacgcagacctggccggggagctgcgggtcctgggccaggccaagcaggaggtggaacataagaagaagaagctggaggcgcaggtgcaggagctgcagtccaagtgcagcgatggggagcgggcccgggcggagctcaatgacaaagtccacaagctgcagaatgaagttgagagcgtcacagggatgcttaacgaggccgaggggaaggccattaagctggccaaggacgtggcgtccctcagttcccagctccaggacacccaggagctgcttcaagaagaaacccggcagaagctcaacgtgtctacgaagctgcgccagctggaggaggagcggaacagcctgcaagaccagctggacgaggagatggaggccaagcagaacctggagcgccacatctccactctcaacatccagctctccgactcgaagaagaagctgcaggactttgccagcaccgtggaagctctggaagaggggaagaagaggttccagaaggagatcgagaacctcacccagcagtacgaggagaaggcggccgcttatgataaactggaaaagaccaagaacaggcttcagcaggagctggacgacctggttgttgatttggacaaccagcggcaactcgtgtccaacctggaaaagaagcagaggaaatttgatcagttgttagccgaggagaaaaacatctcttccaaatacgcggatgagagggacagagctgaggcagaagccagggagaaggaaaccaaggccctgtccctggctcgggcccttgaagaggccttggaagccaaagaggaactcgagcggaccaacaaaatgctcaaagccgaaatggaagacctggtcagctccaaggatgacgtgggcaagaacgtccatgagctggagaagtccaagcgggccctggagacccagatggaggagatgaagacgcagctggaagagctggaggacgagctgcaagccacggaggacgccaaactgcggctggaagtcaacatgcaggcgctcaagggccagttcgaaagggatctccaagcccgggacgagcagaatgaggagaagaggaggcaactgcagagacagcttcacgagtatgagacggaactggaagacgagcgaaagcaacgtgccctggcagctgcagcaaagaagaagctggaaggggacctgaaagacctggagcttcaggccgactctgccatcaaggggagggaggaagccatcaagcagctacgcaaactgcaggctcagatgaaggactttcaaagagagctggaagatgcccgtgcctccagagatgagatctttgccacagccaaagagaatgagaagaaagccaagagcttggaagcagacctcatgcagctacaagaggacctcgccgccgctgagagggctcgcaaacaagcggacctcgagaaggaggaactggcagaggagctggccagtagcctgtcgggaaggaacgcactccaggacgagaagcgccgcctggaggcccggatcgcccagctggaggaggagctggaggaggagcagggcaacatggaggccatgagcgaccgggtccgcaaagccacacagcaggccgagcagctcagcaacgagctggccacagagcgcagcacggcccagaagaatgagagtgcccggcagcagctcgagcggcagaacaaggagctccggagcaagctccacgagatggagggggccgtcaagtccaagttcaagtccaccatcgcggcgctggaggccaagattgcacagctggaggagcaggtcgagcaggaggccagagagaaacaggcggccaccaagtcgctgaagcagaaagacaagaagctgaaggaaatcttgctgcaggtggaggacgagcgcaagatggccgagcagtacaaggagcaggcagagaaaggcaatgccagggtcaagcagctcaagaggcagctggaggaggcagaggaggagtcccagcgcatcaacgccaaccgcaggaagctgcagcgggagctggatgaggccacggagagcaacgaggccatgggccgcgaggtgaacgcactcaagagcaagctcaggcgaggaaacgagacctctttcgttccttctagaaggtctggaggacgtagagttattgaaaatgcagatggttctgaggaggaaacggacactcgagacgcagacttcaatggaaccaaggccagtgaataagcaactttctacagttttgcaccacggcaagaaaaccaaaaaccaaaacaaacaaacaaaaaaaacccaacaacaacccagaacaaagcaaaacccagcagactgtacttagcattgtctaaatccattctcaaattccaaatatcacagacacccctcacacaaggaatataaaaaccaccaccctccagcctgggcaacgtagtaaaacctcatctatacaagaatttaaaaataagctgggcgtggtggtacacacctgtggtcccagctactagggaggctgagccaggaagaacgctccagcccaggacttcgaggctgcaatgagctataattgcatcattgcactccagcctgggcaacagagaccctgtctcaaccaccaccaccaccaccacccctactacccctgtattcaaggtaaaaattgaagtttgtatgatgtaagagatgagaaaaacccaacaggaaacacagacacatcctccagttctatcaatggattgtgcagacactgagtttttagaaaaacatatccacggtaaccggtccctggcaattctgtttacatgaaatggggagaaagtcaccgaaatgggtgccgccggcccccactcccaattcattccctaacctgcaaacctttccaacttctcacgtcaggcctttgagaattctttccccctctcctggtttccacacctcagacacgcacagttcaccaagtgccttctgtagtcacatgaattgaaaaggagacgctgctcccacggaggggagcaggaatgctgcactgtttacaccctgactgtgcttaaaaacactttcactaataaatggttataaatcacaa

SEQ ID NO: 19250 - DNA, 6942 bp, Homo sapiens
  source 1..6942: mol_type = unassigned DNA
gggagatttggacgctccggcctgggaggtgcgtcagatccgagctcgccatccagtttcctctccactagtccccccagttggagatctgggaccaacaaggcaccatggcgcagaagggccaactcagtgacgatgagaagttcctctttgtggacaaaaacttcatcaacagcccagtggcccaggctgactgggccgccaagagactcgtctgggtcccctcggagaagcagggcttcgaggcagccagcattaaggaggagaagggggatgaggtggttgtggagctggtggagaatggcaagaaggtcacggttgggaaagatgacatccagaagatgaacccacccaagttctccaaggtggaggacatggcggagctgacgtgcctcaacgaagcctccgtgctacacaacctgagggagcggtacttctcagggctaatatatacgtactctggcctcttctgcgtggtggtcaacccctataaacacctgcccatctactcggagaagatcgtcgacatgtacaagggcaagaagaggcacgagatgccgcctcacatctacgccatcgcagacacggcctaccggagcatgcttcaagatcgggaggaccagtccattctatgcacaggcgagtctggagccgggaaaaccgaaaacaccaagaaggtcattcagtacctggccgtggtggcctcctcccacaagggcaagaaagacacaagtatcacgcaaggcccatcttttgcctacggagagctggaaaagcagcttctacaagcaaacccgattctggaggctttcggcaacgccaaaacagtgaagaacgacaactcctcacgattcggcaaattcatccgcatcaacttcgacgtcacgggttacatcgtgggagccaacattgagacctatctgctagaaaaatcacgggcaattcgccaagccagagacgagaggacattccacatcttttactacatgattgctggagccaaggagaagatgagaagtgacttgcttttggagggcttcaacaactacaccttcctctccaatggctttgtgcccatcccagcagcccaggatgatgagatgttccaggaaaccgtggaggccatggcaatcatgggtttcagcgaggaggagcagctatccatattgaaggtggtatcatcggtcctgcagcttggaaatatcgtcttcaagaaggaaagaaacacagaccaggcgtccatgccagataacacagctgctcagaaagtttgccacctcatgggaattaatgtgacagatttcaccagatccatcctcactcctcgtatcaaggttgggcgagatgtggtacagaaagctcagacaaaagaacaggctgactttgctgtagaggctttggccaaggcaacatatgagcgccttttccgctggatactcacccgcgtgaacaaagccctggacaagacccatcggcaaggggcttccttcctggggatcctggatatagctggatttgagatctttgaggtgaactccttcgagcagctgtgcatcaactacaccaacgagaagctgcagcagctcttcaaccacaccatgttcatcctggagcaggaggagtaccagcgcgagggcatcgagtggaacttcatcgactttgggctggacctacagccctgcatcgagctcatcgagcgaccgaacaaccctccaggtgtgctggccctgctggacgaggaatgctggttccccaaagccacggacaagtctttcgtggagaagctgtgcacggagcagggcagccaccccaagttccagaagcccaagcagctcaaggacaagactgagttctccatcatccattatgctgggaaggtggactataatgcgagtgcctggctgaccaagaatatggacccgctgaatgacaacgtgacttccctgctcaatgcctcctccgacaagtttgtggccgacctgtggaaggacgtggaccgcatcgtgggcctggaccagatggccaagatgacggagagctcgctgcccagcgcctccaagaccaagaagggcatgttccgcacagtggggcagctgtacaaggagcagctgggcaagctgatgaccacgctacgcaacaccacgcccaacttcgtgcgctgcatcatccccaaccacgagaagaggtccggcaagctggatgcgttcctggtgctggagcagctgcggtgcaatggggtgctggaaggcattcgcatctgccggcagggcttccccaaccggatcgtcttccaggagttccgccaacgctacgagatcctggcggcgaatgccatccccaaaggcttcatggacgggaagcaggcctgcattctcatgatcaaagccctggaacttgaccccaacttatacaggatagggcagagcaaaatcttcttccgaactggcgtcctggcccacctagaggaggagcgagatttgaagatcaccgatgtcatcatggccttccaggcgatgtgtcgtggctacttggccagaaaggcttttgccaagaggcagcagcagctgaccgccatgaaggtgattcagaggaactgcgccgcctacctcaagctgcggaactggcagtggtggaggcttttcaccaaagtgaagccactgctgcaggtgacacggcaggaggaggagatgcaggccaaggaggatgaactgcagaagaccaaggagcggcagcagaaggcagagaatgagcttaaggagctggaacagaagcactcgcagctgaccgaggagaagaacctgctacaggaacagctgcaggcagagacagagctgtatgcagaggctgaggagatgcgggtgcggctggcggccaagaagcaggagctggaggagatactgcatgagatggaggcccgcctggaggaggaggaagacaggggccagcagctacaggctgaaaggaagaagatggcccagcagatgctggaccttgaagaacagctggaggaggaggaagctgccaggcagaagctgcaacttgagaaggtcacggctgaggccaagatcaagaaactggaggatgagatcctggtcatggatgatcagaacaataaactatcaaaagaacgaaaactccttgaggagaggattagtgacttaacgacaaatcttgcagaagaggaagaaaaggccaagaatcttaccaagctgaaaaacaagcatgaatctatgatttcagaactggaagtgcggctaaagaaggaagagaagagccgacaggagctggagaagctgaaacggaagctggagggtgatgccagcgacttccacgagcagatcgctgacctccaggcgcagatcgcagagctcaagatgcagctggccaagaaggaggaggagctgcaggcggccctggccaggcttgacgatgaaatcgctcagaagaacaatgccctgaagaagatccgggagctggagggccacatctcagacctccaggaggacctggactcagagcgggccgccaggaacaaggctgaaaagcagaagcgagacctcggcgaggagctggaggccctaaagacagagctggaagacacactggacagcacagccactcagcaggagctcagggccaagagggagcaggaggtgacggtgctgaagaaggccctggatgaagagacgcggtcccatgaggctcaggtccaggagatgaggcagaaacacgcacaggcggtggaggagctcacagagcagcttgagcagttcaagagggccaaggcgaacctagacaagaataagcagacgctggagaaagagaacgcagacctggccggggagctgcgggtcctgggccaggccaagcaggaggtggaacataagaagaagaagctggaggcgcaggtgcaggagctgcagtccaagtgcagcgatggggagcgggcccgggcggagctcaatgacaaagtccacaagctgcagaatgaagttgagagcgtcacagggatgcttaacgaggccgaggggaaggccattaagctggccaaggacgtggcgtccctcagttcccagctccaggacacccaggagctgcttcaagaagaaacccggcagaagctcaacgtgtctacgaagctgcgccagctggaggaggagcggaacagcctgcaagaccagctggacgaggagatggaggccaagcagaacctggagcgccacatctccactctcaacatccagctctccgactcgaagaagaagctgcaggactttgccagcaccgtggaagctctggaagaggggaagaagaggttccagaaggagatcgagaacctcacccagcagtacgaggagaaggcggccgcttatgataaactggaaaagaccaagaacaggcttcagcaggagctggacgacctggttgttgatttggacaaccagcggcaactcgtgtccaacctggaaaagaagcagaggaaatttgatcagttgttagccgaggagaaaaacatctcttccaaatacgcggatgagagggacagagctgaggcagaagccagggagaaggaaaccaaggccctgtccctggctcgggcccttgaagaggccttggaagccaaagaggaactcgagcggaccaacaaaatgctcaaagccgaaatggaagacctggtcagctccaaggatgacgtgggcaagaacgtccatgagctggagaagtccaagcgggccctggagacccagatggaggagatgaagacgcagctggaagagctggaggacgagctgcaagccacggaggacgccaaactgcggctggaagtcaacatgcaggcgctcaagggccagttcgaaagggatctccaagcccgggacgagcagaatgaggagaagaggaggcaactgcagagacagcttcacgagtatgagacggaactggaagacgagcgaaagcaacgtgccctggcagctgcagcaaagaagaagctggaaggggacctgaaagacctggagcttcaggccgactctgccatcaaggggagggaggaagccatcaagcagctacgcaaactgcaggctcagatgaaggactttcaaagagagctggaagatgcccgtgcctccagagatgagatctttgccacagccaaagagaatgagaagaaagccaagagcttggaagcagacctcatgcagctacaagaggacctcgccgccgctgagagggctcgcaaacaagcggacctcgagaaggaggaactggcagaggagctggccagtagcctgtcgggaaggaacgcactccaggacgagaagcgccgcctggaggcccggatcgcccagctggaggaggagctggaggaggagcagggcaacatggaggccatgagcgaccgggtccgcaaagccacacagcaggccgagcagctcagcaacgagctggccacagagcgcagcacggcccagaagaatgagagtgcccggcagcagctcgagcggcagaacaaggagctccggagcaagctccacgagatggagggggccgtcaagtccaagttcaagtccaccatcgcggcgctggaggccaagattgcacagctggaggagcaggtcgagcaggaggccagagagaaacaggcggccaccaagtcgctgaagcagaaagacaagaagctgaaggaaatcttgctgcaggtggaggacgagcgcaagatggccgagcagtacaaggagcaggcagagaaaggcaatgccagggtcaagcagctcaagaggcagctggaggaggcagaggaggagtcccagcgcatcaacgccaaccgcaggaagctgcagcgggagctggatgaggccacggagagcaacgaggccatgggccgcgaggtgaacgcactcaagagcaagctcagagggccccccccacaggaaacttcgcagtgatgcaccaggcgaggaaacgagacctctttcgttccttctagaaggtctggaggacgtagagttattgaaaatgcagatggttctgaggaggaaacggacactcgagacgcagacttcaatggaaccaaggccagtgaataagcaactttctacagttttgcaccacggcaagaaaaccaaaaaccaaaacaaacaaacaaaaaaaacccaacaacaacccagaacaaagcaaaacccagcagactgtacttagcattgtctaaatccattctcaaattccaaatatcacagacacccctcacacaaggaatataaaaaccaccaccctccagcctgggcaacgtagtaaaacctcatctatacaagaatttaaaaataagctgggcgtggtggtacacacctgtggtcccagctactagggaggctgagccaggaagaacgctccagcccaggacttcgaggctgcaatgagctataattgcatcattgcactccagcctgggcaacagagaccctgtctcaaccaccaccaccaccaccacccctactacccctgtattcaaggtaaaaattgaagtttgtatgatgtaagagatgagaaaaacccaacaggaaacacagacacatcctccagttctatcaatggattgtgcagacactgagtttttagaaaaacatatccacggtaaccggtccctggcaattctgtttacatgaaatggggagaaagtcaccgaaatgggtgccgccggcccccactcccaattcattccctaacctgcaaacctttccaacttctcacgtcaggcctttgagaattctttccccctctcctggtttccacacctcagacacgcacagttcaccaagtgccttctgtagtcacatgaattgaaaaggagacgctgctcccacggaggggagcaggaatgctgcactgtttacaccctgactgtgcttaaaaacactttcactaataaatggttataaatcacaa

SEQ ID NO: 19251 - DNA, 5992 bp, Homo sapiens
  source 1..5992: mol_type = unassigned DNA
aaattgctgtgaccgcagcatctctaggaagacgctttattcctgaaggacactgactgtcacttgggaaccaagaagccctctgcagtcatgagctctgacgcagaaatggccatttttggagaagcagctccctacctccggaaaccagagaaggagagaatcgaggctcaaaatcgtccattcgattccaagaaagcctgctttgtagcggataataaggaaatgtatgtgaaaggcatgatccagactagggaaaatgacaaagtcatagtcaagaccctcgatgaccggatgctcactctgaacaatgaccaggtcttccccatgaaccctcccaaatttgacaagatcgaggacatggccatgatgactcacctgcatgaacctgctgttctgtacaacctcaaagagcgctatgcagcctggatgatctacacctactcaggcctcttctgtgtcaccgtcaacccctacaagtggctgccggtgtacaagcccgaggtggtggctgcctacagaggcaaaaagcgccaggaggccccgccccacatcttctccatctctgacaatgcctatcagttcatgctgactgatcgagacaaccagtctatcctcatcaccggagaatccggggctgggaagactgtgaacaccaagcgtgtcatccagtattttgcaacaattgcagttaccggggacaagaagaaggagacacagccaggcaaaatgcagggaaccctagaggatcagatcatccaggccaacccactgctggaggcctttggaaatgccaagactgtgaggaatgacaactcctcaagatttgggaagttcattcggattcattttggagccacaggaaagctggcatcggcagacatcgaaacttatctgttagaaaaatccagagtgacgtttcaattatccagtgagagaagctatcatattttctaccaaattatgtcaaacaagaagccagaactaattgacctgcttctgatctccaccaaccccttcgacttccccttcgtgagccaaggagaggtcacggtagccagtatcgatgacagtgaagaactgctggcgacagataatgccattgacatcctgggcttcagctcagaggagaaagtcgggatctacaaactgacgggagccgtgatgcattatgggaacatgaagttcaagcagaagcagcgtgaggagcaggcggagccagacggcaccgaagtggctgacaaagccggatacctgatgggactgaattctgcagaaatgctgaagggcctgtgctgtccaagggtgaaggttggcaatgaatatgtcactaaagggcaaaatgtccagcaggtgaccaattcggtgggtgctctggccaaagccgtctacgagaagatgttcctgtggatggtcacccgcatcaaccagcagctggacaccaagcagcccaggcagtacttcatcggggtcttggacattgctggctttgagatctttgatttcaacagcctggagcagctgtgcatcaacttcaccaatgagaaactgcaacagtttttcaaccaccacatgttcgtgctggagcaggaagagtacaagaaggaaggcatcgagtgggagttcattgacttcggaatggacctggctgcctgcatcgagctcatcgagaagcctatgggcatcttctccatcctggaagaggagtgcatgttccccaaggcaacagacacctccttcaagaacaagctgtatgaccagcatcttggaaaatccaacaacttccagaagcccaagcctgccaaaggcaaggctgaggctcacttctcgctggtgcactatgccggcaccgtggactacaacatcgccggctggctggacaaaaacaaggaccccctgaacgagactgtggtggggctgtaccagaagtcttcgctgaagcttctctccttccttttttccaactatgctggtgcagagacaggcgactccggaggaagcaagaagggcgggaagaagaagggctcctctttccagaccgtgtcggccgtgttcagggaaaatttaaacaaattgatgactaacttaaggagcacccaccctcactttgtacgatgtctgattcccaatgagaccaagactcctggtgtgatggaccactacttggtcatgcaccagctgcgctgtaacggggtcctcgagggcatccggatttgcaggaagggattccccagccggatcctctatgctgacttcaagcagcggtaccggatcctcaatgccagtgctatccctgaagggcagttcattgacagcaaaaatgcctcagagaagctcctcaactccatcgatgtggaccgggagcagttcaggttcggcaacaccaaggtgtttttcaaagctgggctcctgggacttttggaggagatgagagatgagaagctggtgacgctgatgacaagcacgcaggcggtgtgcagggggtacctgatgcgggtggagttcaagaagatgatggagaggagggactccatcttctgcatccagtacaacatccgctcttttatgaacgtcaagcactggccctggatgaacctgttcttcaaaatcaagcccctgctgaagagtgcagaggccgagaaggagatggccaccatgaaggaagactttgagaggaccaaggaagaactggcccgatctgaggctcgccggaaggagctggaggagaaaatggtctccctcctgcaggagaagaatgacctccaattgcaggtccagtctgaaacagaaaatctgatggacgctgaggaacggtgtgaaggactcatcaaaagcaagatcctactggaagcaaaagtcaaggagctgacggagagattggaagaggaagaggagatgaattctgaattggttgccaagaagaggaatctggaagataaatgctcctctctcaagagagacattgatgacctggagctgaccttgacgaaagttgaaaaggagaagcatgccacagagaacaaggtaaagaatctttccgaagaaatgacagcacttgaagaaaacatttccaaattgaccaaagaaaagaaatctctacaggaggcccatcagcaaacactggatgatcttcaggtggaagaagataaagtcaatggtctaatcaaaataaatgccaagcttgaacagcaaacagatgatcttgagggttccttagagcaggagaagaaactgcgggcggacttggaaagggcgaagaggaagctggaaggagatctgaaaatgtcccaggaatccattatggatctagaaaatgacaagcagcaaatagaagagaaattgaaaaagaaggagtttgaactcagtcagttacaagccaaaatagatgacgaacaagtccacagtttgcagtttcaaaagaagattaaagaactgcaagcccgcatagaagagctggaggaggaaattgaagcggaacacacgctcagagccaagattgagaagcagcgctcagatctggccagggaactggaggagatcagcgagaggctggaagaagccagtggggccacttcagcccagattgagatgaacaagaagagggaggctgagttccagaaaatgcgcagggacctggaggaggccaccctgcagcacgaagccacagcagccaccctgaggaagaagcaagcagatagtgtggccgagcttggggagcagattgacaacctgcagcgggtgaagcagaagctggagaaggagaagagcgagctgaagatggagattgacgacatggccagcaacatcgaggctctctccaagtcaaagagtaacatagaaagaacgtgccggacggtagaagatcaatttagtgaaatcaaagccaaggacgagcaacagacacagttgatccatgatctgaacatgcagaaagcaagactgcagacccaaaatggggagctgagccaccgagtggaagagaaggagtctctgatttcacagctgaccaaaagcaagcaggccctcacccagcagctggaggagcttaagaggcaaatggaagaagaaaccaaggccaagaacgccatggcgcacgccctgcagtcctcccgccacgactgtgacctgctgcgggaacagtatgaggaggagcaggaagccaaggccgagctgcagagggcgctgtccaaggccaacagtgaggttgcccagtggaggaccaaatacgagacggacgccattcagcgcacagaggagctggaggaggccaagaaaaaactggcccagaggctccaggaagcagaggagaacacggagacggcgaactccaagtgcgcatcgttggagaaaaccaagcagaggctgcagggagaggtggaggatctgatgcgggatctggagcgctcccacaccgcctgtgccacactggacaagaagcagaggaacttcgacaaggtccttgcagagtggaagcaaaagctggacgaaagccaggctgagttggaagctgctcagaaggagtccaggtcactcagcactgaactcttcaagatgaggaatgcctatgaggaggtggtggaccagttagagacactgaggcgagagaacaaaaatctgcaagaagagatttccgacttaactgagcagattgcagaaactggcaagaatcttcaggaagcggaaaagaccaagaagctagtggagcaggaaaagtcagatctgcaggtcgccttagaagaagtggagggttccttggaacacgaggagagcaagatcttgcgcgtgcagctagagctgagccaggtgaaatccgagctagaccgcaaggtcattgagaaggatgaagaaatcgagcagctaaaaagaaacagccagcgggcagcagaggccctgcagagcgtgctggatgctgaaatccgcagccggaacgacgccctgaggctaaagaagaagatggagggagaccttaatgagatggagattcagctgggccactccaaccgccagatggcagagacccagaagcatctgcgcacggtccagggccagctcaaggactcccagctgcatctcgatgacgccctgaggagcaatgaggacctcaaggagcagctggccatcgtggagcgcaggaatggcctcctgctggaggagctggaggaaatgaaggtggccctggaacagacggagcggacccgcaggctgtcagagcaggagctgctggacgccagcgaccgcgtgcagctcctgcactcccagaacacaagcctgataaataccaagaaaaaactggaggctgacatagctcagtgccaggcagaggtggagaactcgatccaggagtccaggaacgcagaggagaaggccaagaaggccatcacggatgctgccatgatggctgaggagctaaagaaggaacaggacaccagcgcccacctggagcggatgaagaagaacctggagcagacggtgaaggacctgcagcaccgtctagatgaggctgaacaactggcgctgaagggcgggaagaagcagatccagaaactggagaaccgggtgcgggagctggaaaatgagcttgatgtggaacagaagaggggagctgaagccctgaagggagcccacaagtacgaacgcaaagtcaaggagatgacttaccaggctgaggaggaccacaagaatatccttaggctccaggacctggtggacaagctgcaggccaaagtgaagtcttacaagaggcaggctgaggaggcggaggagcaggccaacacgcagctgtccagatgccggagagtccagcatgagctagaggaggccgcggagagggcggacatcgctgagtcccaggtcaacaagctgagggccaagagccgagacgtgggcagccagaagatggaagaatgaggctcacctgatgctcgttgccatgggacacctccgagagagtggagggaaaatgtgtgagaaataaattctcctaaatactcgg

SEQ ID NO: 19252 - DNA, 2221 bp, Homo sapiens
  source 1..2221: mol_type = unassigned DNA
acttatttgggcaaatgctgtctcatatgctatacaaaaaagagaatgccattgacatcctgggcttcagctcagaggagaaagtcgggatctacaaactgacgggagccgtgatgcattatgggaacatgaagttcaagcagaagcagcgtgaggagcaggcggagccagacggcaccgaagtggctgacaaagccggatacctgatgggactgaattctgcagaaatgctgaagggcctgtgctgtccaagggtgaaggttggcaatgaatatgtcactaaagggcaaaatgtccagcaggtgaccaattcggtgggtgctctggccaaagccgtctacgagaagatgttcctgtggatggtcacccgcatcaaccagcagctggacaccaagcagcccaggcagtacttcatcggggtcttggacattgctggctttgagatctttgatttcaacagcctggagcagctgtgcatcaacttcaccaatgagaaactgcaacagtttttcaaccaccacatgttcgtgctggagcaggaagagtacaagaaggaaggcatcgagtgggagttcattgacttcggaatggacctggctgcctgcatcgagctcatcgagaagcctatgggcatcttctccatcctggaagaggagtgcatgttccccaaggcaacagacacctccttcaagaacaagctgtatgaccagcatcttggaaaatccaacaacttccagaagcccaagcctgccaaaggcaaggctgaggctcacttctcgctggtgcactatgccggcaccgtggactacaacatcgccggctggctggacaaaaacaaggaccccctgaacgagactgtggtggggctgtaccagaagtcttcgctgaagcttctctccttccttttttccaactatgctggtgcagagacaggcgactccggaggaagcaagaagggcgggaagaagaagggctcctctttccagaccgtgtcggccgtgttcagggaaaatttaaacaaattgatgactaacttaaggagcacccaccctcactttgtacgatgtctgattcccaatgagaccaagactcctggtgtgatggaccactacttggtcatgcaccagctgcgctgtaacggggtcctcgagggcatccggatttgcaggaagggattccccagccggatcctctatgctgacttcaagcagcggtaccggatcctcaatgccagtgctatccctgaagggcagttcattgacagcaaaaatgcctcagagaagctcctcaactccatcgatgtggaccgggagcagttcaggttcggcaacaccaaggtgtttttcaaagctgggctcctgggacttttggaggagatgagagatgagaagctggtgacgctgatgacaagcacgcaggcggtgtgcagggggtacctgatgcgggtggagttcaagaagatgatggagaggagggactccatcttctgcatccagtacaacatccgctcttttatgaacgtcaagcactggccctggatgaacctgttcttcaaaatcaagcccctgctgaagagtgcagaggccgagaaggagatggccaccatgaaggaagactttgagaggaccaaggaagaactggcccgatctgaggctcgccggaaggagctgacggagagattggaagaggaagaggagatgaattctgaattggttgccaagaagaggaatctggaagataaatgctcctctctcaagagagacattgatgacctggagctgaccttgacgaaagttgaaaaggagaagcatgccacagagaacaaggtaaagaatctttccgaagaaatgacagcacttgaagaaaacatttccaaattgaccaaagaaaagaaatctctacaggaggcccatcagcaaacactggatgatcttcaggtggaagaagataaagtcaatggtctaatcaaaataaatgccaagcttgaacagcaaacagatgatgaaggagtttgaactcagtcagttacaagccaaaatagatgacgaacaagtccacagtttgcagtttcaaaagaagattaaagaactgcaagtaaaagcatcaaaaccttcccaatcatgacaatccctttgcaagagcgcccctcctcactccttcccccttgtttctttagctgcttctttccttcctcctgctaaagctagagaagatgtcctgt

SEQ ID NO: 19253 - DNA, 6873 bp, Homo sapiens
  source 1..6873: mol_type = unassigned DNA
gcagaccatggcagccgtgaccatgtcggtgcccgggcggaaggcgccccccaggccgggcccagtgcccgaggcggcccagccgttcctgttcacgccccgcgggcccagcgcgggtggcgggcctggctcgggcacctccccgcaggtggagtggacggcccggcgtctcgtgtgggtgccttcggagcttcacgggttcgaggcggcggcgctgcgggacgaaggcgaggaggaggcggaggtggagctggcggagagcgggaggcggctgcgactgccgcgggaccagatccagcgcatgaacccgcccaagttcagcaaggccgaggacatggccgagctgacctgcctcaacgaggcctcggtcctgcacaacctccgggagcggtactactccggcctcatctacacgtactccggccttttctgtgtggtcatcaacccgtacaagcagcttcccatctacacagaagccattgtggagatgtaccggggcaagaagcgccacgaggtgccaccccacgtgtacgcagtgaccgagggggcctatcggagcatgctgcaggatcgtgaggaccagtccattctctgcactggagagtctggagctgggaagacggaaaacaccaagaaggtcatccagtacctcgcccacgtggcgtcgtctccaaagggcaggaaggagccgggtgtccccgcctccgtcagcaccgtgtcttatggtgagctggagcggcagctgcttcaggccaaccccatcctagaggcctttggcaatgccaagacagtgaagaatgacaactcctcccgattcggcaaattcatccgcatcaactttgatgttgccgggtacatcgtgggcgccaacattgagacctacctgctggagaagtcgcgggccatccgccaggccaaggacgagtgcagcttccacatcttctaccagctgctggggggcgctggagagcagctcaaagccgacctcctcctcgagccctgctcccactaccggttcctgaccaacgggccgtcatcctctcccggccaggagcgggaactcttccaggagacgctggagtcgctgcgggtcctgggattcagccacgaggaaatcatctccatgctgcggatggtctcagcagttctccagtttggcaacattgccttgaagagagaacggaacaccgatcaagccaccatgcctgacaacacagctgcacagaagctctgccgcctcttgggactgggggtgacggatttctcccgagccttgctcacccctcgcatcaaagttggccgagactatgtgcagaaagcccagactaaggaacaggctgacttcgcgctggaggccctggccaaggccacctacgagcgcctcttccgctggctggttctgcgcctcaaccgggccttggaccgcagcccccgccaaggcgcctccttcctgggcatcctggacatcgcgggctttgagatcttccagctgaactccttcgagcagctctgcatcaactacaccaacgagaagctgcagcagctcttcaaccacaccatgttcgtgctggagcaggaggagtaccagcgtgagggcatcccctggaccttcctcgactttggcctcgacctgcagccctgcatcgacctcatcgagcggccggccaacccccctggactcctggccctgctggatgaggagtgctggttcccgaaggccacagacaagtcgtttgtggagaaggtagcccaggagcagggcggccaccccaagttccagcggccgaggcacctgcgggatcaggccgacttcagtgttctccactacgcgggcaaggtcgactacaaggccaacgagtggctgatgaaaaacatggaccctctgaatgacaacgtcgcagccttgctccaccagagcacagaccggctgacggcagagatctggaaagacgaacatgggggcttccagcagttctctttccttggctccttcccaccgtcgcccccaggatctgcagagaggtgcagctctgctatttctccgccaggggtggagggcatcgtggggctggaacaggtgagcagcctgggcgacggcccaccaggtggccgcccccgtcggggtatgttccggacagtgggacagctctacaaggagtccctgagccgcctcatggccacactcagcaacaccaaccccagttttgtccgctgcattgtccccaaccacgagaagagggccgggaagctggagccacggctggtgctggaccagcttcgctgcaacggggtcctggagggcatccgcatctgtcgccagggcttccccaaccgcatcctcttccaggagttccggcagcgatacgagatcctgacacccaatgccatccccaagggcttcatggatgggaagcaggcctgtgaaaagatgatccaggcgctggaactggaccccaacctctaccgcgtgggacagagcaagatcttcttccgggctggggtcctggcccagctggaagaggagcgagacctgaaggtcaccgacatcatcgtctccttccaggcagctgcccggggatacctggctcgcagggccttccagaagcgccagcagcagcagagcgccctgagggtgatgcagcggaactgcgcggcctacctcaagctgagacactggcagtggtggcggctgtttaccaaggtgaagccactgctgcaggtgacgcggcaggatgaggtgctgcaggcacgggcccaggagctgcagaaagtgcaggagctacagcagcagagcgcccgcgaagttggggagctccagggccgagtggcacagctggaagaggagcgcgcccgcctggcagagcaattgcgagcagaggcagaactgtgtgcagaggccgaggagacgcgggggaggctggcagcccgcaagcaggagctggagctggtggtgtcagagctggaggctcgcgtgggcgaggaggaggagtgcagccgtcaaatgcaaaccgagaagaagaggctgcagcagcacatacaggagctagaggcccaccttgaggctgaggagggtgcgcggcagaagctgcagctggagaaggtgacgacagaggcaaaaatgaagaaatttgaagaggacctgctgctcctggaagaccagaattccaagctgagcaaggagcggaagctgctggaagatcgtctggccgagttctcatcccaggcagctgaggaggaggagaaggtcaagagcctcaataagctacggctcaaatatgaggccacaatcgcagacatggaggaccgcctacggaaggaggagaagggtcgccaggagctggagaagctgaagcggaggctggatggggagagctcagagctgcaggagcagatggtggagcagcaacagcgggcagaggagctgcgggcccagctgggccggaaggaggaggagctgcaggctgccctggccagggcagaagacgagggtggggcccgggcccagctgctgaaatccctgcgggaggctcaagcagccctggccgaggcccaggaggacctggagtctgagcgtgtggccaggaccaaggcggagaagcagcgccgggacctgggcgaggagctggaggcgctgcggggcgagctggaggacacgctggactccaccaacgcacagcaggagctccggtccaagagggaacaggaggtgacggagctgaagaagactctggaggaggagactcgcatccacgaggcggcagtgcaggagctgaggcagcgccacggccaggccctgggggagctggcggagcagctggagcaggcccggaggggcaaaggtgcatgggagaagacccggctggccctggaggccgaggtgtccgagctgcgggcagaactgagcagcctgcagactgcacgtcaggagggtgagcagcggaggcgccgcctggagttacagctgcaggaggtgcagggccgggctggtgatggggagagggcacgagcggaggctgctgagaagctgcagcgagcccaggctgaactggagaatgtgtctggggcgctgaacgaggctgagtccaaaaccatccgtcttagcaaggagctgagcagcacagaagcccagctgcacgatgcccaggagctgctgcaggaggagaccagggcgaaattggccttggggtcccgggtgcgagccatggaggctgaggcagccgggctgcgtgagcagctggaggaggaggcagctgccagggaacgggcgggccgtgaactgcagactgcccaggcccagctttccgagtggcggcggcgccaggaggaggaggcaggggcactggaggcaggggaggaggcacggcgccgggcagcccgggaggccgaggccctgacccagcgcctggcagaaaagacagagaccgtggatcggctggagcggggccgccgccggctgcagcaggagctggacgacgccaccatggacctggagcagcagcggcagcttgtgagcaccctggagaagaagcagcgcaagtttgaccagcttctggcagaggagaaggcagctgtacttcgggcagtggaggaacgtgagcgggccgaggcagagggccgggagcgtgaggctcgggccctgtcactgacacgggcactggaggaggagcaggaggcacgtgaggagctggagcggcagaaccgggccctgcgggctgagctggaggcactgctgagcagcaaggatgacgtcggcaagagcgtgcatgagctggaacgagcctgccgggtagcagaacaggcagccaatgatctgcgagcacaggtgacagaactggaggatgagctgacagcggccgaggatgccaagctgcgtctggaggtgactgtgcaggctctcaagactcagcatgagcgtgacctgcagggccgtgatgaggctggtgaagagaggcggaggcagctggccaagcagctgagagatgcagaggtggagcgggatgaggagcggaagcagcgcactctggccgtggctgcccgcaagaagctggagggagagctggaggagctgaaggctcagatggcctctgccggccagggcaaggaggaggcggtgaagcagcttcgcaagatgcaggcccagatgaaggagctatggcgggaggtggaggagacacgcacctcccgggaggagatcttctcccagaatcgggaaagtgaaaagcgcctcaagggcctggaggctgaggtgctgcggctgcaggaggaactggccgcctcggaccgtgctcggcggcaggcccagcaggaccgggatgagatggcagatgaggtggccaatggtaaccttagcaaggcagccattctggaggagaagcgtcagctggaggggcgcctggggcagttggaggaagagctggaggaggagcagagcaactcggagctgctcaatgaccgctaccgcaagctgctcctgcaggtagagtcactgaccacagagctgtcagctgagcgcagtttctcagccaaggcagagagcgggcggcagcagctggaacggcagatccaggagctacggggacgcctgggtgaggaggatgctggggcccgtgcccgccacaagatgaccattgctgcccttgagtctaagttggcccaggctgaggagcagctagagcaagagaccagagagcgcatcctctctggaaagctggtgcgcagagctgagaagcggcttaaagaggtggtgctccaggtggaggaggagcggagggtggctgaccagctccgggaccagctggagaagggaaaccttcgagtcaagcagctgaagcggcagctggaggaggccgaggaggaggcatcccgggctcaggccggccgccggaggctgcagcgtgagctggaagatgtcacagagtcggccgagtccatgaaccgtgaagtgaccacactgaggaaccggcttcgacgcggccccctcaccttcaccacccgcacggtgcgccaggtcttccgactagaggagggcgtggcatccgacgaggaggcagaggaagcacagcctgggtctgggccatccccggagcctgaggggtccccaccagcccacccccagtgaccctaccctgtccccagatgcactaacagatggggcccagcccccttcctccctggaccccacgggcccctgtcccaggaaccccgccctctgacttcttgccctttggaaatggtgcagcactctggcatttatcacccccacctgggtcccctgcaacctcccatcaaaggatgacccctaaacacagaggagcggggcaggcagggaggcaatgactggagctaccttgcttgttgggggactgggtacagttggcaagctgtgtttccatcagctccctgtcctcctttcttccctcgttattgatctatagacattaggaagggagtgagacggctcctccaccatcctcagccagtgcaacccattccctctgcttctctctctctctctctctctccctccctctccttccctaccctctcaccatctttcttggcctctctgagggtctctctgtgcatctttttaggaatctcgctctcactctctacgtagccactctccttcccccatttctgcgtccacccctgaactcctgagcgacagaagccccaggcctccaccagccttgaacccttgcaaaggggcaggacaaggggacccctctcactcctgctgctgcccatgctctgccctcccttctggttgctctgagggttcggagcttccctctgggactaaaggagtgtcctttaccctcccagcctccaggctctggcagaaataaactccaacccgactggaccatc

SEQ ID NO: 19254 - DNA, 4484 bp, Homo sapiens
  source 1..4484: mol_type = unassigned DNA
ctctttctccccaggccgaagcctcgggacggccctggaagccgaccatggcagccgtgaccatgtcggtgcccgggcggaaggcgccccccaggccgggcccagtgcccgaggcggcccagccgttcctgttcacgccccgcgggcccagcgcgggtggcgggcctggctcgggcacctccccgcaggtggagtggacggcccggcgtctcgtgtgggtgccttcggagcttcacgggttcgaggcggcggcgctgcgggacgaaggcgaggaggaggcggaggtggagctggcggagagcgggaggcggctgcgactgccgcgggaccagatccagcgcatgaacccgcccaagttcagcaaggccgaggacatggccgagctgacctgcctcaacgaggcctcggtcctgcacaacctccgggagcggtactactccggcctcatctacacgtactccggccttttctgtgtggtcatcaacccgtacaagcagcttcccatctacacagaagccattgtggagatgtaccggggcaagaagcgccacgaggtgccaccccacgtgtacgcagtgaccgagggggcctatcggagcatgctgcaggatcgtgaggaccagtccattctctgcactggagagtctggagctgggaagacggaaaacaccaagaaggtcatccagtacctcgcccacgtggcgtcgtctccaaagggcaggaaggagccgggtgtccccggtgagctggagcggcagctgcttcaggccaaccccatcctagaggcctttggcaatgccaagacagtgaagaatgacaactcctcccgattcggcaaattcatccgcatcaactttgatgttgccgggtacatcgtgggcgccaacattgagacctacctgctggagaagtcgcgggccatccgccaggccaaggacgagtgcagcttccacatcttctaccagctgctggggggcgctggagagcagctcaaagccgacctcctcctcgagccctgctcccactaccggttcctgaccaacgggccgtcatcctctcccggccaggagcgggaactcttccaggagacgctggagtcgctgcgggtcctgggattcagccacgaggaaatcatctccatgctgcggatggtctcagcagttctccagtttggcaacattgccttgaagagagaacggaacaccgatcaagccaccatgcctgacaacacagctgcacagaagctctgccgcctcttgggactgggggtgacggatttctcccgagccttgctcacccctcgcatcaaagttggccgagactatgtgcagaaagcccagactaaggaacaggctgacttcgcgctggaggccctggccaaggccacctacgagcgcctcttccgctggctggttctgcgcctcaaccgggccttggaccgcagcccccgccaaggcgcctccttcctgggcatcctggacatcgcgggctttgagatcttccagctgaactccttcgagcagctctgcatcaactacaccaacgagaagctgcagcagctcttcaaccacaccatgttcgtgctggagcaggaggagtaccagcgtgagggcatcccctggaccttcctcgactttggcctcgacctgcagccctgcatcgacctcatcgagcggccggccaacccccctggactcctggccctgctggatgaggagtgctggttcccgaaggccacagacaagtcgtttgtggagaaggtagcccaggagcagggcggccaccccaagttccagcggccgaggcacctgcgggatcaggccgacttcagtgttctccactacgcgggcaaggtcgactacaaggccaacgagtggctgatgaaaaacatggaccctctgaatgacaacgtcgcagccttgctccaccagagcacagaccggctgacggcagagatctggaaagacgtggagggcatcgtggggctggaacaggtgagcagcctgggcgacggcccaccaggtggccgcccccgtcggggtatgttccggacagtgggacagctctacaaggagtccctgagccgcctcatggccacactcagcaacaccaaccccagttttgtccgctgcattgtccccaaccacgagaagagggccgggaagctggagccacggctggtgctggaccagcttcgctgcaacggggtcctggagggcatccgcatctgtcgccagggcttccccaaccgcatcctcttccaggagttccggcagcgatacgagatcctgacacccaatgccatccccaagggcttcatggatgggaagcaggcctgtgaaaagatgatccaggcgctggaactggaccccaacctctaccgcgtgggacagagcaagatcttcttccgggctggggtcctggcccagctggaagaggagcgagacctgaaggtcaccgacatcatcgtctccttccaggcagctgcccggggatacctggctcgcagggccttccagaagcgccagcagcagcagagcgccctgagggtgatgcagcggaactgcgcggcctacctcaagctgagacactggcagtggtggcggctgtttaccaaggtgaagccactgctgcaggtgacgcggcaggatgaggtgctgcaggcacgggcccaggagctgcagaaagtgcaggagctacagcagcagagcgcccgcgaagttggggagctccagggccgagtggcacagctggaagaggagcgcgcccgcctggcagagcaattgcgagcagaggcagaactgtgtgcagaggccgaggagacgcgggggaggctggcagcccgcaagcaggagctggagctggtggtgtcagagctggaggctcgcgtgggcgaggaggaggagtgcagccgtcaaatgcaaaccgagaagaagaggctgcagcagcacatacaggagctagaggcccaccttgaggctgaggagggtgcgcggcagaagctgcagctggagaaggtgacgacagaggcaaaaatgaagaaatttgaagaggacctgctgctcctggaagaccagaattccaagctgagcaagagcggaagctgctggaagatcgtctggccgagttctcatcccaggcagctgaggaggaggagaaggtcaagagcctcaataagctacggctcaaatatgaggccacaatcgcagacatggagggaccgcctacggaaggaggagaagggtcgccaggagctggagaagctgaagcggaggctggatggggagagctcagagctgcaggagcagatggtggagcagcaacagcgggcagaggagctgcgggcccagctgggccggaaggaggaggagctgcaggctgccctggccagggcagaagacgagggtggggcccgggcccagctgctgaaatccctgcgggaggctcaagcagccctggccgaggcccaggaggacctggagtctgagcgtgtggccaggaccaaggcggagaagcagcgccgggacctgggcgaggagctggaggcgctgcggggcgagctggaggacacgctggactccaccaacgcacagcaggagctccggtccaagagggaacaggaggtgacggagctgaagaagactctggaggaggagactcgcatccacgaggcggcagtgcaggagctgaggcagcgccacggccaggccctgggggagctggcggagcagctggagcaggcccggaggggcaaaggtgcatgggagaagacccggctggccctggaggccgaggtgtccgagctgcgggcagaactgagcagcctgcagactgcacgtcaggagggtgagcagcggaggcgccgcctggagttacagctgcaggaggtgcagggccgggctggtgatggggagagggcacgagcggaggctgctgagaagctgcagcgagcccaggctgaactggagaatgtgtctggggcgctgaacgaggctgagtccaaaaccatccgtcttagcaaggagctgagcagcacagaagcccagctgcacgatgcccaggagctgctgcaggaggagaccagggcgaaattggccttggggtcccgggtgcgagccatggaggctgaggcagccgggctgcgtgagcagctggaggaggaggcagctgccagggaacgggcgggccgtgaactgcagactgcccaggcccagctttccgagtggcggcggcgccaggaggaggaggcaggggcactggaggcaggggaggaggcacggcgccgggcagcccgggaggccgaggccctgacccagcgcctggcagaaaagacagagaccgtggatcggctggagcggggccgccgccggctgcagcaggagctggacgacgccaccctgtccccagatgcactaacagatggggcccagcccccttcctccctggaccccacgggcccctgtcccaggaaccccgccctctga

SEQ ID NO: 19255 - DNA, 6139 bp, Homo sapiens
  source 1..6139: mol_type = unassigned DNA
ctctttctccccaggccgaagcctcgggacggccctggaagccgaccatggcagccgtgaccatgtcggtgcccgggcggaaggcgccccccaggccgggcccagtgcccgaggcggcccagccgttcctgttcacgccccgcgggcccagcgcgggtggcgggcctggctcgggcacctccccgcaggtggagtggacggcccggcgtctcgtgtgggtgccttcggagcttcacgggttcgaggcggcggcgctgcgggacgaaggcgaggaggaggcggaggtggagctggcggagagcgggaggcggctgcgactgccgcgggaccagatccagcgcatgaacccgcccaagttcagcaaggccgaggacatggccgagctgacctgcctcaacgaggcctcggtcctgcacaacctccgggagcggtactactccggcctcatctacacgtactccggccttttctgtgtggtcatcaacccgtacaagcagcttcccatctacacagaagccattgtggagatgtaccggggcaagaagcgccacgaggtgccaccccacgtgtacgcagtgaccgagggggcctatcggagcatgctgcaggatcgtgaggaccagtccattctctgcactggagagtctggagctgggaagacggaaaacaccaagaaggtcatccagtacctcgcccacgtggcgtcgtctccaaagggcaggaaggagccgggtgtccccggtgagctggagcggcagctgcttcaggccaaccccatcctagaggcctttggcaatgccaagacagtgaagaatgacaactcctcccgattcggcaaattcatccgcatcaactttgatgttgccgggtacatcgtgggcgccaacattgagacctacctgctggagaagtcgcgggccatccgccaggccaaggacgagtgcagcttccacatcttctaccagctgctggggggcgctggagagcagctcaaagccgacctcctcctcgagccctgctcccactaccggttcctgaccaacgggccgtcatcctctcccggccaggagcgggaactcttccaggagacgctggagtcgctgcgggtcctgggattcagccacgaggaaatcatctccatgctgcggatggtctcagcagttctccagtttggcaacattgccttgaagagagaacggaacaccgatcaagccaccatgcctgacaacacagctgcacagaagctctgccgcctcttgggactgggggtgacggatttctcccgagccttgctcacccctcgcatcaaagttggccgagactatgtgcagaaagcccagactaaggaacaggctgacttcgcgctggaggccctggccaaggccacctacgagcgcctcttccgctggctggttctgcgcctcaaccgggccttggaccgcagcccccgccaaggcgcctccttcctgggcatcctggacatcgcgggctttgagatcttccagctgaactccttcgagcagctctgcatcaactacaccaacgagaagctgcagcagctcttcaaccacaccatgttcgtgctggagcaggaggagtaccagcgtgagggcatcccctggaccttcctcgactttggcctcgacctgcagccctgcatcgacctcatcgagcggccggccaacccccctggactcctggccctgctggatgaggagtgctggttcccgaaggccacagacaagtcgtttgtggagaaggtagcccaggagcagggcggccaccccaagttccagcggccgaggcacctgcgggatcaggccgacttcagtgttctccactacgcgggcaaggtcgactacaaggccaacgagtggctgatgaaaaacatggaccctctgaatgacaacgtcgcagccttgctccaccagagcacagaccggctgacggcagagatctggaaagacgtggagggcatcgtggggctggaacaggtgagcagcctgggcgacggcccaccaggtggccgcccccgtcggggtatgttccggacagtgggacagctctacaaggagtccctgagccgcctcatggccacactcagcaacaccaaccccagttttgtccgctgcattgtccccaaccacgagaagagggccgggaagctggagccacggctggtgctggaccagcttcgctgcaacggggtcctggagggcatccgcatctgtcgccagggcttccccaaccgcatcctcttccaggagttccggcagcgatacgagatcctgacacccaatgccatccccaagggcttcatggatgggaagcaggcctgtgaaaagatgatccaggcgctggaactggaccccaacctctaccgcgtgggacagagcaagatcttcttccgggctggggtcctggcccagctggaagaggagcgagacctgaaggtcaccgacatcatcgtctccttccaggcagctgcccggggatacctggctcgcagggccttccagaagcgccagcagcagcagagcgccctgagggtgatgcagcggaactgcgcggcctacctcaagctgagacactggcagtggtggcggctgtttaccaaggtgaagccactgctgcaggtgacgcggcaggatgaggtgctgcaggcacgggcccaggagctgcagaaagtgcaggagctacagcagcagagcgcccgcgaagttggggagctccagggccgagtggcacagctggaagaggagcgcgcccgcctggcagagcaattgcgagcagaggcagaactgtgtgcagaggccgaggagacgcgggggaggctggcagcccgcaagcaggagctggagctggtggtgtcagagctggaggctcgcgtgggcgaggaggaggagtgcagccgtcaaatgcaaaccgagaagaagaggctgcagcagcacatacaggagctagaggcccaccttgaggctgaggagggtgcgcggcagaagctgcagctggagaaggtgacgacagaggcaaaaatgaagaaatttgaagaggacctgctgctcctggaagaccagaattccaagctgagcaagagcggaagctgctggaagatcgtctggccgagttctcatcccaggcagctgaggaggaggagaaggtcaagagcctcaataagctacggctcaaatatgaggccacaatcgcagacatggagggaccgcctacggaaggaggagaagggtcgccaggagctggagaagctgaagcggaggctggatggggagagctcagagctgcaggagcagatggtggagcagcaacagcgggcagaggagctgcgggcccagctgggccggaaggaggaggagctgcaggctgccctggccagggcagaagacgagggtggggcccgggcccagctgctgaaatccctgcgggaggctcaagcagccctggccgaggcccaggaggacctggagtctgagcgtgtggccaggaccaaggcggagaagcagcgccgggacctgggcgaggagctggaggcgctgcggggcgagctggaggacacgctggactccaccaacgcacagcaggagctccggtccaagagggaacaggaggtgacggagctgaagaagactctggaggaggagactcgcatccacgaggcggcagtgcaggagctgaggcagcgccacggccaggccctgggggagctggcggagcagctggagcaggcccggaggggcaaaggtgcatgggagaagacccggctggccctggaggccgaggtgtccgagctgcgggcagaactgagcagcctgcagactgcacgtcaggagggtgagcagcggaggcgccgcctggagttacagctgcaggaggtgcagggccgggctggtgatggggagagggcacgagcggaggctgctgagaagctgcagcgagcccaggctgaactggagaatgtgtctggggcgctgaacgaggcactgctgagcagcaaggatgacgtcggcaagagcgtgcatgagctggaacgagcctgccgggtagcagaacaggcagccaatgatctgcgagcacaggtgacagaactggaggatgagctgacagcggccgaggatgccaagctgcgtctggaggtgactgtgcaggctctcaagactcagcatgagcgtgacctgcagggccgtgatgaggctggtgaagagaggcggaggcagctggccaagcagctgagagatgcagaggtggagcgggatgaggagcggaagcagcgcactctggccgtggctgcccgcaagaagctggagggagagctggaggagctgaaggctcagatggcctctgccggccagggcaaggaggaggcggtgaagcagcttcgcaagatgcaggcccagatgaaggagctatggcgggaggtggaggagacacgcacctcccgggaggagatcttctcccagaatcgggaaagtgaaaagcgcctcaagggcctggaggctgaggtgctgcggctgcaggaggaactggccgcctcggaccgtgctcggcggcaggcccagcaggaccgggatgagatggcagatgaggtggccaatggtaaccttagcaaggcagccattctggaggagaagcgtcagctggaggggcgcctggggcagttggaggaagagctggaggaggagcagagcaactcggagctgctcaatgaccgctaccgcaagctgctcctgcaggtagagtcactgaccacagagctgtcagctgagcgcagtttctcagccaaggcagagagcgggcggcagcagctggaacggcagatccaggagctacggggacgcctgggtgaggaggatgctggggcccgtgcccgccacaagatgaccattgctgcccttgagtctaagttggcccaggctgaggagcagctagagcaagagaccagagagcgcatcctctctggaaagctggtgcgcagagctgagaagcggcttaaagaggtggtgctccaggtggaggaggagcggagggtggctgaccagctccgggaccagctggagaagggaaaccttcgagtcaagcagctgaagcggcagctggaggaggccgaggaggaggcatcccgggctcaggccggccgccggaggctgcagcgtgagctggaagatgtcacagagtcggccgagtccatgaaccgtgaagtgaccacactgaggaaccggcttcgacgcggccccctcaccttcaccacccgcacggtgcgccaggtcttccgactagaggagggcgtggcatccgacgaggaggcagaggaagcacagcctgggtctgggccatccccggagcctgaggggtccccaccagcccacccccagtgaccctaccctgtccccagatgcactaacagatggggcccagcccccttcctccctggaccccacgggcccctgtcccaggaaccccgccctctgacttcttgccctttggaaatggtgcagcactctggcatttatcacccccacctgggtcccctgcaacctcccatcaaaggatgacccctaaacacagaggagcggggcaggcagggaggcaatgactggagctaccttgcttgttgggggactgggtacagttggcaagctgtgtttccatcagctccctgtcctcctttcttccctcgttattgatctatagacattaggaagggagtgagacggctcctccaccatcctcagccagtgcaacccattccctctgcttctctctctctctctctctctccctccctctccttccctaccctctcaccatctttcttggcctctctgagggtctctctgtgcatctttttaggaatctcgctctcactctctacgtagccactctccttcccccatttctgcgtccacccctgaactcctgagcgacagaagccccaggcctccaccagccttgaacccttgcaaaggggcaggacaaggggacccctctcactcctgctgctgcccatgctctgccctcccttctggttgctctgagggttcggagcttccctctgggactaaaggagtgtcctttaccctcccagcctccaggctctggcagaaataaactccaacccgactggacc

SEQ ID NO: 19256 - DNA, 6886 bp, Homo sapiens
  source 1..6886: mol_type = unassigned DNA
ctctttctccccaggccgaagcctcgggacggccctggaagccgaccatggcagccgtgaccatgtcggtgcccgggcggaaggcgccccccaggccgggcccagtgcccgaggcggcccagccgttcctgttcacgccccgcgggcccagcgcgggtggcgggcctggctcgggcacctccccgcaggtggagtggacggcccggcgtctcgtgtgggtgccttcggagcttcacgggttcgaggcggcggcgctgcgggacgaaggcgaggaggaggcggaggtggagctggcggagagcgggaggcggctgcgactgccgcgggaccagatccagcgcatgaacccgcccaagttcagcaaggccgaggacatggccgagctgacctgcctcaacgaggcctcggtcctgcacaacctccgggagcggtactactccggcctcatctacacgtactccggccttttctgtgtggtcatcaacccgtacaagcagcttcccatctacacagaagccattgtggagatgtaccggggcaagaagcgccacgaggtgccaccccacgtgtacgcagtgaccgagggggcctatcggagcatgctgcaggatcgtgaggaccagtccattctctgcactggagagtctggagctgggaagacggaaaacaccaagaaggtcatccagtacctcgcccacgtggcgtcgtctccaaagggcaggaaggagccgggtgtccccggtgagctggagcggcagctgcttcaggccaaccccatcctagaggcctttggcaatgccaagacagtgaagaatgacaactcctcccgattcggcaaattcatccgcatcaactttgatgttgccgggtacatcgtgggcgccaacattgagacctacctgctggagaagtcgcgggccatccgccaggccaaggacgagtgcagcttccacatcttctaccagctgctggggggcgctggagagcagctcaaagccgacctcctcctcgagccctgctcccactaccggttcctgaccaacgggccgtcatcctctcccggccaggagcgggaactcttccaggagacgctggagtcgctgcgggtcctgggattcagccacgaggaaatcatctccatgctgcggatggtctcagcagttctccagtttggcaacattgccttgaagagagaacggaacaccgatcaagccaccatgcctgacaacacagctgcacagaagctctgccgcctcttgggactgggggtgacggatttctcccgagccttgctcacccctcgcatcaaagttggccgagactatgtgcagaaagcccagactaaggaacaggctgacttcgcgctggaggccctggccaaggccacctacgagcgcctcttccgctggctggttctgcgcctcaaccgggccttggaccgcagcccccgccaaggcgcctccttcctgggcatcctggacatcgcgggctttgagatcttccagctgaactccttcgagcagctctgcatcaactacaccaacgagaagctgcagcagctcttcaaccacaccatgttcgtgctggagcaggaggagtaccagcgtgagggcatcccctggaccttcctcgactttggcctcgacctgcagccctgcatcgacctcatcgagcggccggccaacccccctggactcctggccctgctggatgaggagtgctggttcccgaaggccacagacaagtcgtttgtggagaaggtagcccaggagcagggcggccaccccaagttccagcggccgaggcacctgcgggatcaggccgacttcagtgttctccactacgcgggcaaggtcgactacaaggccaacgagtggctgatgaaaaacatggaccctctgaatgacaacgtcgcagccttgctccaccagagcacagaccggctgacggcagagatctggaaagacgaacatgggggcttccagcagttctctttccttggctccttcccaccgtcgcccccaggatctgcagagaggtgcagctctgctatttctccgccaggggtggagggcatcgtggggctggaacaggtgagcagcctgggcgacggcccaccaggtggccgcccccgtcggggtatgttccggacagtgggacagctctacaaggagtccctgagccgcctcatggccacactcagcaacaccaaccccagttttgtccgctgcattgtccccaaccacgagaagagggccgggaagctggagccacggctggtgctggaccagcttcgctgcaacggggtcctggagggcatccgcatctgtcgccagggcttccccaaccgcatcctcttccaggagttccggcagcgatacgagatcctgacacccaatgccatccccaagggcttcatggatgggaagcaggcctgtgaaaagatgatccaggcgctggaactggaccccaacctctaccgcgtgggacagagcaagatcttcttccgggctggggtcctggcccagctggaagaggagcgagacctgaaggtcaccgacatcatcgtctccttccaggcagctgcccggggatacctggctcgcagggccttccagaagcgccagcagcagcagagcgccctgagggtgatgcagcggaactgcgcggcctacctcaagctgagacactggcagtggtggcggctgtttaccaaggtgaagccactgctgcaggtgacgcggcaggatgaggtgctgcaggcacgggcccaggagctgcagaaagtgcaggagctacagcagcagagcgcccgcgaagttggggagctccagggccgagtggcacagctggaagaggagcgcgcccgcctggcagagcaattgcgagcagaggcagaactgtgtgcagaggccgaggagacgcgggggaggctggcagcccgcaagcaggagctggagctggtggtgtcagagctggaggctcgcgtgggcgaggaggaggagtgcagccgtcaaatgcaaaccgagaagaagaggctgcagcagcacatacaggagctagaggcccaccttgaggctgaggagggtgcgcggcagaagctgcagctggagaaggtgacgacagaggcaaaaatgaagaaatttgaagaggacctgctgctcctggaagaccagaattccaagctgagcaaggagcggaagctgctggaagatcgtctggccgagttctcatcccaggcagctgaggaggaggagaaggtcaagagcctcaataagctacggctcaaatatgaggccacaatcgcagacatggaggaccgcctacggaaggaggagaagggtcgccaggagctggagaagctgaagcggaggctggatggggagagctcagagctgcaggagcagatggtggagcagcaacagcgggcagaggagctgcgggcccagctgggccggaaggaggaggagctgcaggctgccctggccagggcagaagacgagggtggggcccgggcccagctgctgaaatccctgcgggaggctcaagcagccctggccgaggcccaggaggacctggagtctgagcgtgtggccaggaccaaggcggagaagcagcgccgggacctgggcgaggagctggaggcgctgcggggcgagctggaggacacgctggactccaccaacgcacagcaggagctccggtccaagagggaacaggaggtgacggagctgaagaagactctggaggaggagactcgcatccacgaggcggcagtgcaggagctgaggcagcgccacggccaggccctgggggagctggcggagcagctggagcaggcccggaggggcaaaggtgcatgggagaagacccggctggccctggaggccgaggtgtccgagctgcgggcagaactgagcagcctgcagactgcacgtcaggagggtgagcagcggaggcgccgcctggagttacagctgcaggaggtgcagggccgggctggtgatggggagagggcacgagcggaggctgctgagaagctgcagcgagcccaggctgaactggagaatgtgtctggggcgctgaacgaggctgagtccaaaaccatccgtcttagcaaggagctgagcagcacagaagcccagctgcacgatgcccaggagctgctgcaggaggagaccagggcgaaattggccttggggtcccgggtgcgagccatggaggctgaggcagccgggctgcgtgagcagctggaggaggaggcagctgccagggaacgggcgggccgtgaactgcagactgcccaggcccagctttccgagtggcggcggcgccaggaggaggaggcaggggcactggaggcaggggaggaggcacggcgccgggcagcccgggaggccgaggccctgacccagcgcctggcagaaaagacagagaccgtggatcggctggagcggggccgccgccggctgcagcaggagctggacgacgccaccatggacctggagcagcagcggcagcttgtgagcaccctggagaagaagcagcgcaagtttgaccagcttctggcagaggagaaggcagctgtacttcgggcagtggaggaacgtgagcgggccgaggcagagggccgggagcgtgaggctcgggccctgtcactgacacgggcactggaggaggagcaggaggcacgtgaggagctggagcggcagaaccgggccctgcgggctgagctggaggcactgctgagcagcaaggatgacgtcggcaagagcgtgcatgagctggaacgagcctgccgggtagcagaacaggcagccaatgatctgcgagcacaggtgacagaactggaggatgagctgacagcggccgaggatgccaagctgcgtctggaggtgactgtgcaggctctcaagactcagcatgagcgtgacctgcagggccgtgatgaggctggtgaagagaggcggaggcagctggccaagcagctgagagatgcagaggtggagcgggatgaggagcggaagcagcgcactctggccgtggctgcccgcaagaagctggagggagagctggaggagctgaaggctcagatggcctctgccggccagggcaaggaggaggcggtgaagcagcttcgcaagatgcaggcccagatgaaggagctatggcgggaggtggaggagacacgcacctcccgggaggagatcttctcccagaatcgggaaagtgaaaagcgcctcaagggcctggaggctgaggtgctgcggctgcaggaggaactggccgcctcggaccgtgctcggcggcaggcccagcaggaccgggatgagatggcagatgaggtggccaatggtaaccttagcaaggcagccattctggaggagaagcgtcagctggaggggcgcctggggcagttggaggaagagctggaggaggagcagagcaactcggagctgctcaatgaccgctaccgcaagctgctcctgcaggtagagtcactgaccacagagctgtcagctgagcgcagtttctcagccaaggcagagagcgggcggcagcagctggaacggcagatccaggagctacggggacgcctgggtgaggaggatgctggggcccgtgcccgccacaagatgaccattgctgcccttgagtctaagttggcccaggctgaggagcagctagagcaagagaccagagagcgcatcctctctggaaagctggtgcgcagagctgagaagcggcttaaagaggtggtgctccaggtggaggaggagcggagggtggctgaccagctccgggaccagctggagaagggaaaccttcgagtcaagcagctgaagcggcagctggaggaggccgaggaggaggcatcccgggctcaggccggccgccggaggctgcagcgtgagctggaagatgtcacagagtcggccgagtccatgaaccgtgaagtgaccacactgaggaaccggcttcgacgcggccccctcaccttcaccacccgcacggtgcgccaggtcttccgactagaggagggcgtggcatccgacgaggaggcagaggaagcacagcctgggtctgggccatccccggagcctgaggggtccccaccagcccacccccagtgaccctaccctgtccccagatgcactaacagatggggcccagcccccttcctccctggaccccacgggcccctgtcccaggaaccccgccctctgacttcttgccctttggaaatggtgcagcactctggcatttatcacccccacctgggtcccctgcaacctcccatcaaaggatgacccctaaacacagaggagcggggcaggcagggaggcaatgactggagctaccttgcttgttgggggactgggtacagttggcaagctgtgtttccatcagctccctgtcctcctttcttccctcgttattgatctatagacattaggaagggagtgagacggctcctccaccatcctcagccagtgcaacccattccctctgcttctctctctctctctctctctccctccctctccttccctaccctctcaccatctttcttggcctctctgagggtctctctgtgcatctttttaggaatctcgctctcactctctacgtagccactctccttcccccatttctgcgtccacccctgaactcctgagcgacagaagccccaggcctccaccagccttgaacccttgcaaaggggcaggacaaggggacccctctcactcctgctgctgcccatgctctgccctcccttctggttgctctgagggttcggagcttccctctgggactaaaggagtgtcctttaccctcccagcctccaggctctggcagaaataaactccaacccgactggacc

SEQ ID NO: 19257 - DNA, 6811 bp, Homo sapiens
  source 1..6811: mol_type = unassigned DNA
ctctttctccccaggccgaagcctcgggacggccctggaagccgaccatggcagccgtgaccatgtcggtgcccgggcggaaggcgccccccaggccgggcccagtgcccgaggcggcccagccgttcctgttcacgccccgcgggcccagcgcgggtggcgggcctggctcgggcacctccccgcaggtggagtggacggcccggcgtctcgtgtgggtgccttcggagcttcacgggttcgaggcggcggcgctgcgggacgaaggcgaggaggaggcggaggtggagctggcggagagcgggaggcggctgcgactgccgcgggaccagatccagcgcatgaacccgcccaagttcagcaaggccgaggacatggccgagctgacctgcctcaacgaggcctcggtcctgcacaacctccgggagcggtactactccggcctcatctacacgtactccggccttttctgtgtggtcatcaacccgtacaagcagcttcccatctacacagaagccattgtggagatgtaccggggcaagaagcgccacgaggtgccaccccacgtgtacgcagtgaccgagggggcctatcggagcatgctgcaggatcgtgaggaccagtccattctctgcactggagagtctggagctgggaagacggaaaacaccaagaaggtcatccagtacctcgcccacgtggcgtcgtctccaaagggcaggaaggagccgggtgtccccgcctccgtcagcaccgtgtcttatggtgagctggagcggcagctgcttcaggccaaccccatcctagaggcctttggcaatgccaagacagtgaagaatgacaactcctcccgattcggcaaattcatccgcatcaactttgatgttgccgggtacatcgtgggcgccaacattgagacctacctgctggagaagtcgcgggccatccgccaggccaaggacgagtgcagcttccacatcttctaccagctgctggggggcgctggagagcagctcaaagccgacctcctcctcgagccctgctcccactaccggttcctgaccaacgggccgtcatcctctcccggccaggagcgggaactcttccaggagacgctggagtcgctgcgggtcctgggattcagccacgaggaaatcatctccatgctgcggatggtctcagcagttctccagtttggcaacattgccttgaagagagaacggaacaccgatcaagccaccatgcctgacaacacagctgcacagaagctctgccgcctcttgggactgggggtgacggatttctcccgagccttgctcacccctcgcatcaaagttggccgagactatgtgcagaaagcccagactaaggaacaggctgacttcgcgctggaggccctggccaaggccacctacgagcgcctcttccgctggctggttctgcgcctcaaccgggccttggaccgcagcccccgccaaggcgcctccttcctgggcatcctggacatcgcgggctttgagatcttccagctgaactccttcgagcagctctgcatcaactacaccaacgagaagctgcagcagctcttcaaccacaccatgttcgtgctggagcaggaggagtaccagcgtgagggcatcccctggaccttcctcgactttggcctcgacctgcagccctgcatcgacctcatcgagcggccggccaacccccctggactcctggccctgctggatgaggagtgctggttcccgaaggccacagacaagtcgtttgtggagaaggtagcccaggagcagggcggccaccccaagttccagcggccgaggcacctgcgggatcaggccgacttcagtgttctccactacgcgggcaaggtcgactacaaggccaacgagtggctgatgaaaaacatggaccctctgaatgacaacgtcgcagccttgctccaccagagcacagaccggctgacggcagagatctggaaagacgtggagggcatcgtggggctggaacaggtgagcagcctgggcgacggcccaccaggtggccgcccccgtcggggtatgttccggacagtgggacagctctacaaggagtccctgagccgcctcatggccacactcagcaacaccaaccccagttttgtccgctgcattgtccccaaccacgagaagagggccgggaagctggagccacggctggtgctggaccagcttcgctgcaacggggtcctggagggcatccgcatctgtcgccagggcttccccaaccgcatcctcttccaggagttccggcagcgatacgagatcctgacacccaatgccatccccaagggcttcatggatgggaagcaggcctgtgaaaagatgatccaggcgctggaactggaccccaacctctaccgcgtgggacagagcaagatcttcttccgggctggggtcctggcccagctggaagaggagcgagacctgaaggtcaccgacatcatcgtctccttccaggcagctgcccggggatacctggctcgcagggccttccagaagcgccagcagcagcagagcgccctgagggtgatgcagcggaactgcgcggcctacctcaagctgagacactggcagtggtggcggctgtttaccaaggtgaagccactgctgcaggtgacgcggcaggatgaggtgctgcaggcacgggcccaggagctgcagaaagtgcaggagctacagcagcagagcgcccgcgaagttggggagctccagggccgagtggcacagctggaagaggagcgcgcccgcctggcagagcaattgcgagcagaggcagaactgtgtgcagaggccgaggagacgcgggggaggctggcagcccgcaagcaggagctggagctggtggtgtcagagctggaggctcgcgtgggcgaggaggaggagtgcagccgtcaaatgcaaaccgagaagaagaggctgcagcagcacatacaggagctagaggcccaccttgaggctgaggagggtgcgcggcagaagctgcagctggagaaggtgacgacagaggcaaaaatgaagaaatttgaagaggacctgctgctcctggaagaccagaattccaagctgagcaaggagcggaagctgctggaagatcgtctggccgagttctcatcccaggcagctgaggaggaggagaaggtcaagagcctcaataagctacggctcaaatatgaggccacaatcgcagacatggaggaccgcctacggaaggaggagaagggtcgccaggagctggagaagctgaagcggaggctggatggggagagctcagagctgcaggagcagatggtggagcagcaacagcgggcagaggagctgcgggcccagctgggccggaaggaggaggagctgcaggctgccctggccagggcagaagacgagggtggggcccgggcccagctgctgaaatccctgcgggaggctcaagcagccctggccgaggcccaggaggacctggagtctgagcgtgtggccaggaccaaggcggagaagcagcgccgggacctgggcgaggagctggaggcgctgcggggcgagctggaggacacgctggactccaccaacgcacagcaggagctccggtccaagagggaacaggaggtgacggagctgaagaagactctggaggaggagactcgcatccacgaggcggcagtgcaggagctgaggcagcgccacggccaggccctgggggagctggcggagcagctggagcaggcccggaggggcaaaggtgcatgggagaagacccggctggccctggaggccgaggtgtccgagctgcgggcagaactgagcagcctgcagactgcacgtcaggagggtgagcagcggaggcgccgcctggagttacagctgcaggaggtgcagggccgggctggtgatggggagagggcacgagcggaggctgctgagaagctgcagcgagcccaggctgaactggagaatgtgtctggggcgctgaacgaggctgagtccaaaaccatccgtcttagcaaggagctgagcagcacagaagcccagctgcacgatgcccaggagctgctgcaggaggagaccagggcgaaattggccttggggtcccgggtgcgagccatggaggctgaggcagccgggctgcgtgagcagctggaggaggaggcagctgccagggaacgggcgggccgtgaactgcagactgcccaggcccagctttccgagtggcggcggcgccaggaggaggaggcaggggcactggaggcaggggaggaggcacggcgccgggcagcccgggaggccgaggccctgacccagcgcctggcagaaaagacagagaccgtggatcggctggagcggggccgccgccggctgcagcaggagctggacgacgccaccatggacctggagcagcagcggcagcttgtgagcaccctggagaagaagcagcgcaagtttgaccagcttctggcagaggagaaggcagctgtacttcgggcagtggaggaacgtgagcgggccgaggcagagggccgggagcgtgaggctcgggccctgtcactgacacgggcactggaggaggagcaggaggcacgtgaggagctggagcggcagaaccgggccctgcgggctgagctggaggcactgctgagcagcaaggatgacgtcggcaagagcgtgcatgagctggaacgagcctgccgggtagcagaacaggcagccaatgatctgcgagcacaggtgacagaactggaggatgagctgacagcggccgaggatgccaagctgcgtctggaggtgactgtgcaggctctcaagactcagcatgagcgtgacctgcagggccgtgatgaggctggtgaagagaggcggaggcagctggccaagcagctgagagatgcagaggtggagcgggatgaggagcggaagcagcgcactctggccgtggctgcccgcaagaagctggagggagagctggaggagctgaaggctcagatggcctctgccggccagggcaaggaggaggcggtgaagcagcttcgcaagatgcaggcccagatgaaggagctatggcgggaggtggaggagacacgcacctcccgggaggagatcttctcccagaatcgggaaagtgaaaagcgcctcaagggcctggaggctgaggtgctgcggctgcaggaggaactggccgcctcggaccgtgctcggcggcaggcccagcaggaccgggatgagatggcagatgaggtggccaatggtaaccttagcaaggcagccattctggaggagaagcgtcagctggaggggcgcctggggcagttggaggaagagctggaggaggagcagagcaactcggagctgctcaatgaccgctaccgcaagctgctcctgcaggtagagtcactgaccacagagctgtcagctgagcgcagtttctcagccaaggcagagagcgggcggcagcagctggaacggcagatccaggagctacggggacgcctgggtgaggaggatgctggggcccgtgcccgccacaagatgaccattgctgcccttgagtctaagttggcccaggctgaggagcagctagagcaagagaccagagagcgcatcctctctggaaagctggtgcgcagagctgagaagcggcttaaagaggtggtgctccaggtggaggaggagcggagggtggctgaccagctccgggaccagctggagaagggaaaccttcgagtcaagcagctgaagcggcagctggaggaggccgaggaggaggcatcccgggctcaggccggccgccggaggctgcagcgtgagctggaagatgtcacagagtcggccgagtccatgaaccgtgaagtgaccacactgaggaaccggcttcgacgcggccccctcaccttcaccacccgcacggtgcgccaggtcttccgactagaggagggcgtggcatccgacgaggaggcagaggaagcacagcctgggtctgggccatccccggagcctgaggggtccccaccagcccacccccagtgaccctaccctgtccccagatgcactaacagatggggcccagcccccttcctccctggaccccacgggcccctgtcccaggaaccccgccctctgacttcttgccctttggaaatggtgcagcactctggcatttatcacccccacctgggtcccctgcaacctcccatcaaaggatgacccctaaacacagaggagcggggcaggcagggaggcaatgactggagctaccttgcttgttgggggactgggtacagttggcaagctgtgtttccatcagctccctgtcctcctttcttccctcgttattgatctatagacattaggaagggagtgagacggctcctccaccatcctcagccagtgcaacccattccctctgcttctctctctctctctctctctccctccctctccttccctaccctctcaccatctttcttggcctctctgagggtctctctgtgcatctttttaggaatctcgctctcactctctacgtagccactctccttcccccatttctgcgtccacccctgaactcctgagcgacagaagccccaggcctccaccagccttgaacccttgcaaaggggcaggacaaggggacccctctcactcctgctgctgcccatgctctgccctcccttctggttgctctgagggttcggagcttccctctgggactaaaggagtgtcctttaccctcccagcctccaggctctggcagaaataaactccaacccgactggacc

SEQ ID NO: 19258 - DNA, 6910 bp, Homo sapiens
  source 1..6910: mol_type = unassigned DNA
ctctttctccccaggccgaagcctcgggacggccctggaagccgaccatggcagccgtgaccatgtcggtgcccgggcggaaggcgccccccaggccgggcccagtgcccgaggcggcccagccgttcctgttcacgccccgcgggcccagcgcgggtggcgggcctggctcgggcacctccccgcaggtggagtggacggcccggcgtctcgtgtgggtgccttcggagcttcacgggttcgaggcggcggcgctgcgggacgaaggcgaggaggaggcggaggtggagctggcggagagcgggaggcggctgcgactgccgcgggaccagatccagcgcatgaacccgcccaagttcagcaaggccgaggacatggccgagctgacctgcctcaacgaggcctcggtcctgcacaacctccgggagcggtactactccggcctcatctacacgtactccggccttttctgtgtggtcatcaacccgtacaagcagcttcccatctacacagaagccattgtggagatgtaccggggcaagaagcgccacgaggtgccaccccacgtgtacgcagtgaccgagggggcctatcggagcatgctgcaggatcgtgaggaccagtccattctctgcactggagagtctggagctgggaagacggaaaacaccaagaaggtcatccagtacctcgcccacgtggcgtcgtctccaaagggcaggaaggagccgggtgtccccgtaagcaaccccgccttgggctggggtgagctggagcggcagctgcttcaggccaaccccatcctagaggcctttggcaatgccaagacagtgaagaatgacaactcctcccgattcggcaaattcatccgcatcaactttgatgttgccgggtacatcgtgggcgccaacattgagacctacctgctggagaagtcgcgggccatccgccaggccaaggacgagtgcagcttccacatcttctaccagctgctggggggcgctggagagcagctcaaagccgacctcctcctcgagccctgctcccactaccggttcctgaccaacgggccgtcatcctctcccggccaggagcgggaactcttccaggagacgctggagtcgctgcgggtcctgggattcagccacgaggaaatcatctccatgctgcggatggtctcagcagttctccagtttggcaacattgccttgaagagagaacggaacaccgatcaagccaccatgcctgacaacacagctgcacagaagctctgccgcctcttgggactgggggtgacggatttctcccgagccttgctcacccctcgcatcaaagttggccgagactatgtgcagaaagcccagactaaggaacaggctgacttcgcgctggaggccctggccaaggccacctacgagcgcctcttccgctggctggttctgcgcctcaaccgggccttggaccgcagcccccgccaaggcgcctccttcctgggcatcctggacatcgcgggctttgagatcttccagctgaactccttcgagcagctctgcatcaactacaccaacgagaagctgcagcagctcttcaaccacaccatgttcgtgctggagcaggaggagtaccagcgtgagggcatcccctggaccttcctcgactttggcctcgacctgcagccctgcatcgacctcatcgagcggccggccaacccccctggactcctggccctgctggatgaggagtgctggttcccgaaggccacagacaagtcgtttgtggagaaggtagcccaggagcagggcggccaccccaagttccagcggccgaggcacctgcgggatcaggccgacttcagtgttctccactacgcgggcaaggtcgactacaaggccaacgagtggctgatgaaaaacatggaccctctgaatgacaacgtcgcagccttgctccaccagagcacagaccggctgacggcagagatctggaaagacgaacatgggggcttccagcagttctctttccttggctccttcccaccgtcgcccccaggatctgcagagaggtgcagctctgctatttctccgccaggggtggagggcatcgtggggctggaacaggtgagcagcctgggcgacggcccaccaggtggccgcccccgtcggggtatgttccggacagtgggacagctctacaaggagtccctgagccgcctcatggccacactcagcaacaccaaccccagttttgtccgctgcattgtccccaaccacgagaagagggccgggaagctggagccacggctggtgctggaccagcttcgctgcaacggggtcctggagggcatccgcatctgtcgccagggcttccccaaccgcatcctcttccaggagttccggcagcgatacgagatcctgacacccaatgccatccccaagggcttcatggatgggaagcaggcctgtgaaaagatgatccaggcgctggaactggaccccaacctctaccgcgtgggacagagcaagatcttcttccgggctggggtcctggcccagctggaagaggagcgagacctgaaggtcaccgacatcatcgtctccttccaggcagctgcccggggatacctggctcgcagggccttccagaagcgccagcagcagcagagcgccctgagggtgatgcagcggaactgcgcggcctacctcaagctgagacactggcagtggtggcggctgtttaccaaggtgaagccactgctgcaggtgacgcggcaggatgaggtgctgcaggcacgggcccaggagctgcagaaagtgcaggagctacagcagcagagcgcccgcgaagttggggagctccagggccgagtggcacagctggaagaggagcgcgcccgcctggcagagcaattgcgagcagaggcagaactgtgtgcagaggccgaggagacgcgggggaggctggcagcccgcaagcaggagctggagctggtggtgtcagagctggaggctcgcgtgggcgaggaggaggagtgcagccgtcaaatgcaaaccgagaagaagaggctgcagcagcacatacaggagctagaggcccaccttgaggctgaggagggtgcgcggcagaagctgcagctggagaaggtgacgacagaggcaaaaatgaagaaatttgaagaggacctgctgctcctggaagaccagaattccaagctgagcaaggagcggaagctgctggaagatcgtctggccgagttctcatcccaggcagctgaggaggaggagaaggtcaagagcctcaataagctacggctcaaatatgaggccacaatcgcagacatggaggaccgcctacggaaggaggagaagggtcgccaggagctggagaagctgaagcggaggctggatggggagagctcagagctgcaggagcagatggtggagcagcaacagcgggcagaggagctgcgggcccagctgggccggaaggaggaggagctgcaggctgccctggccagggcagaagacgagggtggggcccgggcccagctgctgaaatccctgcgggaggctcaagcagccctggccgaggcccaggaggacctggagtctgagcgtgtggccaggaccaaggcggagaagcagcgccgggacctgggcgaggagctggaggcgctgcggggcgagctggaggacacgctggactccaccaacgcacagcaggagctccggtccaagagggaacaggaggtgacggagctgaagaagactctggaggaggagactcgcatccacgaggcggcagtgcaggagctgaggcagcgccacggccaggccctgggggagctggcggagcagctggagcaggcccggaggggcaaaggtgcatgggagaagacccggctggccctggaggccgaggtgtccgagctgcgggcagaactgagcagcctgcagactgcacgtcaggagggtgagcagcggaggcgccgcctggagttacagctgcaggaggtgcagggccgggctggtgatggggagagggcacgagcggaggctgctgagaagctgcagcgagcccaggctgaactggagaatgtgtctggggcgctgaacgaggctgagtccaaaaccatccgtcttagcaaggagctgagcagcacagaagcccagctgcacgatgcccaggagctgctgcaggaggagaccagggcgaaattggccttggggtcccgggtgcgagccatggaggctgaggcagccgggctgcgtgagcagctggaggaggaggcagctgccagggaacgggcgggccgtgaactgcagactgcccaggcccagctttccgagtggcggcggcgccaggaggaggaggcaggggcactggaggcaggggaggaggcacggcgccgggcagcccgggaggccgaggccctgacccagcgcctggcagaaaagacagagaccgtggatcggctggagcggggccgccgccggctgcagcaggagctggacgacgccaccatggacctggagcagcagcggcagcttgtgagcaccctggagaagaagcagcgcaagtttgaccagcttctggcagaggagaaggcagctgtacttcgggcagtggaggaacgtgagcgggccgaggcagagggccgggagcgtgaggctcgggccctgtcactgacacgggcactggaggaggagcaggaggcacgtgaggagctggagcggcagaaccgggccctgcgggctgagctggaggcactgctgagcagcaaggatgacgtcggcaagagcgtgcatgagctggaacgagcctgccgggtagcagaacaggcagccaatgatctgcgagcacaggtgacagaactggaggatgagctgacagcggccgaggatgccaagctgcgtctggaggtgactgtgcaggctctcaagactcagcatgagcgtgacctgcagggccgtgatgaggctggtgaagagaggcggaggcagctggccaagcagctgagagatgcagaggtggagcgggatgaggagcggaagcagcgcactctggccgtggctgcccgcaagaagctggagggagagctggaggagctgaaggctcagatggcctctgccggccagggcaaggaggaggcggtgaagcagcttcgcaagatgcaggcccagatgaaggagctatggcgggaggtggaggagacacgcacctcccgggaggagatcttctcccagaatcgggaaagtgaaaagcgcctcaagggcctggaggctgaggtgctgcggctgcaggaggaactggccgcctcggaccgtgctcggcggcaggcccagcaggaccgggatgagatggcagatgaggtggccaatggtaaccttagcaaggcagccattctggaggagaagcgtcagctggaggggcgcctggggcagttggaggaagagctggaggaggagcagagcaactcggagctgctcaatgaccgctaccgcaagctgctcctgcaggtagagtcactgaccacagagctgtcagctgagcgcagtttctcagccaaggcagagagcgggcggcagcagctggaacggcagatccaggagctacggggacgcctgggtgaggaggatgctggggcccgtgcccgccacaagatgaccattgctgcccttgagtctaagttggcccaggctgaggagcagctagagcaagagaccagagagcgcatcctctctggaaagctggtgcgcagagctgagaagcggcttaaagaggtggtgctccaggtggaggaggagcggagggtggctgaccagctccgggaccagctggagaagggaaaccttcgagtcaagcagctgaagcggcagctggaggaggccgaggaggaggcatcccgggctcaggccggccgccggaggctgcagcgtgagctggaagatgtcacagagtcggccgagtccatgaaccgtgaagtgaccacactgaggaaccggcttcgacgcggccccctcaccttcaccacccgcacggtgcgccaggtcttccgactagaggagggcgtggcatccgacgaggaggcagaggaagcacagcctgggtctgggccatccccggagcctgaggggtccccaccagcccacccccagtgaccctaccctgtccccagatgcactaacagatggggcccagcccccttcctccctggaccccacgggcccctgtcccaggaaccccgccctctgacttcttgccctttggaaatggtgcagcactctggcatttatcacccccacctgggtcccctgcaacctcccatcaaaggatgacccctaaacacagaggagcggggcaggcagggaggcaatgactggagctaccttgcttgttgggggactgggtacagttggcaagctgtgtttccatcagctccctgtcctcctttcttccctcgttattgatctatagacattaggaagggagtgagacggctcctccaccatcctcagccagtgcaacccattccctctgcttctctctctctctctctctctccctccctctccttccctaccctctcaccatctttcttggcctctctgagggtctctctgtgcatctttttaggaatctcgctctcactctctacgtagccactctccttcccccatttctgcgtccacccctgaactcctgagcgacagaagccccaggcctccaccagccttgaacccttgcaaaggggcaggacaaggggacccctctcactcctgctgctgcccatgctctgccctcccttctggttgctctgagggttcggagcttccctctgggactaaaggagtgtcctttaccctcccagcctccaggctctggcagaaataaactccaacccgactggacc

SEQ ID NO: 19259 - DNA, 7074 bp, Homo sapiens
  source 1..7074: mol_type = unassigned DNA
catttctacttcatatgatcattttaattgtatttacctcatcttaccaaaaagatcatggttgaatcttgcctactcacgtttagggcctttttttggtggattgctttaataaagatggatctgtcagaccttggagaagccgcagccttcctcagaagaagtgaagctgagctgcttctactacaggccacagccttggatgggaagaagaaatgctggattcctgatggtgagaatgcttatatcgaggctgaggtaaaagggagtgaagatgatggaacagtaattgttgagacagcagatggagagagtctgagcataaaggaggacaaaatccagcagatgaatcctccagagtttgaaatgattgaagacatggcaatgctgactcacctcaatgaggcatccgtgctgcataccctgaagcggcgctatggccagtggatgatctatacatattcaggtctcttctgtgtgaccataaacccttacaaatggcttcccgtgtatcagaaagaagtcatggccgcctacaaagggaagaggcgatcagaggctccccctcacatctttgctgttgccaataacgcctttcaggacatgcttcacaatcgagaaaatcagtctatactcttcacaggagaatctggtgctggaaagactgtgaacagcaaacatattatccagtattttgccaccatagcagccatgattgaatccaggaaaaagcagggggcgttagaagatcaaatcatgcaagcgaatactatcttggaagcatttggaaatgctaaaaccctgagaaatgacaactcctctcgttttggcaaattcatcaggatgcactttggtgccagaggcatgctgtcatctgtggacattgatatctatttgcttgaaaagtccagggtgattttccagcaggctggagagaggaactaccacatattctatcaaattctatctggacaaaaagagcttcatgacctgctcctggtatctgcaaatccctcagacttccacttttgctcctgtggagcagttactgtggagagcttggatgatgctgaagaattgctggccacagaacaagccatggacatcttgggctttcttcctgatgagaagtatggatgctataaactcactggagccatcatgcactttggaaatatgaaatttaaacagaaacctagagaagagcaactggaagcagatggcacagaaaatgctgacaaagctgctttcctcatgggcattaactcctctgagttggtaaagtgcttgatccatcctagaatcaaagttggtaacgaatatgttaccagaggtcaaactatagaacaggtaacctgtgctgtcggtgccctgtccaagtcaatgtatgaaaggatgtttaagtggctagtggcacggatcaacagggccctggatgccaagctgtcaaggcagttcttcattggcattcttgacatcactggttttgaaatccttgagtataatagccttgagcaactttgcattaattttaccaatgaaaaattacaacaattcttcaattggcacatgtttgttctggagcaagaggaatataagaaagaaagcattgaatgggtgtctattggctttggtctggatttgcaagcttgcatagatctcattgagaagccaatgggcatcctttccatccttgaagaagagtgtatgtttcctaaggctacagacctgactttcaagaccaaactctttgacaaccattttggaaagtcggttcatctccagaagcccaagcctgataagaagaaatttgaagctcattttgaacttgtccattatgcaggagtggtaccttataatatcagtggttggctggaaaagaacaaagacctccttaatgaaacagtggtagctgtatttcagaagtcttccaacagactcctggcgagcctttttgaaaattacatgagtactgacagtgctataccatttggggagaagaaacgaaagaaaggagcttcattccaaacggttgcatctctgcataaagaaaacctgaataaattgatgactaatctgaaatcaacagcacctcattttgtgagatgcataaatcccaatgtgaacaaaataccaggtatactggacccttacttggttctacagcagttgcgctgtaatggtgtcttggaagggactaggatatgccgtgaaggttttccaaaccgactgcagtatgctgattttaaacaaaggtactgcattctgaatccaaggacctttccaaagagcaagtttgtgagcagcagaaaagcagctgaagaattacttggctccttggagatagaccatacccagtaccgatttggaatcactaaggtgttttttaaagctgggtttctgggccaactggaagcaataagagatgagagactatctaaagtcttcacattgttccaagccagagcacagggcaaactgatgcgaatcaaattccagaagattctggaagaaagggatgcacttattttgatccaatggaacataagagctttcatggctgtgaagaactggccctggatgaggctcttcttcaagatcaagcctcttgttaaatcttcagaagtaggagaagaagtagctggactgaaggaagagtgtgcacaattacagaaagccttggagaaatcagagtttcagagggaggaactgaaagcaaagcaagtatccctcactcaggaaaaaaatgacctgattcttcagcttcaggctgagcaagagacactggcaaatgttgaagagcagtgcgagtggctgattaaatccaagatccagctggaggccagagtaaaggagctgtcggagagggtggaggaagaagaggagataaattctgagctgactgccagggggcggaaactcgaagatgaatgttttgagttgaagaaagaaatcgatgacctggaaacaatgttggtgaagtcagagaaggagaagcgtactacagagcacaaggtcaagaacttgactgaggaagtagagtttctaaatgaggatatcagcaaacttaacagagcagccaaggttgtgcaggaggcccatcagcagaccctggatgacctgcacatggaggaggagaagctcagcagcctgagcaaagcaaatctgaagctggaacagcaagttgatgagcttgagggtgcccttgagcaggagagaaaagcgagaatgaactgtgaaagggaactgcacaaactggagggcaatttaaagctgaatcgggaaagtatggagaacctggaaagcagccagcgacacctggcagaagagctgaggaaaaaagaattagaattgagtcagatgaattcaaaagtggagaatgagaaaggcctggtagctcagcttcagaagacggttaaagagcttcagactcaaataaaggatttgaaagagaaactagaagctgaaaggaccactcgagccaagatggaaagggagagagctgacctcacccaagacctggctgacttgaatgagaggctggaggaggtaggaggatccagtttggctcagctggaaataactaagaaacaggaaaccaaattccagaagctgcaccgagacatggaagaggccactctgcactttgagacaacttctgcatctttgaagaagagacatgcagacagcctggctgagctcgagggccaggtagaaaatctacagcaggtcaagcagaaactggaaaaagacaagagtgacttgcagctagaagtagatgacctcctgacccgtgttgagcagatgacaagagctaaggcaaatgctgagaaactctgtactctatatgaagagcgcttgcatgaagcaactgcaaagctagataaggtgactcagttggcaaatgacctggcagcacaaaagacaaagctgtggagtgagagtggcgagttcctacggaggcttgaagagaaggaggctctgataaaccaactttccagggaaaagagcaacttcactcggcagattgaagacctgagagggcagctggaaaaggagaccaaatcccagagtgccctggcccatgccctgcagaaggctcagcgtgactgtgaccttctacgagagcagtatgaggaagaacaagaggtcaaggctgagctgcaccggaccttatccaaagtcaatgctgaaatggtgcaatggagaatgaagtatgaaaacaatgtcatccagagaacagaagacttggaggatgccaagaaggaactggcaattagattgcaggaggcagccgaagccatgggggtggccaatgccagaaatgcctccttggagagagccaggcaccagctgcagctggagctcggggacgccctgtctgacctcgggaaggtccgctctgcagcagccaggctggaccagaagcagctgcagtctggcaaggcccttgccgactggaagcagaagcacgaggagtcccaggcgttgctggatgcctctcagaaggaagttcaggctctcagtacagagctcctcaagctcaagaacacctatgaggagagcatcgtgggccaggagacactcaggagggagaacaagaacctccaagaagagatttctaatctgacaaaccaggttagagaagggaccaagaacttaactgaaatggaaaaggtcaagaaactaattgaagaagagaagacagaagtccaggtgacactggaagaaacagagggagccctggaacgtaatgaaagcaagattcttcatttccagcttgaactcttggaagctaaagcagaacttgaaagaaagctttcagagaaagatgaagaaatagaaaattttaggaggaagcagcagtgtaccattgactccctgcagtctagtctggattctgaagctaagagcagaattgaggttacccggctgaagaagaagatggaagaggacctcaatgagatggaactccagcttagctgtgccaaccggcaggtgtcagaagcaaccaaatccctgggccagcttcagattcaaatcaaggaccttcaaatgcagctggatgacagcacacaactgaacagtgatctgaaggagcaggtggctgtggctgagcggcgcaactctcttcttcagtctgaactagaggatctaaggtccctgcaagagcagacagagcgtggccgcaggctgtcagaagaagagctcctggaagcaacagaaagaatcaatcttttctatacccagaacacaagcctcctcagccagaagaagaaactggaggctgatgttgcccggatgcagaaagaagctgaagaggtggtgcaggagtgtcaaaatgcagaagagaaggccaagaaggcagccattgaggcagcaaacttgtcagaagaactgaagaagaagcaagacaccattgcccacttggaaaggacaagagaaaatatggagcagacaattacagacttacagaaaaggctggctgaagctgaacagatggccctgatggggagtagaaagcaaatccagaaactagaatccagggttcgtgaactggaaggtgaactggagggtgaaatccgtcgcagtgcagaggcccagaggggagcccgcagacttgagcgatgcatcaaagagctgacctatcaggcagaggaagacaagaagaatctgagcaggatgcaaactcagatggataaacttcagctaaaagtgcaaaattacaagcagcaagtcgaggtggcggaaacacaagccaatcaatacctttccaagtataagaaacagcaacatgagttgaatgaagtgaaggaaagggcagaggtggcagaatctcaagtcaataaactcaaaattaaagcaagagagtttgggaaaaaggttcaagaagaatagcatcccctgctttgaaaggacaacagctggagaagtacaaggaaggtgctgtttcatggccaaaaacttaggttgcatggaaacatttttaaaaacatgtttaaattgcttttcacaccatataaacaaggcaattagaaaaataattaaagggaatatcattgcttccacagttaatggggattttttgatcctcaaatgcaagtaaactaccttctaatgcttcacatgacagattaaataaatggaagaaccttttcaattctgatgtttaaaaaatgaataaatacttgatcctttgtccatatttcctcttaatgggtaggactcatagaagatgtccttagaccagtcacgcttcatggggactagggcatgttggtgaatggtttttactaaagttaggcaactttggcttgattcacccctaaatctatgaatgtatattgtgagccagcagtggtagaatggaagtcataagatctcctcagcattgtgatataaatatagctatagttaggcaatttgaacatgtaggcaaaactctcctaatcaacacacatgtaggctatatgctggtacatgctttaaacatggaggtaaccccacacgagacattcagtgacaggtaatatgctggatttgtgcagtaccgatttggctcagctggaggaacatgtcccggaattcctctctctcatggttctggattggagtaggtcataaagaaatttgcattaatttgatcagcagctattttatactcataaggtcagtgtacagacccaagcatggtgacagcttgaaaatatgactccaggccaaaaaggggagctagaagagaccagagacagctccctggacccagagctcttccagctcctgccagcctcctccttcagctttgcaaagtactggccaggtgtgtgtgcagctccatggcaaccagcatcagcttttcctgagatcacacacagcattgcagtggaggccgtgagacagacatgggttctgtttgttcttatggacttcccttcatccttgctgcattcacagtcgacctacagtgacttcaggcccagaaccagatgcagagggaacagcctggcctagacttctccaccagcacccacaattgtgtaaggctgaagctctataataaatctttattctgtc

SEQ ID NO: 19260 - DNA, 6339 bp, Homo sapiens
  source 1..6339: mol_type = unassigned DNA
aaaaagaagttccgagggaagccaggtatcctggctgcccagccactgcctttatccaccagcttgactctttcagatcatcttctcaaattatccataggagatttatccacatactcaataagaaaaatatttctaattatatccaaccattcttaatatgaatgagaattatgcggggacgctagattgccaagaggtattttgccaaacaattccttttgacttaagaaagaagaggcagctgcattgtttccatagctatccatataaaagagcccttggaatgaggctgactcgtcctgctttaaaaagctccaagaactgtctcactcccaggctacatcttctcacttgctaacaaggacctctgagttcagcagccatgagttcagactcagaattggctgtttttggggaggctgctcctttcctccgaaagtctgaaagggagcgcattgaggcccagaataggccctttgatgccaaaacatctgtctttgtggcggagcccaaagaatcctttgtcaaagggaccatccagagcagagaaggaggaaaagtgacggtgaagactgagggaggagcgactctgacagtgaaggatgatcaggtcttccccatgaaccctcccaaatatgacaagatcgaggatatggccatgatgactcatctgcatgagcctgctgtgctgtacaacctcaaagaacgttatgcagcctggatgatctacacctattcaggtctcttctgtgtcactgtcaacccctacaagtggctgcctgtgtataagcccgaggtggtgacagcctaccgaggcaaaaagcgccaggaggccccgccccacatcttctccatctctgacaacgcctatcagttcatgctgactgaccgagagaatcagtcaatcctgatcactggagaatctggtgcagggaagactgtgaacaccaagcgtgtcatccagtactttgcaacaattgcagttactggtgagaagaagaaggaagaaattacttctggcaaaatacaggggactctggaagatcaaatcatcagtgccaaccccctactggaggcctttggcaacgccaagaccgtgaggaatgacaactcctctcgctttggtaaattcatcagaatccactttggcactactggaaaactggcatctgctgatattgaaacatatctgctagagaagtctagagttgttttccagcttaaggctgagagaagttatcatattttttaccagattacatcgaataagaaaccagaacttattgaaatgcttctgattaccacgaacccatatgattacccatttgtcagtcaaggggagatcagtgtggccagcatcgatgatcaggaagaactgatggccacagatagtgctattgatattttgggctttactaatgaagaaaaggtctccatttacaagctcacgggggctgtgatgcattatgggaacctaaaatttaagcaaaagcagcgtgaggagcaagcagagccagatggcacagaagttgctgacaaggcggcctacctccagagtctgaactctgcagatctgctcaaagctctctgctaccccagggtcaaggtcggcaatgagtatgtcaccaaaggccagactgtagaacaggtgtccaacgcagtaggtgctctggccaaagccgtctacgagaagatgttcctgtggatggttgcccgcatcaaccagcagctggacaccaagcagcccaggcagtacttcatcggggtcttggacattgctggttttgagatttttgatttcaacagcctggagcagctgtgcatcaacttcaccaatgagaaactgcaacagtttttcaaccaccacatgttcgtgctggagcaggaggagtacaagaaggaaggcatcgagtggacgttcatcgacttcgggatggacctggctgcctgcatcgagctcatcgagaagcctatgggcatcttctccatcctggaagaggagtgcatgttccctaaggcaacagacacctccttcaagaacaagctgtatgaccagcacctgggcaagtctgccaacttccagaagcccaaggtggtcaaaggcaaggccgaggcccacttcgctctgattcactatgctggtgttgtggactacaacattactggctggctggagaagaacaaggaccccctgaatgagaccgtggttggactgtaccagaagtctgcaatgaaaactctagctcagctcttctctggggctcaaactgctgaaggagagggagctggtggaggggccaagaaaggtggtaagaagaagggctcttctttccagacagtgtctgcccttttcagagagaatttgaacaagctgatgaccaacctcaggagtacccatcctcactttgtgaggtgtatcatccccaatgagacaaaaactcctggtgccatggagcatgagcttgtcctccaccagctgaggtgtaacggtgtgctggaaggcatccgcatctgtaggaaaggatttccaagcagaatcctttatgcagacttcaaacagagatacaaggtattaaatgcaagtgcaatccctgaagggcaattcattgatagcaagaaggcctctgagaagctccttgcatccatcgacattgaccacacccagtataaatttgggcacaccaaggtctttttcaaagctggtcttctggggctcctagaggagatgcgagatgacaagctggcccagctgattacccgaacccaggccaggtgcagagggttcttggcaagagtggagtaccagaggatggtggagagaagggaggccatcttctgtatccagtacaatatcagatccttcatgaatgtcaagcactggccctggatgaaactcttcttcaagatcaagcctctgttgaagagtgcagaaactgagaaggagatggccaccatgaaggaagaatttcagaaaattaaagacgaacttgccaagtcagaggcaaaaaggaaggaactggaagaaaagatggtgacgctgttgaaagaaaaaaatgacttgcagctccaagttcaggctgaagccgaaggcttggctgatgcagaggaaaggtgtgaccagctaatcaaaaccaaaatccagctagaagccaaaatcaaagaggtgactgagagagctgaggatgaggaagagatcaatgctgagctgacagccaagaagaggaaactggaggatgaatgttcagaactcaagaaagacattgatgaccttgagctgacactggccaaggttgagaaggagaaacatgccacagaaaacaaggtgaaaaacctcacagaagagatggcaggtctggatgaaaccattgctaagctgaccaaggagaagaaggctctccaggaggcccaccagcagaccctggatgacctgcaggcagaggaggacaaagtcaacaccctgaccaaagctaaaatcaaacttgaacaacaagtggatgatcttgaagggtccttggagcaagaaaagaaacttcgcatggacctagaaagggctaagaggaaacttgagggtgacttgaagttggcccaagaatccataatggacattgaaaatgagaaacagcaacttgatgaaaagctcaaaaagaaagagtttgaaatcagcaatctgcaaagcaagattgaagatgaacaggcacttggcattcaattgcagaagaaaattaaagaattgcaagcccgcattgaggagctggaggaggaaatcgaggcagagcgggcctcccgggccaaagcagagaagcagcgctctgacctctcccgggagctggaggagatcagcgagaggctggaagaagccggtggggccacttcagcccagattgagatgaacaagaagcgggaggctgagttccagaaaatgcgcagggacctggaggaggccaccctacagcatgaagccacagcggccaccctgaggaagaagcatgcagatagtgtggccgagcttggggagcagattgacaacctgcagcgagtgaagcagaagctggagaaggagaagagtgagatgaagatggagattgatgaccttgctagtaatgtagaaacggtctccaaagccaagggaaacctagagaaaatgtgccggactctagaggaccaactgagtgaactgaaatcaaaggaagaggagcagcagcggctgatcaatgacctgactgcgcagagggggcgcctgcagactgaatctggtgagttttcacgccagcttgatgaaaaggaagctctggtgtctcagttatcaagaggcaaacaagcctttactcaacagattgaagaattaaagaggcaacttgaagaggagataaaagccaagaacgccctggcgcatgccctgcagtcttcccgccacgactgtgacctgctgcgggaacagtatgaggaggagcaggaatccaaggccgagctgcagagagcactgtccaaggccaacaccgaggttgcccaatggaggaccaaatacgagacggacgccatccagcgcacagaggagctggaggaggccaagaagaagctggcccagcggctgcaggcagctgaggaacatgtagaagctgtgaacgccaaatgtgcttccctcgaaaagacgaagcagcggctgcagaatgaggtcgaggacctcatgcttgatgtggagaggacaaatgccgcctgtgccgcccttgacaaaaagcaaaggaacttcgataagatcctggcagaatggaaacagaaatgtgaggaaacgcatgctgagcttgaggcctcccagaaggaggcccgttcccttggcactgagctgttcaagataaagaatgcctatgaggaatctttggatcagctagaaaccctgaagcgagagaacaaaaacttacagcaggagatttctgacctcacggaacagattgcagaaggagggaaacgtatccatgaactggagaaaataaagaaacaagtggaacaagaaaagtgtgaacttcaggctgctttagaagaagcagaggcatctcttgaacatgaagagggaaagatcctgcgcatccagcttgagttgaaccaagtcaagtctgaggttgataggaaaattgctgaaaaagatgaggaaattgaccagctgaagagaaaccacattagaatcgtggagtccatgcagagcacgctggatgctgagatcaggagtaggaatgatgccattaggctcaagaagaagatggagggagacctcaatgaaatggaaatccagctgaaccatgccaaccgcatggctgctgaggccctgaggaactacaggaacacccaaggcatcctcaaggatacccagatccacctggatgatgctctccggagccaggaggacctgaaggaacagctggccatggtggagcgcagagccaacctgctgcaggctgagatcgaggagctgcgggccactctggaacagacagagaggagcagaaaaatcgcagaacaggagctcctggatgccagtgagcgtgttcagctactgcacacccagaacaccagcctgatcaacaccaagaagaagctggagacagatatttcccaaatgcaaggagagatggaggacattctccaggaagcccgcaatgcagaagaaaaggccaagaaggccatcactgatgccgccatgatggctgaggagctgaagaaggagcaggacaccagcgcccacctggagcggatgaagaagaacatggagcagaccgtgaaggatctgcagctccgtctggatgaggctgagcagctggccctgaagggtgggaagaagcagatccagaaactggaggccagggtacgggagctggaaggagaggttgagagtgagcaaaagcgtaatgctgaggctgtcaaaggtctgcgcaaacatgagaggcgagtgaaggaactcacttaccagacggaagaagatagaaagaatattctcaggcttcaagatttggtagataaacttcaggcaaaagtgaaatcttataagagacaagctgaggaggctgaggaacaatccaacaccaatctagctaaattccgcaagctccagcatgagctggaggaggccgaggaacgggctgacattgctgagtcccaggtgaacaaactgcgggtgaagagccgggaggttcacacaaaagtcataagtgaagagtgatcatgtcctgatgccatggaatgactgaagacaggcacaaaatgtgacatctttggtcatttccctctgtaattattgtgtattctaccctgttgcaaaggaaataaagcatagggtagtttgcaaac

SEQ ID NO: 19261 - DNA, 6078 bp, Homo sapiens
  source 1..6078: mol_type = unassigned DNA
aggacgggcctttcaagagggacactggtcacaccgcccagtgtcagcagcagctgctagttctgaactgtctcactcccaggctacatcttctcacttgctaacaaggacctctgagttcagcagccatgagttcagactcagaattggctgtttttggggaggctgctcctttcctccgaaagtctgaaagggagcgcattgaggcccagaataggccctttgatgccaaaacatctgtctttgtggcggagcccaaagaatcctttgtcaaagggaccatccagagcagagaaggaggaaaagtgacggtgaagactgagggaggagcgactctgacagtgaaggatgatcaggtcttccccatgaaccctcccaaatatgacaagatcgaggatatggccatgatgactcatctgcatgagcctgctgtgctgtacaacctcaaagaacgttatgcagcctggatgatctacacctattcaggtctcttctgtgtcactgtcaacccctacaagtggctgcctgtgtataagcccgaggtggtgacagcctaccgaggcaaaaagcgccaggaggccccgccccacatcttctccatctctgacaacgcctatcagttcatgctgactgaccgagagaatcagtcaatcctgatcactggagaatctggtgcagggaagactgtgaacaccaagcgtgtcatccagtactttgcaacaattgcagttactggtgagaagaagaaggaagaaattacttctggcaaaatacaggggactctggaagatcaaatcatcagtgccaaccccctactggaggcctttggcaacgccaagaccgtgaggaatgacaactcctctcgctttggtaaattcatcagaatccactttggcactactggaaaactggcatctgctgatattgaaacatatctgctagagaagtctagagttgttttccagcttaaggctgagagaagttatcatattttttaccagattacatcgaataagaaaccagaacttattgaaatgcttctgattaccacgaacccatatgattacccatttgtcagtcaaggggagatcagtgtggccagcatcgatgatcaggaagaactgatggccacagatagtgctattgatattttgggctttactaatgaagaaaaggtctccatttacaagctcacgggggctgtgatgcattatgggaacctaaaatttaagcaaaagcagcgtgaggagcaagcagagccagatggcacagaagttgctgacaaggcggcctacctccagagtctgaactctgcagatctgctcaaagctctctgctaccccagggtcaaggtcggcaatgagtatgtcaccaaaggccagactgtagaacaggtgtccaacgcagtaggtgctctggccaaagccgtctacgagaagatgttcctgtggatggttgcccgcatcaaccagcagctggacaccaagcagcccaggcagtacttcatcggggtcttggacattgctggttttgagatttttgatttcaacagcctggagcagctgtgcatcaacttcaccaatgagaaactgcaacagtttttcaaccaccacatgttcgtgctggagcaggaggagtacaagaaggaaggcatcgagtggacgttcatcgacttcgggatggacctggctgcctgcatcgagctcatcgagaagcctatgggcatcttctccatcctggaagaggagtgcatgttccctaaggcaacagacacctccttcaagaacaagctgtatgaccagcacctgggcaagtctgccaacttccagaagcccaaggtggtcaaaggcaaggccgaggcccacttcgctctgattcactatgctggtgttgtggactacaacattactggctggctggagaagaacaaggaccccctgaatgagaccgtggttggactgtaccagaagtctgcaatgaaaactctagctcagctcttctctggggctcaaactgctgaaggagagggagctggtggaggggccaagaaaggtggtaagaagaagggctcttctttccagacagtgtctgcccttttcagagagaatttgaacaagctgatgaccaacctcaggagtacccatcctcactttgtgaggtgtatcatccccaatgagacaaaaactcctggtgccatggagcatgagcttgtcctccaccagctgaggtgtaacggtgtgctggaaggcatccgcatctgtaggaaaggatttccaagcagaatcctttatgcagacttcaaacagagatacaaggtattaaatgcaagtgcaatccctgaagggcaattcattgatagcaagaaggcctctgagaagctccttgcatccatcgacattgaccacacccagtataaatttgggcacaccaaggtctttttcaaagctggtcttctggggctcctagaggagatgcgagatgacaagctggcccagctgattacccgaacccaggccaggtgcagagggttcttggcaagagtggagtaccagaggatggtggagagaagggaggccatcttctgtatccagtacaatatcagatccttcatgaatgtcaagcactggccctggatgaaactcttcttcaagatcaagcctctgttgaagagtgcagaaactgagaaggagatggccaccatgaaggaagaatttcagaaaattaaagacgaacttgccaagtcagaggcaaaaaggaaggaactggaagaaaagatggtgacgctgttgaaagaaaaaaatgacttgcagctccaagttcaggctgaagccgaaggcttggctgatgcagaggaaaggtgtgaccagctaatcaaaaccaaaatccagctagaagccaaaatcaaagaggtgactgagagagctgaggatgaggaagagatcaatgctgagctgacagccaagaagaggaaactggaggatgaatgttcagaactcaagaaagacattgatgaccttgagctgacactggccaaggttgagaaggagaaacatgccacagaaaacaaggtgaaaaacctcacagaagagatggcaggtctggatgaaaccattgctaagctgaccaaggagaagaaggctctccaggaggcccaccagcagaccctggatgacctgcaggcagaggaggacaaagtcaacaccctgaccaaagctaaaatcaaacttgaacaacaagtggatgatcttgaagggtccttggagcaagaaaagaaacttcgcatggacctagaaagggctaagaggaaacttgagggtgacttgaagttggcccaagaatccataatggacattgaaaatgagaaacagcaacttgatgaaaagctcaaaaagaaagagtttgaaatcagcaatctgcaaagcaagattgaagatgaacaggcacttggcattcaattgcagaagaaaattaaagaattgcaagcccgcattgaggagctggaggaggaaatcgaggcagagcgggcctcccgggccaaagcagagaagcagcgctctgacctctcccgggagctggaggagatcagcgagaggctggaagaagccggtggggccacttcagcccagattgagatgaacaagaagcgggaggctgagttccagaaaatgcgcagggacctggaggaggccaccctacagcatgaagccacagcggccaccctgaggaagaagcatgcagatagtgtggccgagcttggggagcagattgacaacctgcagcgagtgaagcagaagctggagaaggagaagagtgagatgaagatggagattgatgaccttgctagtaatgtagaaacggtctccaaagccaagggaaacctagagaaaatgtgccggactctagaggaccaactgagtgaactgaaatcaaaggaagaggagcagcagcggctgatcaatgacctgactgcgcagagggggcgcctgcagactgaatctggtgagttttcacgccagcttgatgaaaaggaagctctggtgtctcagttatcaagaggcaaacaagcctttactcaacagattgaagaattaaagaggcaacttgaagaggagataaaagccaagaacgccctggcgcatgccctgcagtcttcccgccacgactgtgacctgctgcgggaacagtatgaggaggagcaggaatccaaggccgagctgcagagagcactgtccaaggccaacaccgaggttgcccaatggaggaccaaatacgagacggacgccatccagcgcacagaggagctggaggaggccaagaagaagctggcccagcggctgcaggcagctgaggaacatgtagaagctgtgaacgccaaatgtgcttccctcgaaaagacgaagcagcggctgcagaatgaggtcgaggacctcatgcttgatgtggagaggacaaatgccgcctgtgccgcccttgacaaaaagcaaaggaacttcgataagatcctggcagaatggaaacagaaatgtgaggaaacgcatgctgagcttgaggcctcccagaaggaggcccgttcccttggcactgagctgttcaagataaagaatgcctatgaggaatctttggatcagctagaaaccctgaagcgagagaacaaaaacttacagcaggagatttctgacctcacggaacagattgcagaaggagggaaacgtatccatgaactggagaaaataaagaaacaagtggaacaagaaaagtgtgaacttcaggctgctttagaagaagcagaggcatctcttgaacatgaagagggaaagatcctgcgcatccagcttgagttgaaccaagtcaagtctgaggttgataggaaaattgctgaaaaagatgaggaaattgaccagctgaagagaaaccacattagaatcgtggagtccatgcagagcacgctggatgctgagatcaggagtaggaatgatgccattaggctcaagaagaagatggagggagacctcaatgaaatggaaatccagctgaaccatgccaaccgcatggctgctgaggccctgaggaactacaggaacacccaaggcatcctcaaggatacccagatccacctggatgatgctctccggagccaggaggacctgaaggaacagctggccatggtggagcgcagagccaacctgctgcaggctgagatcgaggagctgcgggccactctggaacagacagagaggagcagaaaaatcgcagaacaggagctcctggatgccagtgagcgtgttcagctactgcacacccagaacaccagcctgatcaacaccaagaagaagctggagacagatatttcccaaatgcaaggagagatggaggacattctccaggaagcccgcaatgcagaagaaaaggccaagaaggccatcactgatgccgccatgatggctgaggagctgaagaaggagcaggacaccagcgcccacctggagcggatgaagaagaacatggagcagaccgtgaaggatctgcagctccgtctggatgaggctgagcagctggccctgaagggtgggaagaagcagatccagaaactggaggccagggtacgggagctggaaggagaggttgagagtgagcaaaagcgtaatgctgaggctgtcaaaggtctgcgcaaacatgagaggcgagtgaaggaactcacttaccagacggaagaagatagaaagaatattctcaggcttcaagatttggtagataaacttcaggcaaaagtgaaatcttataagagacaagctgaggaggctgaggaacaatccaacaccaatctagctaaattccgcaagctccagcatgagctggaggaggccgaggaacgggctgacattgctgagtcccaggtgaacaaactgcgggtgaagagccgggaggttcacacaaaagtcataagtgaagagtgatcatgtcctgatgccatggaatgactgaagacaggcacaaaatgtgacatctttggtcatttccctctgtaattattgtgtattctaccctgttgcaaaggaaataaagcatagggtagtttgc

SEQ ID NO: 19262 - DNA, 675 bp, Homo sapiens
  source 1..675: mol_type = unassigned DNA
aggacgggcctttcaagagggacactggtcacaccgcccagtgtcagcagcagctgctagttctgaactgtctcactcccaggctacatcttctcacttgctaacaaggacctctgagttcagcagccatgagttcagactcagaattggctgtttttggggaggctgctcctttcctccgaaagtctgaaagggagcgcattgaggcccagaataggccctttgatgccaaaacatctgtctttgtggcggagcccaaagaatcctttgtcaaagggaccatccagagcagagaaggaggaaaagtgacggtgaagactgagggaggagcgactctgacagtgaaggatgatcaggtcttccccatgaaccctcccaaatatgacaagatcgaggatatggccatgatgactcatctgcatgagcctgctgtgctgtacaacctcaaagaacgttatgcagcctggatgatctacacctattcaggtctcttctgtgtcactgtcaacccctacaagtggctgcctgtgtataagcccgaggtggtgacagcctaccgaggcaaaaagcgccaggaggccccgccccacatcttctccatctctgacaacgcctatcagttcatgctgactgaccgagagaatcagtcaatcctgatcactggagaatctggtg

SEQ ID NO: 19263 - DNA, 671 bp, Homo sapiens
  source 1..671: mol_type = unassigned DNA
aggacgggcctttcaagagggacactggtcacaccgcccagtgtcagcagcagctgctagttctggtactgctccttctggaactgcacgttttacctctatgaattttgttacttctgtttacaatagcaagccatgccataaatgggattttttccccctctttttggtcaactaatcaagtgcttttcccttttcttttatagaactgtctcactcccaggctacatcttctcacttgctaacaaggacctctgagttcagcagccatgagttcagactcagaattggctgtttttggggaggctgctcctttcctccgaaagtctgaaagggagcgcattgaggcccagaataggccctttgatgccaaaacatctgtctttgtggcggagcccaaagaatcctttgtcaaagggaccatccagagcagagaaggaggaaaagtgacggtgaagactgagggaggagcgactctgacagtgaaggatgatcaggtcttccccatgaaccctcccaaatatgacaagatcgaggatatggccatgatgactcatctgcatgagcctgctgtgctgtacaacctcaaagaacgttatgcagcctggatgatctacacctattcaggtctcttctgtgtcactgtcaacccctacaagtggctgcctgtg

SEQ ID NO: 19264 - DNA, 2322 bp, Homo sapiens
  source 1..2322: mol_type = unassigned DNA
aactgtctcactcccaggctacatcttctcacttgctaacaaggacctctgagttcagcagccatgagttcagactcagaattggctgtttttggggaggctgctcctttcctccgaaagtctgaaagggagcgcattgaggcccagaataggccctttgatgccaaaacatctgtctttgtggcggagcccaaagaatcctttgtcaaagggaccatccagagcagagaaggaggaaaagtgacggtgaagactgagggaggagcgactctgacagtgaaggatgatcaggtcttccccatgaaccctcccaaatatgacaagatcgaggatatggccatgatgactcatctgcatgagcctgctgtgctgtacaacctcaaagaacgttatgcagcctggatgatctacacctattcaggtctcttctgtgtcactgtcaacccctacaagtggctgcctgtgtataagcccgaggtggtgacagcctaccgaggcaaaaagcgccaggaggccccgccccacatcttctccatctctgacaacgcctatcagttcatgctgactgaccgagagaatcagtcaatcctgatcactggagaatctggtgcagggaagactgtgaacaccaagcgtgtcatccagtactttgcaacaattgcagttactggtgagaagaagaaggaagaaattacttctggcaaaatacaggggactctggaagatcaaatcatcagtgccaaccccctactggaggcctttggcaacgccaagaccgtgaggaatgacaactcctctcgctttggtaaattcatcagaatccactttggcactactggaaaactggcatctgctgatattgaaacatatctgctagagaagtctagagttgttttccagcttaaggctgagagaagttatcatattttttaccagattacatcgaataagaaaccagaacttattgaaatgcttctgattaccacgaacccatatgattacccatttgtcagtcaaggggagatcagtgtggccagcatcgatgatcaggaagaactgatggccacagatagtgctattgatattttgggctttactaatgaagaaaaggtctccatttacaagctcacgggggctgtgatgcattatgggaacctaaaatttaagcaaaagcagcgtgaggagcaagcagagccagatggcacagaagttgctgacaaggcggcctacctccagagtctgaactctgcagatctgctcaaagctctctgctaccccagggtcaaggtcggcaatgagtatgtcaccaaaggccagactgtagaacaggtgtccaacgcagtaggtgctctggccaaagccgtctacgagaagatgttcctgtggatggttgcccgcatcaaccagcagctggacaccaagcagcccaggcagtacttcatcggggtcttggacattgctggttttgagatttttgatttcaacagcctggagcagctgtgcatcaacttcaccaatgagaaactgcaacagtttttcaaccaccacatgttcgtgctggagcaggaggagtacaagaaggaaggcatcgagtggacgttcatcgacttcgggatggacctggctgcctgcatcgagctcatcgagaagcctatgggcatcttctccatcctggaagaggagtgcatgttccctaaggcaacagacacctccttcaagaacaagctgtatgaccagcacctgggcaagtctgccaacttccagaagcccaaggtggtcaaaggcaaggccgaggcccacttcgctctgattcactatgctggtgttgtggactacaacattactggctggctggagaagaacaaggaccccctgaatgagaccgtggttggactgtaccagaagtctgcaatgaaaactctagctcagctcttctctggggctcaaactgctgaaggagagggagctggtggaggggccaagaaaggtggtaagaagaagggctcttctttccagacagtgtctgcccttttcagagaggaacaatccaacaccaatctagctaaattccgcaagctccagcatgagctggaggaggccgaggaacgggctgacattgctgagtcccaggtgaacaaactgcgggtgaagagccgggaggttcacacaaaagtcataagtgaagagtgatcatgtcctgatgccatggaatgactgaagacaggcacaaaatgtgacatctttggtcatttccctctgtaattattgtgtattctaccctgttgcaaaggaaataaagcatagggtagtttgcaaacaata

SEQ ID NO: 19265 - DNA, 6016 bp, Homo sapiens
  source 1..6016: mol_type = unassigned DNA
gtctgggatctcctggctgttgctgtcttctgctctcatcctgcaggtgggactctcagctgacaccatgagtagtgacactgaaatggaagtgttcggcatagctgctcctttcctccggaagtcagaaaaggagaggatcgaggctcagaaccagccctttgatgccaagacgtattgcttcgtggtggactcaaaggaagaatatgccaaggggaaaatcaagagttctcaggatgggaaggtcactgtggaaactgaggacaacaggaccctggtggtcaaaccagaggatgtgtacgccatgaacccccccaagttcgacaggatcgaagacatggccatgctgacgcacctgaatgagccagccgtgctgtacaacctgaaggaccgttacacatcttggatgatctatacctactcaggcctcttctgtgtcactgtcaacccctacaagtggctgccggtgtacaaccccgaggtggtggaaggctaccgaggcaaaaagcgccaggaggccccaccccacatcttctccatctctgacaacgcctatcagttcatgctgactgatcgtgaaaaccagtccattctgatcaccggagaatccggggcaggaaagactgtgaacaccaaacgggtcatccagtactttgcaacaattgcagctactggggacctggccaagaagaaggactccaaaatgaaggggactctggaagatcaaatcatcagtgccaatcccctgctggaggcctttgggaacgccaagactgtgaggaatgacaactcctcccgttttggcaagttcatccgaatccattttggaaccactgggaagctggcctctgcagatattgaaacttatcttctggaaaaatcaagagtcactttccagctgaaggctgaaagaagctaccacatcttctaccagattctttctaacaagaagcctgagctcatagagctgctgcttattacgaccaacccttacgactacccgttcattagccagggggagatcctggtggccagcatagatgatgcagaggagctgctggctacagacagcgccattgacatcctgggcttcaccccagaagagaaatctgggctctacaagctgacgggagccgtgatgcactacgggaacatgaagttcaagcagaagcagcgagaggagcaggccgagccggatggcacagaagtggctgacaaaacagcctatctgatgggcctgaactcttcggacctcctaaaagctttgtgctttcctagagtgaaagttgggaatgagtacgttaccaaaggtcaaactgtggatcaggttcaccatgctgtgaatgctctttcaaaatcagtttatgaaaagttgttcttgtggatggtcactcgcattaaccagcaactggatacgaagcttccaagacaacacttcattggtgttttggacattgcaggctttgaaatctttgagtataacagcctggagcagctgtgcatcaacttcaccaatgagaaactgcaacagtttttcaaccaccacatgttcgtgctggagcaggaggagtacaagaaggaaggcatcgagtggacgttcattgacttcgggatggacctggctgcctgcatcgagctcatcgagaagcctatgggcatcttctccatcctggaagaggagtgcatgttccccaaggcaacagacacctccttcaagaacaagctgtatgaccagcatcttggaaagtccaacaacttccagaagcccaaggtggtcaaaggcagggccgaggctcacttctcactgatccactatgcgggcaccgtggactacagtgtctcaggttggctggagaagaacaaggaccctctgaacgagactgtggttgggctgtaccagaagtcttccaacaggctcctggcacacctctatgccacgtttgccacggcggatgctgacagtggaaagaagaaagttgccaagaagaagggttcttccttccaaactgtctctgcccttttcagggaaaacctgaacaagctgatgtcaaatttaagaactactcaccctcattttgtgcgttgtataattcccaatgaaaccaaaactccaggggctatggaacacagccttgttctgcaccagctgcggtgtaacggtgtcctggagggcatccgcatctgcaggaaagggttcccaaacaggattctctatggcgattttaaacaaagataccgagtgctgaatgccagtgcaatccctgagggacaattcattgacagcaagaaagcctgtgaaaagcttctggcatccattgatattgaccacactcagtacaaatttggacataccaaggtgttcttcaaggctggcttgctgggaaccctggaagagatgcgggatgaccgcctggccaaactaatcacccggacacaagctgtgtgcagagggttcctcatgcgtgtggaattccagaagatggtgcagaggagggagtccatcttctgcatccagtacaacattcgctcattcatgaacgtcaagcactggccctggatgaaactcttcttcaagatcaagcccctcctcaagagtgcagagactgagaaagagatggccaccatgaaggaagaattccagaaaaccaaagatgaactcgccaagtcggaggcaaaaaggaaggagctagaggaaaaactggtgactctggtccaagagaagaatgacctgcagctccaagtacaagctgaaagcgaaaatttgttggatgctgaggaaagatgcgatcagctgatcaaagccaaattccagctcgaggccaagatcaaggaggtgacagagagagctgaagatgaggaggagatcaatgctgagctgacggccaagaagaggaaactggaggatgaatgctcagagctcaagaaagacattgatgaccttgagttgaccctggccaaggttgagaaggagaagcatgccacagagaacaaggttaaaaaccttactgaggaactctctgggttagatgaaacaattgcaaagttaaccagagagaagaaggccctccaagaggcgcaccagcaggccttggatgacctccaagctgaagaagacaaagtcaattctttgaacaaaaccaagagcaaactggaacagcaagtggaagacctggaaagctccctagaacaagaaaagaagctccgagtagacctggaaaggaacaaaaggaaattggaaggagacttgaagcttgctcaagagtccatattagatctggagaatgacaagcaacagctggacgaaaggctcaagaagaaagattttgaatattgtcaacttcaaagcaaagtggaagatgagcagacactgggcctccagtttcagaagaaaatcaaagagttgcaggctcgaattgaggagctggaagaggagatagaggcggagagggccacccgcgcgaagacagagaaacagcgcagcgactatgcccgggagctggaggagctgagcgagcggctggaggaggcgggaggcgtcacctccacgcagatagagctcaacaagaagcgggaggcggagttcctgaagctgcgcagggacctggaggaggccacactgcagcacgaagccatggtggccgcgctgaggaagaagcatgcggatagtgtggccgagcttggggagcagattgacaacctgcagcgggtcaagcagaagctggagaaggagaagagcgagttcaagctggagatcgatgacctctccagcagcatggagagtgtgtcgaaatctaaggcaaatctggaaaaaatctgccgaaccctggaggatcagttaagtgaggccaggggcaagaatgaggaaattcagaggagcctgagcgagctgaccacacagaagtctcgtttgcagaccgaggctggtgagctgagtcgtcagctggaagaaaaagaaagcatagtatcccaactttccaggagcaagcaagcctttacccagcaaacagaagagctcaagaggcagctggaggaagagaacaaggccaagaacgccctggcgcacgccctgcagtcctcccgccacgactgtgacctgctgcgggaacagtatgaggaggagcaggaaggcaaagctgagctgcagagggcgctgtccaaggccaatagtgaggttgcccagtggagaaccaaatacgagacggacgccatccagcgcacagaagagctggaggaggccaagaaaaaacttgctcagcgccttcaagattccgaggaacaggttgaggcagtgaatgctaaatgtgcttcactggagaagaccaagcagaggctgcaaggagaggtggaggatctgatggttgatgttgaaagagccaattccttggccgccgctctggacaagaagcagaggaactttgacaaggtgttggcagagtggaagacaaagtgtgaggagagccaagcagagctggaggcatccctgaaggagtcccgctccttgagcactgagctcttcaaactgaaaaatgcctacgaggaagccttagatcaacttgaaactgtgaaacgggaaaataagaacttagagcaggagatagcagatctcacagaacaaattgctgaaaatggcaaaaccatccatgaactggagaaatcaagaaagcagattgagctggaaaaggctgatatccagctggctctcgaggaagcagaggctgctcttgagcatgaagaagccaagatcctccgaatccagcttgaattgacacaagtgaaatcagaaattgatagaaagatcgccgagaaggatgaagagatcgagcagctgaagaggaactaccagagaacagtggaaaccatgcagagcgccctggacgccgaggtgcggagcaggaatgaagccatccggctcaagaagaagatggagggggacctgaatgaaatcgagatccagctgagccacgccaaccgccaggcggcggagaccctcaaacacctcaggagtgtccagggacagctgaaggatacgcagctccacctggatgatgccctccggggccaggaggacctgaaggagcagctggcgattgtggagcgcagagccaacctgctgcaggccgaggtggaggagctgcgggctactctggagcagacggagagggcccggaaactggcggaacaggagctcctggactccaacgagagggtgcagctgctgcatacccagaacaccagcctcatccacaccaagaagaagctggagacagacctcatgcagctccagagtgaggtagaagatgccagcagggatgcaaggaacgctgaggagaaggccaagaaggccatcacggacgctgccatgatggcggaggagctgaagaaggagcaggacaccagcgcccaccttgagcggatgaagaagaacctggaacagacggtgaaggacctgcagcatcgtctagatgaggccgagcagctggcgctgaagggcgggaagaagcagatccagaaactggagaccaggatccgagagctggagtttgaacttgagggagagcagaagaagaacacagagtctgttaagggcctgaggaagtatgagcggagggtcaaggagctgacgtaccagagtgaagaggacaggaagaatgtgctgagattgcaggatctggtggataaactgcaagtgaaagtcaagtcctacaagaggcaggcggaggaggctgatgaacaagccaatgctcatctcaccaaattccgaaaggctcagcatgagctggaggaggccgaggaacgtgcggatatcgcagaatctcaagtcaacaagctccgcgctaagactcgagacttcacctccagcaggatggtggtccacgagagtgaagagtgagccagcccttctggagcaggacagaagatatgcaaaatgtatattttcttgattcctgaccattgatacttaatgtccatgtgactctttttcacatgcaataaactttgctttgtttcaatctgg

SEQ ID NO: 19266 - DNA, 6016 bp, Homo sapiens
  source 1..6016: mol_type = unassigned DNA
atccttcctcaaaattcttgaagtagttgtctgctttgagcctgccaccttcttcatctgataatacaagaggtatacctagtccagtactgccatcaataacctgcagccatgagttctgactctgagatggccatttttggggaggctgctcctttcctccgaaagtctgaaaaggagcgaattgaagctcagaacaagccttttgatgccaagacatcagtctttgtggtggaccctaaggagtcctacgtgaaagcaatagtgcagagcagggaaggggggaaggtgacagccaagaccgaagctggagctactgtaactgtgaaagaagaccaagtcttctccatgaaccctcccaaatatgacaagatcgaggacatggccatgatgactcacctgcatgagcctgctgtgctgtataacctcaaagagcgttacgcagcctggatgatctacacctactcgggcctcttctgtgtcaccgtcaacccctacaagtggctgccggtgtacaaccctgaggtggtgacagcctaccgaggcaaaaagcgccaggaggccccaccccatatcttctccatctctgacaatgcctatcagttcatgctaactgatcgtgaaaaccagtcaatcttgattactggagaatctggtgcagggaagactgtgaacacgaagcgtgtcatccagtactttgcaacaattgcagttactggagagaagaaaaaagaggaacctgcctctggcaaaatgcaggggacccttgaagatcaaatcatcagtgctaaccccctactggaagccttcggcaatgccaagaccgtgaggaatgacaactcctctcgctttggtaaattcatcaggatccattttggtgccacaggcaaactggcttctgcagatattgaaacatatctgctagagaagtcccgagttacttttcagctaaaggctgaaagaagctaccacatattttatcaaatcctgtccaataagaaaccagagctcattgaaatgcttctgatcaccaccaacccatatgacttcgcatttgtcagccaaggggaaattactgtgcccagcattgatgaccaggaagagctgatggccacagatagtgctgtggacatcctgggtttcactgctgatgaaaaggtggccatttacaagctcactggagccgtgatgcattatgggaacatgaaattcaagcaaaagcaaagggaagagcaggcagagccagatggcacggaagttgctgacaaagctgcttatctgacaagtctgaactctgctgacctgctcaaatctctctgctatcccagagtcaaggtcggcaatgagttcgtaaccaaaggccagactgtgcagcaggtgtacaatgcagtgggtgctctggccaaagccatctacgagaagatgttcctgtggatggtcacccgcatcaaccagcagctggacaccaagcagcccaggcagtacttcatcggggtcttggacattgctggctttgagatctttgatttcaacagcctggagcagctgtgcatcaacttcaccaacgagaaactgcaacagtttttcaaccaccacatgttcgtgctggagcaggaagagtacaagaaggaaggcatcgagtgggagttcattgacttcgggatggacctggctgcctgcatcgagctcatcgagaagcctatgggcatcttctccatcctagaagaggagtgcatgttccccaaggcaacagacacctccttcaagaacaagctgtatgaacaacatcttggaaaatccaacaacttccagaagcccaagcctgccaaaggcaagcctgaggctcacttctcactggtgcactatgccggcaccgtggactacaacatcgccggctggctggacaaaaacaaggaccccctgaatgagactgtggtggggctgtaccagaagtctgcaatgaagactctggctttcctcttctctggggcacaaactgctgaagcagagggtggtggtggaaagaaaggtggcaaaaagaagggttcttctttccagacagtgtcagctcttttcagggagaatttgaataagctgatgaccaacttgaggagcactcacccccactttgtgcggtgcatcatccccaatgaaactaaaactcctggtgccatggagcatgagcttgtcctgcatcagctgaggtgtaacggtgtgctggaaggcatccgcatctgcaggaaaggcttcccaagcagaatcctttatgcagacttcaaacagagatacaaggttctaaatgcgagtgctatcccagagggtcagttcattgacagcaagaaggcttctgagaaacttctagggtctattgaaattgaccacacccagtacaaattcggtcataccaaggttttcttcaaagctggcctgctgggaactctagaggaaatgcgagatgaaaagctagctcaactcatcacgcgcactcaagccatatgcagagggttcctgatgagagtggagttcagaaagatgatggagaggagagagtccatcttctgcattcagtacaacatccgtgctttcatgaatgtgaagcactggccctggatgaagctgtatttcaagatcaagcccctcctcaagagtgcagagacagagaaggagatggccaacatgaaggaagaatttgagaaaaccaaagaagagctggctaagacagaggcaaaaaggaaagaactagaagaaaagatggtgacgctaatgcaagagaaaaatgacttacaactccaagttcaagctgaagcagatgccttggctgatgcagaggaaagatgtgatcagttgattaaaaccaaaatccaacttgaggccaaaatcaaagaggtaactgaaagagctgaggatgaggaagagatcaatgctgagctgacagccaagaagaggaaactggaggatgaatgttcagagctcaagaaagacattgatgaccttgagctgacactggccaaggttgagaaggagaaacatgccacagagaacaaggtgaaaaacctcacagaagagatggcaggtctggatgaaaccattgctaagctgaccaaggagaagaaggctctccaggaggcccaccagcagaccctggatgacctgcagatggaggaggacaaagtcaacaccctgaccaaagctaaaaccaagctagaacagcaagtggacgatcttgaaggatctctggaacaagaaaagaaactttgcatggacttagaaagagccaagagaaaactggagggtgacctaaaattggcccaagaatccacaatggatacagaaaatgacaaacagcaacttaatgagaaactcaaaaagaaagagtttgaaatgagcaatctgcaaggcaagattgaagatgaacaagcccttgcaatacagctacaaaagaagatcaaagaattacaggcccgcattgaggagctggaggaggaaatcgaggcagagcgggcctcccgggccaaagcagagaagcagcgctctgacctctcccgggagctggaggagatcagtgagaggctggaagaagccggtggggccacttcagcccagattgagatgaacaagaagcgggaggctgagttccagaaaatgcgcagggacctggaagagtccaccctgcagcacgaagccacggcagctgctcttcggaagaagcacgcagatagtgtggctgagcttggggagcagattgacagccttcagcgggtcaagcagaagctggagaaggaaaagagtgagctgaagatggagatcaatgaccttgctagtaacatggagactgtctccaaagccaaggcaaactttgagaaaatgtgccgcaccctagaggaccagcttagtgaaataaaaacaaaggaagaagagcaacaacgcttaataaatgagttgtcagcccagaaggcacgtttacacacagaatcaggtgagttttcacgacagctagatgaaaaagatgctatggtttctcagctatcccgaggcaaacaagcatttacacaacagattgaagaattaaagaggcagctagaagaggagactaaggccaagagcactctggcccatgccctgcagtcagcccgccatgactgtgacctgctgcgggaacagtatgaggaggagcaggaagccaaggctgagctgcagaggggaatgtccaaggccaacagtgaggttgcccagtggaggaccaagtacgagacggacgccatccagcgcacagaggagctggaggaggccaagaagaagctagcccagcgtctgcaggatgcagaagaacatgtagaagctgtgaattccaaatgtgcttctcttgaaaagacaaagcagaggctacagaatgaagtagaggacctcatgattgatgtggaacgatctaatgctgcctgcatagctctcgataagaagcaaagaaactttgacaaggttctggcagaatggaaacagaagtatgaggaaactcaggctgaacttgaggcctcccagaaggagtcgcgttctctcagcactgagctgttcaaggtgaagaatgcctacgaggaatccctggatcatcttgaaactctaaagcgagagaataagaacttacaacaggagatttctgacctgacagagcaaattgcagagggtggaaagcatatccatgaactggagaaagtaaagaaacaacttgatcatgagaagagtgaactacagacttccctagaggaagcagaggcatctcttgagcatgaagaaggcaaaattcttcgcattcaacttgagctaaatcaggtgaaatctgagattgaccgaaaaattgctgaaaaagatgaagaactcgatcagctaaagaggaaccatctcagagttgtggagtcaatgcagagtacactggatgctgagatcaggagcagaaatgatgctctgaggatcaagaagaagatggagggagatcttaatgaaatggaaatccagctgaaccatgccaaccgccaggctgctgaggcactaaggaatcttagaaacacacaaggaatactgaaggacactcagctacatttggatgatgccatcagaggccaagatgaccttaaggaacaactggcaatggttgagcgcagagctaacctgatgcaggctgaagttgaagagctcagggcatccctggaacggactgagagaggcaggaaaatggcagagcaagagcttctggatgccagtgaacgtgtgcaacttctgcacactcagaacaccagcctgatcaacaccaagaagaagctggaaacagacatttcccaaatccagggagagatggaggacatcgtccaggaagcccgcaatgcagaggagaaggccaagaaggccatcactgatgctgccatgatggctgaggagctgaagaaggaacaggacaccagcgcccacctggagcggatgaagaagaacatggagcagaccgtgaaggatctgcagctccgtctggatgaggctgagcagctggcgctgaagggtgggaagaagcagatccagaaactggaggccagggtgagagagcttgaaagtgaggtggaaagtgaacagaagcacaatgttgaggctgtcaagggtcttcgcaaacatgagagaagagtgaaggaactcacttaccagactgaggaggaccgcaagaatattctcaggctgcaggacttggtggacaaattgcaaaccaaagtcaaagcttacaagagacaagctgaagaggctgaggaacaatccaatgtcaaccttgccaagttccgcaagctccagcacgagctggaggaggccaaggaacgggctgacattgctgagtcccaagtcaacaagctgagagtgaagagtcgggaggttcacacaaaagtcataagtgaagagtaattcattctaatgaaagaaaatgtgaccaaagaaatgcacgaaatgtgaagttctttgtcactgtcctgtatatcaaggaaataaa

SEQ ID NO: 19267 - DNA, 5871 bp, Homo sapiens
  source 1..5871: mol_type = unassigned DNA
cgtgaagggataaccaggggaagcaccaagatgaccgatgcccagatggctgactttggggcagcggcccagtacctccgcaagtcagagaaggagcgtctagaggcccagacccggccctttgacattcgcactgagtgcttcgtgcccgatgacaaggaagagtttgtcaaagccaagattttgtcccgggagggaggcaaggtcattgctgaaaccgagaatgggaagacggtgactgtgaaggaggaccaggtgttgcagcagaacccacccaagttcgacaagattgaggacatggccatgctgaccttcctgcacgagcccgcggtgcttttcaacctcaaggagcgctacgcggcctggatgatatatacctactcgggcctcttctgtgtcactgtcaacccctacaagtggctgccggtgtacaatgccgaggtggtggccgcctaccggggcaagaagaggagtgaggccccgccccacatcttctccatctccgacaacgcctatcagtacatgctgacagatcgggagaaccagtccatcctcatcacgggagaatccggggcggggaagactgtgaacaccaagcgtgtcatccagtactttgccagcattgcagccataggtgaccgtggcaagaaggacaatgccaatgcgaacaagggcaccctggaggaccagatcatccaggccaaccccgctctggaggccttcggcaatgccaagactgtccggaacgacaactcctcccgctttgggaaattcattaggatccactttggggccactggaaagctggcttctgcagacatagagacctacctgctggagaagtcccgggtgatcttccagctgaaagctgagagaaactaccacatcttctaccagattctgtccaacaagaagccggagttgctggacatgctgctggtcaccaacaatccctacgactacgccttcgtgtctcagggagaggtgtccgtggcctccattgatgactccgaggagctcatggccaccgatagtgcctttgacgtgctgggcttcacttcagaggagaaagctggcgtctacaagctgacgggagccatcatgcactacgggaacatgaagttcaagcagaagcagcgggaggagcaggcggagccagacggcaccgaagatgctgacaagtcggcctacctcatggggctgaactcagctgacctgctcaaggggctgtgccaccctcgggtgaaagtgggcaacgagtatgtcaccaaggggcagagcgtgcagcaggtgtactactccatcggggctctggccaaggcagtgtatgagaagatgttcaactggatggtgacgcgcatcaacgccaccctggagaccaagcagccacgccagtacttcataggagtcctggacatcgctggcttcgagatcttcgacttcaacagctttgagcagctctgcatcaacttcaccaacgagaagctgcagcagttcttcaaccaccacatgttcgtgctggagcaggaggagtacaagaaggagggcattgagtggacattcattgactttggcatggacctgcaggcctgcattgacctcatcgagaagcccatgggcatcatgtccatcctggaggaggagtgcatgttccccaaggccactgacatgaccttcaaggccaagctgtacgacaaccacctgggcaagtccaacaatttccagaagccacgcaacatcaaggggaagcaggaagcccacttctccctgatccactacgccggcactgtggactacaacatcctgggctggctggaaaaaaacaaggatcctctcaacgagactgttgtggccctgtaccagaagtcctccctcaagctcatggccactctcttctcctcctacgcaactgccgatactggggacagtggtaaaagcaaaggaggcaagaaaaagggctcatccttccagacggtgtcggctctccaccgggaaaatctcaacaagctaatgaccaacctgaggaccacccatcctcactttgtgcgttgcatcatccccaatgagcggaaggctccaggggtgatggacaaccccctggtcatgcaccagctgcgctgcaatggcgtgctggagggcatccgcatctgcaggaagggcttccccaaccgcatcctctacggggacttccggcagaggtatcgcatcctgaacccagtggccatccctgagggacagttcattgatagcaggaaggggacagagaagctgctcagctctctggacattgatcacaaccagtacaagtttggccacaccaaggtgttcttcaaggcagggctgcttgggctgctggaggagatgcgggatgagaggctgagccgcatcatcacgcgcatgcaggcccaagcccggggccagctcatgcgcattgagttcaagaagatagtggaacgcagggatgccctgctggtaatccagtggaacattcgggccttcatgggggtcaagaattggccctggatgaagctctacttcaagatcaagccgctgctgaagagcgcagagacggagaaggagatggccaccatgaaggaagagttcgggcgcatcaaagagacgctggagaagtccgaggctcgccgcaaggagctggaggagaagatggtgtccctgctgcaggagaagaatgacctgcagctccaagtgcaggcggaacaagacaacctcaatgatgctgaggagcgctgcgaccagctgatcaaaaacaagattcagctggaggccaaagtaaaggagatgaatgagaggctggaggatgaggaggagatgaacgcggagctcactgccaagaagcgcaagctggaagacgagtgctcagagctcaagaaggacattgatgacctggagctgacactggccaaggtggagaaggagaagcatgcaacagagaacaaggtgaagaacctaacagaggagatggctgggctggatgaaatcatcgctaagctgaccaaggagaagaaagctctacaagaggcccatcagcaggccctggatgaccttcaggttgaggaagacaaggtcaacagcctgtccaagtctaaggtcaagctggagcagcaggtggatgatctggagggatccctagagcaagagaagaaggtgcgcatggacctggagcgagcaaagcggaaactggagggcgacctgaagctgacccaggagagcatcatggacctggaaaatgataaactgcagctggaagaaaagcttaagaagaaggagtttgacattaatcagcagaacagtaagattgaggatgagcaggtgctggcccttcaactacagaagaaactgaaggaaaaccaggcacgcatcgaggagctggaggaggagctggaggccgagcgcaccgccagggctaaggtggagaagctgcgctcagacctgtctcgggagctggaggagatcagcgagcggctggaagaggccggcggggccacgtccgtgcagatcgagatgaacaagaagcgcgaggccgagttccagaagatgcggcgggacctggaggaggccacgctgcagcacgaggccactgccgcggccctgcgcaagaagcacgccgacagcgtggccgagctgggcgagcagatcgacaacctgcagcgggtgaagcagaagctggagaaggagaagagcgagttcaagctggagctggatgacgtcacctccaacatggagcagatcatcaaggccaaggcaaacctggagaaagtgtctcggacgctggaggaccaggccaatgagtaccgcgtgaagctagaagaggcccaacgctccctcaatgatttcaccacccagcgagccaagctgcagaccgagaatggagagttggcccggcagctagaggaaaaggaggcgctaatctcgcagctgacccgggggaagctctcttatacccagcaaatggaggacctcaaaaggcagctggaggaggagggcaaggcgaagaacgccctggcccatgcactgcagtcggcccggcatgactgcgacctgctgcgggagcagtacgaggaggagacagaggccaaggccgagctgcagcgcgtcctgtccaaggccaactcggaggtggcccagtggaggaccaagtatgagacggacgccattcagcggactgaggagctcgaagaggccaaaaagaagctggcccagcggctgcaggatgccgaggaggccgtggaggctgttaatgccaagtgctcctcactggagaagaccaagcaccggctacagaatgagatagaggacttgatggtggacgtagagcgctccaatgctgctgctgcagccctggacaagaagcagagaaactttgacaagatcctggccgagtggaagcagaagtatgaggagtcgcagtctgagctggagtcctcacagaaggaggctcgctccctcagcacagagctcttcaagctcaagaacgcctacgaggagtccctggagcacctagagaccttcaagcgggagaacaagaaccttcaggaggaaatctcggaccttactgagcagctaggagaaggaggaaagaatgtgcatgagctggagaaggtccgcaaacagctggaggtggagaagctggagctgcagtcagccctggaggaggcagaggcctccctggagcacgaggagggcaagatcctccgggcccagctagagttcaaccagatcaaggcagagatcgagcggaagctggcagagaaggacgaggagatggaacaggccaagcgcaaccaccagcgggtggtggactcgctgcagacctccctggatgcagagacacgcagccgcaacgaggtcctgagggtgaagaagaagatggaaggagacctcaatgagatggagatccagctcagccacgccaaccgcatggctgccgaggcccagaagcaagtcaagagcctccagagcttgctgaaggacacccagatccagctggacgatgcggtccgtgccaacgacgacctgaaggagaacatcgccatcgtggagcggcgcaacaacctgctgcaggctgagctggaggagctgcgtgccgtggtggagcagacagagcggtcccggaagctggcggagcaggagctgattgagaccagcgagcgggtgcagctgctgcattcccagaacaccagcctcatcaaccagaagaagaagatggagtcggatctgacccagctccagtcggaagtggaggaggcagtgcaggagtgcagaaacgccgaggagaaggccaagaaggccatcacggatgccgccatgatggcagaggagctgaagaaggagcaggacaccagcgcccacctggagcgcatgaagaagaacatggagcagaccattaaggacctgcagcaccggctggacgaggccgagcagatcgccctcaagggaggcaagaagcagctgcagaagctggaagcgcgggtgcgggagctggagggtgagctggaggccgagcagaagcgcaacgcagagtcggtgaagggcatgaggaagagcgagcggcgcatcaaggagctcacctaccagacagaggaagacaaaaagaacctgctgcggctacaggacctggtggacaagctgcaactgaaggtcaaggcctacaagcgccaggccgaggaggcggaggagcaagccaacaccaacctgtccaagttccgcaaggtgcagcatgagctggatgaggcagaggagcgggcggacatcgctgagtcccaggtcaacaagcttcgagccaagagccgtgacattggtgccaagcaaaaaatgcacgatgaggagtgacactgcctcgggaacctcact

SEQ ID NO: 19268 - DNA, 5941 bp, Homo sapiens
  source 1..5941: mol_type = unassigned DNA
agatagagagactcctgcggcccagattcttcaggattctccgtgaagggataaccaggggaagcaccaagatgaccgatgcccagatggctgactttggggcagcggcccagtacctccgcaagtcagagaaggagcgtctagaggcccagacccggccctttgacattcgcactgagtgcttcgtgcccgatgacaaggaagagtttgtcaaagccaagattttgtcccgggagggaggcaaggtcattgctgaaaccgagaatgggaagacggtgactgtgaaggaggaccaggtgttgcagcagaacccacccaagttcgacaagattgaggacatggccatgctgaccttcctgcacgagcccgcggtgcttttcaacctcaaggagcgctacgcggcctggatgatatatacctactcgggcctcttctgtgtcactgtcaacccctacaagtggctgccggtgtacaatgccgaggtggtggccgcctaccggggcaagaagaggagtgaggccccgccccacatcttctccatctccgacaacgcctatcagtacatgctgacagatcgggagaaccagtccatcctcatcacgggagaatccggggcggggaagactgtgaacaccaagcgtgtcatccagtactttgccagcattgcagccataggtgaccgtggcaagaaggacaatgccaatgcgaacaagggcaccctggaggaccagatcatccaggccaaccccgctctggaggccttcggcaatgccaagactgtccggaacgacaactcctcccgctttgggaaattcattaggatccactttggggccactggaaagctggcttctgcagacatagagacctacctgctggagaagtcccgggtgatcttccagctgaaagctgagagaaactaccacatcttctaccagattctgtccaacaagaagccggagttgctggacatgctgctggtcaccaacaatccctacgactacgccttcgtgtctcagggagaggtgtccgtggcctccattgatgactccgaggagctcatggccaccgatagtgcctttgacgtgctgggcttcacttcagaggagaaagctggcgtctacaagctgacgggagccatcatgcactacgggaacatgaagttcaagcagaagcagcgggaggagcaggcggagccagacggcaccgaagatgctgacaagtcggcctacctcatggggctgaactcagctgacctgctcaaggggctgtgccaccctcgggtgaaagtgggcaacgagtatgtcaccaaggggcagagcgtgcagcaggtgtactactccatcggggctctggccaaggcagtgtatgagaagatgttcaactggatggtgacgcgcatcaacgccaccctggagaccaagcagccacgccagtacttcataggagtcctggacatcgctggcttcgagatcttcgacttcaacagctttgagcagctctgcatcaacttcaccaacgagaagctgcagcagttcttcaaccaccacatgttcgtgctggagcaggaggagtacaagaaggagggcattgagtggacattcattgactttggcatggacctgcaggcctgcattgacctcatcgagaagcccatgggcatcatgtccatcctggaggaggagtgcatgttccccaaggccactgacatgaccttcaaggccaagctgtacgacaaccacctgggcaagtccaacaatttccagaagccacgcaacatcaaggggaagcaggaagcccacttctccctgatccactacgccggcactgtggactacaacatcctgggctggctggaaaaaaacaaggatcctctcaacgagactgttgtggccctgtaccagaagtcctccctcaagctcatggccactctcttctcctcctacgcaactgccgatactggggacagtggtaaaagcaaaggaggcaagaaaaagggctcatccttccagacggtgtcggctctccaccgggaaaatctcaacaagctaatgaccaacctgaggaccacccatcctcactttgtgcgttgcatcatccccaatgagcggaaggctccaggggtgatggacaaccccctggtcatgcaccagctgcgctgcaatggcgtgctggagggcatccgcatctgcaggaagggcttccccaaccgcatcctctacggggacttccggcagaggtatcgcatcctgaacccagtggccatccctgagggacagttcattgatagcaggaaggggacagagaagctgctcagctctctggacattgatcacaaccagtacaagtttggccacaccaaggtgttcttcaaggcagggctgcttgggctgctggaggagatgcgggatgagaggctgagccgcatcatcacgcgcatgcaggcccaagcccggggccagctcatgcgcattgagttcaagaagatagtggaacgcagggatgccctgctggtaatccagtggaacattcgggccttcatgggggtcaagaattggccctggatgaagctctacttcaagatcaagccgctgctgaagagcgcagagacggagaaggagatggccaccatgaaggaagagttcgggcgcatcaaagagacgctggagaagtccgaggctcgccgcaaggagctggaggagaagatggtgtccctgctgcaggagaagaatgacctgcagctccaagtgcaggcggaacaagacaacctcaatgatgctgaggagcgctgcgaccagctgatcaaaaacaagattcagctggaggccaaagtaaaggagatgaatgagaggctggaggatgaggaggagatgaacgcggagctcactgccaagaagcgcaagctggaagacgagtgctcagagctcaagaaggacattgatgacctggagctgacactggccaaggtggagaaggagaagcatgcaacagagaacaaggtgaagaacctaacagaggagatggctgggctggatgaaatcatcgctaagctgaccaaggagaagaaagctctacaagaggcccatcagcaggccctggatgaccttcaggttgaggaagacaaggtcaacagcctgtccaagtctaaggtcaagctggagcagcaggtggatgatctggagggatccctagagcaagagaagaaggtgcgcatggacctggagcgagcaaagcggaaactggagggcgacctgaagctgacccaggagagcatcatggacctggaaaatgataaactgcagctggaagaaaagcttaagaagaaggagtttgacattaatcagcagaacagtaagattgaggatgagcaggtgctggcccttcaactacagaagaaactgaaggaaaaccaggcacgcatcgaggagctggaggaggagctggaggccgagcgcaccgccagggctaaggtggagaagctgcgctcagacctgtctcgggagctggaggagatcagcgagcggctggaagaggccggcggggccacgtccgtgcagatcgagatgaacaagaagcgcgaggccgagttccagaagatgcggcgggacctggaggaggccacgctgcagcacgaggccactgccgcggccctgcgcaagaagcacgccgacagcgtggccgagctgggcgagcagatcgacaacctgcagcgggtgaagcagaagctggagaaggagaagagcgagttcaagctggagctggatgacgtcacctccaacatggagcagatcatcaaggccaaggcaaacctggagaaagtgtctcggacgctggaggaccaggccaatgagtaccgcgtgaagctagaagaggcccaacgctccctcaatgatttcaccacccagcgagccaagctgcagaccgagaatggagagttggcccggcagctagaggaaaaggaggcgctaatctcgcagctgacccgggggaagctctcttatacccagcaaatggaggacctcaaaaggcagctggaggaggagggcaaggcgaagaacgccctggcccatgcactgcagtcggcccggcatgactgcgacctgctgcgggagcagtacgaggaggagacagaggccaaggccgagctgcagcgcgtcctgtccaaggccaactcggaggtggcccagtggaggaccaagtatgagacggacgccattcagcggactgaggagctcgaagaggccaaaaagaagctggcccagcggctgcaggatgccgaggaggccgtggaggctgttaatgccaagtgctcctcactggagaagaccaagcaccggctacagaatgagatagaggacttgatggtggacgtagagcgctccaatgctgctgctgcagccctggacaagaagcagagaaactttgacaagatcctggccgagtggaagcagaagtatgaggagtcgcagtctgagctggagtcctcacagaaggaggctcgctccctcagcacagagctcttcaagctcaagaacgcctacgaggagtccctggagcacctagagaccttcaagcgggagaacaagaaccttcaggaggaaatctcggaccttactgagcagctaggagaaggaggaaagaatgtgcatgagctggagaaggtccgcaaacagctggaggtggagaagctggagctgcagtcagccctggaggaggcagaggcctccctggagcacgaggagggcaagatcctccgggcccagctagagttcaaccagatcaaggcagagatcgagcggaagctggcagagaaggacgaggagatggaacaggccaagcgcaaccaccagcgggtggtggactcgctgcagacctccctggatgcagagacacgcagccgcaacgaggtcctgagggtgaagaagaagatggaaggagacctcaatgagatggagatccagctcagccacgccaaccgcatggctgccgaggcccagaagcaagtcaagagcctccagagcttgctgaaggacacccagatccagctggacgatgcggtccgtgccaacgacgacctgaaggagaacatcgccatcgtggagcggcgcaacaacctgctgcaggctgagctggaggagctgcgtgccgtggtggagcagacagagcggtcccggaagctggcggagcaggagctgattgagaccagcgagcgggtgcagctgctgcattcccagaacaccagcctcatcaaccagaagaagaagatggagtcggatctgacccagctccagtcggaagtggaggaggcagtgcaggagtgcagaaacgccgaggagaaggccaagaaggccatcacggatgccgccatgatggcagaggagctgaagaaggagcaggacaccagcgcccacctggagcgcatgaagaagaacatggagcagaccattaaggacctgcagcaccggctggacgaggccgagcagatcgccctcaagggaggcaagaagcagctgcagaagctggaagcgcgggtgcgggagctggagggtgagctggaggccgagcagaagcgcaacgcagagtcggtgaagggcatgaggaagagcgagcggcgcatcaaggagctcacctaccagacagaggaagacaaaaagaacctgctgcggctacaggacctggtggacaagctgcaactgaaggtcaaggcctacaagcgccaggccgaggaggcggaggagcaagccaacaccaacctgtccaagttccgcaaggtgcagcatgagctggatgaggcagaggagcgggcggacatcgctgagtcccaggtcaacaagcttcgagccaagagccgtgacattggtgccaagcaaaaaatgcacgatgaggagtgacactgcctcgggaacctcactcttgccaacctgtaataaatatgagtgcc

SEQ ID NO: 19269 - DNA, 6087 bp, Homo sapiens
  source 1..6087: mol_type = unassigned DNA
gggggtgggggtgccctgctgccccatatatacagcccctgagaccaggtctggctccacagctctgtcctgctctgtgtctttccctgctgctctcaggtcccctgcaggccttggcccctttcctcatctgtagacacacttgagtagcccaggcacagccatgggagattcggagatggcagtctttggggctgccgccccctacctgcgcaagtcagagaaggagcggctagaagcgcagaccaggccttttgacctcaagaaggatgtcttcgtgcctgatgacaaacaggagtttgtcaaggccaagatcgtgtctcgagagggtggcaaagtcactgccgagaccgagtatggcaagacagtgaccgtgaaggaggaccaggtgatgcagcagaacccacccaagttcgacaaaatcgaggacatggccatgctgaccttcctgcatgagcccgcggtgctctacaacctcaaggatcgctacggctcctggatgatctacacctactcgggcctcttctgtgtcaccgtcaacccttacaagtggctgccggtgtacactcctgaggtggtggctgcctaccggggcaagaagaggagcgaggccccgccccacatcttctccatctccgacaacgcctatcagtacatgctgacagacagagaaaaccagtccatcctgatcaccggagaatccggagcagggaagacagtcaacaccaagagggtcatccagtactttgctgttattgcagccattggggaccgcagcaagaaggaccagagcccgggcaagggcaccctggaggaccagatcatccaggccaaccctgctctggaggcctttggcaatgccaagaccgtccggaacgacaactcctcccgcttcgggaaattcattcgaattcattttggggcaacaggaaagttggcatctgcagacatagagacctatcttctggaaaaatccagagttattttccagctgaaagcagagagagattatcacattttctaccaaatcctgtctaacaaaaagcctgagctgctggacatgctgctgatcaccaacaacccctacgattatgcattcatctcccaaggagagaccaccgtggcctccattgatgacgctgaggagctcatggccactgataacgcttttgatgtgctgggcttcacttcagaggagaaaaactccatgtataagctgacaggcgccatcatgcactttggaaacatgaagttcaagctgaagcagcgggaggagcaggcggagccagacggcactgaagaggctgacaagtctgcctacctcatggggctgaactcagccgacctgctcaaggggctgtgccaccctcgggtgaaagtgggcaatgagtacgtcaccaaggggcagaatgtccagcaggtgatatatgccactggggcactggccaaggcagtgtatgagaggatgttcaactggatggtgacgcgcatcaatgccaccctggagaccaagcagccacgccagtacttcataggagtcctggacatcgctggcttcgagatcttcgatttcaacagctttgagcagctctgcatcaacttcaccaacgagaagctgcagcagttcttcaaccaccacatgtttgtgctggagcaggaggagtacaagaaggagggcatcgagtggacattcattgactttggcatggacctgcaggcctgcattgacctcatcgagaagcccatgggcatcatgtccatcctggaagaggagtgcatgttccccaaggccaccgacatgaccttcaaggccaagctgtttgacaaccacctgggcaaatccgccaacttccagaagccacgcaatatcaaggggaagcctgaagcccacttctccctgatccactatgccggcatcgtggactacaacatcattggctggctgcagaagaacaaggatcctctcaatgagactgtcgtgggcttgtatcagaagtcttccctcaagctgctcagcaccctgtttgccaactatgctggggctgatgcgcctattgagaagggcaaaggcaaggccaagaaaggctcgtcctttcagactgtgtcagctctgcacagggaaaatctgaacaagctgatgaccaacttgcgctccacccatccccactttgtacgttgtatcatccctaatgagacaaagtctccaggggtgatggacaaccccctggtcatgcaccagctgcgctgcaatggtgtgctggagggcatccgcatctgcaggaaaggcttccccaaccgcatcctctacggggacttccggcagaggtatcgcatcctgaacccagcggccatccctgagggacagttcattgatagcaggaagggggcagagaagctgctcagctccctggacattgatcacaaccagtacaagtttggccacaccaaggtgttcttcaaggccgggctgctggggctgctggaggaaatgagggacgagaggctgagccgcatcatcacgcgtatccaggcccagtcccgaggtgtgctcgccagaatggagtacaaaaagctgctggaacgtagagactccctgctggtaatccagtggaacattcgggccttcatgggggtcaagaattggccctggatgaagctctacttcaagatcaagccgctgctgaagagtgcagaaagagagaaggagatggcctccatgaaggaggagttcacacgcctcaaagaggcgctagagaagtccgaggctcgccgcaaggagctggaggagaagatggtgtccctgctgcaggagaagaatgacctgcagctccaagtgcaggcggaacaagacaacctggcagatgctgaggagcgctgtgatcagctgatcaaaaacaagattcagctggaggccaaggtgaaggagatgaacgagaggctggaggatgaggaggagatgaatgctgagctcactgccaagaagcgcaagctggaagatgagtgctcagagctcaaaagggacatcgatgatctggagctgacactggccaaagtggagaaggagaaacacgcaacagagaacaaggtgaaaaacctgacagaggagatggctgggctggatgagatcattgccaagctgaccaaggagaagaaagctctgcaagaggcccaccaacaggctctggatgaccttcaggccgaggaggacaaggtcaacaccctgactaaggccaaagtcaagctggagcagcaagtggatgatctggaaggatccctggagcaagagaagaaggtgcgcatggacctggagcgagcgaagcggaagctggagggcgacctgaagctgacccaggagagcatcatggacctggagaatgacaagcagcagctggatgagcggctgaaaaaaaaagactttgagctgaatgctctcaacgcaaggattgaggatgaacaggccctcggcagccagctgcagaagaagctcaaggagcttcaggcacgcatcgaggagctggaggaggagctggaggccgagcgcaccgccagggctaaggtggagaagctgcgctcagacctgtctcgggagctggaggagatcagcgagcggctggaagaggccggcggggccacgtccgtgcagatcgagatgaacaagaagcgcgaggccgagttccagaagatgcggcgggacctggaggaggccacgctgcagcacgaggccactgccgcggccctgcgcaagaagcacgccgacagcgtggccgagctgggcgagcagatcgacaacctgcagcgggtgaagcagaagctggagaaggagaagagcgagttcaagctggagctggatgacgtcacctccaacatggagcagatcatcaaggccaaggctaacctggagaagatgtgccggaccttggaagaccagatgaatgagcaccggagcaaggcggaggagacccagcgttctgtcaacgacctcaccagccagcgggccaagttgcaaaccgagaatggtgagctgtcccggcagctggatgagaaggaggcactgatctcccagctgacccgaggcaagctcacctacacccagcagctggaggacctcaagaggcagctggaggaggaggttaaggcgaagaacgccctggcccacgcactgcagtcggcccggcatgactgcgacctgctgcgggagcagtacgaggaggagacggaggccaaggccgagctgcagcgcgtcctttccaaggccaactcggaggtggcccagtggaggaccaagtatgagacggacgccattcagcggactgaggagctcgaggaggccaagaagaagctggcccagcggctgcaggaagctgaggaggccgtggaggctgttaatgccaagtgctcctcgctggagaagaccaagcaccggctacagaatgagatcgaggacttgatggtggacgtagagcgctccaatgctgctgctgcagccctggacaagaagcagaggaacttcgacaagatcctggccgagtggaagcagaagtatgaggagtcgcagtcggagctggagtcctcgcagaaggaggctcgctccctcagcacagagctcttcaaactcaagaacgcctatgaggagtccctggaacatctggagaccttcaagcgggagaacaaaaacctgcaggaggagatctccgacttgactgagcagttgggttccagcggaaagactatccatgagctggagaaggtccgaaagcagctggaggccgagaagatggagctgcagtcagccctggaggaggccgaggcctccctggagcacgaggagggcaagatcctccgggcccagctggagttcaaccagatcaaggcagagatcgagcggaagctggcagagaaggacgaggagatggaacaggccaagcgcaaccacctgcgggtggtggactcgctgcagacctccctggacgcagagacacgcagccgcaacgaggccctgagggtgaagaagaagatggaaggagacctcaatgagatggagatccagctcagccacgccaaccgcatggccgccgaggcccagaagcaagtcaagagcctccagagcttgttgaaggacacccagattcagctggacgatgcagtccgtgccaacgacgacctgaaggagaacatcgccatcgtggagcggcgcaacaacctgctgcaggctgagctggaggagttgcgtgccgtggtggagcagacagagcggtcccggaagctggcggagcaggagctgattgagactagtgagcgggtgcagctgctgcattcccagaacaccagcctcatcaaccagaagaagaagatggatgctgacctgtcccagctccagactgaagtggaggaggcagtgcaggagtgcaggaatgctgaggagaaggccaagaaggccatcacggatgccgccatgatggcagaggagctgaagaaggagcaggacaccagcgcccacctggagcgcatgaagaagaacatggaacagaccattaaggacctgcagcaccggctggacgaagccgagcagatcgccctcaagggcggcaagaagcagctgcagaagctggaagcgcgggtgcgggagctggagaatgagctggaggccgagcagaagcgcaacgcagagtcggtgaagggcatgaggaagagcgagcggcgcatcaaggagctcacctaccagacggaggaggacaggaaaaacctgctgcggctgcaggacctggtagacaagctgcagctaaaggtcaaggcctacaagcgccaggccgaggaggcggaggagcaagccaacaccaacctgtccaagttccgcaaggtgcagcacgagctggatgaggcagaggagcgggcggacatcgccgagtcccaggtcaacaagctgcgggccaagagccgtgacattggcacgaagggcttgaatgaggagtagctttgccacatcttgatctgctcagccctggaggtgccagcaaagccccatgctggagcctgtgtaacagctccttgggaggaagcagaataaagcaattttccttgaagccgaga

SEQ ID NO: 19270 - DNA, 6042 bp, Homo sapiens
  source 1..6042: mol_type = unassigned DNA
cacagctctgtcctgctctgtgtctttccctgctgctctcaggtcccctgcaggccttggcccctttcctcatctgtagacacacttgagtagcccaggcacagccatgggagattcggagatggcagtctttggggctgccgccccctacctgcgcaagtcagagaaggagcggctagaagcgcagaccaggccttttgacctcaagaaggatgtcttcgtgcctgatgacaaacaggagtttgtcaaggccaagatcgtgtctcgagagggtggcaaagtcactgccgagaccgagtatggcaagacagtgaccgtgaaggaggaccaggtgatgcagcagaacccacccaagttcgacaaaatcgaggacatggccatgctgaccttcctgcatgagcccgcggtgctctacaacctcaaggatcgctacggctcctggatgatctacacctactcgggcctcttctgtgtcaccgtcaacccttacaagtggctgccggtgtacactcctgaggtggtggctgcctaccggggcaagaagaggagcgaggccccgccccacatcttctccatctccgacaacgcctatcagtacatgctgacagacagagaaaaccagtccatcctgatcaccggagaatccggagcagggaagacagtcaacaccaagagggtcatccagtactttgctgttattgcagccattggggaccgcagcaagaaggaccagagcccgggcaagggcaccctggaggaccagatcatccaggccaaccctgctctggaggcctttggcaatgccaagaccgtccggaacgacaactcctcccgcttcgggaaattcattcgaattcattttggggcaacaggaaagttggcatctgcagacatagagacctatcttctggaaaaatccagagttattttccagctgaaagcagagagagattatcacattttctaccaaatcctgtctaacaaaaagcctgagctgctggacatgctgctgatcaccaacaacccctacgattatgcattcatctcccaaggagagaccaccgtggcctccattgatgacgctgaggagctcatggccactgataacgcttttgatgtgctgggcttcacttcagaggagaaaaactccatgtataagctgacaggcgccatcatgcactttggaaacatgaagttcaagctgaagcagcgggaggagcaggcggagccagacggcactgaagaggctgacaagtctgcctacctcatggggctgaactcagccgacctgctcaaggggctgtgccaccctcgggtgaaagtgggcaatgagtacgtcaccaaggggcagaatgtccagcaggtgatatatgccactggggcactggccaaggcagtgtatgagaggatgttcaactggatggtgacgcgcatcaatgccaccctggagaccaagcagccacgccagtacttcataggagtcctggacatcgctggcttcgagatcttcgatttcaacagctttgagcagctctgcatcaacttcaccaacgagaagctgcagcagttcttcaaccaccacatgtttgtgctggagcaggaggagtacaagaaggagggcatcgagtggacattcattgactttggcatggacctgcaggcctgcattgacctcatcgagaagcccatgggcatcatgtccatcctggaagaggagtgcatgttccccaaggccaccgacatgaccttcaaggccaagctgtttgacaaccacctgggcaaatccgccaacttccagaagccacgcaatatcaaggggaagcctgaagcccacttctccctgatccactatgccggcatcgtggactacaacatcattggctggctgcagaagaacaaggatcctctcaatgagactgtcgtgggcttgtatcagaagtcttccctcaagctgctcagcaccctgtttgccaactatgctggggctgatgcgcctattgagaagggcaaaggcaaggccaagaaaggctcgtcctttcagactgtgtcagctctgcacagggaaaatctgaacaagctgatgaccaacttgcgctccacccatccccactttgtacgttgtatcatccctaatgagacaaagtctccaggggtgatggacaaccccctggtcatgcaccagctgcgctgcaatggtgtgctggagggcatccgcatctgcaggaaaggcttccccaaccgcatcctctacggggacttccggcagaggtatcgcatcctgaacccagcggccatccctgagggacagttcattgatagcaggaagggggcagagaagctgctcagctccctggacattgatcacaaccagtacaagtttggccacaccaaggtgttcttcaaggccgggctgctggggctgctggaggaaatgagggacgagaggctgagccgcatcatcacgcgtatccaggcccagtcccgaggtgtgctcgccagaatggagtacaaaaagctgctggaacgtagagactccctgctggtaatccagtggaacattcgggccttcatgggggtcaagaattggccctggatgaagctctacttcaagatcaagccgctgctgaagagtgcagaaagagagaaggagatggcctccatgaaggaggagttcacacgcctcaaagaggcgctagagaagtccgaggctcgccgcaaggagctggaggagaagatggtgtccctgctgcaggagaagaatgacctgcagctccaagtgcaggcggaacaagacaacctggcagatgctgaggagcgctgtgatcagctgatcaaaaacaagattcagctggaggccaaggtgaaggagatgaacgagaggctggaggatgaggaggagatgaatgctgagctcactgccaagaagcgcaagctggaagatgagtgctcagagctcaaaagggacatcgatgatctggagctgacactggccaaagtggagaaggagaaacacgcaacagagaacaaggtgaaaaacctgacagaggagatggctgggctggatgagatcattgccaagctgaccaaggagaagaaagctctgcaagaggcccaccaacaggctctggatgaccttcaggccgaggaggacaaggtcaacaccctgactaaggccaaagtcaagctggagcagcaagtggatgatctggaaggatccctggagcaagagaagaaggtgcgcatggacctggagcgagcgaagcggaagctggagggcgacctgaagctgacccaggagagcatcatggacctggagaatgacaagcagcagctggatgagcggctgaaaaaaaaagactttgagctgaatgctctcaacgcaaggattgaggatgaacaggccctcggcagccagctgcagaagaagctcaaggagcttcaggcacgcatcgaggagctggaggaggagctggaggccgagcgcaccgccagggctaaggtggagaagctgcgctcagacctgtctcgggagctggaggagatcagcgagcggctggaagaggccggcggggccacgtccgtgcagatcgagatgaacaagaagcgcgaggccgagttccagaagatgcggcgggacctggaggaggccacgctgcagcacgaggccactgccgcggccctgcgcaagaagcacgccgacagcgtggccgagctgggcgagcagatcgacaacctgcagcgggtgaagcagaagctggagaaggagaagagcgagttcaagctggagctggatgacgctctgctcggcctcccctcctccaacttcctcctcccacctcccctttctgctaacctggagaagatgtgccggaccttggaagaccagatgaatgagcaccggagcaaggcggaggagacccagcgttctgtcaacgacctcaccagccagcgggccaagttgcaaaccgagaatggtgagctgtcccggcagctggatgagaaggaggcactgatctcccagctgacccgaggcaagctcacctacacccagcagctggaggacctcaagaggcagctggaggaggaggttaaggcgaagaacgccctggcccacgcactgcagtcggcccggcatgactgcgacctgctgcgggagcagtacgaggaggagacggaggccaaggccgagctgcagcgcgtcctttccaaggccaactcggaggtggcccagtggaggaccaagtatgagacggacgccattcagcggactgaggagctcgaggaggccaagaagaagctggcccagcggctgcaggaagctgaggaggccgtggaggctgttaatgccaagtgctcctcgctggagaagaccaagcaccggctacagaatgagatcgaggacttgatggtggacgtagagcgctccaatgctgctgctgcagccctggacaagaagcagaggaacttcgacaagatcctggccgagtggaagcagaagtatgaggagtcgcagtcggagctggagtcctcgcagaaggaggctcgctccctcagcacagagctcttcaaactcaagaacgcctatgaggagtccctggaacatctggagaccttcaagcgggagaacaaaaacctgcaggaggagatctccgacttgactgagcagttgggttccagcggaaagactatccatgagctggagaaggtccgaaagcagctggaggccgagaagatggagctgcagtcagccctggaggaggccgaggcctccctggagcacgaggagggcaagatcctccgggcccagctggagttcaaccagatcaaggcagagatcgagcggaagctggcagagaaggacgaggagatggaacaggccaagcgcaaccacctgcgggtggtggactcgctgcagacctccctggacgcagagacacgcagccgcaacgaggccctgagggtgaagaagaagatggaaggagacctcaatgagatggagatccagctcagccacgccaaccgcatggccgccgaggcccagaagcaagtcaagagcctccagagcttgttgaaggacacccagattcagctggacgatgcagtccgtgccaacgacgacctgaaggagaacatcgccatcgtggagcggcgcaacaacctgctgcaggctgagctggaggagttgcgtgccgtggtggagcagacagagcggtcccggaagctggcggagcaggagctgattgagactagtgagcgggtgcagctgctgcattcccagaacaccagcctcatcaaccagaagaagaagatggatgctgacctgtcccagctccagactgaagtggaggaggcagtgcaggagtgcaggaatgctgaggagaaggccaagaaggccatcacggatgccgccatgatggcagaggagctgaagaaggagcaggacaccagcgcccacctggagcgcatgaagaagaacatggaacagaccattaaggacctgcagcaccggctggacgaagccgagcagatcgccctcaagggcggcaagaagcagctgcagaagctggaagcgcgggtgcgggagctggagaatgagctggaggccgagcagaagcgcaacgcagagtcggtgaagggcatgaggaagagcgagcggcgcatcaaggagctcacctaccagacggaggaggacaggaaaaacctgctgcggctgcaggacctggtagacaagctgcagctaaaggtcaaggcctacaagcgccaggccgaggaggcggaggagcaagccaacaccaacctgtccaagttccgcaaggtgcagcacgagctggatgaggcagaggagcgggcggacatcgccgagtcccaggtcaacaagctgcgggccaagagccgtgacattggcacgaagggcttgaatgaggagtagctttgccacatcttgatctgctcagccctggaggtgccagcaaagccccatgctggagcctgtgtaacagctccttgggaggaagcagaataaagcaattttccttgaagccg

SEQ ID NO: 19271 - DNA, 6019 bp, Homo sapiens
  source 1..6019: mol_type = unassigned DNA
gtggaacacttctgaacctgcatttttatctggaactccagaggcagaatcctttgctaaataaatcgcagccatgagtgcgagctcagacgctgagatggctgtttttggcgaagctgctccctaccttcgaaaatcagaaaaggagcggattgaggcccaaaacaagccgtttgatgctaaaacatctgtctttgtggcggagcccaaggaatcctatgtgaagagcactatacaaagcaaagaaggagggaaagtaaccgtaaagactgaaggtggagcaactctaactgtcagggaagaccaagtcttccctatgaaccctccgaaatatgacaaaattgaggacatggccatgatgactcatctacacgagcctggagtgctgtacaacctcaaagagcgctatgcagcctggatgatctacacctactcaggcctcttctgtgtcaccgtcaacccctacaagtggctgccggtgtacaagcccgaggtggtggctgcctacagaggcaaaaagcgccaggaggccccgccccacatcttctccatctctgacaatgcctatcagttcatgttgactgatcgagagaatcagtccatcctgatcaccggagaatctggtgccggaaagactgtgaacaccaagcgtgtcatccaatactttgcaacaattgcagttactggagagaagaagaaggatgaatctggcaaaatgcaggggactctggaagatcaaatcatcagcgccaatcccctactggaggcctttggcaatgccaaaactgtgaggaatgacaactcctctcgctttggtaaattcattagaatccactttggtactacagggaagctggcatctgctgatatagaaacatatcttttagaaaagtccagagttactttccagctaaaggcggaaagaagctaccatattttttatcagatcacttccaataagaagccagatctaattgaaatgctcctgatcaccaccaacccatatgactatgccttcgtcagtcagggggagatcacagttcccagtattgatgaccaagaagagttgatggccactgatagtgccattgacatcctgggcttcactcctgaagagaaagtgtccatctataaactcacaggggctgtgatgcattatgggaacatgaaattcaagcaaaagcagcgtgaggagcaagctgagccagatggcacagaagtcgctgacaaggcagcctatctccagagtctgaactctgcagacctactcaaagccctctgctaccctagggtcaaggttggcaatgagtatgtcaccaaaggccagactgtgcagcaggtgtacaatgcggtgggtgctctggccaaagccgtctacgagaagatgttcctgtggatggtcacccgcatcaaccagcagctggacaccaagcagcccaggcagtacttcatcggggtcttggacattgctggctttgaaatctttgattttaacagcctggagcagctgtgcatcaacttcaccaacgagaaactgcaacagtttttcaaccaccacatgtttgtgctagagcaggaggagtacaagaaggaaggcatcgagtggacgttcattgactttgggatggacctggctgcctgcattgagctcattgagaagccactgggcatcttctccatcctggaagaggagtgcatgttccctaaggcaacggacacctccttcaagaacaagctgtatgaccagcacctgggcaagtctgccaacttccagaagcccaaggtggtcaaaggcaaggctgaggcccacttctctctgattcactatgctggcactgtggactacaacattactggctggctggacaaaaataaggaccccctgaatgatactgtggttgggctgtaccagaagtctgcaatgaagactctagccagtctcttttccacgtatgctagtgctgaagcagatagcagcgcgaagaaaggtgctaagaaaaagggctcttctttccagactgtgtctgcccttttcagggaaaatttaaataaattgatgacgaatctgaggagcacacaccctcacttcgtacggtgtatcattcccaatgaaaccaaaactcctggggcaatggaacatgaacttgtgttgcaccagctgaggtgtaatggtgtgctggaaggcatccgcatctgtaggaaaggattcccaagcagaatcttatatggtgatttcaaacaaagatacaaggttttaaatgcaagtgctattccagagggacagttcattgacagcaagaaggcttctgagaaacttcttgcatctattgatattgatcatactcaatataaatttggacataccaaggttttcttcaaagctggacttctgggtcttctggaagaaatgagagatgaaaaattagcccaaattataacaagaacacaagctgtctgtaggggattcctaatgagggtagaatatcagaagatgttgcaaaggagagaagcacttttctgcatccagtataatgtccgtgccttcatgaacgtcaagcactggccctggatgaaactctttttcaagattaagcccctcctcaagagtgcagagaccgagaaagagatggccaccatgaaggaagaattccagaaaaccaaagatgaactcgccaagtcagaggcaaaacggaaggagctagaggaaaaaatggtcactctcttaaaagagaaaaatgacctgcaactccaggttcaatctgaagcagatagcttggctgatgcagaggaaaggtgtgagcaactgattaaaaacaaaatccaacttgaggccaaaatcaaagaggtgactgaaagagctgaggaggaggaagagatcaatgctgagctgacagccaagaagagaaaactggaggatgaatgttcagaactcaagaaagacattgatgaccttgagctgacactggccaaggttgagaaggagaaacatgccacggagaacaaggtgaaaaatcttacagaagagatggcaggcctggatgaaaccattgcaaaactgtccaaggagaagaaggctctccaagagacccaccagcagaccctggatgacctgcaggcagaggaggacaaagtcaacatcctgaccaaagctaaaaccaagctagaacagcaagtggatgatcttgaagggtctctggaacaagaaaagaagcttcgaatggatctagaaagagcaaagcggaaactggagggtgacctcaaattggcccaagaatccacaatggatatggaaaatgacaaacagcaacttgatgaaaagcttgaaaagaaagaatttgaaatcagcaatttgataagcaaaattgaagatgagcaagctgtagaaattcaactacagaagaagatcaaagagttgcaggcccgcattgaggagctgggggaagaaatcgaggcagagagggcgtcccgagccaaagcggagaagcagcgctctgacctctcccgggaactggaggagatcagcgagaggctggaagaagccggtggggcaacttctgctcaggtggaattgaacaagaagcgggaggctgagtttcagaaactgcgcagggacctggaggaggccaccctgcagcatgaagctatggtggctgctcttcggaagaagcacgcagacagtatggctgagcttggggagcagattgacaacttgcagcgggtcaaacagaagctggagaaggagaagagtgagctgaagatggagactgatgacctcagcagtaacgcagaggccatttccaaagccaagggaaaccttgaaaagatgtgccgctctctagaagatcaagtgagtgagcttaagaccaaggaagaggagcagcagcggctgatcaatgacctcacagcacagagagcgcgcctgcagacagaagcgggtgaatattctcgacaattagatgagaaagatgctttagtctctcagctttcaaggagcaagcaagcatctactcagcagattgaagagctgaaacatcaactagaggaagaaactaaagccaagaacgccctggcacacgccctgcagtcctcccgccatgactgcgacctgctgcgggaacagtatgaggaagagcaggaaggcaaagctgagctgcagagggcgctgtccaaggccaacagtgaggttgcccagtggagaaccaaatacgagacggatgccatccagcgcacagaggagctggaggaggccaagaaaaagttggcccagcgcctgcaagaagctgaggaacatgtagaagctgtgaacgccaaatgtgcttcccttgagaagacgaagcagcggctccagaatgaagttgaagacctcatgcttgatgtggaaaggtctaatgcagcctgtgcagcccttgataagaagcaaaggaactttgacaaggtcctatcagaatggaagcagaagtatgaggaaactcaggctgaacttgaggcctcccagaaggagtcacgttctcttagcactgagctgttcaaggtgaagaatgtctatgaggaatccctggatcaactcgaaacgctaagaagagaaaataagaacttgcaacaggagatttctgacctcactgagcagattgcagagggaggaaagcaaattcatgaattggagaaaataaagaagcaagtagaacaagagaaatgtgaaattcaggctgctttagaggaagcagaggcatctcttgaacatgaagaaggaaagattctgcgtatccagcttgagttaaaccaagtcaagtctgaagttgatagaaaaatcgcagaaaaggatgaggaaattgaccagctgaagagaaaccacactagagtcgtggagacaatgcagagcacgctggatgcagagattagaagcagaaatgatgctctgagagtcaagaagaaaatggaaggagatctgaatgaaatggaaatccagctgaaccatgccaatcgcttagctgcagagagtttaaggaactacaggaacacccaaggaatcctgaaggaaacccagctccacctggatgatgctctccggggccaggaggacctcaaggaacagctggcaattgtggagcgcagagccaacctgctgcaggctgagatcgaggagctgtgggccactctggaacagacagagagaagcaggaaaatcgccgaacaggagctcctggatgccagtgagcgtgtccagctcctccacacccagaataccagtctcattaacaccaagaagaaattagaaaatgacgtttcccaactccaaagtgaagtggaagaagtaatccaagaatcacgcaatgcagaagagaaagccaagaaggccatcactgatgctgccatgatggctgaggagctgaagaaggaacaggacaccagcgcccacctggagcggatgaagaagaacctggagcagacggtgaaggacctgcagcatcgtctagatgaggccgagcagctggcgctgaagggtgggaagaagcagatccagaaactggaggccagggtacgtgagcttgaaggagaggttgaaaatgaacagaaacgtaatgcagaggctgttaaaggtttacggaaacatgagcgacgagtaaaagaactcacctaccagactgaagaagatcgcaagaatgttctcaggctgcaggacttggtagataaattacaggcgaaggtgaaatcatacaagagacaagctgaggaggctgaggaacaatccaatgctaatctatctaaattccgcaaactccagcatgagctggaggaggccgaggaacgggctgacattgctgagtcccaggtcaacaaattgcgagtgaagagccgagaggttcacacaaaaatcagtgcagagtaaacacacctgcctgatgctatcaagaggctgaagaaaggcacaaaatgtgctatttttggtcacttgctttatgacgtttattttcctgttaaagctgaataaataaaaactacagtaaatgtatacattaaa

SEQ ID NO: 19272 - DNA, 6038 bp, Homo sapiens
  source 1..6038: mol_type = unassigned DNA
atttccaccaagaacccagagagtggaacacttctgaacctgcatttttatctggaactccagaggcagaatcctttgctaaataaatcgcagccatgagtgcgagctcagacgctgagatggctgtttttggcgaagctgctccctaccttcgaaaatcagaaaaggagcggattgaggcccaaaacaagccgtttgatgctaaaacatctgtctttgtggcggagcccaaggaatcctatgtgaagagcactatacaaagcaaagaaggagggaaagtaaccgtaaagactgaaggtggagcaactctaactgtcagggaagaccaagtcttccctatgaaccctccgaaatatgacaaaattgaggacatggccatgatgactcatctacacgagcctggagtgctgtacaacctcaaagagcgctatgcagcctggatgatctacacctactcaggcctcttctgtgtcaccgtcaacccctacaagtggctgccggtgtacaagcccgaggtggtggctgcctacagaggcaaaaagcgccaggaggccccgccccacatcttctccatctctgacaatgcctatcagttcatgttgactgatcgagagaatcagtccatcctgatcaccggagaatctggtgccggaaagactgtgaacaccaagcgtgtcatccaatactttgcaacaattgcagttactggagagaagaagaaggatgaatctggcaaaatgcaggggactctggaagatcaaatcatcagcgccaatcccctactggaggcctttggcaatgccaaaactgtgaggaatgacaactcctctcgctttggtaaattcattagaatccactttggtactacagggaagctggcatctgctgatatagaaacatatcttttagaaaagtccagagttactttccagctaaaggcggaaagaagctaccatattttttatcagatcacttccaataagaagccagatctaattgaaatgctcctgatcaccaccaacccatatgactatgccttcgtcagtcagggggagatcacagttcccagtattgatgaccaagaagagttgatggccactgatagtgccattgacatcctgggcttcactcctgaagagaaagtgtccatctataaactcacaggggctgtgatgcattatgggaacatgaaattcaagcaaaagcagcgtgaggagcaagctgagccagatggcacagaagtcgctgacaaggcagcctatctccagagtctgaactctgcagacctactcaaagccctctgctaccctagggtcaaggttggcaatgagtatgtcaccaaaggccagactgtgcagcaggtgtacaatgcggtgggtgctctggccaaagccgtctacgagaagatgttcctgtggatggtcacccgcatcaaccagcagctggacaccaagcagcccaggcagtacttcatcggggtcttggacattgctggctttgaaatctttgattttaacagcctggagcagctgtgcatcaacttcaccaacgagaaactgcaacagtttttcaaccaccacatgtttgtgctagagcaggaggagtacaagaaggaaggcatcgagtggacgttcattgactttgggatggacctggctgcctgcattgagctcattgagaagccactgggcatcttctccatcctggaagaggagtgcatgttccctaaggcaacggacacctccttcaagaacaagctgtatgaccagcacctgggcaagtctgccaacttccagaagcccaaggtggtcaaaggcaaggctgaggcccacttctctctgattcactatgctggcactgtggactacaacattactggctggctggacaaaaataaggaccccctgaatgatactgtggttgggctgtaccagaagtctgcaatgaagactctagccagtctcttttccacgtatgctagtgctgaagcagatagcagcgcgaagaaaggtgctaagaaaaagggctcttctttccagactgtgtctgcccttttcagggaaaatttaaataaattgatgacgaatctgaggagcacacaccctcacttcgtacggtgtatcattcccaatgaaaccaaaactcctggggcaatggaacatgaacttgtgttgcaccagctgaggtgtaatggtgtgctggaaggcatccgcatctgtaggaaaggattcccaagcagaatcttatatggtgatttcaaacaaagatacaaggttttaaatgcaagtgctattccagagggacagttcattgacagcaagaaggcttctgagaaacttcttgcatctattgatattgatcatactcaatataaatttggacataccaaggttttcttcaaagctggacttctgggtcttctggaagaaatgagagatgaaaaattagcccaaattataacaagaacacaagctgtctgtaggggattcctaatgagggtagaatatcagaagatgttgcaaaggagagaagcacttttctgcatccagtataatgtccgtgccttcatgaacgtcaagcactggccctggatgaaactctttttcaagattaagcccctcctcaagagtgcagagaccgagaaagagatggccaccatgaaggaagaattccagaaaaccaaagatgaactcgccaagtcagaggcaaaacggaaggagctagaggaaaaaatggtcactctcttaaaagagaaaaatgacctgcaactccaggttcaatctgaagcagatagcttggctgatgcagaggaaaggtgtgagcaactgattaaaaacaaaatccaacttgaggccaaaatcaaagaggtgactgaaagagctgaggaggaggaagagatcaatgctgagctgacagccaagaagagaaaactggaggatgaatgttcagaactcaagaaagacattgatgaccttgagctgacactggccaaggttgagaaggagaaacatgccacggagaacaaggtgaaaaatcttacagaagagatggcaggcctggatgaaaccattgcaaaactgtccaaggagaagaaggctctccaagagacccaccagcagaccctggatgacctgcaggcagaggaggacaaagtcaacatcctgaccaaagctaaaaccaagctagaacagcaagtggatgatcttgaagggtctctggaacaagaaaagaagcttcgaatggatctagaaagagcaaagcggaaactggagggtgacctcaaattggcccaagaatccacaatggatatggaaaatgacaaacagcaacttgatgaaaagcttgaaaagaaagaatttgaaatcagcaatttgataagcaaaattgaagatgagcaagctgtagaaattcaactacagaagaagatcaaagagttgcaggcccgcattgaggagctgggggaagaaatcgaggcagagagggcgtcccgagccaaagcggagaagcagcgctctgacctctcccgggaactggaggagatcagcgagaggctggaagaagccggtggggcaacttctgctcaggtggaattgaacaagaagcgggaggctgagtttcagaaactgcgcagggacctggaggaggccaccctgcagcatgaagctatggtggctgctcttcggaagaagcacgcagacagtatggctgagcttggggagcagattgacaacttgcagcgggtcaaacagaagctggagaaggagaagagtgagctgaagatggagactgatgacctcagcagtaacgcagaggccatttccaaagccaagggaaaccttgaaaagatgtgccgctctctagaagatcaagtgagtgagcttaagaccaaggaagaggagcagcagcggctgatcaatgacctcacagcacagagagcgcgcctgcagacagaagcgggtgaatattctcgacaattagatgagaaagatgctttagtctctcagctttcaaggagcaagcaagcatctactcagcagattgaagagctgaaacatcaactagaggaagaaactaaagccaagaacgccctggcacacgccctgcagtcctcccgccatgactgcgacctgctgcgggaacagtatgaggaagagcaggaaggcaaagctgagctgcagagggcgctgtccaaggccaacagtgaggttgcccagtggagaaccaaatacgagacggatgccatccagcgcacagaggagctggaggaggccaagaaaaagttggcccagcgcctgcaagaagctgaggaacatgtagaagctgtgaacgccaaatgtgcttcccttgagaagacgaagcagcggctccagaatgaagttgaagacctcatgcttgatgtggaaaggtctaatgcagcctgtgcagcccttgataagaagcaaaggaactttgacaaggtcctatcagaatggaagcagaagtatgaggaaactcaggctgaacttgaggcctcccagaaggagtcacgttctcttagcactgagctgttcaaggtgaagaatgtctatgaggaatccctggatcaactcgaaacgctaagaagagaaaataagaacttgcaacaggagatttctgacctcactgagcagattgcagagggaggaaagcaaattcatgaattggagaaaataaagaagcaagtagaacaagagaaatgtgaaattcaggctgctttagaggaagcagaggcatctcttgaacatgaagaaggaaagattctgcgtatccagcttgagttaaaccaagtcaagtctgaagttgatagaaaaatcgcagaaaaggatgaggaaattgaccagctgaagagaaaccacactagagtcgtggagacaatgcagagcacgctggatgcagagattagaagcagaaatgatgctctgagagtcaagaagaaaatggaaggagatctgaatgaaatggaaatccagctgaaccatgccaatcgcttagctgcagagagtttaaggaactacaggaacacccaaggaatcctgaaggaaacccagctccacctggatgatgctctccggggccaggaggacctcaaggaacagctggcaattgtggagcgcagagccaacctgctgcaggctgagatcgaggagctgtgggccactctggaacagacagagagaagcaggaaaatcgccgaacaggagctcctggatgccagtgagcgtgtccagctcctccacacccagaataccagtctcattaacaccaagaagaaattagaaaatgacgtttcccaactccaaagtgaagtggaagaagtaatccaagaatcacgcaatgcagaagagaaagccaagaaggccatcactgatgctgccatgatggctgaggagctgaagaaggaacaggacaccagcgcccacctggagcggatgaagaagaacctggagcagacggtgaaggacctgcagcatcgtctagatgaggccgagcagctggcgctgaagggtgggaagaagcagatccagaaactggaggccagggtacgtgagcttgaaggagaggttgaaaatgaacagaaacgtaatgcagaggctgttaaaggtttacggaaacatgagcgacgagtaaaagaactcacctaccagactgaagaagatcgcaagaatgttctcaggctgcaggacttggtagataaattacaggcgaaggtgaaatcatacaagagacaagctgaggaggctgaggaacaatccaatgctaatctatctaaattccgcaaactccagcatgagctggaggaggccgaggaacgggctgacattgctgagtcccaggtcaacaaattgcgagtgaagagccgagaggttcacacaaaaatcagtgcagagtaaacacacctgcctgatgctatcaagaggctgaagaaaggcacaaaatgtgctatttttggtcacttgctttatgacgtttattttcctgttaaagctgaataaataaaaactacagtaaatgtatacatt

SEQ ID NO: 19273 - DNA, 870 bp, Homo sapiens
  source 1..870: mol_type = unassigned DNA
ccagggatgaccccactcagggaccggagcagccctcaactcactcttcagcttccctgctgtgttgcagcccagccgctccatcatgtccttcagtgctgaccagattgctgaattcaaggaggcatttctcctgtttgacagaacaggtgattccaagatcaccttaagccaggtcggtgatgtccttcgagctctgggcacaaatcccaccaatgcagaggtcaggaaagttctgggaaaccccagcaatgaagagctgaatgccaagaaaattgagtttgaacaatttctgcctatgatgcaagccatttccaacaacaaggaccaggccacctatgaagactttgttgagggtctgcgtgtctttgacaaggaaggcaatggcacagtcatgggtgctgaactccgccatgttctagccaccctgggtgaaaagatgaaagaggaagaagtggaagccctgatggcaggtcaagaagactccaatggctgcatcaactacgaagcttttgtcaagcacatcatgtctatctgaatggagctctcaagaacaagcattgtttaggaagactggctggaaacttattttaatcacacccatgacaaactctccagatctgtttaccatcattcaggaaaacaaagcaatctggacggttcaagactgagcaactccctgaatttttatacatcttcagtttttctctgaattgaattcataccacacaaacaaagtgtctgctgctctagatgagaagaataaaatattgacaatctcaaatccaagcaccattctttattatctaccatgaatcaacaaacattcttaaaacaataaatcaataaacaattttggtcagtctggaa

SEQ ID NO: 19274 - DNA, 1065 bp, Homo sapiens
  source 1..1065: mol_type = unassigned DNA
tgcccttatgccgtttaacactctgggtccatcttcaagacactgggctgtggatcaacccaaccaccactcctcttccaagaatcattttgacaggttcttttggaggaactccttctctttttaacccacccttttaaaaaaaaaaatggcaccaaagaaagacgtgaagaaacctgtggctgcggctgcggctgccccagccccggcaccggcacctgcacctgcccctgccccagccaaacccaaagaagaaaaaattgacctctctgccattaagatcgagttctctaaggaacagcaggatgaattcaaggaggcatttctcctgtttgacagaacaggtgattccaagatcaccttaagccaggtcggtgatgtccttcgagctctgggcacaaatcccaccaatgcagaggtcaggaaagttctgggaaaccccagcaatgaagagctgaatgccaagaaaattgagtttgaacaatttctgcctatgatgcaagccatttccaacaacaaggaccaggccacctatgaagactttgttgagggtctgcgtgtctttgacaaggaaggcaatggcacagtcatgggtgctgaactccgccatgttctagccaccctgggtgaaaagatgaaagaggaagaagtggaagccctgatggcaggtcaagaagactccaatggctgcatcaactacgaagcttttgtcaagcacatcatgtctatctgaatggagctctcaagaacaagcattgtttaggaagactggctggaaacttattttaatcacacccatgacaaactctccagatctgtttaccatcattcaggaaaacaaagcaatctggacggttcaagactgagcaactccctgaatttttatacatcttcagtttttctctgaattgaattcataccacacaaacaaagtgtctgctgctctagatgagaagaataaaatattgacaatctcaaatccaagcaccattctttattatctaccatgaatcaacaaacattcttaaaacaataaatcaataaacaattttggtcagtctggaa

SEQ ID NO: 19275 - DNA, 1210 bp, Homo sapiens
  source 1..1210: mol_type = unassigned DNA
cgcagcgcaggccgcgatatcgcagcggatcggagcaggccggaggggcaattaagaccccggccgtgtgcgtccggcctcagcagccccgccgctcggcggacacgcagaccccgccggcccgggcgcgaacactcagcgcacccccgttccacttggtcccgccgcgccttccggtgcgccttccggtgcgccttccggtgcgccttccgctccgccccttcaggcaggaagtgtcggcgccgccactgtccggccacagcctaacgctcttcgctgtcgtttgtggtctcgcgcagggcggccccggttctggtgtttggcgtcggaattaaacaaccaccatgtcgagcaaaaaggcaaagaccaagaccaccaagaagcgccctcagcgtgcaacatccaatgtgtttgccatgtttgaccagtcacagattcaggagttcaaagaggccttcaacatgattgatcagaacagagatggcttcatcgacaaggaagatttgcatgatatgcttgcttctctagggaagaatcccactgatgcataccttgatgccatgatgaatgaggccccagggcccatcaatttcaccatgttcctgaccatgtttggtgagaagttaaatggcacagatcctgaagatgtcatcagaaacgcctttgcttgctttgatgaagaagcaacaggcaccattcaggaagattacctaagagagctgctgacaaccatgggggatcggtttacagatgaggaagtggatgagctgtacagagaagcacctattgacaaaaaggggaatttcaattacatcgagttcacacgcatcctgaaacatggagccaaagacaaagatgactgaaagaactttagctaaaatcttccagttacattgtcttactctcttttacttctcagacacttcccccaccctcatagaacctgttgcatgcaacttagtttcacagctttgcctcttctttttgatgtatttattccagacctttctgccacttagcacttgtataatcagactggaaatggggatgagggtgtaaattgtattgaaaaagatcgcgaataaaaatcaacaaatgtgaaagcccagaaaaatatattcgtatttctggttttgctggatttttacatttttatataataaaaatgttattttgaaataaagattatgctgactcaaatgcaatgtaa

SEQ ID NO: 19276 - DNA, 1064 bp, Homo sapiens
  source 1..1064: mol_type = unassigned DNA
actgaaggccttggattcaaccttaagagggagaacttagcgtttccggctagatgtgtgggaggtggtaacgagcaaaactcaaaagctgggaattgtgtcctgtgaaaagcaggccgtggggacaccggcgggtatggaacagaactgtaatgactaatagtcggaaataagggtagatagaattaaacaaccaccatgtcgagcaaaaaggcaaagaccaagaccaccaagaagcgccctcagcgtgcaacatccaatgtgtttgccatgtttgaccagtcacagattcaggagttcaaagaggccttcaacatgattgatcagaacagagatggcttcatcgacaaggaagatttgcatgatatgcttgcttctctagggaagaatcccactgatgcataccttgatgccatgatgaatgaggccccagggcccatcaatttcaccatgttcctgaccatgtttggtgagaagttaaatggcacagatcctgaagatgtcatcagaaacgcctttgcttgctttgatgaagaagcaacaggcaccattcaggaagattacctaagagagctgctgacaaccatgggggatcggtttacagatgaggaagtggatgagctgtacagagaagcacctattgacaaaaaggggaatttcaattacatcgagttcacacgcatcctgaaacatggagccaaagacaaagatgactgaaagaactttagctaaaatcttccagttacattgtcttactctcttttacttctcagacacttcccccaccctcatagaacctgttgcatgcaacttagtttcacagctttgcctcttctttttgatgtatttattccagacctttctgccacttagcacttgtataatcagactggaaatggggatgagggtgtaaattgtattgaaaaagatcgcgaataaaaatcaacaaatgtgaaagcccagaaaaatatattcgtatttctggttttgctggatttttacatttttatataataaaaatgttattttgaaataaagattatgctgactcaaatgcaatgtaa

SEQ ID NO: 19277 - DNA, 1025 bp, Homo sapiens
  source 1..1025: mol_type = unassigned DNA
ctgccctcccggcgccgcggcgggtcctggcggtggattggggccgacccgggcgtgttcgtgtggagcacctgccctgtgcccaacactatcctagatgctttggagggtggaggagcctcctgttgcacggtcttgcctaagaattaaacaaccaccatgtcgagcaaaaaggcaaagaccaagaccaccaagaagcgccctcagcgtgcaacatccaatgtgtttgccatgtttgaccagtcacagattcaggagttcaaagaggccttcaacatgattgatcagaacagagatggcttcatcgacaaggaagatttgcatgatatgcttgcttctctagggaagaatcccactgatgcataccttgatgccatgatgaatgaggccccagggcccatcaatttcaccatgttcctgaccatgtttggtgagaagttaaatggcacagatcctgaagatgtcatcagaaacgcctttgcttgctttgatgaagaagcaacaggcaccattcaggaagattacctaagagagctgctgacaaccatgggggatcggtttacagatgaggaagtggatgagctgtacagagaagcacctattgacaaaaaggggaatttcaattacatcgagttcacacgcatcctgaaacatggagccaaagacaaagatgactgaaagaactttagctaaaatcttccagttacattgtcttactctcttttacttctcagacacttcccccaccctcatagaacctgttgcatgcaacttagtttcacagctttgcctcttctttttgatgtatttattccagacctttctgccacttagcacttgtataatcagactggaaatggggatgagggtgtaaattgtattgaaaaagatcgcgaataaaaatcaacaaatgtgaaagcccagaaaaatatattcgtatttctggttttgctggatttttacatttttatataataaaaatgttattttgaaataaagattatgctgactcaaatgcaatgtaa

SEQ ID NO: 19278 - DNA, 1249 bp, Homo sapiens; identical to SEQ ID NO: 19167
  source 1..1249: mol_type = unassigned DNA

SEQ ID NO: 19279 - DNA, 792 bp, Homo sapiens
  source 1..792: mol_type = unassigned DNA
gcggagtgtggaattcttctcgggaggcagtgctgggtcctttccaccatggcacctaagaaagcaaagaagagagccgggggcgccaactccaacgtgttctccatgttcgaacagacccaaatccaggaatttaaggaggccttcactatcatggaccagaacagggatggcttcattgacaagaacgatctgagagacacctttgctgcccttgggcgagtgaacgtgaaaaatgaagaaattgatgaaatgatcaaggaggctccgggtccaattaactttactgtgttcctcacaatgtttggggagaaacttaagggagcggaccctgaggaaaccattctcaacgcattcaaagtgtttgaccctgaaggcaaaggggtgctgaaggctgattacgttcgggaaatgctgaccacgcaggcggagaggttttccaaggaggaggttgaccagatgttcgccgccttcccccctgacgtgactggcaacttggactacaagaacctggtgcacatcatcacccacggagaagagaaggactaggagggggctcgctgctgcgccctgggctcgtctttgcagagtggtccctgccctcatctctctcccccgagtaccgcctctgtccctaccttgtctgttagccatgtggctgccccatttatccacctccatcttctttgcagcctgggtggctatgggtacttcgtggccgcacatcctacagttggaaatccatccagaggccatgttccaataaacaggaggtcgtgtatttggtcacga

SEQ ID NO: 19280 - DNA, 924 bp, Homo sapiens
  source 1..924: mol_type = unassigned DNA
atccgggcaggataaaggcctgggtgaggcggctcacctaccctgctttctgcattcttctctccacatccctctctgtacttacagcccccaatggcccccaaaaagccagagcccaagaaggatgatgccaaggcagcccccaaggcagctccagctcccgcacctccccctgagcctgagcgccctaaggaggtcgagtttgatgcttccaagatcaagattgagttcacacctgagcagattgaagagttcaaggaagccttcatgctgttcgaccgcacacccaagtgtgagatgaagatcacctacgggcagtgtggggatgtcctgcgggcgctgggccagaaccccacacaggcagaagtgctccgtgtcctggggaagccaagacaggaagagctcaataccaagatgatggactttgaaactttcctgcctatgctccagcacatttccaagaacaaggacacaggcacctatgaggacttcgtggaggggctgcgggtcttcgacaaggagggcaatggcactgtcatgggtgctgagcttcgccacgtgctggccacgctgggtgagaggctgacagaagacgaagtggagaagttgatggctgggcaagaggactccaatggctgcatcaactatgaagcatttgtgaagcacatcatgtccagctaaacctcgtgcccaggaagcccagggaaggctgtgcagggacgtctcatctcccatgtgtgatgctgacaccagcggcctggagtcgtgggaaggaggggagccttaccaagactcctgcaaaaacccttggacctctccacgtggttgccgtctctggcccctctcaggctgtgcttacctgtgacagcagctctgtccccaccccatgggcctcatgaataaatggcttcttgccggccttcc

SEQ ID NO: 19281 - DNA, 1012 bp, Homo sapiens
  source 1..1012: mol_type = unassigned DNA
cctgctttctgcattcttctctccacatccctctctgtacttacagcccccaatggcccccaaaaagccagagcccaagaaggatgatgccaaggcagcccccaaggcagctccagctcccgcacctccccctgagcctgagcgccctaaggaggtcgagtttgatgcttccaagatcaagattgagttcacacctgagcagattgaagagttcaaggaagccttcatgctgttcgaccgcacacccaagtgtgagatgaagatcacctacgggcagtgtggggatgtcctgcgggcgctgggccagaaccccacacaggcagaagtgctccgtgtcctggggaagccaagacaggaagagctcaataccaagatgatggactttgaaactttcctgcctatgctccagcacatttccaagaacaaggacacaggcacctatgaggacttcgtggaggggctgcgggtcttcgacaaggagggcaatggcactgtcatgggtgctgagcttcgccacgtgctggccacgctgggtgagaggctgacagaagacgaagtggagaagttgatggctgggcaagaggactccaatggctgcatcaactatgaagcatttgtgaagcacatcatgtccagctaaacctcgtgcccaggtaggcacccactccctcctgaacccgctgctgccacctgcccacactccaccagctgcagtgctcacttgacatcctgctgcctccgtctccctcctcctctgtaatctgcactgcctttgctctcaggaagcccagggaaggctgtgcagggacgtctcatctcccatgtgtgatgctgacaccagcggcctggagtcgtgggaaggaggggagccttaccaagactcctgcaaaaacccttggacctctccacgtggttgccgtctctggcccctctcaggctgtgcttacctgtgacagcagctctgtccccaccccatgggcctcatgaataaatggcttcttgccggccttcc

SEQ ID NO: 19282 - DNA, 451 bp, Homo sapiens
  source 1..451: mol_type = unassigned DNA
gacgcgggagtgtggagaggccgagaggagccttccgccccccgccccgggacattgcgctagaggccgaggcccggagtcttacggcggcgggatgtcctgggaaaatgtagctgtggaagagcagaacattcctccctcctgtgatggctgacattcataggaaggcggacacacggaagacgccaggtaacaagagcccagaagaaggccggcgtggccgggctttcctgccttagtccacaggctcctcagaagtcagggcccatatcttccccgcattctccttggctgggggaagggagagcccccaatggcccccaaaaagccagagcccaagaaggatgatgccaaggcagcccccaaggcagctccagctcccgcacctccccctgagcctgagcgccctaaggaggtcgagtttgatgcttccaagatcaagattgagttc

SEQ ID NO: 19283 - DNA, 907 bp, Homo sapiens
  source 1..907: mol_type = unassigned DNA
ctctctggctgctccggcatatttgagaaggtctgtttccctggtccttctgggtttccaccaattggcaagaagggatcagcctgtcctagagatcactcctctgccaaagatcccaacaagacaacatggctcccaagaagcctgagcctaagaaggaggcagccaagccagctccagctccagctccagcccctgcaccagcccctgccccagctcctgaggctcccaaggaacctgcctttgaccccaagagtgtaaagatagacttcactgccgaccagattgaagagttcaaagaggccttttcattgtttgaccggaccccgactggagagatgaagatcacctacggccagtgcggggatgtactgcgggccctgggccagaaccctaccaatgccgaggtgctgcgtgtgctgggcaagcccaagcctgaagagatgaatgtcaagatgctggactttgagacgttcttgcccatcctgcagcacatttcccgcaacaaggagcagggcacctatgaggacttcgtggagggcctgcgtgtctttgacaaggagagcaatggcacggtcatgggtgctgagcttcggcacgtccttgccaccctgggagagaagatgactgaggctgaagtggagcagctgttagctgggcaagaggatgccaatggctgcatcaattatgaagcctttgtcaagcacatcatgtcagggtgaagcagagtcttccaggtgcctggcccttggctttagccataccagggtgagttaaagagaggccccggctgggtgagctgagatggagtcctcgacttatcaccacaccactgccccaaggaccttacaggccctccctgttaataaacagctctaacacggccaggctgggctctgggattctg

SEQ ID NO: 19284 - DNA, 855 bp, Homo sapiens
  source 1..855: mol_type = unassigned DNA
atctcatctcccagacgccacgtctctcggtttcttcttagatcactcctctgccaaagatcccaacaagacaacatggctcccaagaagcctgagcctaagaaggaggcagccaagccagctccagctccagctccagcccctgcaccagcccctgccccagctcctgaggctcccaaggaacctgcctttgaccccaagagtgtaaagatagacttcactgccgaccagattgaagagttcaaagaggccttttcattgtttgaccggaccccgactggagagatgaagatcacctacggccagtgcggggatgtactgcgggccctgggccagaaccctaccaatgccgaggtgctgcgtgtgctgggcaagcccaagcctgaagagatgaatgtcaagatgctggactttgagacgttcttgcccatcctgcagcacatttcccgcaacaaggagcagggcacctatgaggacttcgtggagggcctgcgtgtctttgacaaggagagcaatggcacggtcatgggtgctgagcttcggcacgtccttgccaccctgggagagaagatgactgaggctgaagtggagcagctgttagctgggcaagaggatgccaatggctgcatcaattatgaagcctttgtcaagcacatcatgtcagggtgaagcagagtcttccaggtgcctggcccttggctttagccataccagggtgagttaaagagaggccccggctgggtgagctgagatggagtcctcgacttatcaccacaccactgccccaaggaccttacaggccctccctgttaataaacagctctaacacggccaggctgggctctgggattctga

SEQ ID NO: 19285 - DNA, 261 bp, Homo sapiens
  source 1..261: mol_type = unassigned DNA
cctgaggctcccaaggaacctgcctttgaccccaagagtgtaaaggtaatagggtgtccatgccccagatcgcagtcccatggggcagtgatagacttcactgccgaccagattgaagagttcaaagaggcctttatgggtgctgagcttcggcacgtccttgccaccctggtaattaagagcgcaccacctcccaaacccaccgcaggagagaagatgactgaggctgaagtggagcagctgttagctgggcaagaggat

SEQ ID NO: 19286 - DNA, 666 bp, Homo sapiens
  source 1..666: mol_type = unassigned DNA
ggagtggcagccggagtctgaactgtcctgggggaccaagcaggagcttaagatgggcaagacctggggccctgggcagacgcatcaaagcaggcagaagcaggcatggccagcaggaagaccaagaagaaggaagggggtgccctccgggcccagagagcctcatccaatgtcttctccaactttgagcagactcagatccaggagttcaaggaggcattcacactcatggatcagaaccgagatggcttcattgacaaggaggacctgaaggacacctatgcctccctgggcaagaccaacgtcaaggacgacgagctggacgccatgctcaaagaggcctcggggcccatcaacttcaccatgtttctgaacctgtttggggagaagctgagcggtaccgacgccgaggagaccattcttaacgccttcaagatgctggacccggacgggaaagggaaaatcaacaaggagtacatcaagcgtctgctgatgtcccaggctgacaagatgacggcggaagaggtggaccagatgttccagttcgcctccatcgatgtggcgggcaacctggactacaaggcgctcagctacgtgatcacccacggggaggagaaggaggagtgagacccagccgggtcaataaacctggacgcttggaccctg

SEQ ID NO: 19287 - DNA, 584 bp, Homo sapiens
  source 1..584: mol_type = unassigned DNA
aggaacagggcggagtagcggccgagctgcgaaagaggccagcaggaagaccaagaagaaggaagggggtgccctccgggcccagagagcctcatccaatgtcttctccaactttgagcagactcagatccaggagttcaaggaggcattcacactcatggatcagaaccgagatggcttcattgacaaggaggacctgaaggacacctatgcctccctgggcaagaccaacgtcaaggacgacgagctggacgccatgctcaaagaggcctcggggcccatcaacttcaccatgtttctgaacctgtttggggagaagctgagcggtaccgacgccgaggagaccattcttaacgccttcaagatgctggacccggacgggaaagggaaaatcaacaaggagtacatcaagcgtctgctgatgtcccaggctgacaagatgacggcggaagaggtggaccagatgttccagttcgcctccatcgatgtggcgggcaacctggactacaaggcgctcagctacgtgatcacccacggggaggagaaggaggagtgagacccagccgggtcaataaacctggacg

SEQ ID NO: 19288 - DNA, 2956 bp, Homo sapiens
  source 1..2956: mol_type = unassigned DNA
acagggcccctgctgcccacccgctcacgcactggctcactcgtcctctgcgaacagggactgcctcccatcaagacctcagcactcgaacagccatttagcacccgttttcaccaagaagcagccgttttcgagtcccccgcccgggcctcagaagcctgagctttgggtgagctgattccactatcggggtcacgctcggtggaggacacggtcctgcagcctcgcatgcgtcccaagcccccttccagagctggagttctccaaatagcacaggagctccacaggaaagccgagcagaccccgccccggccccgcccgcggtcactcactgtagcgcgtggctccgtaggccacaccgaggaacagggcggagtagcggccgagctgcgaaagaggttggtcagaggcggcgcgaaacggggctcgcgggacgggggtcgcgggaggagggggggcggggtcgctgggcagaggtcgcaggaggggtgggggtccggtcgccgggcgagggtcacggggcgaggatcatgggggcgggggccgggggtcgcagcccgcggggtcggagctgcggggcgggacacgggggggcccagagcactgggcggcggctgcaaagcctggatcaccttgatgagcggagagacctgcaccggtggcaccatcttgtccctgacctccgcaccggaagcacaacctgcagacggagcaggatgccgcacaagccagcaaagccttggaggcaaaggcggagctgggcgcacgcatgcgccgtcagcggcgagagagcggggggccgcgccccctggcgaccgaagggtgactgcgcgcccccgcgcggcggtgacgtcacgtgaggcgcacgcgcacaaaggctggggagtgcgcggaggatcatcggctgcgcctgcgcagttgctgcgtgaggcgggatctgcgccgagtgggcggggggtttcctttccccgcagggctgggggtccgctgtttccccgcgctgctgccgaggccccgccgtccgcgtcctggccgtgtgtccacaccccagactgcgggccggggcgcactctgtcttcttgcgcggagcgtcggaggcctgaggtcagggcggctcgggcgggtccagccccgcggaccgcgcccacccgagggtggcctgggcagggacctgggggtcctgggagcggagtgtgagccgagtgcaggtggctccccgggcaggtccttctcctacaaggcagtagtgtctgtcgccggccgggccgcgttggattccgcggcccgcgggagcatggcctccaggcccctcttcctgcggctgctctgcccgggagcacggggcgcccttcatcccggagctggagcttcctcaccccaggatgccccatcacttctgtcccgaagaggggctgggatcttcttgggaagaccagcccccaacagaggctgctccctgggtcccccgactccaggcctcaggactccacggctccaagggcctgccccggcccaggcctggggaccactgagccccacactggtctttgctggcctctgtccacctcccggtagctgtgtgtctcccacagctgcccagagatggggcctgcggtgcctatgcagcctccccgctgtgcccgaagtgctgacccgccagccccatggacaccaggcttggagtctaggcaggagcctggcaccccctccacgttctgggtcttcctggcggcagccatgctgcccgtgctgggccaccctcgggccccctttggccccatgcagtagtgacgcaaggcctcctgtgtcccctcctggccctgcactgctacaggcagaagcaactggagaactatggctcgggtctcgctaaggtgcagcatcacaaactccaggactcttgaagcaagcatggggaggacccgtgatcctggcggcctgggctacctgtccgggcctaagtcgcctctgccccctctcctggcttgctctggggtccagggcctgggcctctctggctgagaaactaggaagtcactgggctctgtttcctgagctgggtataccaaggccagtcctatagggcaggggtccccaacccccaggtgcagaccagtaccagcttgtggcccgttaggaaccgggcagcacaggacgaggtgagggagcatgattgcccgagctccacccactttcagatcagcctgggcatcagattcccataggagcgtgaaccctactgtgagctgcgcacttggatctggattgcgctctgggggccagaagcaaactccagccctccccgtgtctactgctcgctgaggaagccgcaggtgcacactggatccacaaggcacagaaccatcttggccctcggcaagcccccgcttccgccagggcagacggcctcaggaagaccaagaagaaggaagggggtgccctccgggcccagagagcctcatccaatgtcttctccaactttgagcagactcagatccaggagttcaaggaggcattcacactcatggatcagaaccgagatggcttcattgacaaggaggacctgaaggacacctatgcctccctgggcaagaccaacgtcaaggacgacgagctggacgccatgctcaaagaggcctcggggcccatcaacttcaccatgtttctgaacctgtttggggagaagctgagcggtaccgacgccgaggagaccattcttaacgccttcaagatgctggacccggacgggaaagggaaaatcaacaaggagtacatcaagcgtctgctgatgtcccaggctgacaagatgacggcggaagaggtggaccagatgttccagttcgcctccatcgatgtggcgggcaacctggactacaaggcgctcagctacgtgatcacccacggggaggagaaggaggagtgagacccagccgggtcaataaacctggacgcttgg

SEQ ID NO: 19289 - DNA, 781 bp, Homo sapiens
  source 1..781: mol_type = unassigned DNA
gggtccgctgtttccccgcgctgctgccgaggccccgccgtccgcgtcctggccgtgtgtccacaccccagactgcgggccggggcgcactctgtcttcttgcgcggagcgtcggaggcctgaggtcagggcggctcgggcgggtccagccccgcggaccgcgcccacccgagggtggcctgggcagggacctgggggtcctgggagcggagtgtgagccgagtgcaggccagcaggaagaccaagaagaaggaagggggtgccctccgggcccagagagcctcatccaatgtcttctccaactttgagcagactcagatccaggagttcaaggaggcattcacactcatggatcagaaccgagatggcttcattgacaaggaggacctgaaggacacctatgcctccctgggcaagaccaacgtcaaggacgacgagctggacgccatgctcaaagaggcctcggggcccatcaacttcaccatgtttctgaacctgtttggggagaagctgagcggtaccgacgccgaggagaccattcttaacgccttcaagatgctggacccggacgggaaagggaaaatcaacaaggagtacatcaagcgtctgctgatgtcccaggctgacaagatgacggcggaagaggtggaccagatgttccagttcgcctccatcgatgtggcgggcaacctggactacaaggcgctcagctacgtgatcacccacggggaggagaaggaggagtgagacccagccgggtcaataaacctggacgcttgga

SEQ ID NO: 19290 - DNA, 655 bp, Homo sapiens
  source 1..655: mol_type = unassigned DNA
attactgcaggaaaaggtcccggagagctgagcagtcaagatgtgtgacttcaccgaagaccagaccgcagagttcaaggaggccttccagctgtttgaccgaacaggtgatggcaagatcctgtacagccagtgtggggatgtgatgagggccctgggccagaaccctaccaacgccgaggtgctcaaggtcctggggaaccccaagagtgatgagatgaatgtgaaggtgctggactttgagcactttctgcccatgctgcagacagtggccaagaacaaggaccagggcacctatgaggattatgtcgaaggacttcgggtgtttgacaaggaaggaaatggcaccgtcatgggtgctgaaatccggcatgttcttgtcacactgggtgagaagatgacagaggaagaagtagagatgctggtggcagggcatgaggacagcaatggttgtatcaactatgaagagctcgtccgcatggtgctgaatggctgaggaccttcccagtctccccagagtccgtgcctttccctgtgtgaattttgtatctagcctaaagtttccctaggctttcttgtctcagcaactttcccatcttgtctctcttggatgatgtttgccgtcagcattcaccaaataaacttgctctctggg

SEQ ID NO: 19291 - DNA, 753 bp, Homo sapiens
  source 1..753: mol_type = unassigned DNA
gtcaagatgtgtgacttcaccgaagaccagaccgcagagttcaaggaggccttccagctgtttgaccgaacaggtgatggcaagatcctgtacagccagtgtggggatgtgatgagggccctgggccagaaccctaccaacgccgaggtgctcaaggtcctggggaaccccaagagtgatgagatgaatgtgaaggtgctggactttgagcactttctgcccatgctgcagacagtggccaagaacaaggaccagggcacctatgaggattatgtcgaaggacttcgggtgtttgacaaggaaggaaatggcaccgtcatgggtgctgaaatccggcatgttcttgtcacactgggtgagaagatgacagaggaagaagtagagatgctggtggcagggcatgaggacagcaatggttgtatcaactatgaagcgtttgtgaggcatatcctgtcggggtgacgggcccatggggcgggtacggctcctcccagcctctcctctagttgatctccccagtgtttcttttttccccaacctgtgctctttatcccctgcccttaccctactaccatctgacttcctcctggcatgtttctgcatggagctgactagggaggggagggattcctcaaagaggaagacaacctgggggtacagtacctccttacctctagaatgggccctgaggttttacttatgcggccctgggtgctggtgtctgggaactctcaccagcctgtataccagtct

SEQ ID NO: 19292 - DNA, 901 bp, Homo sapiens
  source 1..901: mol_type = unassigned DNA
ctccccccacgaccccccccacctccgagcgggttctgtgcccaggtggcgctggagaaaggaacagcggaccccgcccaagtcattactaatgtagcaatcgtctgcataaacccaggccacggttcctattggctgagtcctctgagggtgacgtcatcgggacgtactaagactagggttgggccgagagtcggagccattactgcaggaaaaggtcccggagagctgagcagtcaagatgtgtgacttcaccgaagaccagaccgcagagttcaaggaggccttccagctgtttgaccgaacaggtgatggcaagatcctgtacagccagtgtggggatgtgatgagggccctgggccagaaccctaccaacgccgaggtgctcaaggtcctggggaaccccaagagtgatgagatgaatgtgaaggtgctggactttgagcactttctgcccatgctgcagacagtggccaagaacaaggaccagggcacctatgaggattatgtcgaaggacttcgggtgtttgacaaggaaggaaatggcaccgtcatgggtgctgaaatccggcatgttcttgtcacactgggtgagaagatgacagaggaagaagtagagatgctggtggcagggcatgaggacagcaatggttgtatcaactatgaagcgtttgtgaggcatatcctgtcggggtgacgggcccatggggcggagctcgtccgcatggtgctgaatggctgaggaccttcccagtctccccagagtccgtgcctttccctgtgtgaattttgtatctagcctaaagtttccctaggctttcttgtctcagcaactttcccatcttgtctctcttggatgatgtttgccgtcagcattcaccaaataaacttgctctctggg

SEQ ID NO: 19293 - DNA, 869 bp, Homo sapiens
  source 1..869: mol_type = unassigned DNA
ggccaccggaattaacccttcagggctgggggccgcgctatgccccgccccctccccagccccagacacggaccccgcaggagatgggtgcccccatccgcacactgtcctttggccaccggacatcatgcctcccaagaaggatgttcccgtgaagaaaccagcagggccctccatctccaaacctgctgctaagccagcagcagcaggggctcctccagccaagaccaaagctgagccagctgtcccccaggcccctcagaaaacccaggagcctccagtcgatctctccaaagtggtgatcgagtttaacaaggaccagctggaggagttcaaggaggccttcgagctgtttgaccgagtgggggatggcaagatcctgtacagccagtgtggggacgtgatgagggccctgggccagaaccccaccaacgccgaggtgctcaaggtcctggggaaccccaagagtgatgagctgaagtcgcggcgtgtggactttgagactttcctgcccatgctccaggcagtggccaagaaccgaggccaaggcacatatgaggactacttggaggggtttcgtgtgtttgacaaggaggggaacggcaaagtcatgggagcagagctcagacatgttctcaccacccttggagagaagatgactgaggaggaggtggagaccgttctggcaggacacgaggacagcaacggctgcatcaactacgaggccttcttgaaacacatcctaagcgtctgagtgctgcagatccagtggggtccggacactgggccccgcaggcgaaagcacgttccagccaccaggaggccacctattgtttcaaaataaagactgggttcctctcttggtttca

SEQ ID NO: 19294 - DNA, 1034 bp, Homo sapiens
  source 1..1034: mol_type = unassigned DNA
agtcaccaaccaccgccatgggccggaagccaccgccctcgcgtcaactgcaatctagagcgcggcgcatcccgtgagcccgcggggaactacgactcccggcatgctccgcggccaccggaattaacccttcagggctgggggccgcgctatgccccgccccctccccagccccagacacggaccccgcaggccaactggctccctgcccctgcccccgccccttgacatcccagactccctggctatttaaacagagatgggtgcccccatccgcacactgtcctttggccaccggacatcatgcctcccaagaaggatgttcccgtgaagaaaccagcagggccctccatctccaaacctgctgctaagccagcagcagcaggggctcctccagccaagaccaaagctgagccagctgtcccccaggcccctcagaaaacccaggagcctccagtcgatctctccaaagtggtgatcgagtttaacaaggaccagctggaggagttcaaggaggccttcgagctgtttgaccgagtgggggatggcaagatcctgtacagccagtgtggggacgtgatgagggccctgggccagaaccccaccaacgccgaggtgctcaaggtcctggggaaccccaagagtgatgagctgaagtcgcggcgtgtggactttgagactttcctgcccatgctccaggcagtggccaagaaccgaggccaaggcacatatgaggactacttggaggggtttcgtgtgtttgacaaggaggggaacggcaaagtcatgggagcagagctcagacatgttctcaccacccttggagagaagatgactgaggaggaggtggagaccgttctggcaggacacgaggacagcaacggctgcatcaactacgaggccttcttgaaacacatcctaagcgtctgagtgctgcagatccagtggggtccggacactgggccccgcaggcgaaagcacgttccagccaccaggaggccacctattgtttcaaaataaagactgggttcctc

SEQ ID NO: 19295 - DNA, 562 bp, Homo sapiens
  source 1..562: mol_type = unassigned DNA
atgccccgccccctccccagccccagacacggaccccgcaggttcacacaagcctccctggctgctacccctcaccccacccttcaagaagactaaagctgctggatcacctgctttgcctcaccacccccatctcagtgccactggcaagcatcctatcctcaccctggaggttaactacctcattctgggcagtctctggcttcctcccctacccctaaaggaaacattgttcttttctggtcagcctttggggataaggggacagagggaagaagaccttggggcaggagtcctgaaccataggaggccaggggagtgagggcaggcggttatatctctcctctacctcatctttgccacagccaactggctccctgcccctgcccccgccccttgacatcccagactccctggctatttaaacagagatgggtgcccccatccgcacactgtcctttggccaccggacatcatgcctcccaagaaggatgttcccgtgaagaaaccagcagggccctccatctccaaacctgctgctaagccagcagcagcaggggct

SEQ ID NO: 19296 - DNA, 1305 bp, Homo sapiens
  source 1..1305: mol_type = unassigned DNA
ctttcagcagtaggtccaggaaaacagccgccccgccccctccacctcccgagactaggagcccgccagggttaagtaggagggataccctaggggccccgcagggtttttagggttggggtggattggaaattgttcattgcctttcagttccgggacataaagcgcgctggaaggacactgagtcaccaaccaccgccatgggccggaagccaccgccctcgcgtcaactgcaatctagagcgcggcgcatcccgtgagcccgcggggaactacgactcccggcatgctccgcggccaccggaattaacccttcagggctgggggccgcgctatgccccgccccctccccagccccagacacggaccccgcaggagatgggtgcccccatccgcacactgtcctttggccaccggacatcatgcctcccaagaaggatgttcccgtgaagaaaccagcagggccctccatctccaaacctgctgctaagccagcagcagcaggggctcctccagccaagaccaaagctgagccagctgtcccccaggcccctcagaaaacccaggagcctccagtcgatctctccaaagtggtgatcgagtttaacaaggaccagctggaggagttcaaggaggccttcgagctgtttgaccgagtgggggatggcaagatcctgtacagccagtgtggggacgtgatgagggccctgggccagaaccccaccaacgccgaggtgctcaaggtcctggggaaccccaagagtgatgagctgaagtcgcggcgtgtggactttgagactttcctgcccatgctccaggcagtggccaagaaccgaggccaaggcacatatgaggactacttggaggggtttcgtgtgtttgacaaggaggggaacggcaaagtcatgggagcagagctcagacatgttctcaccacccttggagagaagatgactgaggaggaggtggagaccgttctggcaggacacgaggacagcaacggctgcatcaactacgaggccttcttgaaacacatcctaagcgtctgagtgctgcaggtagggccctcccaccccttcgccgcgccttacgaggcaagtctcccgcccttctctcagccaacatagaaaagcagcggagttcattctgctgtccggttgctgcacgggctccagcgcttcgcaactttggtttttttccacagatccagtggggtccggacactgggccccgcaggcgaaagcacgttccagccaccaggaggccacctattgtttcaaaataaagactgggttcctctcttgg

SEQ ID NO: 19297 - DNA, 612 bp, Homo sapiens
  source 1..612: mol_type = unassigned DNA
gacagcagccacacctctgcagagagaatggccagcaggaaggcggggacccggggcaaggtggcagccaccaagcaggcccaacgtggttcttccaacgtcttttccatgtttgaacaagcccagatacaggagttcaaagaagccttcagctgtatcgaccagaatcgtgatggcatcatctgcaaggcagacctgagggagacctactcccagctggggaaggtgagtgtcccagaggaggagctggacgccatgctgcaagagggcaagggccccatcaacttcaccgtcttcctcacgctctttggggagaagctcaatgggacagaccccgaggaagccatcctgagtgccttccgcatgtttgaccccagcggcaaaggggtggtgaacaaggatgagttcaagcagcttctcctgacccaggcagacaagttctctccagctgaggtggagcagatgttcgccctgacacccatggacctggcggggaacatcgactacaagtcactgtgctacatcatcacccatggagacgagaaagaggaatgaggggcagggccaggcccacgggggggcacctcaataaactctgttgcaaaattggaa

SEQ ID NO: 19298 - DNA, 791 bp, Homo sapiens
  source 1..791: mol_type = unassigned DNA
aagaaaggctagcggtctcccaggtgctggcctttgggctgggggagcagagttttctgtgcttgtgttgggttgagggtggtccccagggagaggaagaggatcctggccctggctctcctgggaatgctctgggactgtgcatgatgggtggggtggggagactctgaggagttggggagaggacccctccctactcacagtgttgcaggccagcaggaaggcggggacccggggcaaggtggcagccaccaagcaggcccaacgtggttcttccaacgtcttttccatgtttgaacaagcccagatacaggagttcaaagaagccttcagctgtatcgaccagaatcgtgatggcatcatctgcaaggcagacctgagggagacctactcccagctggggaaggtgagtgtcccagaggaggagctggacgccatgctgcaagagggcaagggccccatcaacttcaccgtcttcctcacgctctttggggagaagctcaatgggacagaccccgaggaagccatcctgagtgccttccgcatgtttgaccccagcggcaaaggggtggtgaacaaggatgagttcaagcagcttctcctgacccaggcagacaagttctctccagctgaggtggagcagatgttcgccctgacacccatggacctggcggggaacatcgactacaagtcactgtgctacatcatcacccatggagacgagaaagaggaatgaggggcagggccaggcccacgggggggcacctcaataaactctgttgcaaaattgg

SEQ ID NO: 19299 - DNA, 2635 bp, Homo sapiens
  source 1..2635: mol_type = unassigned DNA
agattcactggtgtggcaagttgtctctcagactgtacatgcattaaaattttgcttggcattactcaaaagcaaaagaaaagtaaaaggaagaaacaagaacaagaaaaaagattatattgattttaaaatcatgcaaaaactgcaactctgtgtttatatttacctgtttatgctgattgttgctggtccagtggatctaaatgagaacagtgagcaaaaagaaaatgtggaaaaagaggggctgtgtaatgcatgtacttggagacaaaacactaaatcttcaagaatagaagccattaagatacaaatcctcagtaaacttcgtctggaaacagctcctaacatcagcaaagatgttataagacaacttttacccaaagctcctccactccgggaactgattgatcagtatgatgtccagagggatgacagcagcgatggctctttggaagatgacgattatcacgctacaacggaaacaatcattaccatgcctacagagtctgattttctaatgcaagtggatggaaaacccaaatgttgcttctttaaatttagctctaaaatacaatacaataaagtagtaaaggcccaactatggatatatttgagacccgtcgagactcctacaacagtgtttgtgcaaatcctgagactcatcaaacctatgaaagacggtacaaggtatactggaatccgatctctgaaacttgacatgaacccaggcactggtatttggcagagcattgatgtgaagacagtgttgcaaaattggctcaaacaacctgaatccaacttaggcattgaaataaaagctttagatgagaatggtcatgatcttgctgtaaccttcccaggaccaggagaagatgggctgaatccgtttttagaggtcaaggtaacagacacaccaaaaagatccagaagggattttggtcttgactgtgatgagcactcaacagaatcacgatgctgtcgttaccctctaactgtggattttgaagcttttggatgggattggattatcgctcctaaaagatataaggccaattactgctctggagagtgtgaatttgtatttttacaaaaatatcctcatactcatctggtacaccaagcaaaccccagaggttcagcaggcccttgctgtactcccacaaagatgtctccaattaatatgctatattttaatggcaaagaacaaataatatatgggaaaattccagcgatggtagtagaccgctgtgggtgctcatgagatttatattaagcgttcataacttcctaaaacatggaaggttttcccctcaacaattttgaagctgtgaaattaagtaccacaggctataggcctagagtatgctacagtcacttaagcataagctacagtatgtaaactaaaagggggaatatatgcaatggttggcatttaaccatccaaacaaatcatacaagaaagttttatgatttccagagtttttgagctagaaggagatcaaattacatttatgttcctatatattacaacatcggcgaggaaatgaaagcgattctccttgagttctgatgaattaaaggagtatgctttaaagtctatttctttaaagttttgtttaatatttacagaaaaatccacatacagtattggtaaaatgcaggattgttatataccatcattcgaatcatccttaaacacttgaatttatattgtatggtagtatacttggtaagataaaattccacaaaaatagggatggtgcagcatatgcaatttccattcctattataattgacacagtacattaacaatccatgccaacggtgctaatacgataggctgaatgtctgaggctaccaggtttatcacataaaaaacattcagtaaaatagtaagtttctcttttcttcaggtgcattttcctacacctccaaatgaggaatggattttctttaatgtaagaagaatcatttttctagaggttggctttcaattctgtagcatacttggagaaactgcattatcttaaaaggcagtcaaatggtgtttgtttttatcaaaatgtcaaaataacatacttggagaagtatgtaattttgtctttggaaaattacaacactgcctttgcaacactgcagtttttatggtaaaataatagaaatgatcgactctatcaatattgtataaaaagactgaaacaatgcatttatataatatgtatacaatattgttttgtaaataagtgtctccttttttatttactttggtatatttttacactaaggacatttcaaattaagtactaaggcacaaagacatgtcatgcatcacagaaaagcaactacttatatttcagagcaaattagcagattaaatagtggtcttaaaactccatatgttaatgattagatggttatattacaatcattttatatttttttacatgattaacattcacttatggattcatgatggctgtataaagtgaatttgaaatttcaatggtttactgtcattgtgtttaaatctcaacgttccattattttaatacttgcaaaaacattactaagtataccaaaataattgactctattatctgaaatgaagaataaactgatgctatctcaacaataa

SEQ ID NO: 19300 - DNA, 2337 bp, Homo sapiens
  source 1..2337: mol_type = unassigned DNA
ggacaggcaagcacatcagatgtcactgtttggcagctgataaaagtcagtggtgctataatactaagcacagagccactagattagtctgtgagggaaggagatgcctcttccttcccttcaatagtgggttaaacccagctggcaccctctggaactacgggaacaatattcttcaagagaaggtcactctaccaaagccaggagcacagtattctcaggatctcaacaaggaagagcagaccaaggttgcttctgattccttacaaccttccgtaattccaggcttgtggccccaaattcagggccccacccttccaggaacaaatcattatagtaataatttgccttcatcttccatataccaactaagcatgtttaactacgaacgtccaaaacacttcatccagtcccaaaacccatgtggctccagattgcagcctcctggaccagaaacctccagcttctctagccagaccaaacagtcttccattatcatccagccccgccagtgtacagagcaaagattttctgcctcctcaacactgagctctcacatcaccatgtcctcctctgctttccctgcttctcccaagcagcatgctggctccaacccaggccaaagggttacaaccacctataaccagtccccagccagcttcctcagctccatattaccatcacagcctgattacaatagcagtaaaatcccttccgctatggattccaactatcaacagtcctcagctggccaacctataaatgcaaagccatcccaaactgcaaatgctaagcccataccaagaactcctgatcatgaaatacaaggatcaaaagaagctttgattcaagatttggaaagaaagctgaaatgcaaggacacccttcttcataatggaaatcaacgtctaacatatgaagagaagatggctcgcagattgctaggaccacagaatgcagctgctgtgtttcaagctcaggatgacagtggtgcacaagactcgcagcaacacaactcagaacatgcgcgactgcaagttcctacatcacaagtaagaagtagatcaacctcaaggggagatgtgaatgatcaggatgcaatccaggagaaattttacccaccacgtttcattcaagtgccagagaacatgtcgattgatgaaggaagattctgcagaatggacttcaaagtgagtggactgccagctcctgatgtgtcatggtatctaaatggaagaacagttcaatcagatgatttgcacaaaatgatagtgtctgagaagggtcttcattcactcatctttgaagtagtcagagcttcagatgcaggggcttatgcatgtgttgccaagaatagagcaggagaagccaccttcactgtgcagctggatgtccttgcaaaagaacataaaagagcaccaatgtttatctacaaaccacagagcaaaaaagttttagagggagattcagtgaaactagaatgccagatctcggctatacctccaccaaagcttttctggaaaagaaataatgaaatggtacaattcaacactgaccgaataagcttatatcaagataacactggaagagttactttactgataaaagatgtaaacaagaaagatgctgggtggtatactgtgtcagcagttaatgaagctggagtgactacatgtaacacaagattagacgttacggcacgtccaaaccaaactcttccagctcctaagcagttacgggttcgaccaacattcagcaaatatttagcacttaatgggaaaggtttgaatgtaaaacaagcttttaacccagaaggagaatttcagcgtttggcagctcaatctggactctatgaaagtgaagaactttaataactttaccaacattggaaaacagccaactacaccattagtaatatatttgattacatttttttgaaattaatccatagctgtattaacagattatggttttaattaggtaatatagttaatatatatttataatattatttatcctttgactcttgcacattctatgtacccctccgatttgtgaagcctacaggaaatctgggtatatggatttgtaactgcagaagactatcttaaaatacaggattttaacatttaagtcatgcacatttaacaattacaggttataaattagtatcaactttttaaacacatctaatgcttgtaataacgtttactggtactgctttctaaatactgttttacccgttttctcttgtaggaatactaacatggtatagattatctgagtgttccacagttgtatgtcaaaagaaaataaaattcaaatatttaaaacgga

SEQ ID NO: 19301 - DNA, 1474 bp, Homo sapiens
  source 1..1474: mol_type = unassigned DNA
gcacagagccactagattagtctgtgagggaaggagatgcctcttccttcccttcaatagtgggttaaacccagctggcaccctctggaactacgggaacaatattcttcaagagaaggtcactctaccaaagccaggagcacagtattctcaggatctcaacaaggaagagcagaccaagctatcaacagtcctcagctggccaacctataaatgcaaagccatcccaaactgcaaatgctaagcccataccaagaactcctgatcatgaaatacaaggatcaaaagaagctttgattcaagatttggaaagaaagctgaaatgcaaggacacccttcttcataatggaaatcaacgtctaacatatgaagagaagatggctcgcagattgctaggaccacagaatgcagctgctgtgtttcaagctcaggatgacagtggtgcacaagactcgcagcaacacaactcagaacatgcgcgactgcaagttcctacatcacaagtaagaagtagatcaacctcaaggggagatgtgaatgatcaggatgcaatccaggagaaattttacccaccacgtttcattcaagtgccagagaacatgtcgattgatgaaggaagattctgcagaatggacttcaaagtgagtggactgccagctcctgatgtgtcatggtatctaaatggaagaacagttcaatcagatgatttgcacaaaatgatagtgtctgagaagggtcttcattcactcatctttgaagtagtcagagcttcagatgcaggggcttatgcatgtgttgccaagaatagagcaggagaagccaccttcactgtgcagctggatgtccttgcaaaagaacataaaagagcaccaatgtttatctacaaaccacagagcaaaaaagttttagagggagattcagtgaaactagaatgccagatctcggctatacctccaccaaagcttttctggaaaagaaataatgaaatggtacaattcaacactgaccgaataagcttatatcaagataacactggaagagttactttactgataaaagatgtaaacaagaaagatgctgggtggtatactgtgtcagcagttaatgaagctggagtgactacatgtaacacaagattagacgttacggcacgtccaaaccaaactcttccagctcctaagcagttacgggttcgaccaacattcagcaaatatttagcacttaatgggaaaggtttgaatgtaaaacaagcttttaacccagaaggagaatttcagcgtttggcagctcaatctggactctatgaaagtgaagaactttaataactttaccaacattggaaaacagccaactacaccattagtaatatatttgattacatttttttgaaattaatccatagctgtattaacagattatggttttaattaggtaatatagttaatatatatttataatattatttatcctttga

SEQ ID NO: 19302 - DNA, 3738 bp, Homo sapiens
  source 1..3738: mol_type = unassigned DNA
ctgctgggcccggtggccgcaaaagaactttctttctcccgcccgaacggtcgccgcggccaactgcctcgcccgcctggcagcctaaccctccttctcttcttctcctctccggcttcgcgcggccctgcctccctctcgcccggcggcatccgcttgctgctgccaccgcctcctcatcttctgcccggccaaccggcctgccccgctgcagtgatgtgcgacaaggagttcatgtgggccctgaaaaacggagacttggatgaggtgaaagactatgtggccaagggagaagatgtcaaccggacactagaaggtggaaggaaacctcttcattatgcagcagattgtgggcagcttgaaatcctggaatttctgctgctgaaaggagcagatattaatgctccagataaacatcatattactcctcttctgtctgctgtctatgagggtcatgtttcctgtgtgaaattgcttctgtcaaagggtgctgataagactgtgaaaggcccagatggactgaccgcctttgaagccactgacaaccaggcaatcaaagctcttctccagtgatggatggatggactgataactccggaagaatgactctcctgtggcctcacactgctgcctgtctgtctgtcactctctatctgccagcttcttcagctaaatactttaagaggggtgaggggagagagaaattcataacaaatccgactaccagaaaaaaaaaattgttttggaggaggggcaaaaggaaccatgatcaggcttttactgggattcctgatcaagtaagcctcttccctttctaataaaatatacaccttatacccaagggagagcaaagacaaaatacaccagtaacatttgaccttttcagctccctagctaatttattagattgtgttgaaggtctgattctacaaaggccaactctacatatttggtagccctaactgtctgagcagtagtggctgctgtgatgtaaacttagggtgctgagataagcaattagctctagccttctgccttaagaatgcactctactggggatttcctggcatagttaagagcgctgcctataaggttggtgaccaaatctttcctcggtgactttaagctttatgtgaaagcttagttaaggtgaggaggggcacactcctaaattgctggatgactgaactttggattttctctcccctttcacatggatttcatgtctctttagataaaactgactagttttatttataaaatcttaagttttggaagtctaaaggagaaaccattccagtatgcatatttttttctcctctagattcatacatttatatagcattgaaacactttcaaactcctgctggtagtaaaaggggatttaaaaatagaatcatagccataagcctgttagtatcatatgaagagagaacagttatcttagtacctatggattttctttatttgctgtttgaatggattgaccttggttatgtgttgagaattaaggaacattctttgaaatgcctctctcagacccatcttggaggctgattacttactgcaccaaagctatcactggggtgagatttactgtttggacaaatttagccccatcccttcaaaaatacacttgtaaccaggtttcccagagttgttgataggcttctgctgaacatatgccaacccacctgcataatatatttttgttgcttttataaatcatgcattacataaagtgtgacaacttcaaaatgtattctctgttcttggaatacagtgccctaaaatggtgttcttatgacctgcagaaaatatttacacatatttccaaatatttatttcatgagcagtacagctaattaaaatatataagcttaaattttatatcttacatttaaaatattaagattcctttgacttgccatccatataagcttgctaaaaatattaagaccaagtcatgcaataattgaatgtacctcaaatttttaggggagggtgggttagggactgatactcagattgtggataataattgaattggtttttaaaggcaacatagcattctacagcagggttaatctattatcaagaacagtcaccctggttaataacaagttttactgatcagttgctggttggttggttggttggcatgtgggtgtgtgggtgtataggtgtgtgtgggtgtgtgtgtgtatttttccccatgagtcctttttttaatcctgtggctttttcacttacaactagcctaaccctgtaattttcctacatccaagaaaacaatcacaaagtagtggtttaaatactttgttgtatttggctaattttgctgtcttaatgcagcctattaagagttgggttaaaaatcagtaatcagtactttattacatcactgaactaaaatatggagacatcctcattgaaaatggagggcactctatcagtctataactatcaacgtagtgcaacagggtgttttgatacctttgttttcacctcttgacataatgctatttaaaggcttgaatttttccctttatataattttcacctttactttcaaagtgttttgttgtagttggctattgcagagagtgcattgtcctatcattcctaaacctggtctgctttctacattcatggtatggaaaccatgtgattctttgtacagtttatcctgatgttgcttgtaatgcagtagaggctatttcgccttcgcttttctttctcgacctttttgtaaaccctataattatgaagcgattgcttgagaaaataacatataaacatagaatagaatagactgaccaagatggttcacagtttctttttttaactaggttatttataatgtatttctgaaccacttggcagacaaattcacaacacttaatgttcatattttgagtaaaggaagctaaaaccatgtttgctttctggtactacatgcattagcgaaaggttaagtaagttttgttctccactgaagtaatacttaacatctcagaaaaaattttgcatgttctgtagttttgtattaaatcagtcatttcatatgcactatatcaagtacaaacaggtagtttacctgtttatagtagtgtactaacaaagtctcccttgcagcttcagactgttatctataggcttatcgttcaaatacagcacttgaatatcccaagtagttcttctacgcatagctcacctttctaaacccagttaagcatggaagagaggtagtaggtaggtgcagtgtgtggaagctgcaaacaagtaggccttttattcattgatatcttttcccaagtactggattttaaatctgtatgtatctgtttgatttttttttctaatatttcagttgagctgctgttttcttccatgcaatattgtatactcaattgtgtatagaagaagctggtgagagtgccctcctacataaataagcaattgcagtgttttgcatgcaaaatataaaaaatttaaattgtcctgattctattttgtaaatggagaaacaatcatatctttctaagcggtaatggaggaagactagtgctttgtgcattttgatatatttgagttcattttttccacaatgtcatacttttgacgcagttgggtttctcataagtatcctagttcatgtacatccgaatgctaaataatactgtgttttaagttttgtgttgcaagaacaaatggaataaacttgaattgtgctac

SEQ ID NO: 19303 - DNA, 3593 bp, Homo sapiens
  source 1..3593: mol_type = unassigned DNA
gcagccgagcagcctggcaacggcggtggcgcccggagcccgagagtttccaggatggcttctgcatcaacttctaaatataattcacactccttggagaatgagtctattaagaggacgtctcgagatggagtcaatcgagatctcactgaggctgttcctcgacttccaggagaaacactaatcactgacaaagaagttatttacatatgtcctttcaatggccccattaagggaagagtttacatcacaaattatcgtctttatttaagaagtttggaaacggattcttctctaatacttgatgttcctctgggtgtgatctcgagaattgaaaaaatgggaggcgcgacaagtagaggagaaaattcctatggtctagatattacttgtaaagacatgagaaacctgaggttcgctttgaaacaggaaggccacagcagaagagatatgtttgagatcctcacgagatacgcgtttcccctggctcacagtctgccattatttgcatttttaaatgaagaaaagtttaacgtggatggatggacagtttacaatccagtggaagaatacaggaggcagggcttgcccaatcaccattggagaataacttttattaataagtgctatgagctctgtgacacttaccctgctcttttggtggttccgtatcgtgcctcagatgatgacctccggagagttgcaacttttaggtcccgaaatcgaattccagtgctgtcatggattcatccagaaaataagacggtcattgtgcgttgcagtcagcctcttgtcggtatgagtgggaaacgaaataaagatgatgagaaatatctcgatgttatcagggagactaataaacaaatttctaaactcaccatttatgatgcaagacccagcgtaaatgcagtggccaacaaggcaacaggaggaggatatgaaagtgatgatgcatatcataacgccgaacttttcttcttagacattcataatattcatgttatgcgggaatctttaaaaaaagtgaaggacattgtttatcctaatgtagaagaatctcattggttgtccagtttggagtctactcattggttagaacatatcaagctcgttttgacaggagccattcaagtagcagacaaagtttcttcagggaagagttcagtgcttgtgcattgcagtgacggatgggacaggactgctcagctgacatccttggccatgctgatgttggatagcttctataggagcattgaagggttcgaaatactggtacaaaaagaatggataagttttggacataaatttgcatctcgaataggtcatggtgataaaaaccacaccgatgctgaccgttctcctatttttctccagtttattgattgtgtgtggcaaatgtcaaaacagttccctacagcttttgaattcaatgaacaatttttgattataattttggatcatctgtatagttgccgatttggtactttcttattcaactgtgaatctgctcgagaaagacagaaggttacagaaaggactgtttctttatggtcactgataaacagtaataaagaaaaattcaaaaaccccttctatactaaagaaatcaatcgagttttatatccagttgccagtatgcgtcacttggaactctgggtgaattactacattagatggaaccccaggatcaagcaacaacagccgaatccagtggagcagcgttacatggagctcttagccttacgcgacgaatacataaagcggcttgaggaactgcagctcgccaactctgccaagctttctgatcccccaacttcaccttccagtccttcgcaaatgatgccccatgtgcaaactcacttctgaggggggaccctggcaccgcattagagctcgaaataaaggcgatagctgactttcatttggggcatttgtaaaaagtagattaaaatatttgcctccatgtagaacttgaactaacataatcttaaactcttgaatatgtgccttctagaatacatattacaagaaaactacagggtccacacggcaatcagaagaaaggagctgagatgaggttttggaaaaccctgacacctttaaaaagcagtttttgaaagacaaaatttagatttaatttacgtcttgagaaatactatatatacaatatatattttgtgggcttaattgaaacaacattattttaaaatcaaaggggatatatgtttgtggaatggattttcctgaagctgcttaacagttgctttggattctctaagatgaatccaaatgtgaaagatgcatgttactgccaaaaccaaattgagctcagcttcctaggcattacccaaaagcaaggtgtttaagtaattgccagcttttataccatcatgagtggtgacttaaggagaaatagctgtatagatgagtttttcattatttggaaatttaggggtagaaaatgttttcccctaattttccagagaagcctatttttatatttttaaaaaactgacagggcccagttaaatatgatttgcattttttaaatttgccagttttattttctaaattctttcatgagcttgcctaaaattcggaatggttttcgggttgtggcaaaccccaaagagagcactgtccaaggatgtcgggagcatcctgctgcttaggggaatgttttcgcaaatgttgctctagtcagtccagctcatctgccaaaatgtagggctaccgtcttggatgcatgagctattgctagagcatcatccttagaaatcagtgccccagatgtacatgtgttgagcgtattcttgaaagtattgtgtttatgcatttcaatttcaatggtgttggcttcccctccccaccccacgcgtgcataaaaactggttctacaaatttttacttgaagtaccaggccgtttgctttttcaggttgttttgttttatagtattaagtgaaattttaaatgcacagttctatttgctatctgaactaattcatttattaagtatatttgtaaaagctaaggctcgagttaaaacaatgaagtgttttacaatgatttgtaaaggactatttataactaatatggttttgttttcaatgaattaagaaagattaaatatatctttgtaaattattttatgtcatagtttaattggtctaccaagtaagacatctcaaatacagtagtataatgtatgaattttgtaagtataagaaattttattagacattctcttactttttgtaaatgctgtaaatatttcataaattaacaaagtgtcactccataaaaagaaagctaatactaatagcctaaaagattttgtgaaatttcatgaaaactttttaatggcaataatgactaaagacctgctgtaataaatgtattaactgaaacctaacactgttttcagggctgtgagtgtgcatgtgttggaaatgtgcatggtggccatctgatttctttgcccgggtctgcttcatgtactttttatctcaccggcaaccttgcagggctctcccaaaatttcagcaagattgggcatttaagtgtattaaacagtgcagattttaagagtca

SEQ ID NO: 19304 - DNA, 1774 bp, Homo sapiens
  source 1..1774: mol_type = unassigned DNA
ggtggcgcccggagcccgagagtttccaggatggcttctgcatcaacttctaaatataattcacactccttggagaatgagtctattaagaggacgtctcgagatggagtcaatcgagatctcactgaggctgttcctcgacttccaggagaaacactaatcactgacaaagaagttatttacatatgtcctttcaatggccccattaagggaagagtttacatcacaaattatcgtctttatttaagaagtttggaaacggacatgagaaacctgaggttcgctttgaaacaggaaggccacagcagaagagatatgtttgagatcctcacgagatacgcgtttcccctggctcacagtctgccattatttgcatttttaaatgaagaaaagtttaacgtggatggatggacagtttacaatccagtggaagaatacaggaggcagggcttgcccaatcaccattggagaataacttttattaataagtgctatgagctctgtgacacttaccctgctcttttggtggttccgtatcgtgcctcagatgatgacctccggagagttgcaacttttaggtcccgaaatcgaattccagtgctgtcatggattcatccagaaaataagacggtcattgtgcgttgcagtcagcctcttgtcggtatgagtgggaaacgaaataaagatgatgagaaatatctcgatgttatcagggagactaataaacaaatttctaaactcaccatttatgatgcaagacccagcgtaaatgcagtggccaacaaggcaacaggaggaggatatgaaagtgatgatgcatatcataacgccgaacttttcttcttagacattcataatattcatgttatgcgggaatctttaaaaaaagtgaaggacattgtttatcctaatgtagaagaatctcattggttgtccagtttggagtctactcattggttagaacatatcaagctcgttttgacaggagccattcaagtagcagacaaagtttcttcagggaagagttcagtgcttgtgcattgcagtgacggatgggacaggactgctcagctgacatccttggccatgctgatgttggatagcttctataggagcattgaagggttcgaaatactggtacaaaaagaatggataagttttggacataaatttgcatctcgaataggtcatggtgataaaaaccacaccgatgctgaccgttctcctatttttctccagtttattgattgtgtgtggcaaatgtcaaaacagttccctacagcttttgaattcaatgaacaatttttgattataattttggatcatctgtatagttgccgatttggtactttcttattcaactgtgaatctgctcgagaaagacagaaggttacagaaaggactgtttctttatggtcactgataaacagtaataaagaaaaattcaaaaaccccttctatactaaagaaatcaatcgagttttatatccagttgccagtatgcgtcacttggaactctgggtgaattactacattagatggaaccccaggatcaagcaacaacagccgaatccagtggagcagcgttacatggagctcttagccttacgcgacgaatacataaagcggcttgaggaactgcagctcgccaactctgccaagctttctgatcccccaacttcaccttccagtccttcgcaaatgatgccccatgtgcaaactcacttctgaggggggaccctggcaccgcattagagctcgaaataaaggcgat

SEQ ID NO: 19305 - DNA, 1943 bp, Homo sapiens
  source 1..1943: mol_type = unassigned DNA
agccgagcagcctggcaacggcggtggcgcccggagcccgagagtttccaggatggcttctgcatcaacttctaaatataattcacactccttggagaatgagtctattaagaggacgtctcgagatggagtcaatcgagatctcactgaggctgttcctcgacttccaggagaaacactaatcactggattcttctctaatacttgatgttcctctgggtgtgatctcgagaattgaaaaaatgggaggcgcgacaagtagaggagaaaattcctatggtctagatattacttgtaaagacatgagaaacctgaggttcgctttgaaacaggaaggccacagcagaagagatatgtttgagatcctcacgagatacgcgtttcccctggctcacagtctgccattatttgcatttttaaatgaagaaaagtttaacgtggatggatggacagtttacaatccagtggaagaatacaggaggcagggcttgcccaatcaccattggagaataacttttattaataagtgctatgagctctgtgacacttaccctgctcttttggtggttccgtatcgtgcctcagatgatgacctccggagagttgcaacttttaggtcccgaaatcgaattccagtgctgtcatggattcatccagaaaataagacggtcattgtgcgttgcagtcagcctcttgtcggtatgagtgggaaacgaaataaagatgatgagaaatatctcgatgttatcagggagactaataaacaaatttctaaactcaccatttatgatgcaagacccagcgtaaatgcagtggccaacaaggcaacaggaggaggatatgaaagtgatgatgcatatcataacgccgaacttttcttcttagacattcataatattcatgttatgcgggaatctttaaaaaaagtgaaggacattgtttatcctaatgtagaagaatctcattggttgtccagtttggagtctactcattggttagaacatatcaagctcgttttgacaggagccattcaagtagcagacaaagtttcttcagggaagagttcagtgcttgtgcattgcagtgacggatgggacaggactgctcagctgacatccttggccatgctgatgttggatagcttctataggagcattgaagggttcgaaatactggtacaaaaagaatggataagttttggacataaatttgcatctcgaataggtcatggtgataaaaaccacaccgatgctgaccgttctcctatttttctccagtttattgattgtgtgtggcaaatgtcaaaacagttccctacagcttttgaattcaatgaacaatttttgattataattttggatcatctgtatagttgccgatttggtactttcttattcaactgtgaatctgctcgagaaagacaggctctccactttctctctctgtctctctgtagaaggttacagaaaggactgtttctttatggtcactgataaacagtaataaagaaaaattcaaaaaccccttctatactaaagaaatcaatcgagttttatatccagttgccagtatgcgtcacttggaactctgggtgaattactacattagatggaaccccaggatcaagcaacaacagccgaatccagtggagcagcgttacatggagctcttagccttacgcgacgaatacataaagcggcttgaggaactgcagctcgccaactctgccaagctttctgatcccccaacttcaccttccagtccttcgcaaatgatgccccatgtgcaaactcacttctgaggggggaccctggcaccgcattagagctcgaaataaaggcgatagctgactttcatttggggcatttgtaaaaagtagattaaaatatttgcctccatgtagaacttgaactaacataatcttaaactcttgaatatgtgcc

SEQ ID NO: 19306 - DNA, 1954 bp, Homo sapiens
  source 1..1954: mol_type = unassigned DNA
agccgagcagcctggcaacggcggtggcgcccggagcccgagagtttccaggatggcttctgcatcaacttctaaatataattcacactccttggagaatgagtctattaagaggacgtctcgagatggagtcaatcgagatctcactgaggctgttcctcgacttccaggagaaacactaatcactggacatgagaaacctgaggttcgctttgaaacaggaaggccacagcagaagagatatgtttgagatcctcacgagatacgcgtttcccctggctcacagtctgccattatttgcatttttaaatgaagaaaagtttaacgtggatggatggacagtttacaatccagtggaagaatacaggaggcagggcttgcccaatcaccattggagaataacttttattaataagtgctatgagctctgtgacacttaccctgctcttttggtggttccgtatcgtgcctcagatgatgacctccggagagttgcaacttttaggtcccgaaatcgaattccagtgctgtcatggattcatccagaaaataagacggtcattgtgcgttgcagtcagcctcttgtcggtatgagtgggaaacgaaataaagatgatgagaaatatctcgatgttatcagggagactaataaacaaatttctaaactcaccatttatgatgcaagacccagcgtaaatgcagtggccaacaaggcaacaggaggaggatatgaaagtgatgatgcatatcataacgccgaacttttcttcttagacattcataatattcatgttatgcgggaatctttaaaaaaagtgaaggacattgtttatcctaatgtagaagaatctcattggttgtccagtttggagtctactcattggttagaacatatcaagctcgttttgacaggagccattcaagtagcagacaaagtttcttcagggaagagttcagtgcttgtgcattgcagtgacggatgggacaggactgctcagctgacatccttggccatgctgatgttggatagcttctataggagcattgaagggttcgaaatactggtacaaaaagaatggataagttttggacataaatttgcatctcgaataggtcatggtgataaaaaccacaccgatgctgaccgttctcctatttttctccagtttattgattgtgtgtggcaaatgtcaaaacagttccctacagcttttgaattcaatgaacaatttttgattataattttggatcatctgtatagttgccgatttggtactttcttattcaactgtgaatctgctcgagaaagacagaaggttacagaaaggactgtttctttatggtcactgataaacagtaataaagaaaaattcaaaaaccccttctatactaaagaaatcaatcgagttttatatccagttgccagtatgcgtcacttggaactctgggtgaattactacattagatggaaccccaggatcaagcaacaacagccgaatccagtggagcagcgttacatggagctcttagccttacgcgacgaatacataaagcggcttgaggaactgcagctcgccaactctgccaagctttctgatcccccaacttcaccttccagtccttcgcaaatgatgccccatgtgcaaactcacttctgaggggggaccctggcaccgcattagagctcgaaataaaggcgatagctgactttcatttggggcatttgtaaaaagtagattaaaatatttgcctccatgtagaacttgaactaacataatcttaaactcttgaatatgtgccttctagaatacatattacaagaaaactacagggtccacacggcaatcagaagaaaggagctgagatgaggttttggaaaaccctgacacctttaaaaagcagtttttgaaagacaaaatttagatttaatttacgtcttgagaaatactatata

SEQ ID NO: 19307 - DNA, 2755 bp, Homo sapiens
  source 1..2755: mol_type = unassigned DNA
gggtaacgcggggccgccaggtgacagctaatggcggcggccgcctgaggcgggcgggcggtatagagcgggcggcaggaggcaagcagcgaaaccttcccggccgccgctcccgtcccgacggcggcttccccaaggcggcaggactcggcgcgccatggacaggccggcggcggcggcggcggcgggctgcgagggcggcgggggcccgaacccggggccggcgggcggcaggaggcctcctcgggccgcggggggcgccaccgccggctcccggcagcccagcgtggagaccctggacagtcccacaggatcacatgttgaatggtgtaaacagcttatagctgctacaatttctagtcagatttcaggttcagtgacatcagaaaatgtgtccagagattacaaggctctaagggatggaaataagctggcacagatggaagaggctccacttttcccaggagaatcaattaaagccattgtgaaagatgtcatgtatatctgcccatttatgggagcagtgagtggaaccctgacagtgacggactttaagctgtacttcaaaaatgtcgagagggacccgcattttatccttgatgttccccttggagtgatcagcagagtggagaagattggagcacagagccatggagacaattcctgtggtatagagatagtgtgcaaggatatgaggaacttgcggcttgcttataaacaggaagaacagagtaaactagggatatttgaaaacctcaacaaacatgcatttcctctttctaacggacaggcactatttgcattcagctataaagaaaaatttccaattaatggctggaaagtttatgatccagtatctgaatataagagacagggcttgccaaatgagagttggaaaatatccaaaataaacagtaattatgagttctgtgacacctaccctgccatcattgttgtgccaactagtgtaaaagatgatgacctttcaaaagtggcagcttttcgagcaaaaggcagagtccctgtgttgtcatggattcatccggaaagtcaagcaacgattacccgttgcagccagccacttgtgggtcccaatgataagcgctgcaaagaggatgaaaaatacttgcaaacaataatggatgctaacgcacagtcacacaagcttatcatctttgatgctcgacaaaacagtgtcgctgataccaacaagacaaagggtggaggatatgaaagtgaaagtgcttacccaaatgcagaacttgtgttcttggagatccacaacattcatgtcatgcgagagtcactacgcaaattaaaagagattgtgtacccttcgatcgatgaggcgcggtggctctccaatgtggatgggacgcattggctggaatatataaggatgctgcttgctggggcagtaagaattgctgataaaatagaatctgggaaaacatctgtggtggtgcattgcagcgacggttgggaccgaacagcccagctcacatctctggctatgctaatgttggacagttactacaggaccattaaaggatttgaaactctcgtagaaaaggagtggataagctttggacacaggtttgcactgcgagtgggccatggtaatgacaaccatgcggatgctgaccgatctcccatatttctgcagtttgttgattgtgtttggcaaatgacaaggcagtttccttcagcattcgagtttaatgagctattcttgattacaattttggatcacctttatagctgtctttttgggacctttttgtgcaactgtgaacagcagcgattcaaagaggatgtatatacaaagacgatatctttatggtcgtatatcaatagccagctagacgagttttctaatcccttctttgtgaattatgaaaaccacgtgttatatcctgttgctagtctgagtcatttggaattgtgggtaaattattatgtacgatggaatccacggatgagacctcagatgcccattcaccagaatctcaaggagctgctggccgtcagggcggagctgcagaagcgtgtggagggcctacagcgggaggtggccacgcgcgccgtctcatcctcatctgagcggggctcctcgccctcccactccgccacctccgtccacacctcggtctgatgggcgagaaatatgtaatcccctggctgactaggactgttaaacatagtgtggactggatgatgccttcgacaaaccagagaagccaagttggggggagctggtgcctggagtgggccctgtgcacctcacctggcggaggctggggggggctctgtcagcaggaccctagaggagactctcattcgattttaaagaagcacaacgggtcattttcctttgtatgttcctagcgcagaactgtttctaaaacaacttgaagtatagttttgttatctaagcaatttttgttttaagtaagtaagtgtactagaatgcgaagccgttatggttcaggtttttaaaaactggtacagtattgtatttgtctcatctgttgcactgtatttcaatcatctgtaattaaaatgatcatatgtttgctccctggtcttttttaagtaagtaagtaagtatcttagtagatttttcctttgaggaaaatcggtaataaaataacatggattgaatgtttactgtgcgtcaagcacagttaatatatgatgatgtaaagtaactaactttatgtgatttaattcattcagtaaattgtaaatgtat

SEQ ID NO: 19308 - DNA, 564 bp, Homo sapiens
  source 1..564: mol_type = unassigned DNA
aaaatgcacggaattgctcctgcttcaagatgtcaagaccgagggagcttgagctgttctataccttttccgggaaggacaactgagtcccacaggatcacatgttgaatggtgtaaacagcttatagctgctacaatttctagtcagatttcaggttcagtgacatcagaaaatgtgtccagagattacaaggttttcaggaggcctgatctaagggagattcaggaagaacacaatggctacccttctgaagctgaagctgatcaggtggctctaagggatggaaataagctggcacagatggaagaggctccacttttcccaggagaatcaattaaagccattgtgaaagatgtcatgtatatctgcccatttatgggagcagtgagtggaaccctgacagtgacggactttaagctgtacttcaaaaatgtcgagagggacccgcattttatccttgatgttccccttggagtgatcagcagagtggagaagattggagcacagagccatggagacaattcctgtggtatagagatagtgtgcaaggatatgaggaactt

SEQ ID NO: 19309 - DNA, 549 bp, Homo sapiens
  source 1..549: mol_type = unassigned DNA
aagatgtcaagaccgagggagcttgagctgttctataccttttccgggaaggacaactgaggatcacatgttgaatggtgtaaacagcttatagctgctacaatttctagtcagatttcaggttcagtgacatcagaaaatgtgtccagagattacaaggttttcaggaggcctgatctaaggaatttagcaactaaaaaaaaaaaggagattcaggaagaacacaatggctacccttctgaagctgaagctgatcaggctctaagggatggaaataagctggcacagatggaagaggctccacttttcccaggagaatcaattaaagccattgtgaaagatgtcatgtatatctgcccatttatgggagcagtgagtggaaccctgacagtgacggactttaagctgtacttcaaaaatgtcgagagggacccgcattttatccttgatgttccccttggagtgatcagcagagtggagaagattggagcacagagccatggagacaattcctgtggtatagagatagtgtgcaaggatatgaggaac

SEQ ID NO: 19310 - DNA, 573 bp, Homo sapiens
  source 1..573: mol_type = unassigned DNA
ttgctaaaatgcacggaattgctcctgcttcaagatgtcaagaccgagggagcttgagctgttctataccttttccgggaaggacaactgagtcccacaggatcacatgttgaatggtgtaaacagcttatagctgctacaatttctagtcagatttcaggttcagtgacatcagaaaatgtgtccagagattacaaggttttcaggaggcctgatctaagggagattcaggaagaacacaatggctacccttctgaagctgaagctgatcaggctctaagggatggaaataagctggcacagatggaagaggctccacttttcccaggagaatcaattaaagccattgtgaaagatgtcatgtatatctgcccatttatgggagcagtgagtggaaccctgacagtgacggactttaagctgtacttcaaaaatgtcgagagggacccgcattttatccttgatgttccccttggagtgatcagcagagtggagaagattggagcacagagccatggagacaattcctgtggtatagagatagtgtgcaaggatatgaggaacttgcggctt

SEQ ID NO: 19311 - DNA, 4516 bp, Homo sapiens
  source 1..4516: mol_type = unassigned DNA
gcggccgcctgaggcgggcgggcggtatagagcgggcggcaggaggcaagcagcgaaaccttcccggccgccgctcccgtcccgacggcggcttccccaaggcggcaggactcggcgcgccatggacaggccggcggcggcggcggcggcgggctgcgagggcggcgggggcccgaacccggggccggcgggcggcaggaggcctcctcgggccgcggggggcgccaccgccggctcccggcagcccagcgtggagaccctggacagtcccacaggatcacatgttgaatggtgtaaacagcttatagctgctacaatttctagtcagatttcaggttcagtgacatcagaaaatgtgtccagagattacaaggttttcaggaggcctgatctaagggctctaagggatggaaataagctggcacagatggaagaggctccacttttcccaggagaatcaattaaagccattgtgaaagatgtcatgtatatctgcccatttatgggagcagtgagtggaaccctgacagtgacggactttaagctgtacttcaaaaatgtcgagagggacccgcattttatccttgatgttccccttggagtgatcagcagagtggagaagattggagcacagagccatggagacaattcctgtggtatagagatagtgtgcaaggatatgaggaacttgcggcttgcttataaacaggaagaacagagtaaactagggatatttgaaaacctcaacaaacatgcatttcctctttctaacggacaggcactatttgcattcagctataaagaaaaatttccaattaatggctggaaagtttatgatccagtatctgaatataagagacagggcttgccaaatgagagttggaaaatatccaaaataaacagtaattatgagttctgtgacacctaccctgccatcattgttgtgccaactagtgtaaaagatgatgacctttcaaaagtggcagcttttcgagcaaaaggcagagtccctgtgttgtcatggattcatccggaaagtcaagcaacgattacccgttgcagccagccacttgtgggtcccaatgataagcgctgcaaagaggatgaaaaatacttgcaaacaataatggatgctaacgcacagtcacacaagcttatcatctttgatgctcgacaaaacagtgtcgctgataccaacaagacaaagggtggaggatatgaaagtgaaagtgcttacccaaatgcagaacttgtgttcttggagatccacaacattcatgtcatgcgagagtcactacgcaaattaaaagagattgtgtacccttcgatcgatgaggcgcggtggctctccaatgtggatgggacgcattggctggaatatataaggatgctgcttgctggggcagtaagaattgctgataaaatagaatctgggaaaacatctgtggtggtgcattgcagcgacggttgggaccgaacagcccagctcacatctctggctatgctaatgttggacagttactacaggaccattaaaggatttgaaactctcgtagaaaaggagtggataagctttggacacaggtttgcactgcgagtgggccatggtaatgacaaccatgcggatgctgaccgatctcccatatttctgcagtttgttgattgtgtttggcaaatgacaaggcagtttccttcagcattcgagtttaatgagctattcttgattacaattttggatcacctttatagctgtctttttgggacctttttgtgcaactgtgaacagcagcgattcaaagaggatgtatatacaaagacgatatctttatggtcgtatatcaatagccagctagacgagttttctaatcccttctttgtgaattatgaaaaccacgtgttatatcctgttgctagtctgagtcatttggaattgtgggtaaattattatgtacgatggaatccacggatgagacctcagatgcccattcaccagaatctcaaggagctgctggccgtcagggcggagctgcagaagcgtgtggagggcctacagcgggaggtggccacgcgcgccgtctcatcctcatctgagcggggctcctcgccctcccactccgccacctccgtccacacctcggtctgatgggcgaggtcagcctgctgctccactgtctcccggtggctcaggaaagggacctggcgatcactgttatggctgtagcttgtgatcttgtcttttaggattaggcccagggaccatttgtgtggctaggtgacagctcccactgttggcaaccgttaccctcctgtcagcggtttcacaggggagccgtctgtcacgcccaccctgtgaagcaacttctggcattcaggcagcttgggagaaactaagtgaacggaatgcagtactgaggttcaagaaagctgtacgccatttctttccaacttaaatccttcagtaacaacaaacaccactcacttcaagatgcattgccagccccgtggcttccctcagctcttggccacaacttgaaaactgtcttgaatgaagtacttggggagaagacaggccactgccctctgttccacagttttcttcatgcacggggtcctcctgttaacaattactgttgtgtacatataaggtatttttagagaagagaaacaggcctttattttcctatgtccttttttacgtttagaatagtcacccgaggggggatcagctcaactgtactgtgggagaaattcttttccaacaaacctcatgctcgtttttctgtggtgcaatttcaagggcaacgtgttctgtcctcacctcactctggtactcgcctcttggggcggctcagcccattcatggggatggcaccaagcggccatgctcagtcttccagccccgctgagggtaaaccgaggcctctggcagctgtgcacaggtgctggcctctggctccttcaaggagcactgcctgtcactcgctcctgggctgtctagccatgtctcccacccccactttaccgcagccagctgctgggatcaaagcaagtctgttcttatgttatttgcctgtatgaaatcatttctcattttatcacaattccttcaactcagcttactcgcgtggctgcctgttcatatttgaaagcagccaccgtgctgtggctttggtttggaaaagcatagcacgcacttcccttggttttcccttcccagagccgaccgcagctggtcagccctctcttcccgctcctgaacctttacttactgactttgagctctgtgactccgtcggttctcgcaggaattaactaacttaccaattggttcaatccacttgagcgccatagctctgagctcctctgtgtgacatgccacagatgactattgcacacctgggtcctgccccagcaggccatgcccctcccatgtgccgtgcctgttgctgcagctgcccccccaccccgccactggctgcaggaattcagcctttagaggcagaggcagctgcagcggcccctgaggtcaaaccccagtgtgactgcatagcagtgttagctggttggtttcaaactactggattccaggcaaaggcctacagattgaccttattatttttgaaaatatgttaagggttttttcgtagagagagaaagaatggatttttttttaactgggaacctcctgattcttacggaaaattatccttctataagaagataccagagagatttattcaaggtaatttgataacctaaaatcaattctccattttttatcatatgtgggatttgttgctaagtcgtgttcaacaatagcttttatgttcctaacatatctgaaagcttatttatgaatggatatactggattattgatatactgattttttttttaatggggacatttgccattttcttcccagaaatatgtaatcccctggctgactaggactgttaaacatagtgtggactggatgatgccttcgacaaaccagagaagccaagttggggggagctggtgcctggagtgggccctgtgcacctcacctggcggaggctggggggggctctgtcagcaggaccctagaggagactctcattcgattttaaagaagcacaacgggtcattttcctttgtatgttcctagcgcagaactgtttctaaaacaacttgaagtatagttttgttatctaagcaatttttgttttaagtaagtaagtgtactagaatgcgaagccgttatggttcaggtttttaaaaactggtacagtattgtatttgtctcatctgttgcactgtatttcaatcatctgtaattaaaatgatcatatgtttgctccctggtcttttttaagtaagtaagtaagtatcttagtagatttttcctttgaggaaaatcggtaataaaataacatggattgaatgtttactgtgcgtcaagcacagttaatatatgatgatgtaaagtaactaactttatgtgatttaattcattcagtaaattgtaaatgta

SEQ ID NO: 19312 - DNA, 1828 bp, Homo sapiens
  source 1..1828: mol_type = unassigned DNA
gcggccgcctgaggcgggcgggcggtatagagcgggcggcaggaggcaagcagcgaaaccttcccggccgccgctcccgtcccgacggcggcttccccaaggcggcaggactcggcgcgccatggacaggccggcggcggcggcggcggcgggctgcgagggcggcgggggcccgaacccggggccggcgggcggcaggaggcctcctcgggccgcggggggcgccaccgccggctcccggcagcccagcgtggagaccctggacagtcccacaggatcacatgttgaatggtgtaaacagcttatagctgctacaatttctagtcagatttcaggttcagtgacatcagaaaatgtgtccagagattacaaggctctaagggatggaaataagctggcacagatggaagaggctccacttttcccaggagaatcaattaaagccattgtgaaagatgtcatgtatatctgcccatttatgggagcagtgagtggaaccctgacagtgacggactttaagctgtacttcaaaaatgtcgagagggacccgcattttatccttgatgttccccttggagtgatcagcagagtggagaagattggagcacagagccatggagacaattcctgtggtatagagatagtgtgcaaggatatgaggaacttgcggcttgcttataaacaggaagaacagagtaaactagggatatttgaaaacctcaacaaacatgcatttcctctttctaacggacaggcactatttgcattcagctataaagaaaaatttccaattaatggctggaaagtttatgatccagtatctgaatataagagacagggcttgccaaatgagagttggaaaatatccaaaataaacagtaattatgagttctgtgacacctaccctgccatcattgttgtgccaactagtgtaaaagatgatgacctttcaaaagtggcagcttttcgagcaaaaggcagagtccctgtgttgtcatggattcatccggaaagtcaagcaacgattacccgttgcagccagccacttgtgggtcccaatgataagcgctgcaaagaggatgaaaaatacttgcaaacaataatggatgctaacgcacagtcacacaagcttatcatctttgatgctcgacaaaacagtgtcgctgataccaacaagacaaagggtggaggatatgaaagtgaaagtgcttacccaaatgcagaacttgtgttcttggagatccacaacattcatgtcatgcgagagtcactacgcaaattaaaagagattgtgtacccttcgatcgatgaggcgcggtggctctccaatgtggatgggacgcattggctggaatatataaggatgctgcttgctggggcagtaagaattgctgataaaatagaatctgggaaaacatctgtggtggtgcattgcagcgacggttgggaccgaacagcccagctcacatctctggctatgctaatgttggacagttactacaggaccattaaaggatttgaaactctcgtagaaaaggagtggataagctttggacacaggtttgcactgcgagtgggccatggtaatgacaaccatgcggatgctgaccgatctcccatatttctgcagtttgttgattgtgtttggcaaatgacaaggcagtttccttcagcattcgagtttaatgagctattcttgattacaattttggatcacctttatagctgtctttttgggacctttttgtgcaactgtgaacagcagcgattcaaagaggcatggggggctgggacccagcgagcccgtggctctctcaggagtagatga

SEQ ID NO: 19313 - DNA, 700 bp, Homo sapiens
  source 1..700: mol_type = unassigned DNA
ggaggaattgctaaaatgcacggaattgctcctgcttcaagatgtcaagaccgagggagcttgagctgttctataccttttccgggaaggacaactgagtcccacaggatcacatgttgaatggtgtaaacagcttatagctgctacaatttctagtcagatttcaggttcagtgacatcagaaaatgtgtccagagattacaaggttttcaggaggcctgatctaagggctctaagggatggaaataagctggcacagatggaagaggctccacttttcccaggagaatcaattaaagccattgtgaaagatgtcatgtatatctgcccatttatgggagcagtgagtggaaccctgacagtgacggactttaagctgtacttcaaaaatgtcgagagggacccgcattttatccttgatgttccccttggagtgatcagcagagtggagaagattggagcacagagccatggagacaattcctgtggtatagagatagtgtgcaaggatatgaggaacttgcggcttgcttataaacaggaagaacagagtaaactagggatatttgaaaacctcaacaaacatgcatttcctctttctaacggacaggcactatttgcattcagctataaagaaaaatttccaattaatggctggaaagtttatgatccagtatctgaatataagagacagggcttg

SEQ ID NO: 19314 - DNA, 1967 bp, Homo sapiens
  source 1..1967: mol_type = unassigned DNA
caggagaatcaattaaagccattgtgaaagatgtcatgtatatctgcccatttatgggagcagtgagtggaaccctgacagtgacggactttaagctgtacttcaaaaatgtcgagagggacccgcattttatccttgatgttccccttggagtgatcagcagagtggagaagattggagcacagagccatggagacaattcctgtggtatagagatagtgtgcaaggatatgaggaacttgcggcttgcttataaacaggaagaacagagtaaactagggatatttgaaaacctcaacaaacatgcatttcctctttctaacggacaggcactatttgcattcagctataaagaaaaatttccaattaatggctggaaagtttatgatccagtatctgaatataagagacagggcttgccaaatgagagttggaaaatatccaaaataaacagtaattatgagttctgtgacacctaccctgccatcattgttgtgccaactagtgtaaaagatgatgacctttcaaaagtggcagcttttcgagcaaaaggcagagtccctgtgttgtcatggattcatccggaaagtcaagcaacgattacccgttgcagccagccacttgtgggtcccaatgataagcgctgcaaagaggatgaaaaatacttgcaaacaataatggatgctaacgcacagtcacacaagcttatcatctttgatgctcgacaaaacagtgtcgctgataccaacaagatgctgcttgctggggcagtaagaattgctgataaaatagaatctgggaaaacatctgtggtggtgcattgcagcgacggttgggaccgaacagcccagctcacatctctggctatgctaatgttggacagttactacaggaccattaaaggatttgaaactctcgtagaaaaggagtggataagctttggacacaggtttgcactgcgagtgggccatggtaatgacaaccatgcggatgctgaccgatctcccatatttctgcagtttgttgattgtgtttggcaaatgacaaggcagtttccttcagcattcgagtttaatgagctattcttgattacaattttggatcacctttatagctgtctttttgggacctttttgtgcaactgtgaacagcagcgattcaaagaggcatggggggctgggacccagcgagcccgtggctctctcaggagtagatgagtgctagaccctggacctcctgactccgagttcatgtagtctccgctgcaccaactccaaaaccgtgggattctgcttttcatcctctgtggtgttggccagatcatacttgaaggccttggaaatggagtctgctgattagccaaaaagcccactttaggatgtatatacaaagacgatatctttatggtcgtatatcaatagccagctagacgagttttctaatcccttctttgtgaattatgaaaaccacgtgttatatcctgttgctagtctgagtcatttggaattgtgggtaaattattatgtacgatggaatccacggatgagacctcagaaatatgtaatcccctggctgactaggactgttaaacatagtgtggactggatgatgccttcgacaaaccagagaagccaagttggggggagctggtgcctggagtgggccctgtgcacctcacctggcggaggctggggggggctctgtcagcaggaccctagaggagactctcattcgattttaaagaagcacaacgggtcattttcctttgtatgttcctagcgcagaactgtttctaaaacaacttgaagtatagttttgttatctaagcaatttttgttttaagtaagtaagtgtactagaatgcgaagccgttatggttcaggtttttaaaaactggtacagtattgtatttgtctcatctgttgcactgtatttcaatcatctgtaattaaaatgatcatatgttt

SEQ ID NO: 19315 - DNA, 2162 bp, Homo sapiens
  source 1..2162: mol_type = unassigned DNA
atggggtggggaggaattgctaaaatgcacggaattgctcctgcttcaagatgtcaagaccgagggagcttgagctgttctataccttttccgggaaggacaactgagtcccacaggatcacatgttgaatggtgtaaacagcttatagctgctacaatttctagtcagatttcaggttcagtgacatcagaaaatgtgtccagagattacaaggttttcaggaggcctgatctaagggctctaagggatggaaataagctggcacagatggaagaggctccacttttcccaggagaatcaattaaagccattgtgaaagatgtcatgtatatctgcccatttatgggagcagtgagtggaaccctgacagtgacggactttaagctgtacttcaaaaatgtcgagagggacccgcattttatccttgatgttccccttggagtgatcagcagagtggagaagattggagcacagagccatggagacaattcctgtggtatagagatagtgtgcaaggatatgaggaacttgcggcttgcttataaacaggaagaacagagtaaactagggatatttgaaaacctcaacaaacatgcatttcctctttctaacggacaggcactatttgcattcagctataaagaaaaatttccaattaatggctggaaagtttatgatccagtatctgaatataagagacagggcttgccaaatgagagttggaaaatatccaaaataaacagtaattatgagttctgtgacacctaccctgccatcattgttgtgccaactagtgtaaaagatgatgacctttcaaaagtggcagcttttcgagcaaaaggcagagtccctgtgttgtcatggattcatccggaaagtcaagcaacgattacccgttgcagccagccacttgtgggtcccaatgataagcgctgcaaagaggatgaaaaatacttgcaaacaataatggatgctaacgcacagtcacacaagcttatcatctttgatgctcgacaaaacagtgtcgctgataccaacaagacaaagggtggaggatatgaaagtgaaagtgcttacccaaatgcagaacttgtgttcttggagatccacaacattcatgtcatgcgagagtcactacgcaaattaaaagagattgtgtacccttcgatcgatgaggcgcggtggctctccaatgtggatgggacgcattggctggaatatataaggatgctgcttgctggggcagtaagaattgctgataaaatagaatctgggaaaacatctgtggtggtgcattgcagcgacggttgggaccgaacagcccagctcacatctctggctatgctaatgttggacagttactacaggaccattaaaggatttgaaactctcgtagaaaaggagtggataagctttggacacaggtttgcactgcgagtgggccatggtaatgacaaccatgcggatgctgaccgatctcccatatttctgcagtttgttgattgtgtttggcaaatgacaaggcagtttccttcagcattcgagtttaatgagctattcttgattacaattttggatcacctttatagctgtctttttgggacctttttgtgcaactgtgaacagcagcgattcaaagaggatgtatatacaaagacgatatctttatggtcgtatatcaatagccagctagacgagttttctaatcccttctttgtgaattatgaaaaccacgtgttatatcctgttgctagtctgagtcatttggaattgtgggtaaattattatgtacgatggaatccacggatgagacctcagatgcccattcaccagaatctcaaggagctgctggccgtcagggcggagctgcagaagcgtgtggagggcctacagcgggaggtggccacgcgcgccgtctcatcctcatctgagcggggctcctcgccctcccactccgccacctccgtccacacctcggtctgatgggcgaggtcagcctgctgctccactgtctcccggtggctcaggaaagggacctggcgatcactgttatggctgtagcttgtgatcttgtcttttaggattaggcccagggaccatttgtgtggctaggtgacagctcccactgttggcaaccgttaccctcctgtcagcggtttca

SEQ ID NO: 19316 - DNA, 1451 bp, Homo sapiens
  source 1..1451: mol_type = unassigned DNA
gtgggtaacgcggggccgccaggtgacagctaatggcggcggccgcctgaggcgggcgggcggtatagagcgggcggcaggaggcaagcagcgaaaccttcccggccgccgctcccgtcccgacggcggcttccccaaggcggcaggactcggcgcgccatggacaggccggcggcggcggcggcggcgggctgcgagggcggcgggggcccgaacccggggccggcgggcggcaggaggcctcctcgggccgcggggggcgccaccgccggctcccggcagcccagcgtggagaccctggacagtcccacaggatcacatgttgaatggtgtaaacagcttatagctgctacaatttctagtcagatttcaggttcagtgacatcagaaaatgtgtccagagattacaaggctctaagggatggaaataagctggcacagatggaagaggctccacttttcccaggagaatcaattaaagccattgtgaaagatgtcatgtatatctgcccatttatgggagcagtgagtggaaccctgacagtgacggactttaagctgtacttcaaaaatgtcgagagggacccgcattttatccttgatgttccccttggagtgatcagcagagtggagaagattggagcacagagccatggagacaattcctgtggtatagagatagtgtgcaaggatatgaggaacttgcggcttgcttataaacaggaagaacagagtaaactagggatatttgaaaacctcaacaaacatgcatttcctctttctaacggacaggcactatttgcattcagctataaagaaaaatttccaattaatggctggaaagtttatgatccagtatctgaatataagagacagggcttgccaaatgagagttggaaaatatccaaaataaacagtaattatgagttctgtgacacctaccctgccatcattgttgtgccaactagtgtaaaagatgatgacctttcaaaagtggcagcttttcgagcaaaaggcagagtccctgtgttgtcatggattcatccggaaagtcaagcaacgattacccgttgcagccagccacttgtgggtcccaatgataagcgctgcaaagaggatgaaaaatacttgcaaacaataatggatgctaacgcacagtcacacaagcttatcatctttgatgctcgacaaaacagtgtcgctgataccaacaagctttggtatcaggatacagctagcctcatggaatgaactaggaagtatgccctcctcttctagtttttggatgacccatcatctcttacctcacctacagcaggaaccttgaaattggacttctgcctcacaccctgcaatctcatctccacattatgaccagagtgatcttcttttttaaaaaaaacttattgttactatttcaattgataaatgaattgtatatatttatggtg

SEQ ID NO: 19317 - DNA, 4314 bp, Homo sapiens
  source 1..4314: mol_type = unassigned DNA
gcggccgcctgaggcgggcgggcggtatagagcgggcggcaggaggcaagcagcgaaaccttcccggccgccgctcccgtcccgacggcggcttccccaaggcggcaggactcggcgcgccatggacaggccggcggcggcggcggcggcgggctgcgagggcggcgggggcccgaacccggggccggcgggcggcaggaggcctcctcgggccgcggggggcgccaccgccggctcccggcagcccagcgtggagaccctggacagtcccacaggatcacatgttgaatggtgtaaacagcttatagctgctacaatttctagtcagatttcaggttcagtgacatcagaaaatgtgtccagagattacaaggctctaagggatggaaataagctggcacagatggaagaggctccacttttcccaggagaatcaattaaagccattgtgaaagatgtcatgtatatctgcccatttatgggagcagtgagtggaaccctgacagtgacggactttaagctgtacttcaaaaatgtcgagagggacccgcattttatccttgatgttccccttggagtgatcagcagagtggagaagattggagcacagagccatggagacaattcctgtggtatagagatagtgtgcaaggatatgaggaacttgcggcttgcttataaacaggaagaacagagtaaactagggatatttgaaaacctcaacaaacatgcatttcctctttctaacggacaggcactatttgcattcagctataaagaaaaatttccaattaatggctggaaagtttatgatccagtatctgaatataagagacagggcttgccaaatgagagttggaaaatatccaaaataaacagtaattatgagttctgtgacacctaccctgccatcattgttgtgccaactagtgtaaaagatgatgacctttcaaaagtggcagcttttcgagcaaaaggcagagtccctgtgttgtcatggattcatccggaaagtcaagcaacgattacccgttgcagccagccacttgtgggtcccaatgataagcgctgcaaagaggatgaaaaatacttgcaaacaataatggatgctaacgcacagtcacacaagcttatcatctttgatgctcgacaaaacagtgtcgctgataccaacaagacaaagggtggaggatatgaaagtgaaagtgcttacccaaatgcagaacttgtgttcttggagatccacaacattcatgtcatgcgagagtcactacgcaaattaaaagagattgtgtacccttcgatcgatgaggcgcggtggctctccaatgtggatgggacgcattggctggaatatataaggatgctgcttgctggggcagtaagaattgctgataaaatagaatctgggaaaacatctgtggtggtgcattgcagcgacggttgggaccgaacagcccagctcacatctctggctatgctaatgttggacagttactacaggaccattaaaggatttgaaactctcgtagaaaaggagtggataagctttggacacaggtttgcactgcgagtgggccatggtaatgacaaccatgcggatgctgaccgatctcccatatttctgcagtttgttgattgtgtttggcaaatgacaaggcagtttccttcagcattcgagtttaatgagctattcttgattacaattttggatcacctttatagctgtctttttgggacctttttgtgcaactgtgaacagcagcgattcaaagaggatgtatatacaaagacgatatctttatggtcgtatatcaatagccagctagacgagttttctaatcccttctttgtgaattatgaaaaccacgtgttatatcctgttgctagtctgagtcatttggaattgtgggtaaattattatgtacgatggaatccacggatgagacctcagatgcccattcaccagaatctcaaggagctgctggccgtcagggcggagctgcagaagcgtgtggagggcctacagcgggaggtggccacgcgcgccgtctcatcctcatctgagcggggctcctcgccctcccactccgccacctccgtccacacctcggtctgatgggcgaggtcagcctgctgctccactgtctcccggtggctcaggaaagggacctggcgatcactgttatggctgtagcttgtgatcttgtcttttaggattaggcccagggaccatttgtgtggctaggtgacagctcccactgttggcaaccgttaccctcctgtcagcggtttcacaggggagccgtctgtcacgcccaccctgtgaagcaacttctggcattcaggcagcttgggagaaactaagtgaacggaatgcagtactgaggttcaagaaagctgtacgccatttctttccaacttaaatccttcagtaacaacaaacaccactcacttcaagatgcattgccagccccgtggcttccctcagctcttggccacaacttgaaaactgtcttgaatgaagtacttggggagaagacaggccactgccctctgttccacagttttcttcatgcacggggtcctcctgttaacaattactgttgtgtacatataaggtatttttagagaagagaaacaggcctttattttcctatgtccttttttacgtttagaatagtcacccgaggggggatcagctcaactgtactgtgggagaaattcttttccaacaaacctcatgctcgtttttctgtggtgcaatttcaagggcaacgtgttctgtcctcacctcactctggtactcgcctcttggggcggctcagcccattcatggggatggcaccaagcggccatgctcagtcttccagccccgctgagggtaaaccgaggcctctggcagctgtgcacaggtgctggcctctggctccttcaaggagcactgcctgtcactcgctcctgggctgtctagccatgtctcccacccccactttaccgcagccagctgctgggatcaaagcaagtctgttcttatgttatttgcctgtatgaaatcatttctcattttatcacaattccttcaactcagcttactcgcgtggctgcctgttcatatttgaaagcagccaccgtgctgtggctttggtttggaaaagcatagcacgcacttcccttggttttcccttcccagagccgaccgcagctggtcagccctctcttcccgctcctgaacctttacttactgactttgagctctgtgactccgtcggttctcgcaggaattaactaacttaccaattggttcaatccacttgagcgccatagctctgagctcctctgtgtgacatgccacagatgactattgcacacctgggtcctgccccagcaggccatgcccctcccatgtgccgtgcctgttgctgcagctgcccccccaccccgccactggctgcaggaattcagcctttagaggcagaggcagctgcagcggcccctgaggtcaaaccccagtgtgactgcatagcagtgttagctggttggtttcaaactactggattccaggcaaaggcctacagattgaccttattatttttgaaaatatgttaagggttttttcgtagagagagaaagaatggatttttttttaactgggaacctcctgattcttacggaaaattatccttctataagaagataccagagagatttattcaaggtaatttgataacctaaaatcaattctccattttttatcatatgtgggatttgttgctaagtcgtgttcaacaatagcttttatgttcctaacatatctgaaagcttatttatgaatggatatactggattattgatatactgattttttttttaatggggacatttgccattttcttcccagaaatatgtaatcccctggctgactaggactgttaaacatagtgtggactggatgatgccttcgacaaaccagagaagccaagttggggggagctggtgcctggagtgggccctgtgcacctcacctggcggaggctggggggggctctgtcagcaggaccctagaggagactctcattcgattttaaagaagcacaacgggtcattttcctttgtatgttcctagcgcagaactgtttctaaaacaacttgaagtatagttttgttatctaagcaatttttgttttaagtaagtaagtgtactagaatgcgaagccgttatggttcaggtttttaaaaactggtacagtattgtatttgtctcatctgttgcactgtatttcaatcatctgtaattaaaatgatcatatgttt

SEQ ID NO: 19318 - DNA, 2215 bp, Homo sapiens
  source 1..2215: mol_type = unassigned DNA
atcgcggcggtcgcggccttggggatgggcggagccccagccgctagtgctggtggccgccgctgctgccccagctggagcccgagccgccgcctctgcgtccgcgcgtcgctgcttcccagggcggcggtatgctggggaaaggagtagtcggcggtggcggcggcaccaaggcccccaagccctccttcgtgtcgtacgtacgccctgaggaaattcacacaaacgaaaaggaagtaacagagaaggaagtaactcttcacttgttgccaggtgaacagctgctttgtgaagccagcacagtactgaagtatgtccaggaagattcctgtcagcatggggtctatgggaggcttgtctgcacagacttcaagattgccttcttgggtgatgatgaatctgcattggataatgatgaaactcaatttaagaataaggttataggagaaaatgacattacactccactgtgttgatcagatttatggagtgtttgatgagaaaaagaaaactctctttggacaactgaagaaataccctgagaagctcatcatccactgcaaagaccttcgagtgttccagttttgtctgaggtacacaaaggaagaggaagtcaaaaggattgtcagtggcataattcatcatacccaggctcctaaactgcttaaacgattatttctgttttcctatgcgactgctgcacaaaacaatacagtcactgatcccaagaaccataccgtaatgtttgacacacttaaggactggtgttgggaactggaacggaccaaaggcaacatgaagtacaaagcagtgagtgtcaacgaaggctataaagtctgtgagagattgccagcatactttgttgtccccacccctcttcctgaagagaatgtgcagcgctttcagggtcatggcataccaatatggtgttggtcctgccacaatggaagtgcccttttgaaaatgtcagcactgcccaaagaacaggatgacggcattttacaaatccaaaagagcttcttagatggaatttacaagaccatccacaggccaccctatgaaattgttaaaacggaagacctgtcaagcaacttcctgtccctgcaggaaatccagactgcatactctaaatttaaacagctatttctgatagataacagtactgaattttgggacacagatataaaatggttttctctgttggaaagtagcagctggcttgacataatcagacgttgcctgaaaaaagcaatagagattacagaatgtatggaagcacaaaacatgaatgttcttcttttagaggagaatgcatccgacctctgctgtctcatttcctctctggtgcaactgatgatggacccccactgcagaaccagaattggtttccagagcctcatccaaaaggagtgggtcatgggtggccactgtttcttggatcgctgcaaccatctccgccagaacgacaaagaggagcatcaacgacaactttctttgccacttacacaatctaagtcatctcccaaaagaggatttttcagggaagaaacagatcatttaattaaaaaccttctgggcaagagaattagcaaacttattaattcttctgatgagctccaagacaactttcgagagttctatgacagctggcatagcaagtccactgactaccatggtttgttgttaccgcatatcgaggggcccgaaatcaaagtctgggcccagcgctacctacgttggattccagaagcccaaatcctaggtggtggccaagtggccactctgagcaaactcttggaaatgatggaggaagtccagagtttacaagagaagatcgacgagagacaccacagccagcaggccccccaggctgaggccccctgcctgctgaggaactctgcccgcctctcgtctttgtttcctttcgctctgctccagcgacattcctctaagcccgtcttacccaccagtggctggaaagctttgggagatgaagacgatttggccaaacgagaagatgagttcgtggacctaggggatgtgtgacctgtttgttgagtgattgtgaaagaggaatgtgggagattgggacagctgatccctggatttgtgtcacgctacagctcatgctggctgggtccttagcccggcactccgttagaataaacctgggccttcgggaaaagaggtggctctcattatttttcatgattcta

SEQ ID NO: 19319 - DNA, 4966 bp, Homo sapiens
  source 1..4966: mol_type = unassigned DNA
gagccccagccgctagtgctggtggccgccgctgctgccccagctggagcccgagccgccgcctctgcgtccgcgcgtcgctgcttcccagggcggcggtatgctggggaaaggagtagtcggcggtggcggcggcaccaaggcccccaagccctccttcgtgtcgtacgtacgccctgaggaaattcacacaaacgaaaaggaagtaacagagaaggaagtaactcttcacttgttgccaggtgaacagctgctttgtgaagccagcacagtactgaagtatgtccaggaagattcctgtcagcatggggtctatgggaggcttgtctgcacagacttcaagattgccttcttgggtgatgatgaatctgcattggataatgatgaaactcaatttaagaataaggttataggagaaaatgacattacactccactgtgttgatcagatttatggagtgtttgatgagaaaaagaaaactctctttggacaactgaagaaataccctgagaagctcatcatccactgcaaagaccttcgagtgttccagttttgtctgaggtacacaaaggaagaggaagtcaaaaggattgtcagtggcataattcatcatacccaggctcctaaactgcttaaacgattatttctgttttcctatgcgactgctgcacaaaacaatacagtcactgatcccaagaaccataccgtaatgtttgacacacttaaggactggtgttgggaactggaacggaccaaaggcaacatgaagtacaaagcagtgagtgtcaacgaaggctataaagtctgtgagagattgccagcatactttgttgtccccacccctcttcctgaagagaatgtgcagcgctttcagggtcatggcataccaatatggtgttggtcctgccacaatggaagtgcccttttgaaaatgtcagcactgcccaaagaacaggatgacggcattttacaaatccaaaagagcttcttagatggaatttacaagaccatccacaggccaccctatgaaattgttaaaacggaagacctgtcaagcaacttcctgtccctgcaggaaatccagactgcatactctaaatttaaacagctatttctgatagataacagtactgaattttgggacacagatataaaatggttttctctgttggaaagtagcagctggcttgacataatcagacgttgcctgaaaaaagcaatagagattacagaatgtatggaagcacaaaacatgaatgttcttcttttagaggagaatgcatccgacctctgctgtctcatttcctctctggtgcaactgatgatggacccccactgcagaaccagaattggtttccagagcctcatccaaaaggagtgggtcatgggtggccactgtttcttggatcgctgcaaccatctccgccagaacgacaaagaggaggttcctgtgttcctgcttttcctagattgtgtctggcagctggtgcaccagcatcccccggcatttgaattcacagagacttacctgactgttttgtcagatagcctgtatatacctatttttagcaccttcttcttcaattcacctcatcaaaaagatactaacatgcatcaacgacaactttctttgccacttacacaatctaagtcatctcccaaaagaggatttttcagggaagaaacagatcatttaattaaaaaccttctgggcaagagaattagcaaacttattaattcttctgatgagctccaagacaactttcgagagttctatgacagctggcatagcaagtccactgactaccatggtttgttgttaccgcatatcgaggggcccgaaatcaaagtctgggcccagcgctacctacgttggattccagaagcccaaatcctaggtggtggccaagtggccactctgagcaaactcttggaaatgatggaggaagtccagagtttacaagagaagatcgacgagagacaccacagccagcaggccccccaggctgaggccccctgcctgctgaggaactctgcccgcctctcgtctttgtttcctttcgctctgctccagcgacattcctctaagcccgtcttacccaccagtggctggaaagctttgggagatgaagacgatttggccaaacgagaagatgagttcgtggacctaggggatgtgtgacctgtttgttgagtgattgtgaaagaggaatgtgggagattgggacagctgatccctggatttgtgtcacgctacagctcatgctggctgggtccttagcccggcactccgttagaataaacctgggccttcgggaaaagaggtggctctcattatttttcatgattctaaaagactatgcaattaaaaccgcatctgtagtattactaattggaaggaattattacttgacccgtaatagggttgtggccgttttctgatgcctaagtattatacagagcccacaatggccagtttactaccagaaagggcttcagtaagatattcttggacttgatactttcttcagatcctctttgtgccaagataatttatccagtcattgggaatagtaagtttctgtgtaacccatctcaattatagaagcaagttcagctttatgtatttgtatggggagttgaagattcagatagaggtattaagatgtgtggcatttacttaaaccatcacatttttttctttctacgcccccttgcctgtaaaacacctgggaagttccactggtgtcatccatcctgatgcttcagaccaccctcccttcttcacagaccgtgtcactttgcctgtgggtgggggctagccagccaccaccctcttttctgtgctgccagccccaggtcttcctccgcctgctccacaccactcgccgctgtccctctgcactccctgccttggtgcgtgtagtcccagtgtctcactgccaaacctcttggttacgctgcggggatctgtttctttgcctgagatccttcctgaggagcgtccattcctctggagtctctccttgtttggaacaaatcgcttcgcctttttctacttgcctgctgaagctttggagcacttgtgattgcagttttctgccgcaacccctgagccgagttcctcacattcttttacctttatggactgatgggattgggtcacttttgaatgtggctttcataggaaagcagcttaaacataaatatcagaagtgatgattatcatatgatacctcagtgattttaaaagccatagaagaaacttgactatgcctggtcaccttcttggatctgctgtctaaatgatatatatatgatatatatgtgatatatatatatcatatatatgatatatatatatatatcacatatatatgatatatatatgatatatatatatcacatatatatgatatatatatcatatatatgatatatattttttttaatgcaggaaagtatactttgtaaggagcagatttttttgttctcagtggaaccctgtcaaatcgcataaaagaggaaaaaaacaaaactcattagaatgttttaaattgaatgttcgccttttacatatatttgctcttcagtatggatcccaatttgaatgttacatgttcggaaaaactttcagttgctcaagggcaataagaaaatttgaggccgggtgtggtggctcacgcctgtaatcccagcactttgggaggctcaggtgggcgaattgcttgagcccaggagttcgagaccagccggggcaacatggcaaaaccctgtctctactaaaaatacaaaaattagctgggtgtggtggtgcatgcctgtagtcccagctactcgggaggctgaggtgggaggatcccgtgagcctgggaggtggagtttgcagtgagctaagatcgtgccactgcactccggcctgggtgatggagcaagacctcgtctcagaaaattggaaactattgactaagagaagtttctaggtttgcactgaattgtcttttgtacatacagtgaattgttttgctgttctccccactccatattaatgcaggagccaggttggtctgttaggatgaacaaaggttgaggggagggcaggattcgtgcatctgggggccaaacacatgttccgtcttgattgccttaagagttactagcgaggtcagtgttaggcttgcaatagggattttaaaatacactaactagttccttagctaccttcacatacattctataggccttcttaaattagcactaacctccacttccttctctgccccattgcctcccaaatatgctatggagctatttttgttaccacgttataacgtgaatatttatacagtagcctcttcaggctttgtaattttcattccaaaaatgcccggtgtgatgctttacactctacaaagtatggtttaaaggcacaaggtcatggcctttgtcatagcagttgaatgtgcattgacatatttttctatgattttttaaaattacaatagaaaaataagctgttgtaacgtgtaaggtcatgacaatttttgtatttatatttgaaatcagatttctataactcgtatttgtgtacagaattctcaatggatttatatattgtgaaatttttatctgagattgggatgtggattatgcttaacagtgagagctgaaatgagaccatttactttgtttaaaatgctgtactgtgcaagtttggaaatgtaaattaatttactgtatataatatcttgagtttgtttatacctccaagtttttacactgaagataaactagctttaattcaaaactttttttttctttataagggaataagctgttgagctaaacctgtatacttgtgctttttattttctggatgcacaatgaaagtttatacttgtatctcactgcatcatatctgattgcagaaattaaagcacaatttacaagcaatactgtacttggt

SEQ ID NO: 19320 - DNA, 5187 bp, Homo sapiens
  source 1..5187: mol_type = unassigned DNA
ggggcgagcggtgtcagcggcggagccggatgcgggcggcatcgcggcggtcgcggccttggggatgggcggagccccagccgctagtgctggtggccgccgctgctgccccagctggagcccgagccgccgcctctgcgtccgcgcgtcgctgcttcccagggcggcggtatgctggggaaaggagtagtcggcggtggcggcggcaccaaggcccccaagccctccttcgtgtcgtacgtacgccctgaggaaattcacacaaacgaaaaggaagtaacagagaaggaagtaactcttcacttgttgccaggtgaacagctgctttgtgaagccagcacagtactgaagtatgtccaggaagattcctgtcagcatggggtctatgggaggcttgtctgcacagacttcaagattgccttcttgggtgatgatgaatctgcattggataatgatgaaactcaatttaagaataaggttataggagaaaatgacattacactccactgtgttgatcagatttatggagtgtttgatgagaaaaagaaaactctctttggacaactgaagaaataccctgagaagctcatcatccactgcaaagaccttcgagtgttccagttttgtctgaggtacacaaaggaagaggaagtcaaaaggattgtcagtggcataattcatcatacccaggctcctaaactgcttaaacgattatttctgttttcctatgcgactgctgcacaaaacaatacagtcactgatcccaagaaccataccgtaatgtttgacacacttaaggactggtgttgggaactggaacggaccaaaggcaacatgaagtacaaagcagtgagtgtcaacgaaggctataaagtctgtgagagattgccagcatactttgttgtccccacccctcttcctgaagagaatgtgcagcgctttcagggtcatggcataccaatatggtgttggtcctgccacaatggaagtgcccttttgaaaatgtcagcactgcccaaagaacaggatgacggcattttacaaatccaaaagagcttcttagatggaatttacaagaccatccacaggccaccctatgaaattgttaaaacggaagacctgtcaagcaacttcctgtccctgcaggaaatccagactgcatactctaaatttaaacagctatttctgatagataacagtactgaattttgggacacagatataaaatggttttctctgttggaaagtagcagctggcttgacataatcagacgttgcctgaaaaaagcaatagagattacagaatgtatggaagcacaaaacatgaatgttcttcttttagaggagaatgcatccgacctctgctgtctcatttcctctctggtgcaactgatgatggacccccactgcagaaccagaattggtttccagagcctcatccaaaaggagtgggtcatgggtggccactgtttcttggatcgctgcaaccatctccgccagaacgacaaagaggaggttcctgtgttcctgcttttcctagattgtgtctggcagctggtgcaccagcatcccccggcatttgaattcacagagacttacctgactgttttgtcagatagcctgtatatacctatttttagcaccttcttcttcaattcacctcatcaaaaagatactaacatgggtagagaaggccaggatacacaaagcaagcctttgaatctgctcaccgtgtgggattggtcggtgcagtttgaacccaaagcccagacattgctcaaaaaccctctttatgtggaaaagccaaaactggacaaaggccaacggaaaggaatgcgcttcaaacatcaacgacaactttctttgccacttacacaatctaagtcatctcccaaaagaggatttttcagggaagaaacagatcatttaattaaaaaccttctgggcaagagaattagcaaacttattaattcttctgatgagctccaagacaactttcgagagttctatgacagctggcatagcaagtccactgactaccatggtttgttgttaccgcatatcgaggggcccgaaatcaaagtctgggcccagcgctacctacgttggattccagaagcccaaatcctaggtggtggccaagtggccactctgagcaaactcttggaaatgatggaggaagtccagagtttacaagagaagatcgacgagagacaccacagccagcaggccccccaggctgaggccccctgcctgctgaggaactctgcccgcctctcgtctttgtttcctttcgctctgctccagcgacattcctctaagcccgtcttacccaccagtggctggaaagctttgggagatgaagacgatttggccaaacgagaagatgagttcgtggacctaggggatgtgtgacctgtttgttgagtgattgtgaaagaggaatgtgggagattgggacagctgatccctggatttgtgtcacgctacagctcatgctggctgggtccttagcccggcactccgttagaataaacctgggccttcgggaaaagaggtggctctcattatttttcatgattctaaaagactatgcaattaaaaccgcatctgtagtattactaattggaaggaattattacttgacccgtaatagggttgtggccgttttctgatgcctaagtattatacagagcccacaatggccagtttactaccagaaagggcttcagtaagatattcttggacttgatactttcttcagatcctctttgtgccaagataatttatccagtcattgggaatagtaagtttctgtgtaacccatctcaattatagaagcaagttcagctttatgtatttgtatggggagttgaagattcagatagaggtattaagatgtgtggcatttacttaaaccatcacatttttttctttctacgcccccttgcctgtaaaacacctgggaagttccactggtgtcatccatcctgatgcttcagaccaccctcccttcttcacagaccgtgtcactttgcctgtgggtgggggctagccagccaccaccctcttttctgtgctgccagccccaggtcttcctccgcctgctccacaccactcgccgctgtccctctgcactccctgccttggtgcgtgtagtcccagtgtctcactgccaaacctcttggttacgctgcggggatctgtttctttgcctgagatccttcctgaggagcgtccattcctctggagtctctccttgtttggaacaaatcgcttcgcctttttctacttgcctgctgaagctttggagcacttgtgattgcagttttctgccgcaacccctgagccgagttcctcacattcttttacctttatggactgatgggattgggtcacttttgaatgtggctttcataggaaagcagcttaaacataaatatcagaagtgatgattatcatatgatacctcagtgattttaaaagccatagaagaaacttgactatgcctggtcaccttcttggatctgctgtctaaatgatatatatatgatatatatgtgatatatatatatcatatatatgatatatatatatatatcacatatatatgatatatatatgatatatatatatcacatatatatgatatatatatcatatatatgatatatattttttttaatgcaggaaagtatactttgtaaggagcagatttttttgttctcagtggaaccctgtcaaatcgcataaaagaggaaaaaaacaaaactcattagaatgttttaaattgaatgttcgccttttacatatatttgctcttcagtatggatcccaatttgaatgttacatgttcggaaaaactttcagttgctcaagggcaataagaaaatttgaggccgggtgtggtggctcacgcctgtaatcccagcactttgggaggctcaggtgggcgaattgcttgagcccaggagttcgagaccagccggggcaacatggcaaaaccctgtctctactaaaaatacaaaaattagctgggtgtggtggtgcatgcctgtagtcccagctactcgggaggctgaggtgggaggatcccgtgagcctgggaggtggagtttgcagtgagctaagatcgtgccactgcactccggcctgggtgatggagcaagacctcgtctcagaaaattggaaactattgactaagagaagtttctaggtttgcactgaattgtcttttgtacatacagtgaattgttttgctgttctccccactccatattaatgcaggagccaggttggtctgttaggatgaacaaaggttgaggggagggcaggattcgtgcatctgggggccaaacacatgttccgtcttgattgccttaagagttactagcgaggtcagtgttaggcttgcaatagggattttaaaatacactaactagttccttagctaccttcacatacattctataggccttcttaaattagcactaacctccacttccttctctgccccattgcctcccaaatatgctatggagctatttttgttaccacgttataacgtgaatatttatacagtagcctcttcaggctttgtaattttcattccaaaaatgcccggtgtgatgctttacactctacaaagtatggtttaaaggcacaaggtcatggcctttgtcatagcagttgaatgtgcattgacatatttttctatgattttttaaaattacaatagaaaaataagctgttgtaacgtgtaaggtcatgacaatttttgtatttatatttgaaatcagatttctataactcgtatttgtgtacagaattctcaatggatttatatattgtgaaatttttatctgagattgggatgtggattatgcttaacagtgagagctgaaatgagaccatttactttgtttaaaatgctgtactgtgcaagtttggaaatgtaaattaatttactgtatataatatcttgagtttgtttatacctccaagtttttacactgaagataaactagctttaattcaaaactttttttttctttataagggaataagctgttgagctaaacctgtatacttgtgctttttattttctggatgcacaatgaaagtttatacttgtatctcactgcatcatatctgattgcagaaattaaagcacaatttacaagcaat

SEQ ID NO: 19321 - DNA, 2494 bp, Homo sapiens
  source 1..2494: mol_type = unassigned DNA
aagtggaagtggaagtagaaggcggtggctgaggcggttccggaggttctagtgtcggagttgggtgcaggcaggtgccatgggcccgcttgaggcacactgaggggacgcggggctgggccatggccggcgctcgggccgccgccgccgctgcctcggcggggtcctcggcctcttcaggcaaccagccgcctcaggagctggggcttggggagctgctggaggagttctcccggactcagtaccgggccaaggatggcagcgggaccggcggctctaaggttgagcgcattgagaagagatgtctggagctgtttggccgagactactgtttcagcgtgattccaaacacgaatggggatatctgtggccactatccccggcacatcgtgttcctggagtatgagagttctgagaaggagaaagacacgtttgagagtaccgtacaggtgagcaagttgcaagacctcatccaccgcagcaagatggcccggtgcagaggacggtttgtctgcccagtaatcctgttcaagggcaagcacatttgcaggtcggccacactggctggatggggagagctgtatggacgctcaggctacaactattttttctcagggggtgcagatgatgcctgggcagatgtggaggacgtcacggaggaggactgtgctcttcgaagtggtgacacgcatctttttgataaggtcagaggctatgacatcaagctgcttcgatacctgtcagtcaaatacatctgtgacctgatggtggagaacaagaaggtgaagtttggcatgaatgtaacctcctctgagaaggtggacaaagcccagcgctatgccgacttcactctcctctccatcccgtatccaggctgtgaatttttcaaggaatataaagatcgggattacatggcagaagggctcatatttaactggaagcaggactacgttgatgccccattgagcatccccgacttcctgactcactctctgaacattgactggagccagtatcagtgttgggatctggtgcaacaaacacaaaactacctgaagctgctgctttccttagttaacagtgatgatgacagcgggctgctggtacactgtatctcaggctgggatcggacccccctcttcatctccctcctgcgcctttccttgtgggctgatgggctcatccacacgtccctgaagcccactgagatcctctacctcactgtggcctatgactggttcctcttcgggcacatgttggtagatcggctcagcaaaggggaggagattttcttcttctgcttcaattttttgaagcatattacctccgaggagttctctgctctgaagacccagaggaggaagagtttgccagcccgggatggaggcttcaccctggaagacatctgcatgctgagacgaaaggaccgtggcagcaccaccagccttggcagcgacttctccctggtcatggagagttccccaggagccactgggagcttcacctatgaggccgtggagctggtcccagcaggagcgccaactcaggcagcttggaggaagagccactcatcctctccacagagtgtcctctggaaccggccacaaccctcagaggaccgcttgccttcccagcaggggctggcggaagccaggtcttccagctcctcttcctcaaaccattctgataactttttcaggatgggtagcagtcccctggaggtccccaaacccagatcagtggaccatcccctgcccggatcctctctctccacagactatggcagctggcagatggtaacgggctgtggcagtattcaggagcgggctgtcctgcacacagactcctctctccctttcagcttcccggatgagctccctaacagttgtctgcttgcagccctgagtgatcgagagactcggctgcaggaggtgcgctcagccttcttggctgcgtacagcagcacagtggggcttcgggcagtagcccccagtccttccggtgccatcgggggcctgctggagcaatttgcccgtggtgttggactccggagcatcagcagcaatgccttgtgaagaagccagcccatgacattttcctgctcctctctcagctgagcccttagcagagaatcaaagccatgcctggccgaaggggtacttccaggtcaggggaaatttcagtcccccatctccatcatgaacatggcagccccaaagctgagcaaggccaaagacagggttttccaacccccagcctcttgactggtgaccaccaccccttcttgtcactgtctcccacccaccccatctttgctgggattcccatcaactctcagaactgtgtggggtttccctggggccttgtggaagccatgacttcacaaagaccctacctgtcagttcttgtttctggggaggagggatcacctgcactgagaatgaggcagtttgacacagatcacaaaataaaatcaaagtctttttgaatagcc

SEQ ID NO: 19322 - DNA, 2105 bp, Homo sapiens
  source 1..2105: mol_type = unassigned DNA
agtgtcggagttgggtgcaggcaggtgccatgggcccgcttgaggcacactgaggggacgcggggctgggccatggccggcgctcgggccgccgccgccgctgcctcggcggggtcctcggcctcttcaggcaaccagccgcctcaggagctggggcttggggagctgctggaggagttctcccggactcagtaccgggccaaggatggcagcgggaccggcggctctaaggttgagcgcattgagaagagatgtctggagctgtttggccgagactactgtttcagcgtgattccaaacacgaatggggatatctgtggccactatccccggcacatcgtgttcctggagtatgagagttctgagaaggagaaagacacgtttgagagtaccgtacaggtgagcaagttgcaagacctcatccaccgcagcaagatggcccggtgcagaggacggtttgtctgcccagtaatcctgttcaagggcaagcacatttgcaggtcggccacactggctggatggggagagctgtatggacgctcaggctacaactattttttctcagggggtgcagatgatgcctgggcagatgtggaggacgtcacggaggaggactgtgctcttcgaagtggtgacacgcatctttttgataaggtcagaggctatgacatcaagctgcttcgatacctgtcagtcaaatacatctgtgacctgatggtggagaacaagaaggtgaagtttggcatgaatgtaacctcctctgagaaggtggacaaagcccagcgctatgccgacttcactctcctctccatcccgtatccaggctgtgaatttttcaaggaatataaagatcgggattacatggcagaagggctcatatttaactggaagcaggactacgttgatgccccattgagcatccccgacttcctgactcactctctgaacattgactggagccagtatcagtgttgggatctggtgcaacaaacacaaaactacctgaagctgctgctttccttagttaacagtgatgatgacagcgggctgctggtacactgtatctcaggctgggatcggacccccctcttcatctccctcctgcgcctttccttgtgggctgatgggctcatccacacgtccctgaagcccactgagatcctctacctcactgtggcctatgactggttcctcttcgggcacatgttggtagatcggctcagcaaaggggaggagattttcttcttctgcttcaattttttgaagcatattacctccgaggagttctctgctctgaagacccagaggaggaagagtttgccagcccgggatggaggcttcaccctggaagacatctgcatgctgagacgaaaggaccgtggcagcaccaccagccttggcagcgacttctccctggtcatggagagttccccaggagccactgggagcttcacctatgaggccgtggagctggtcccagcaggagcgccaactcaggcagcttggcttgcagccctgagtgatcgagagactcggctgcaggaggtgcgctcagccttcttggctgcgtacagcagcacagtggggcttcgggcagtagcccccagtccttccggtgccatcgggggcctgctggagcaatttgcccgtggtgttggactccggagcatcagcagcaatgccttgtgaagaagccagcccatgacattttcctgctcctctctcagctgagcccttagcagagaatcaaagccatgcctggccgaaggggtacttccaggtcaggggaaatttcagtcccccatctccatcatgaacatggcagccccaaagctgagcaaggccaaagacagggttttccaacccccagcctcttgactggtgaccaccaccccttcttgtcactgtctcccacccaccccatctttgctgggattcccatcaactctcagaactgtgtggggtttccctggggccttgtggaagccatgacttcacaaagaccctacctgtcagttcttgtttctggggaggagggatcacctgcactgagaatgaggcagtttgacacagatcacaaaataaaatcaaagtctttttgaata

SEQ ID NO: 19323 - DNA, 2368 bp, Homo sapiens
  source 1..2368: mol_type = unassigned DNA
aaacatccggcgggacggggcggggccggaagtggaagtggaagtagaaggcggtggctgaggcggttccggaggttctagtgtcggagttgggtgcaggcaggtgccatgggcccgcttgaggcacactgaggggacgcggggctgggccatggccggcgctcgggccgccgccgccgctgcctcggcggggtcctcggcctcttcaggcaaccagccgcctcaggagctggggcttggggagctgctggaggagttctcccggactcagtaccgggccaaggatggcagcgggaccggcggctctaaggttgagcgcattgagaagagatgtctggagctgtttggccgagactactgtttcagcgtgattccaaacacgaatggggatatctgtggccactatccccggcacatcgtgttcctggagtatgagagttctgagaaggagaaagacacgtttgagagtaccgtacaggtgagcaagttgcaagacctcatccaccgcagcaagatggcccggtgcagaggacggtttgtctgcccagtaatcctgttcaagggcaagcacatttgcaggtcggccacactggctggatggggagagctgtatggacgctcaggctacaactattttttctcagggggtgcagatgatgcctgggcagatgtggaggacgtcacggaggaggactgtgctcttcgaagtggtgacacgcatctttttgataaggtcagaggctatgacatcaagctgcttcgatacctgtcagtcaaatacatctgtgacctgatggtggagaacaagaaggtgaagtttggcatgaatgtaacctcctctgagaaggtggacaaagcccagcgctatgccgacttcactctcctctccatcccgtatccaggctgtgaatttttcaaggaatataaagatcgggattacatggcagaagggctcatatttaactggaagcaggactacgttgatgccccattgagcatccccgacttcctgactcactctctgaacattgactggagccagtatcagtgttgggatctggtgcaacaaacacaaaactacctgaagctgctgctttccttagttaacagtgatgatgacagcgggctgctggtacactgtatctcaggctgggatcggacccccctcttcatctccctcctgcgcctttccttgtgggctgatgggctcatccacacgtccctgaagcccactgagatcctctacctcactgtggcctatgactggttcctcttcgggcacatgttggtagatcggctcagcaaaggggaggagattttcttcttctgcttcaattttttgaagcatattacctccgaggagttctctgctctgaagacccagaggaggaagagtttgccagcccgggatggaggcttcaccctggaagacatctgcatgctgagacgaaaggaccgtggcagcaccaccagccttggcagcgacttctccctggtcatggagagttccccaggagccactgggagcttcacctatgaggccgtggagctggtcccagcaggagcgccaactcaggcagcttggaggaagagccactcatcctctccacagagtgtcctctggaaccggccacaaccctcagaggaccgcttgccttcccagcaggggctggcggaagccaggtcttccagctcctcttcctcaaaccattctgataactttttcaggatgggtagcagtcccctggaggtccccaaacccaggcttgcagccctgagtgatcgagagactcggctgcaggaggtgcgctcagccttcttggctgcgtacagcagcacagtggggcttcgggcagtagcccccagtccttccggtgccatcgggggcctgctggagcaatttgcccgtggtgttggactccggagcatcagcagcaatgccttgtgaagaagccagcccatgacattttcctgctcctctctcagctgagcccttagcagagaatcaaagccatgcctggccgaaggggtacttccaggtcaggggaaatttcagtcccccatctccatcatgaacatggcagccccaaagctgagcaaggccaaagacagggttttccaacccccagcctcttgactggtgaccaccaccccttcttgtcactgtctcccacccaccccatctttgctgggattcccatcaactctcagaactgtgtggggtttccctggggccttgtggaagccatgacttcacaaagaccctacctgtcagttcttgtttctggggaggagggatcacctgcactgagaatgaggcagtttgacacagatcacaaaataaaatcaaagtctttttgaatagcca

SEQ ID NO: 19324 - DNA, 2433 bp, Homo sapiens
  source 1..2433: mol_type = unassigned DNA
gttgggtgcaggcaggtgccatgggcccgcttgaggcacactgaggggacgcggggctgggccatggccggcgctcgggccgccgccgccgctgcctcggcggggtcctcggcctcttcaggcaaccagccgcctcaggagctggggcttggggagctgctggaggagttctcccggactcagtaccgggccaaggatggcagcgggaccggcggctctaaggttgagcgcattgagaagagatgtctggagctgtttggccgagactactgtttcagcgtgattccaaacacgaatggggatatctgtggccactatccccggcacatcgtgttcctggagtatgagagttctgagaaggagaaagacacgtttgagagtaccgtacaggtgagcaagttgcaagacctcatccaccgcagcaagatggcccggtgcagaggacggtttgtctgcccagtaatcctgttcaagggcaagcacatttgcaggtcggccacactggctggatggggagagctgtatggacgctcaggctacaactattttttctcagggggtgcagatgatgcctgggcagatgtggaggacgtcacggaggaggactgtgctcttcgaagtggtgacacgcatctttttgataaggtcagaggctatgacatcaagctgcttcgatacctgtcagtcaaatacatctgtgacctgatggtggagaacaagaaggtgaagtttggcatgaatgtaacctcctctgagaaggtggacaaagcccagcgctatgccgacttcactctcctctccatcccgtatccaggctgtgaatttttcaaggaatataaagatcgggattacatggcagaagggctcatatttaactggaagcaggactacgttgatgccccattgagcatccccgacttcctgactcactctctgaacattgactggagccagtatcagtgttgggatctggtgcaacaaacacaaaactacctgaagctgctgctttccttagttaacagtgatgatgacagcgggctgctggtacactgtatctcaggctgggatcggacccccctcttcatctccctcctgcgcctttccttgtgggctgatgggctcatccacacgtccctgaagcccactgagatcctctacctcactgtggcctatgactggttcctcttcgggcacatgttggtagatcggctcagcaaaggggaggagattttcttcttctgcttcaattttttgaagcatattacctccgaggagttctctgctctgaagacccagaggaggaagagtttgccagcccgggatggaggcttcaccctggaagacatctgcatgctgagacgaaaggaccgtggcagcaccaccagccttggcagcgacttctccctggtcatggagagttccccaggagccactgggagcttcacctatgagcgtggagctggtcccagcaggagcgccaactcaggcagcttggaggaagagccactcatcctctccacagagtgtcctctggaaccggccacaaccctcagaggaccgcttgccttcccagcaggggctggcggaagccaggtcttccagctcctcttcctcaaaccattctgataactttttcaggatgggtagcagtcccctggaggtccccaaacccagatcagtggaccatcccctgcccggatcctctctctccacagactatggcagctggcagatggtaacgggctgtggcagtattcaggagcgggctgtcctgcacacagactcctctctccctttcagcttcccggatgagctccctaacagttgtctgcttgcagccctgagtgatcgagagactcggctgcaggaggtgcgctcagccttcttggctgcgtacagcagcacagtggggcttcgggcagtagcccccagtccttccggtgccatcgggggcctgctggagcaatttgcccgtggtgttggactccggagcatcagcagcaatgccttgtgaagaagccagcccatgacattttcctgctcctctctcagctgagcccttagcagagaatcaaagccatgcctggccgaaggggtacttccaggtcaggggaaatttcagtcccccatctccatcatgaacatggcagccccaaagctgagcaaggccaaagacagggttttccaacccccagcctcttgactggtgaccaccaccccttcttgtcactgtctcccacccaccccatctttgctgggattcccatcaactctcagaactgtgtggggtttccctggggccttgtggaagccatgacttcacaaagaccctacctgtcagttcttgtttctggggaggagggatcacctgcactgagaatgaggcagtttgacacagatcacaaaataaaatcaaagtctttttgaatagcc

SEQ ID NO: 19325 - DNA, 4681 bp, Homo sapiens
  source 1..4681: mol_type = unassigned DNA
ctccttccataagggtctggtccttcatccctcccgcttcaccagaccccctcaccctgggagccgccacctccctttccccaagaccagatgtcgcgcggccggacacagccagcacggagagtcgatgccggcgtctgagctgcgcagtggggtcttcccgctgcccagcagcctacaggcgcggtgcactctgggggaacatggccgcttccggtctccctcccgggccggcgctggcctgactgcggccccggtccgtagcactccgccctccgcttctcccgccctgtagccgcgaagactgcttcagcctttccctgtgctgcccctgccgcgcgatggagaagagctcgagctgcgagagtcttggctcccagccggcggcggctcggccgcccagcgtggactccttgtccagtgcctccacttctcattcagagaattcagtgcatacaaaatcagcttctgttgtatcatcagattccatttcaacttctgccgacaacttttctcctgatttgagggtcctgagggagtctaacaagttagcagaaatggaagaaccacccttgcttccaggagaaaatattaaagacatggccaaagatgtaacttatatatgtccattcactggcgctgtacgaggaactctgactgtcacgaattataggttatatttcaaaagcatggaacgggatcccccatttgttttagatgcttcccttggtgtgataaatagagtagaaaaaattggtggtgcttctagtcgaggtgaaaattcttatggactagaaactgtgtgtaaggatattaggaatttacgatttgctcataaacctgaggggcggacaagaagatccatatttgagaatctaatgaaatatgcatttcctgtctctaataacctgcctctttttgcttttgaatacaaagaagtattccctgaaaatgggtggaagctatatgaccctcttttagagtatagaaggcagggaattccaaatgaaagctggagaataacaaagataaatgaacgatatgaactttgtgatacataccctgccctcctggttgtgccagcaaatattcctgatgaagaattaaagagagtggcatccttcagatcaagaggccgtatcccagttttatcatggattcatcctgaaagtcaagccacaatcactcggtgtagccagcccatggttggagtgagtggaaagcgaagcaaagaagatgaaaaataccttcaagctatcatggattccaatgcccagtctcacaaaatctttatatttgatgcccggccaagtgttaatgctgttgccaacaaggcaaagggtggaggttatgaaagtgaagatgcctatcaaaatgctgaactagttttcctggatatccacaatattcatgttatgagagaatcattacgaaaacttaaggagattgtgtaccccaacattgaggaaacccactggttgtctaacttggaatctactcattggctagaacatattaagcttattcttgcaggggctcttaggattgctgacaaggtagagtcagggaagacgtctgtggtagtgcattgcagtgatggttgggatcgcacagctcagctcacttcccttgccatgctcatgttggatggatactatcgaaccatccgaggatttgaagtccttgtggagaaagaatggctaagttttggacatcgatttcaactaagagttggccatggagataagaaccatgcagatgcagacagatcgcctgtttttcttcaatttattgactgtgtctggcagatgacaagacagtttcctaccgcatttgaattcaatgagtattttctcattaccattttggaccacctatacagctgcttattcggaacattcctctgtaatagtgaacaacagagaggaaaagagaatcttcctaaaaggactgtgtcactgtggtcttacataaacagccagctggaagacttcactaatcctctctatgggagctattccaatcatgtcctttatccagtagccagcatgcgccacctagagctctgggtgggatattacataaggtggaatccacggatgaaaccacaggaacctattcacaacagatacaaagaacttcttgctaaacgagcagagcttcagaaaaaagtagaggaactacagagagagatttctaaccgatcaacctcatcctcagagagagccagctctcctgcacagtgtgtcactcctgtccaaactgttgtataaaggactgtaagatcaggggcatcattgctatacactcttgattacactggcagctctatgagtagaaagtcttcggaatttagaacccatctatgagagaaagttcagtcactttatttattttaaatctctctaggatgagtttagaactgtagcagtgcaggtggcttaagtgaagtaactccatatgtaattacatgattatgatactaatcttttaagtatccaaagaatattaaaatacttcaatcctggattcacagtgggaacaagtttctattaaaaggcaaatgctgttacaaatttttggcatctggtaatattaaaaccattttagaaatacactctgtgctcactgtgcagaggaacatcagttttcaaaccaacactgaaattctgtggcatcacatatattgggccttgatgtcatgacagatcaaaatcatttgatatccctttctccattctaggtttttctttttttcagtaactgatttaccttgatcacttttcaacttccatattcttcatatagtaaaaggcaaagtgttgaagatactacggtgtggtagtagttgaaaattattgccgtcattatttacatacttaagacatattagcaagttgatccaaaatgggaggccttatagatgtgcttgggggaaaatgaaggggagaaagtagccatacaggagttcaaagaattccatgcccttcagattagcccaattaccagaaacatcatgaaagatattttaaaaactaattatttactacagtgtatttcacttgtcttgtgtgtctgaacacacagaagctaattagcaagtttttaagaagtatttaaaaatcttactaggattgacattttttctgaattctgtataaatagcttatagtgagaagtactgtgctcaaattttacatttttttcctttgcaaattctgtaatttcactcaacgattaagtctaccaaagaacacactgcatgtaaaagatgtattacaatctcaaagccagtaaaagaaatcttgcttcactgttcacctgctacaagtaagagtttggtgctggtagaaacatttgactctgatgtctattttattctacataagagccatatgtaatgtactgtaacaaaggagcttcttgtccccttggtcttttaattaaaagaaattccaactgacttttaaactttgttcttgtccaaagttgccatttcttttttttccccagaaatatttggaaattattggaggaatatgcaccccagatgaaaatgttcagtttgtacccatttttccttaaccaacacccaaatcaaacaattaaaatatacagtgtttttccactcactaattcactatacagagagtctgaaccttagcctccctcttggtcttgcagtgaggaagtttctattagtatatccaatttagcaaaattggtaccaaaatgatttctttggtaattgtgtgaaatataagctttttaacagggcatttaagtggctagcaaatcagtaattaaaaattaagctttctactccaagtatttcacaaacgcatctgccattttcctcatttaaaccttggttatcttggcctgataccacataaaagaatgtagaatggctgaagagatcaagaatttaaagcttctagtcttaacatacttgcatccacttcaaattcaaatcaaaagccagggaaatctaagtgcaaccctaccacttctctgctgagaaccttccagtggttcccctcaccttctgcagaagtctccaatatggagtacatgcacttgggcatttaatatataccactggtgtgtgtgggagggagggaggaggaatactagccctttttatatatttacacaagcaaaacttttaaatatttgaattgacagttacatgtttcataactttgtatgtctattggttgtgcaggtgtaattttttccctttttgattagggttacaaaatttagagaccagtatgattaagttgaagctccttagcctccttcgacctagtctctgcatacctcaacttttacgtaccaatgctactctgctgttcacaattgcctcatgtaatctgcagattcctgcctccccactttggttcagtctgtcttgtgcacctggaacaactgttctcccttgtgactaattcctattttctagagtttaggcatcatctcttcctttgggaagttatctgattcacgactgccttctctgacatccccaccttcctctgtgcccccatagcactgtgtataccgctactaccactgcaattcacattatattggaatgaacaattcacatgtctaccacaagtctgtaaacataaccttatttgaaatgaattgcaataaagctctgttacaacgt

SEQ ID NO: 19326 - DNA, 3350 bp, Homo sapiens
  source 1..3350: mol_type = unassigned DNA
gggggaacatggccgcttccggtctccctcccgggccggcgctggcctgactgcggccccggtccgtagcactccgccctccgcttctcccgccctgtagccgcgaagactgcttcagcctttccctgtgctgcccctgccgcgcgatggagaagagctcgagctgcgagagtcttggctcccagccggcggcggctcggccgcccagcgtggactccttgtccagttaatgtgttaagagccattgacatttgaagatcatcagaagtgaagataaaacatctcaaaaattataattgcctccacttctcattcagagaattcagtgcatacaaaatcagcttctgttgtatcatcagattccatttcaacttctgccgacaacttttctcctgatttgagggtcctgagggagtctaacaagttagcagaaatggaagaaccacccttgcttccaggagaaaatattaaagacatggccaaagatgtaacttatatatgtccattcactggcgctgtacgaggaactctgactgtcacgaattataggttatatttcaaaagcatggaacgggatcccccatttgttttagatgcttcccttggtgtgataaatagagtagaaaaaattggtggtgcttctagtcgaggtgaaaattcttatggactagaaactgtgtgtaaggatattaggaatttacgatttgctcataaacctgaggggcggacaagaagatccatatttgagaatctaatgaaatatgcatttcctgtctctaataacctgcctctttttgcttttgaatacaaagaagtattccctgaaaatgggtggaagctatatgaccctcttttagagtatagaaggcagggaattccaaatgaaagctggagaataacaaagataaatgaacgatatgaactttgtgatacataccctgccctcctggttgtgccagcaaatattcctgatgaagaattaaagagagtggcatccttcagatcaagaggccgtatcccagttttatcatggattcatcctgaaagtcaagccacaatcactcggtgtagccagcccatggttggagtgagtggaaagcgaagcaaagaagatgaaaaataccttcaagctatcatggattccaatgcccagtctcacaaaatctttatatttgatgcccggccaagtgttaatgctgttgccaacaaggcaaagggtggaggttatgaaagtgaagatgcctatcaaaatgctgaactagttttcctggatatccacaatattcatgttatgagagaatcattacgaaaacttaaggagattgtgtaccccaacattgaggaaacccactggttgtctaacttggaatctactcattggctagaacatattaagcttattcttgcaggggctcttaggattgctgacaaggtagagtcagggaagacgtctgtggtagtgcattgcagtgatggttgggatcgcacagctcagctcacttcccttgccatgctcatgttggatggatactatcgaaccatccgaggatttgaagtccttgtggagaaagaatggctaagttttggacatcgatttcaactaagagttggccatggagataagaaccatgcagatgcagacagatcgcctgtttttcttcaatttattgactgtgtctggcagatgacaagacagtttcctaccgcatttgaattcaatgagtattttctcattaccattttggaccacctatacagctgcttattcggaacattcctctgtaatagtgaacaacagagaggaaaagagaatcttcctaaaaggactgtgtcactgtggtcttacataaacagccagctggaagacttcactaatcctctctatgggagctattccaatcatgtcctttatccagtagccagcatgcgccacctagagctctgggtgggatattacataaggtggaatccacggatgaaaccacaggaacctattcacaacagatacaaagaacttcttgctaaacgagcagagcttcagaaaaaagtagaggaactacagagagagatttctaaccgatcaacctcatcctcagagagagccagctctcctgcacagtgtgtcactcctgtccaaactgttgtataaaggactgtaagatcaggggcatcattgctatacactcttgattacactggcagctctatgagtagaaagtcttcggaatttagaacccatctatgagagaaagttcagtcactttatttattttaaatctctctaggatgagtttagaactgtagcagtgcaggtggcttaagtgaagtaactccatatgtaattacatgattatgatactaatcttttaagtatccaaagaatattaaaatacttcaatcctggattcacagtgggaacaagtttctattaaaaggcaaatgctgttacaaatttttggcatctggtaatattaaaaccattttagaaatacactctgtgctcactgtgcagaggaacatcagttttcaaaccaacactgaaattctgtggcatcacatatattgggccttgatgtcatgacagatcaaaatcatttgatatccctttctccattctaggtttttctttttttcagtaactgatttaccttgatcacttttcaacttccatattcttcatatagtaaaaggcaaagtgttgaagatactacggtgtggtagtagttgaaaattattgccgtcattatttacatacttaagacatattagcaagttgatccaaaatgggaggccttatagatgtgcttgggggaaaatgaaggggagaaagtagccatacaggagttcaaagaattccatgcccttcagattagcccaattaccagaaacatcatgaaagatattttaaaaactaattatttactacagtgtatttcacttgtcttgtgtgtctgaacacacagaagctaattagcaagtttttaagaagtatttaaaaatcttactaggattgacattttttctgaattctgtataaatagcttatagtgagaagtactgtgctcaaattttacatttttttcctttgcaaattctgtaatttcactcaacgattaagtctaccaaagaacacactgcatgtaaaagatgtattacaatctcaaagccagtaaaagaaatcttgcttcactgttcacctgctacaagtaagagtttggtgctggtagaaacatttgactctgatgtctattttattctacataagagccatatgtaatgtactgtaacaaaggagcttcttgtccccttggtcttttaattaaaagaaattccaactgacttttaaactt

SEQ ID NO: 19327 - DNA, 4787 bp, Homo sapiens
  source 1..4787: mol_type = unassigned DNA
agatgtcgcgcggccggacacagccagcacggagagtcgatgccggcgtctgagctgcgcagtggggtcttcccgctgcccagcagcctacaggcgcggtgcactctgggggaacatggccgcttccggtctccctcccgggccggcgctggcctgactgcggccccggtccgtagcactccgccctccgcttctcccgccctgtagccgcgaagactgcttcagcctttccctgtgctgcccctgccgcgcgatggagaagagctcgagctgcgagagtcttggctcccagccggcggcggctcggccgcccagcgtggactccttgtccagttaatgtgttaagagccattgacatttgaagatcatcagaagtgaagataaaacatctcaaaaattataattgcctccacttctcattcagagaattcagtgcatacaaaatcagcttctgttgtatcatcagattccatttcaacttctgccgacaacttttctcctgatttgaggagggagtctcgctctatcccctaggctggagtgcattggcgccatctcggctcatttgcaacctctgtctcccgggttcaagcgattctcctgcctcagcttcccgaggagctgggattacaggtcctgagggagtctaacaagttagcagaaatggaagaaccacccttgcttccaggagaaaatattaaagacatggccaaagatgtaacttatatatgtccattcactggcgctgtacgaggaactctgactgtcacgaattataggttatatttcaaaagcatggaacgggatcccccatttgttttagatgcttcccttggtgtgataaatagagtagaaaaaattggtggtgcttctagtcgaggtgaaaattcttatggactagaaactgtgtgtaaggatattaggaatttacgatttgctcataaacctgaggggcggacaagaagatccatatttgagaatctaatgaaatatgcatttcctgtctctaataacctgcctctttttgcttttgaatacaaagaagtattccctgaaaatgggtggaagctatatgaccctcttttagagtatagaaggcagggaattccaaatgaaagctggagaataacaaagataaatgaacgatatgaactttgtgatacataccctgccctcctggttgtgccagcaaatattcctgatgaagaattaaagagagtggcatccttcagatcaagaggccgtatcccagttttatcatggattcatcctgaaagtcaagccacaatcactcggtgtagccagcccatggttggagtgagtggaaagcgaagcaaagaagatgaaaaataccttcaagctatcatggattccaatgcccagtctcacaaaatctttatatttgatgcccggccaagtgttaatgctgttgccaacaaggcaaagggtggaggttatgaaagtgaagatgcctatcaaaatgctgaactagttttcctggatatccacaatattcatgttatgagagaatcattacgaaaacttaaggagattgtgtaccccaacattgaggaaacccactggttgtctaacttggaatctactcattggctagaacatattaagcttattcttgcaggggctcttaggattgctgacaaggtagagtcagggaagacgtctgtggtagtgcattgcagtgatggttgggatcgcacagctcagctcacttcccttgccatgctcatgttggatggatactatcgaaccatccgaggatttgaagtccttgtggagaaagaatggctaagttttggacatcgatttcaactaagagttggccatggagataagaaccatgcagatgcagacagatcgcctgtttttcttcaatttattgactgtgtctggcagatgacaagacagtttcctaccgcatttgaattcaatgagtattttctcattaccattttggaccacctatacagctgcttattcggaacattcctctgtaatagtgaacaacagagaggaaaagagaatcttcctaaaaggactgtgtcactgtggtcttacataaacagccagctggaagacttcactaatcctctctatgggagctattccaatcatgtcctttatccagtagccagcatgcgccacctagagctctgggtgggatattacataaggtggaatccacggatgaaaccacaggaacctattcacaacagatacaaagaacttcttgctaaacgagcagagcttcagaaaaaagtagaggaactacagagagagatttctaaccgatcaacctcatcctcagagagagccagctctcctgcacagtgtgtcactcctgtccaaactgttgtataaaggactgtaagatcaggggcatcattgctatacactcttgattacactggcagctctatgagtagaaagtcttcggaatttagaacccatctatgagagaaagttcagtcactttatttattttaaatctctctaggatgagtttagaactgtagcagtgcaggtggcttaagtgaagtaactccatatgtaattacatgattatgatactaatcttttaagtatccaaagaatattaaaatacttcaatcctggattcacagtgggaacaagtttctattaaaaggcaaatgctgttacaaatttttggcatctggtaatattaaaaccattttagaaatacactctgtgctcactgtgcagaggaacatcagttttcaaaccaacactgaaattctgtggcatcacatatattgggccttgatgtcatgacagatcaaaatcatttgatatccctttctccattctaggtttttctttttttcagtaactgatttaccttgatcacttttcaacttccatattcttcatatagtaaaaggcaaagtgttgaagatactacggtgtggtagtagttgaaaattattgccgtcattatttacatacttaagacatattagcaagttgatccaaaatgggaggccttatagatgtgcttgggggaaaatgaaggggagaaagtagccatacaggagttcaaagaattccatgcccttcagattagcccaattaccagaaacatcatgaaagatattttaaaaactaattatttactacagtgtatttcacttgtcttgtgtgtctgaacacacagaagctaattagcaagtttttaagaagtatttaaaaatcttactaggattgacattttttctgaattctgtataaatagcttatagtgagaagtactgtgctcaaattttacatttttttcctttgcaaattctgtaatttcactcaacgattaagtctaccaaagaacacactgcatgtaaaagatgtattacaatctcaaagccagtaaaagaaatcttgcttcactgttcacctgctacaagtaagagtttggtgctggtagaaacatttgactctgatgtctattttattctacataagagccatatgtaatgtactgtaacaaaggagcttcttgtccccttggtcttttaattaaaagaaattccaactgacttttaaactttgttcttgtccaaagttgccatttcttttttttccccagaaatatttggaaattattggaggaatatgcaccccagatgaaaatgttcagtttgtacccatttttccttaaccaacacccaaatcaaacaattaaaatatacagtgtttttccactcactaattcactatacagagagtctgaaccttagcctccctcttggtcttgcagtgaggaagtttctattagtatatccaatttagcaaaattggtaccaaaatgatttctttggtaattgtgtgaaatataagctttttaacagggcatttaagtggctagcaaatcagtaattaaaaattaagctttctactccaagtatttcacaaacgcatctgccattttcctcatttaaaccttggttatcttggcctgataccacataaaagaatgtagaatggctgaagagatcaagaatttaaagcttctagtcttaacatacttgcatccacttcaaattcaaatcaaaagccagggaaatctaagtgcaaccctaccacttctctgctgagaaccttccagtggttcccctcaccttctgcagaagtctccaatatggagtacatgcacttgggcatttaatatataccactggtgtgtgtgggagggagggaggaggaatactagccctttttatatatttacacaagcaaaacttttaaatatttgaattgacagttacatgtttcataactttgtatgtctattggttgtgcaggtgtaattttttccctttttgattagggttacaaaatttagagaccagtatgattaagttgaagctccttagcctccttcgacctagtctctgcatacctcaacttttacgtaccaatgctactctgctgttcacaattgcctcatgtaatctgcagattcctgcctccccactttggttcagtctgtcttgtgcacctggaacaactgttctcccttgtgactaattcctattttctagagtttaggcatcatctcttcctttgggaagttatctgattcacgactgccttctctgacatccccaccttcctctgtgcccccatagcactgtgtataccgctactaccactgcaattcacattatattggaatgaacaattcacatgtctaccacaagtctgtaaacataaccttatttgaaatgaattgcaataaagctctgttacaacgt

SEQ ID NO: 19328 - DNA, 3420 bp, Homo sapiens
  source 1..3420: mol_type = unassigned DNA
gaacatggccgcttccggtctccctcccgggccggcgctggcctgactgcggccccggtccgtagcactccgccctccgcttctcccgccctgtagccgcgaagactgcttcagcctttccctgtgctgcccctgccgcgcgatggagaagagctcgagctgcgagagtcttggctcccagccggcggcggctcggccgcccagcgtggactccttgtccagttaatgtgttaagagccattgacatttgaagatcatcagaagtgaagataaaacatctcaaaaattataattgcctccacttctcattcagagaattcagtgcatacaaaatcagcttctgttgtatcatcagattccatttcaacttctgccgacaacttttctcctgatttgaggcccatgcagtccagttcgggagctaagtcacttaaacactgtgtgatagttcctacacatctcattatagtttgtcctgagggagtctaacaagttagcagaaatggaagaaccacccttgcttccaggagaaaatattaaagacatggccaaagatgtaacttatatatgtccattcactggcgctgtacgaggaactctgactgtcacgaattataggttatatttcaaaagcatggaacgggatcccccatttgttttagatgcttcccttggtgtgataaatagagtagaaaaaattggtggtgcttctagtcgaggtgaaaattcttatggactagaaactgtgtgtaaggatattaggaatttacgatttgctcataaacctgaggggcggacaagaagatccatatttgagaatctaatgaaatatgcatttcctgtctctaataacctgcctctttttgcttttgaatacaaagaagtattccctgaaaatgggtggaagctatatgaccctcttttagagtatagaaggcagggaattccaaatgaaagctggagaataacaaagataaatgaacgatatgaactttgtgatacataccctgccctcctggttgtgccagcaaatattcctgatgaagaattaaagagagtggcatccttcagatcaagaggccgtatcccagttttatcatggattcatcctgaaagtcaagccacaatcactcggtgtagccagcccatggttggagtgagtggaaagcgaagcaaagaagatgaaaaataccttcaagctatcatggattccaatgcccagtctcacaaaatctttatatttgatgcccggccaagtgttaatgctgttgccaacaaggcaaagggtggaggttatgaaagtgaagatgcctatcaaaatgctgaactagttttcctggatatccacaatattcatgttatgagagaatcattacgaaaacttaaggagattgtgtaccccaacattgaggaaacccactggttgtctaacttggaatctactcattggctagaacatattaagcttattcttgcaggggctcttaggattgctgacaaggtagagtcagggaagacgtctgtggtagtgcattgcagtgatggttgggatcgcacagctcagctcacttcccttgccatgctcatgttggatggatactatcgaaccatccgaggatttgaagtccttgtggagaaagaatggctaagttttggacatcgatttcaactaagagttggccatggagataagaaccatgcagatgcagacagatcgcctgtttttcttcaatttattgactgtgtctggcagatgacaagacagtttcctaccgcatttgaattcaatgagtattttctcattaccattttggaccacctatacagctgcttattcggaacattcctctgtaatagtgaacaacagagaggaaaagagaatcttcctaaaaggactgtgtcactgtggtcttacataaacagccagctggaagacttcactaatcctctctatgggagctattccaatcatgtcctttatccagtagccagcatgcgccacctagagctctgggtgggatattacataaggtggaatccacggatgaaaccacaggaacctattcacaacagatacaaagaacttcttgctaaacgagcagagcttcagaaaaaagtagaggaactacagagagagatttctaaccgatcaacctcatcctcagagagagccagctctcctgcacagtgtgtcactcctgtccaaactgttgtataaaggactgtaagatcaggggcatcattgctatacactcttgattacactggcagctctatgagtagaaagtcttcggaatttagaacccatctatgagagaaagttcagtcactttatttattttaaatctctctaggatgagtttagaactgtagcagtgcaggtggcttaagtgaagtaactccatatgtaattacatgattatgatactaatcttttaagtatccaaagaatattaaaatacttcaatcctggattcacagtgggaacaagtttctattaaaaggcaaatgctgttacaaatttttggcatctggtaatattaaaaccattttagaaatacactctgtgctcactgtgcagaggaacatcagttttcaaaccaacactgaaattctgtggcatcacatatattgggccttgatgtcatgacagatcaaaatcatttgatatccctttctccattctaggtttttctttttttcagtaactgatttaccttgatcacttttcaacttccatattcttcatatagtaaaaggcaaagtgttgaagatactacggtgtggtagtagttgaaaattattgccgtcattatttacatacttaagacatattagcaagttgatccaaaatgggaggccttatagatgtgcttgggggaaaatgaaggggagaaagtagccatacaggagttcaaagaattccatgcccttcagattagcccaattaccagaaacatcatgaaagatattttaaaaactaattatttactacagtgtatttcacttgtcttgtgtgtctgaacacacagaagctaattagcaagtttttaagaagtatttaaaaatcttactaggattgacattttttctgaattctgtataaatagcttatagtgagaagtactgtgctcaaattttacatttttttcctttgcaaattctgtaatttcactcaacgattaagtctaccaaagaacacactgcatgtaaaagatgtattacaatctcaaagccagtaaaagaaatcttgcttcactgttcacctgctacaagtaagagtttggtgctggtagaaacatttgactctgatgtctattttattctacataagagccatatgtaatgtactgtaacaaaggagcttcttgtccccttggtcttttaattaaaagaaattccaactgacttttaaacttt

SEQ ID NO: 19329 - DNA, 1450 bp, Homo sapiens
  source 1..1450: mol_type = unassigned DNA
aattcgcggattctggtttctgaaggctacgccggaattccttccccgggacttgggaaccacttctgcctccctccctggggcgtggaggctgaggaaaaggagttaatgtgttaagagccattgacatttgaagatcatcagaagtgaagataaaacatctcaaaaattataatgggaatacttccagcttttacccattcagtgtgatgttggctgtagctctcactattttgagtgcctccacttctcattcagagaattcagtgcatacaaaatcagcttctgttgtatcatcagattccatttcaacttctgccgacaacttttctcctgatttgagggtcctgagggagtctaacaagttagcagaaatggaagaaccacccttgcttccaggagaaaatattaaagacatggccaaagatgtaacttatatatgtccattcactggcgctgtacgaggaactctgactgtcacgaattataggttatatttcaaaagcatggaacgggatcccccatttgttttagatgcttcccttggtgtgataaatagagtagaaaaaattggtggtgcttctagtcgaggtgaaaattcttatggactagaaactgtgtgtaaggatattaggaatttacgatttgctcataaacctgaggggcggacaagaagatccatatttgagaatctaatgaaatatgcatttcctgtctctaataacctgcctctttttgcttttgaatacaaagaagtattccctgaaaatgggtggaagctatatgaccctcttttagagtatagaaggcagggaattccaaatgaaagctggagaataacaaagataaatgaacgatatgaactttgtgatacataccctgccctcctggttgtgccagcaaatattcctgatgaagaattaaagagagtggcatccttcagatcaagaggccgtatcccagttttatcatggattcatcctgaaagtcaagccacaatcactcggtgtagccagcccatggttggagtgagtggaaagcgaagcaaagaagatgaaaaataccttcaagctatcatggattccaatgcccagtctcacaaaatctttatatttgatgcccggccaagtgttaatgctgttgccaacaaggcaaagggtggaggttatgaaagtgaagatgcctatcaaaatgctgaactagttttcctggatatccacaatattcatgttatgagagaatcattacgaaaacttaaggagattgtgtaccccaacattgaggaaacccactggttgtctaacttggaatctactcattggctagaacatattaagcttattcttgcaggggctcttaggattgctgacaaggtagagtcagggaagacgtctgtggtagtgcattgcagtgatggttgggatcgcacagctcagctcacttcccttgc

SEQ ID NO: 19330 - DNA, 8906 bp, Homo sapiens
  source 1..8906: mol_type = unassigned DNA
agcgcgctctgtgtggccgctgccgccatgttgttgtggttgtgagaaggcggcggcggcggcggagtagcagccggacgagacgtcccagcggctcaggcgctgcccagcgccggccctggcagggagcctggtggggtggcggagggggagactgtgccgtggagggcctcgccatgtcctgctgcccgacttccttgtgaaacctcctagtagaaaaagttcttgggacaaacttcatttgacttcaccataagggaaagaagagagccttgttggacactgaagaagggacggggatttctcctcctaatctgggcctcttgtcatggatgaagagactcggcacagccttgagtgcatccaggccaatcagatctttcccaggaagcagctgatccgggaggatgagaatcttcaggttcctttccttgaacttcatggagagagcacagagtttgtgggccgtgccgaggatgccatcattgccctttccaattacagacttcacatcaagttcaaggagtctcttgttaatgttccattacagcttatagaaagtgttgaatgccgagatatatttcagcttcatttgacttgcaaagactgcaaagttatcaggtgtcagttttcaacctttgagcagtgtcaagagtggctgaagagactgaacaacgcaatccgaccacctgctaaaatagaagatctcttctcatttgcataccatgcttggtgcatggaggtctatgccagtgaaaaagagcaacatggagacctgtgcagaccaggggagcatgtaacttcaaggtttaaaaacgaggtggagaggatgggttttgatatgaacaacgcctggaggatttccaacatcaatgagaagtacaaattatgtggtagctatcctcaagagctcatagtgcctgcctggatcactgacaaagaactggaaagtgtatcaagtttcaggtcctggaagcgcatccctgccgtcatctacaggcaccagagcaatggagctgtcattgcccgctgtggacagccagaggttagctggtggggctggcgaaatgcagatgatgagcatctggtacagtcagtagccaaagcttgtgcctctgactcccgatcgagtggcagcaagctgtcaactaggaacacttctcgagactttcccaatgggggagacctttctgacgtggagttcgattcttctctgtcaaatgcttcaggagcagagagtttagccatccaaccgcagaagcttttgatcttggatgcacgctcctatgcagctgctgtggcaaaccgagccaaaggaggaggctgcgaatgcccagagtattacccaaactgtgaagttgtgtttatggggatggcaaacattcattctattcggaggagttttcagtctctgcggttgctgtgcactcagatgccagatccgggaaattggctatcagctcttgaaagcacaaaatggctccatcacttgtctgtgcttctgaaatcagcgcttctggtagtgcatgctgtggatcaggatcagcggccggtgctagtacactgctcagatggctgggaccgcaccccccagattgtggcattggctaagctcttgctggacccttattaccgaaccatagagggtttccaggtcctcgtggaaatggagtggctggattttggccataaatttgctgaccggtgtggtcatggggagaactcggatgatctgaatgaacgttgcccagtgtttctgcagtggcttgactgtgttcatcagcttcagaggcaatttccttgctcttttgagttcaatgaagcattccttgtgaaactggtgcagcatacctattcctgcctgtttggaacattcctgtgcaacaacgccaaggagagaggggaaaagcatactcaggaacggacatgttccgtgtggtcacttcttcgggcaggcaacaaggctttcaaaaacctactgtattcctctcagtcagaagccgtgctgtaccctgtgtgccatgtgcgtaacctgatgctgtggagtgcagtgtacctgccctgcccatccccaaccacccctgtggacgacagctgtgcaccatacccagccccaggcaccagccctgatgatccccccctgagccggctaccaaagactagatcatacgacaatctgaccacagcctgtgacaacacagtgcctctggccagccggcgctgcagcgaccccagcctgaacgagaagtggcaggagcaccggcgctcactagagctgagcagcctggctggccctggagaggatcccctttctgccgacagcctagggaagcccaccagagtgccggggggtgccgagctttctgttgcagccggagtagctgaggggcagatggagaacatcttgcaggaggccaccaaagaggagagtggagtagaggaacctgcccacagggcaggcattgagatacaggagggtaaagaggaccctctcttagaaaaggagagcaggaggaagacacctgaggcctcagccattggacttcaccaagacccagaactgggtgatgctgctctgaggagccatctggatatgagctggcctctgttctcacagggcatttctgaacagcagagtgggctcagtgttctcctcagttctctccaggtcccccccaggggagaggattccctggaggtccctgtggagcagtttcgaatagaagagattgcagagggtagggaggaagcagttcttccaatcccagtagatgcaaaagttggctatggtacctcacagtcatgttctctgctaccttcccaagtcccttttgagaccagaggaccaaacgtggacagttctacagacatgttagtggaagataaggtgaagtcagtaagtgggccccaaggtcatcatagatcttgccttgtaaatagtggcaaggacaggcttcctcagaccatggaacccagcccttcagagacaagcctggtcgagaggccccaagtggggtctgtggtgcataggacttcccttggcagcactctcagcctgacacgttccccttgtgccttgcctttagccgaatgtaaagaggggcttgtgtgcaatggtgccccagagactgaaaacagggcctcagagcagcccccaggtcttagcaccctccagatgtaccccacacccaatgggcattgcgccaatggggaggctggtaggagcaaggactcactgagccgtcagctgtctgctatgagctgcagctctgcccacttacactcaaggaacttgcaccacaagtggctgcatagccactcaggaaggccatctgcaaccagcagccccgaccagccttcccgcagccacctggacgatgatggcatgtcagtgtacacagacacgatccaacagcgcctgcgtcagattgagtcaggccaccagcaggaagtagaaactttgaagaaacaagtccaggagctgaagagtcgcctggagagccagtacctgaccagctccctacactttaatggagactttggggatgaggtgatgacccgttggcttcctgaccacctggccgcccactgctatgcgtgcgacagtgccttctggcttgccagcaggaagcaccactgcagggacactgaccgtgttgatcaaacgtggaattgtgggaacgtattctgctccagttgttgtaaccagaaggttccagttcccagccagcagctctttgaacccagtcgagtatgcaagtcttgctatagcagcctacatcccacaagctccagcattgaccttgaactggataagcccattgctgccacttccaactgaagctcagtgacctgggtgggcagtggccaagctgctgttcctatgacaggcccactcaacctgggcagaccgagaggcccgtgcactttggaatgggagcgtggaaccacctgtacagagtgacagatttgggatgcaccactggattgtagattgatttttctttcctgtccccctactccctccctaccttttccatcctcctcctctgccttcaaaaaaggaaactttcccttggttgtcttaattttttttttttttgatggaagaccaagggttgccaggcccactgtaactgccgagctgcctgctgtcacgtgacactgagggatggcttgtttcttccgggtgggaggatggtggtcagagccaggagtatggagatctgagaccgtgagcagggaagaaagccagtgctaacatgcaaccattcctcacgccaccgccacatcagagctggttgggaaccctttgctgctggggaggctggaagcatattccccaagagcactgccctgggcatcatctccctcctgcgaggagctgagccagtcccctcacagatggataaatgaggctgatgtttggagggagaggcacacggtaaatggcatccccttaggcgcctctttgggaaaggaaagtggatgctcctttgaggcaggcgaggggctgggagtgggtagccgtcatgttgtcccccgtgggatcccatttttaacttgacccagattgtcttgggctccttttactttcagggggctgctttcctgggccaggctgtgtagcacttcccaccctcaggcatgagtacagactggtcaaaatgtttatgcagtcaaggccaaagcctgccctgagcccagacacacctgggtccccattctggggcctggtcccctaaacaatctcttcctcagccagcacagggaaatccagactcagggttccagaaatcccccgttcccaaaccaaaccaatcatggatcttccctttaaggggtagaatcagcctttagagttacaagcccctggaaaagggagcaggtcccatacaatcagcctttctcctcttctcttcttgggacaggaataactgctgagcagtccccctttgccactcctggctgtctgagtgggcacttgtctggctgctggccagcagtgaagggccacttggtgacttcgtagggttccttagagaagtgacatggccttgaggagattcagggcacctttcctcagtgagctttgatatggtccaaaaacagccttaaatcaagaatatttgtggaggtaggtgtggggaaggttggagaagagttaggtttgtgctttgtaatcttggcatccatgttttgtgcctgccctccctcttggggaggccatgcttgactctgctgaaagctgctaactggtgacagggtggatcatggtgaggactaggggtaaggtcagggaatgcttaagctctggccctgccctgtattcctcttccccttggtagcagttccctgaccaagggcaaggtgtgtctcaggaaggtggttctgtgcatgcctgggtgtggttaaggcgtggcccagaaggcttccctggtgctctcagtccaggcaaagcccagagcatctgagcacgtctctgacttccagtggcaacacagtttgaacgtggtgaaacagggtgtagttcttttccacattctgtgtcatctagtcgtgcaggtagggaaaaagttggtctaattgaagattgtgcatttcctagtgacaggtgccaagaggttatgatacgggtttcttgggtctgatgtacagtgtgaataaatgcttgcagctcttagctcttttttgatcgatgaagcacttttttattaatattttcctttgttaaaggaggaaccgtaactctccatagctgtacatataacccttttctcctaaagaggagtcagtcagtgctcctatatttttcattttttgtcaaagcaagaagtaaatactttagaattgttaaatatataaataaagcaaataaagttgagtgttccacatggtagcatttgctaacacttcctaattctttgccctgtggtttatcccctcttcgtcccttttccctctcacacagaagtgtttgagggcctgctgggaaactgacctttggcaaaggaaagctacagatagccttccgactctagaccttggcaaggagcctcaccatgatgttcaagcactgaacgcatttcctcagtgattttgctcctaaaatctcccaggctaaaagagggcaaagcagtcagggatctgacctggcagctattcctccttctctgaagagttcccatcagtagtcattacaactacctctcgcctcaaggctccatttttagctgctgctctgatttcagggcagccagtactctggccccttcagtcggggagtggaaggagatgtggggtgggggtgagaaaatgcttctgcctgttgttcttgaaggatagactatgggtgggcagagagaactgggggcagaaatggaattagatgtgattgggttatgcagtcaactagaggtctccttcccgccctctctccacacagagaggaacctctgctccttagctcttacagcaggactgtggcatctagtcacttcaatactagttcttgctcttcacagaggtagatttttctttaccctacagcactgttgggcatccctcccatcacatgggtctgtgggtgagatatgttatgctgttcctccctcgggaaggttggtattgaggggtgccttgctccagaggcgccagcccagcatctgtggtgagttggctaagatccagagtgacctgctcagagctccccagaggccttcactctttggggcagtctctctagggtcactttctgaatgtaccttctacctaaagtatacaaacacaaagagccagctgagctggttctagtgtgaaagccgtaagtgccacccagcaggcgtttgaaaacaagaaatcattcttctgtggaaggagaatgtgccatctcagctaccctcagtccgccaggcagcccagtctgtgtattcatatgaagttgtgaaaaccatgagtgtgtgccatggccatcgtgtctacacacagccactattgttcctgtgggctagtctccagcaaattaaaacactggcatggcctaggaagggcgttgcgagctcctaaatggaaagcttctctgggggtagggagatgaagagccaagatgctggtgaagcaggtgcagtgaggatccaaggcaaggaattgccctgagggaggtggctgcatatggagaaaggcagttctctgtgggcaaggccagcttgcttcaggctgtagagggaatttggtctgaagcaacagggcatgaactgtgactttgagctgccaggttgtcttcatctcagaactttcctatcctggcactctcgttacctttcttctataccttggcctctgtaactgcagtccaaaacaagttacagctgccttaatccactgagattctctatgaggatgtacagaaaagttttcctgtaataattttgcttatatgctaactcttttcatgttagcaaagaatattctatgaattagaatgttactgtggtagatctaaaggagaatgaacagaaggtgctggaggacctgttaaacaatctctggctattaaaaaacatcaagatgagaattaaaggcatatcctgatatacttgcctgcttgcacatgaggctgggagatcccatgcctgttgaagttaactctagccctgacctctattgatcttttgggaatgagggctgatttgaaggtgctgttgcaggatttcatttagctgctgccagttcaagtgacctgtccccagggctgcagctgtatccacctgattgcagtaggtgagggctaacagcagaatttaaagtggaccctgggctgtggagcaaagtgactatccatttggacttttggataatgtggcaggagtcccagctgtttaatttctagtcacattttccagaaagttgttctaagttgagattactgacaagatttctcaagggcaggaccagatatgtgagagacttctagttcagagctgacccctctaagcctctgacacttaaacacgagtcctgctgtccccagcacacaactgcactgaagccttgttcctctcggctggtgtagagctcatctgcatgttgtgtgcagataccagtagcctccctgcttgaacaggcctctcctaggctaggcaggtgttcagaggcatgaaggtctgggcaggggaagggcgtcttctgaaatgggagttaccaggtttttaaatgctgctattgttttatttaccatttaaggtcttttctattatatctgagtaactagtcagtttttcttacagtgctcatagcagttgtatttgaattgtattttcagtgaaatttgttttacattgccatttaaaattggcctttaacagcttcccaactagcttataagatttttttttttaatgaaaacataacccatgaggctcagatgctgttgaagaaataaatggtatgttgctgctgacagtagtgcttgcctattgtaacagcattggttctgctgtagcctcggtgaccatttaagttgaataaatctgtcattttcacccacaaacagttgttgagcccctggatttgggttgtcactgtggttctcctgccagtgctataatccagtgtcgtaggtgcagggtatgaatcagctcagcctcttaggagagaggggctctcagcgaggagggggcggggggggggtcactatttatcttccagaggcagggttcatggattcctgatgtttagaggcggaagggaccttaggtcacctacttccacggttttcatactgttctctggggcctcgtggagagggagcctccaggcccattcaaagctttattagatttaaaagtaagatctggtatgaagaaaggttttgtttgtttcttaaaataaaaagtctgaaaatcact

SEQ ID NO: 19331 - DNA, 4464 bp, Homo sapiens
  source 1..4464: mol_type = unassigned DNA
agaaggcggcggcggcggcggagtagcagccggacgagacgtcccagcggctcaggcgctgcccagcgccggccctggcagggagcctggtggggtggcggagggggagactgtgccgtggagggcctcgccatgtcctgctgcccgacttccttgtgaaacctcctagtagaaaaagttcttgggacaaacttcatttgacttcaccataagggaaagaagagagccttgttggacactgaagaagggacggggatttctcctcctaatctgggcctcttgtcatggatgaagagactcggcacagccttgagtgcatccaggccaatcagatctttcccaggaagcagctgatccgggaggatgagaatcttcaggttcctttccttgaacttcatggagagagcacagagtttgtgggccgtgccgaggatgccatcattgccctttccaattacagacttcacatcaagttcaaggagtctcttgttaatgttccattacagcttatagaaagtgttgaatgccgagatatatttcagcttcatttgacttgcaaagactgcaaagttatcaggtgtcagttttcaacctttgagcagtgtcaagagtggctgaagagactgaacaacgcaatccgaccacctgctaaaatagaagatctcttctcatttgcataccatgcttggtgcatggaggtctatgccagtgaaaaagagcaacatggagacctgtgcagaccaggggagcatgtaacttcaaggtttaaaaacgaggtggagaggatgggttttgatatgaacaacgcctggaggatttccaacatcaatgagaagtacaaattatgtggtagctatcctcaagagctcatagtgcctgcctggatcactgacaaagaactggaaagtgtatcaagtttcaggtcctggaagcgcatccctgccgtcatctacaggcaccagagcaatggagctgtcattgcccgctgtggacagccagaggttagctggtggggctggcgaaatgcagatgatgagcatctggtacagtcagtagccaaagcttgtgcctctgactcccgatcgagtggcagcaagctgtcaactaggaacacttctcgagactttcccaatgggggagacctttctgacgtggagttcgattcttctctgtcaaatgcttcaggagcagagagtttagccatccaaccgcagaagcttttgatcttggatgcacgctcctatgcagctgctgtggcaaaccgagccaaaggaggaggctgcgaatgcccagagtattacccaaactgtgaagttgtgtttatggggatggcaaacattcattctattcggaggagttttcagtctctgcggttgctgtgcactcagatgccagatccgggaaattggctatcagctcttgaaagcacaaaatggctccatcacttgtctgtgcttctgaaatcagcgcttctggtagtgcatgctgtggatcaggatcagcggccggtgctagtacactgctcagatggctgggaccgcaccccccagattgtggcattggctaagctcttgctggacccttattaccgaaccatagagggtttccaggtcctcgtggaaatggagtggctggattttggccataaatttgctgaccggtgtggtcatggggagaactcggatgatctgaatgaacgttgcccagtgtttctgcagtggcttgactgtgttcatcagcttcagaggcaatttccttgctcttttgagttcaatgaagcattccttgtgaaactggtgcagcatacctattcctgcctgtttggaacattcctgtgcaacaacgccaaggagagaggggaaaagcatactcaggaacggacatgttccgtgtggtcacttcttcgggcaggcaacaaggctttcaaaaacctactgtattcctctcagtcagaagccgtgctgtaccctgtgtgccatgtgcgtaacctgatgctgtggagtgcagtgtacctgccctgcccatccccaaccacccctgtggacgacagctgtgcaccatacccagccccaggcaccagccctgatgatccccccctgagccggctaccaaagactagatcatacgacaatctgaccacagcctgtgacaacacagtgcctctggccagccggcgctgcagcgaccccagcctgaacgagaagtggcaggagcaccggcgctcactagagctgagcagcctggctggccctggagaggatcccctttctgccgacagcctagggaagcccaccagagtgccggggggtgccgagctttctgttgcagccggagtagctgaggggcagatggagaacatcttgcaggaggccaccaaagaggagagtggagtagaggaacctgcccacagggcaggcattgagatacaggagggtaaagaggaccctctcttagaaaaggagagcaggaggaagacacctgaggcctcagccattggacttcaccaagacccagaactgggtgatgctgctctgaggagccatctggatatgagctggcctctgttctcacagggcatttctgaacagcagagtgggctcagtgttctcctcagttctctccaggtcccccccaggggagaggattccctggaggtccctgtggagcagtttcgaatagaagagattgcagagggtagggaggaagcagttcttccaatcccagtagatgcaaaagttggctatggtacctcacagtcatgttctctgctaccttcccaagtcccttttgagaccagaggaccaaacgtggacagttctacagacatgttagtggaagataaggtgaagtcagtaagtgggccccaaggtcatcatagatcttgccttgtaaatagtggcaaggacaggcttcctcagaccatggaacccagcccttcagagacaagcctggtcgagaggccccaagtggggtctgtggtgcataggacttcccttggcagcactctcagcctgacacgttccccttgtgccttgcctttagccgaatgtaaagaggggcttgtgtgcaatggtgccccagagactgaaaacagggcctcagagcagcccccaggtcttagcaccctccagatgtaccccacacccaatgggcattgcgccaatggggaggctggtaggagcaaggactcactgagccgtcagctgtctgctatgagctgcagctctgcccacttacactcaaggaacttgcaccacaagtggctgcatagccactcaggaaggccatctgcaaccagcagccccgaccagccttcccgcagccacctggacgatgatggcatgtcagtgtacacagacacgatccaacagcgcctgcgtcagattgagtcaggccaccagcaggaagtagaaactttgaagaaacaagtccaggagctgaagagtcgcctggagagccagtacctgaccagctccctacactttaatggagactttggggatgaggtgatgacccgttggcttcctgaccacctggccgcccactgctatgcgtgcgacagtgccttctggcttgccagcaggaagcaccactgcaggaattgtgggaacgtattctgctccagttgttgtaaccagaaggttccagttcccagccagcagctctttgaacccagtcgagtatgcaagtcttgctatagcagcctacatcccacaagctccagcattgaccttgaactggataagcccattgctgccacttccaactgaagctcagtgacctgggtgggcagtggccaagctgctgttcctatgacaggcccactcaacctgggcagaccgagaggcccgtgcactttggaatgggagcgtggaaccacctgtacagagtgacagatttgggatgcaccactggattgtagattgatttttctttcctgtccccctactccctccctaccttttccatcctcctcctctgccttcaaaaaaggaaactttcccttggttgtcttaattttttttttttttgatggaagaccaagggttgccaggcccactgtaactgccgagctgcctgctgtcacgtgacactgagggatggcttgtttcttccgggtgggaggatggtggtcagagccaggagtatggagatctgagaccgtgagcagggaagaaagccagtgctaacatgcaaccattcctcacgccaccgccacatcagagctggttgggaaccctttgctgctggggaggctggaagcatattccccaagagcactgccctgggcatcatctccctcctgcgaggagctgagccagtcccctcacagatggataaatgaggctgatgtttggagggagaggcacacggtaaatggcatccccttaggcgcctctttgggaaaggaaagtggatgctcctttgaggcaggcgaggggctgggagtgggtagccgtcatg

SEQ ID NO: 19332 - DNA, 6018 bp, Homo sapiens
  source 1..6018: mol_type = unassigned DNA
ggctcggcgtcgggagcgcgctctgtgtggccgctgccgccatgttgttgtggttgtgagaaggcggcggcggcggcggagtagcagccggacgagacgtcccagcggctcaggcgctgcccagcgccggccctggcagggagcctggtggggtggcggagggggagactgtgccgtggagggcctcgccatgtcctgctgcccgacttccttgtgaaacctcctagtagaaaaagttcttgggacaaacttcatttgacttcaccataagggaaagaagagagccttgttggacactgaagaagggacggggatttctcctcctaatctgggcctcttgtcatggatgaagagactcggcacagccttgagtgcatccaggccaatcagatctttcccaggaagcagctgatccgggaggatgagaatcttcaggttcctttccttgaacttcatggagagagcacagagtttgtgggccgtgccgaggatgccatcattgccctttccaattacagacttcacatcaagttcaaggagtctcttgttaatgttccattacagcttatagaaagtgttgaatgccgagatatatttcagcttcatttgacttgcaaagactgcaaagttatcaggtgtcagttttcaacctttgagcagtgtcaagagtggctgaagagactgaacaacgcaatccgaccacctgctaaaatagaagatctcttctcatttgcataccatgcttggtgcatggaggtctatgccagtgaaaaagagcaacatggagacctgtgcagaccaggggagcatgtaacttcaaggtttaaaaacgaggtggagaggatgggttttgatatgaacaacgcctggaggatttccaacatcaatgagaagtacaaattatgtggtagctatcctcaagagctcatagtgcctgcctggatcactgacaaagaactggaaagtgtatcaagtttcaggtcctggaagcgcatccctgccgtcatctacaggcaccagagcaatggagctgtcattgcccgctgtggacagccagaggttagctggtggggctggcgaaatgcagatgatgagcatctggtacagtcagtagccaaagcttgtgcctctgactcccgatcgagtggcagcaagctgtcaactaggaacacttctcgagactttcccaatgggggagacctttctgacgtggagttcgattcttctctgtcaaatgcttcaggagcagagagtttagccatccaaccgcagaagcttttgatcttggatgcacgctcctatgcagctgctgtggcaaaccgagccaaaggaggaggctgcgaatgcccagagtattacccaaactgtgaagttgtgtttatggggatggcaaacattcattctattcggaggagttttcagtctctgcggttgctgtgcactcagatgccagatccgggaaattggctatcagctcttgaaagcacaaaatggctccatcacttgtctgtgcttctgaaatcagcgcttctggtagtgcatgctgtggatcaggatcagcggccggtgctagtacactgctcagatggctgggaccgcaccccccagattgtggcattggctaagctcttgctggacccttattaccgaaccatagagggtttccaggtcctcgtggaaatggagtggctggattttggccataaatttgctgaccggtgtggtcatggggagaactcggatgatctgaatgaacgttgcccagtgtttctgcagtggcttgactgtgttcatcagcttcagaggcaatttccttgctcttttgagttcaatgaagcattccttgtgaaactggtgcagcatacctattcctgcctgtttggaacattcctgtgcaacaacgccaaggagagaggggaaaagcatactcaggaacggacatgttccgtgtggtcacttcttcgggcaggcaacaaggctttcaaaaacctactgtattcctctcagtcagaagccgtgctgtaccctgtgtgccatgtgcgtaacctgatgctgtggagtgcagtgtacctgccctgcccatccccaaccacccctgtggacgacagctgtgcaccatacccagccccaggcaccagccctgatgatccccccctgagccggctaccaaagactagatcatacgacaatctgaccacagcctgtgacaacacagtgcctctggccagccggcgctgcagcgaccccagcctgaacgagaagtggcaggagcaccggcgctcactagagctgagcagcctggctggccctggagaggatcccctttctgccgacagcctagggaagcccaccagagtgccggggggtgccgagctttctgttgcagccggagtagctgaggggcagatggagaacatcttgcaggaggccaccaaagaggagagtggagtagaggaacctgcccacagggcaggcattgagatacaggagggtaaagaggaccctctcttagaaaaggagagcaggaggaagacacctgaggcctcagccattggacttcaccaagacccagaactgggtgatgctgctctgaggagccatctggatatgagctggcctctgttctcacagggcatttctgaacagcagagtgggctcagtgttctcctcagttctctccaggtcccccccaggggagaggattccctggaggtccctgtggagcagtttcgaatagaagagattgcagagggtagggaggaagcagttcttccaatcccagtagatgcaaaagttggctatggtacctcacagtcatgttctctgctaccttcccaagtcccttttgagaccagaggaccaaacgtggacagttctacagacatgttagtggaagataaggtgaagtcagtaagtgggccccaaggtcatcatagatcttgccttgtaaatagtggcaaggacaggcttcctcagaccatggaacccagcccttcagagacaagcctggtcgagaggccccaagtggggtctgtggtgcataggacttcccttggcagcactctcagcctgacacgttccccttgtgccttgcctttagccgaatgtaaagaggggcttgtgtgcaatggtgccccagagactgaaaacagggcctcagagcagcccccaggtcttagcaccctccagatgtaccccacacccaatgggcattgcgccaatggggaggctggtaggagcaaggactcactgagccgtcagctgtctgctatgagctgcagctctgcccacttacactcaaggaacttgcaccacaagtggctgcatagccactcaggaaggccatctgcaaccagcagccccgaccagccttcccgcagccacctggacgatgatggcatgtcagtgtacacagacacgatccaacagcgcctgcgtcagattgagtcaggccaccagcaggaagtagaaactttgaagaaacaagtccaggagctgaagagtcgcctggagagccagtacctgaccagctccctacactttaatggagactttggggatgaggtgacttcaatccccgactcggaaagcaatctggatcagaactgtttgtctcgctgcagcacagagattttctctgaagccagctgggagcaggtggataaacaggacacagagatgacccgttggcttcctgaccacctggccgcccactgctatgcgtgcgacagtgccttctggcttgccagcaggaagcaccactgcaggaattgtgggaacgtattctgctccagttgttgtaaccagaaggttccagttcccagccagcagctctttgaacccagtcgagtatgcaagtcttgctatagcagcctacatcccacaagctccagcattgaccttgaactggataagcccattgctgccacttccaactgaagctcagtgacctgggtgggcagtggccaagctgctgttcctatgacaggcccactcaacctgggcagaccgagaggcccgtgcactttggaatgggagcgtggaaccacctgtacagagtgacagatttgggatgcaccactggattgtagattgatttttctttcctgtccccctactccctccctaccttttccatcctcctcctctgccttcaaaaaaggaaactttcccttggttgtcttaattttttttttttttgatggaagaccaagggttgccaggcccactgtaactgccgagctgcctgctgtcacgtgacactgagggatggcttgtttcttccgggtgggaggatggtggtcagagccaggagtatggagatctgagaccgtgagcagggaagaaagccagtgctaacatgcaaccattcctcacgccaccgccacatcagagctggttgggaaccctttgctgctggggaggctggaagcatattccccaagagcactgccctgggcatcatctccctcctgcgaggagctgagccagtcccctcacagatggataaatgaggctgatgtttggagggagaggcacacggtaaatggcatccccttaggcgcctctttgggaaaggaaagtggatgctcctttgaggcaggcgaggggctgggagtgggtagccgtcatgttgtcccccgtgggatcccatttttaacttgacccagattgtcttgggctccttttactttcagggggctgctttcctgggccaggctgtgtagcacttcccaccctcaggcatgagtacagactggtcaaaatgtttatgcagtcaaggccaaagcctgccctgagcccagacacacctgggtccccattctggggcctggtcccctaaacaatctcttcctcagccagcacagggaaatccagactcagggttccagaaatcccccgttcccaaaccaaaccaatcatggatcttccctttaaggggtagaatcagcctttagagttacaagcccctggaaaagggagcaggtcccatacaatcagcctttctcctcttctcttcttgggacaggaataactgctgagcagtccccctttgccactcctggctgtctgagtgggcacttgtctggctgctggccagcagtgaagggccacttggtgacttcgtagggttccttagagaagtgacatggccttgaggagattcagggcacctttcctcagtgagctttgatatggtccaaaaacagccttaaatcaagaatatttgtggaggtaggtgtggggaaggttggagaagagttaggtttgtgctttgtaatcttggcatccatgttttgtgcctgccctccctcttggggaggccatgcttgactctgctgaaagctgctaactggtgacagggtggatcatggtgaggactaggggtaaggtcagggaatgcttaagctctggccctgccctgtattcctcttccccttggtagcagttccctgaccaagggcaaggtgtgtctcaggaaggtggttctgtgcatgcctgggtgtggttaaggcgtggcccagaaggcttccctggtgctctcagtccaggcaaagcccagagcatctgagcacgtctctgacttccagtggcaacacagtttgaacgtggtgaaacagggtgtagttcttttccacattctgtgtcatctagtcgtgcaggtagggaaaaagttggtctaattgaagattgtgcatttcctagtgacaggtgccaagaggttatgatacgggtttcttgggtctgatgtacagtgtgaataaatgcttgcagctcttagctcttttttgatcgatgaagcacttttttattaatattttcctttgttaaaggaggaaccgtaactctccatagctgtacatataacccttttctcctaaagaggagtcagtcagtgctcctatatttttcattttttgtcaaagcaagaagtaaatactttagaattgttaaatatataaataaagcaaataaagttgagtgttccacatggtagcatttgctaacacttcctaa

SEQ ID NO: 19333 - DNA, 3758 bp, Homo sapiens
  source 1..3758: mol_type = unassigned DNA
cctcttgtcatggatgaagagactcggcacagccttgagtgcatccaggccaatcagatctttcccaggaagcagctgatccgggaggatgagaatcttcaggttcctttccttgaacttcatggagagagcacagagtttgtgggccgtgccgaggatgccatcattgccctttccaattacagacttcacatcaagttcaaggagtctcttgttaatgttccattacagcttatagaaagtgttgaatgccgagatatatttcagcttcatttgacttgcaaagactgcaaagttatcaggtgtcagttttcaacctttgagcagtgtcaagagtggctgaagagactgaacaacgcaatccgaccacctgctaaaatagaagatctcttctcatttgcataccatgcttggtgcatggaggtctatgccagtgaaaaagagcaacatggagacctgtgcagaccaggggagcatgtaacttcaaggtttaaaaacgaggtggagaggatgggttttgatatgaacaacgcctggaggatttccaacatcaatgagaagtacaaattatgtggtagctatcctcaagagctcatagtgcctgcctggatcactgacaaagaactggaaagtgtatcaagtttcaggtcctggaagcgcatccctgccgtcatctacaggcaccagagcaatggagctgtcattgcccgctgtggacagccagaggttagctggtggggctggcgaaatgcagatgatgagcatctggtacagtcagtagccaaagcttgtgcctctgactcccgatcgagtggcagcaagctgtcaactaggaacacttctcgagactttcccaatgggggagacctttctgacgtggagttcgattcttctctgtcaaatgcttcaggagcagagagtttagccatccaaccgcagaagcttttgatcttggatgcacgctcctatgcagctgctgtggcaaaccgagccaaaggaggaggctgcgaatgcccagagtattacccaaactgtgaagttgtgtttatggggatggcaaacattcattctattcggaggagttttcagtctctgcggttgctgtgcactcagatgccagatccgggaaattggctatcagctcttgaaagcacaaaatggctccatcacttgtctgtgcttctgaaatcagcgcttctggtagtgcatgctgtggatcaggatcagcggccggtgctagtacactgctcagatggctgggaccgcaccccccagattgtggcattggctaagctcttgctggacccttattaccgaaccatagagggtttccaggtcctcgtggaaatggagtggctggattttggccataaatttgctgaccggtgtggtcatggggagaactcggatgatctgaatgaacgttgcccagtgtttctgcagtggcttgactgtgttcatcagcttcagaggcaatttccttgctcttttgagttcaatgaagcattccttgtgaaactggtgcagcatacctattcctgcctgtttggaacattcctgtgcaacaacgccaaggagagaggggaaaagcatactcaggaacggacatgttccgtgtggtcacttcttcgggcaggcaacaaggctttcaaaaacctactgtattcctctcagtcagaagccgtgctgtaccctgtgtgccatgtgcgtaacctgatgctgtggagtgcagtgtacctgccctgcccatccccaaccacccctgtggacgacagctgtgcaccatacccagccccaggcaccagccctgatgatccccccctgagccggctaccaaagactagatcatacgacaatctgaccacagcctgtgacaacacagtgcctctggccagccggcgctgcagcgaccccagcctgaacgagaagtggcaggagcaccggcgctcactagagctgagcagcctggctggccctggagaggatcccctttctgccgacagcctagggaagcccaccagagtgccggggggtgccgagctttctgttgcagccggagtagctgaggggcagatggagaacatcttgcaggaggccaccaaagaggagagtggagtagaggaacctgcccacagggcaggcattgagatacaggagggtaaagaggaccctctcttagaaaaggagagcaggaggaagacacctgaggcctcagccattggacttcaccaagacccagaactgggtgatgctgctctgaggagccatctggatatgagctggcctctgttctcacagggcatttctgaacagcagagtgggctcagtgttctcctcagttctctccaggtcccccccaggggagaggattccctggaggtccctgtggagcagtttcgaatagaagagattgcagagggtagggaggaagcagttcttccaatcccagtagatgcaaaagttggctatggtacctcacagtcatgttctctgctaccttcccaagtcccttttgagaccagaggaccaaacgtggacagttctacagacatgttagtggaagataaggtgaagtcagtaagtgggccccaaggtcatcatagatcttgccttgtaaatagtggcaaggacaggcttcctcagaccatggaacccagcccttcagagacaagcctggtcgagaggccccaagtggggtctgtggtgcataggacttcccttggcagcactctcagcctgacacgttccccttgtgccttgcctttagccgaatgtaaagaggggcttgtgtgcaatggtgccccagagactgaaaacagggcctcagagcagcccccaggtcttagcaccctccagatgtaccccacacccaatgggcattgcgccaatggggaggctggtaggagcaaggactcactgagccgtcagctgtctgctatgagctgcagctctgcccacttacactcaaggaacttgcaccacaagtggctgcatagccactcaggaaggccatctgcaaccagcagccccgaccagccttcccgcagccacctggacgatgatggcatgtcagtgtacacagacacgatccaacagcgcctgcgtcagattgagtcaggccaccagcaggaagtagaaactttgaagaaacaagtccaggagctgaagagtcgcctggagagccagtacctgaccagctccctacactttaatggagactttggggatgaggtgatgacccgttggcttcctgaccacctggccgcccactgctatgcgtgcgacagtgccttctggcttgccagcaggaagcaccactgcagggacactgaccgtgttgatcaaacgtggaattgtgggaacgtattctgctccagttgttgtaaccagaaggttccagttcccagccagcagctctttgaacccagtcgagtatgcaagtcttgctatagcagcctacatcccacaagctccagcattgaccttgaactggataagcccattgctgccacttccaactgaagctcagtgacctgggtgggcagtggccaagctgctgttcctatgacaggcccactcaacctgggcagaccgagaggcccgtgcactttggaatgggagcgtggaaccacctgtacagagtgacagatttgggatgcaccactggattgtagattgatttttctttcctgtccccctactccctccctaccttttccatcctcctcctctgccttcaaaaaaggaaactttccctt

SEQ ID NO: 19334 - DNA, 665 bp, Homo sapiens
  source 1..665: mol_type = unassigned DNA
tgttgttgtggttgtgagaaggcggcggcggcggcggagtagcagccggacgagacgtcccagcggctcaggcgctgcccagcgccggccctggcagggagcctggtggggtggcggagggggagactgtgccgtggagggcctcgccatgtcctgctgcccgacttcaccataagggaaagaagagagccttgttggacactgaagaagggacggggatttctcctcctaatctgggcctcttgtcatggatgaagagactcggcacagccttgagtgcatccaggccaatcagatctttcccaggaagcagctgatccgggaggatgagaatcttcaggttcctttccttgaacttcatggagagagcacagagtttgtgggccgtgccgaggatgccatcattgccctttccaattacagacttcacatcaagttcaaggagtctcttgttaatgttccattacagcttatagaaagtgttgaatgccgagatatatttcagcttcatttgacttgcaaagactgcaaagttatcaggtgtcagttttcaacctttgagcagtgtcaagagtggctgaagagactgaacaacgcaatccgaccacctgctaaaatagaagatctcttctcatttgcataccatgcttggtgcatggaggtct

SEQ ID NO: 19335 - DNA, 5829 bp, Homo sapiens
  source 1..5829: mol_type = unassigned DNA
gcgcggcctcagcagctgcgggagacggaagtggcaagagcgcggcctcagagggtcgggcggacgccgcctggtgagaagcaggcagccagtacccttgccacggtagaatgggtgaggaggggccccccagcctggagtacatccaagccaaggatctgttcccccccaaggaactagtgaaggaggaagagaatcttcaggtccccttcacagtgctgcagggtgagggagtagagttcctgggccgggcagccgatgccctcattgccatctctaactaccggctgcatatcaaattcaaggactctgtcatcaacgtccccctccggatgattgacagtgtggagagccgtgatatgttccagttgcacatttcctgcaaggactccaaagtggtgaggtgccacttctccacttttaagcagtgccaagagtggctctcacggctaagccgagccacagcaagacctgccaagcctgaagacctctttgcctttgcctaccatgcctggtgcctggggctgaccgaggaggaccagcacactcacctatgtcagccaggtgagcacatacgttgtcgacaggaggcggagcttgcaaggatgggctttgacctgcagaacgtctggagagtctcacacatcaacagcaactacaaattgtgccccagttacccccagaagctgctggttcctgtgtggatcactgacaaagagctggagaacgtggcttccttccgctcctggaagcggattcccgtggttgtgtatagacacttgcgcaatggggctgccatcgcccgctgcagccagccagagatcagctggtggggctggcgcaatgctgatgatgagtacctggtcacgtccattgctaaagcctgtgccctggacccggggacaagggccactgggggctccctcagcaccgggaataatgataccagcgaggcgtgtgatgctgactttgattcttctctgactgcgtgctctggagtggagagcacagcagctcctcaaaagctgctgatcctggatgcgcgatcctacacggcagcagtggccaaccgggccaagggtggaggctgtgaatgtgaagagtactatcccaactgtgaggtcgtgttcatgggaatggccaacatccatgccatccggaacagctttcagtacctccgggctgtgtgtagccagatgccggatcctagcaactggttgtcggcactggagagtaccaaatggctgcagcacttgtcggtgatgctaaaagcagctgtgctggtggctaatacagtagaccgggaaggccggcctgtgctggtacactgctcagatggctgggaccgcacaccgcagatcgtagccctggccaaaatattactggacccatattacaggacgttggagggcttccaagtgttagtggagtctgactggctggattttgggcacaagtttggagatcgctgtggccaccaagagaatgtggaggaccaaaacgaacaatgccctgtgttcctccagtggcttgattctgttcatcagttgcttaagcagttcccctgcctgtttgaatttaatgaagcattcctggtaaaactggtgcaacacacatactcctgcctctacggcaccttcctggccaacaacccctgtgagcgagagaagcgcaacatctacaagcggacctgctctgtgtgggcgctccttcgagctggcaataaaaactttcataacttcctctacacacccagctcagacatggtcctgcatcctgtttgtcatgtccgggccctgcacctctggacagctgtttatctgccagcatcatctccatgcacacttggggaagaaaacatggatctttacctttccccagtggcccagagccaggagttctctggccgctctctggacagattacctaaaaccagatccatggatgatcttctttctgcctgtgacacaagcagccccctgactcgtacatccagtgaccctaacctgaataaccactgtcaggaggtcagggtaggcctggagccctggcacagcaatcctgagggatcagagacaagctttgtggactctggggtaggagggcctcagcaaactgtaggagaagtgggtcttcctcctcctctgcccagcagccagaaagactacttgagcaataaacctttcaagagtcacaaaagctgttctccaagttacaaactgcttaataccgcagtgcctcgggaaatgaagagcaacacctctgatcctgagatcaaagtcctagaagagactaagggaccagctccagacccttctgcccaggatgagctgggtaggactttagatggcataggggagccacctgaacattgtcctgaaacagaagctgtcagtgcactctccaaggtcatttctaacaagtgtgatggagtttgtaattttcctgagtcttcccagaactctcctacaggtacgccccaacaggcccagccagactccatgctaggtgtgccctccaagtgtgttcttgatcacagcctcagcaccgtttgcaacccaccgagtgctgcctgccaaactcctctagacccaagcactgacttcctcaaccaagatccctcagggtctgtggcaagtatctcccaccaggaacaactgagttctgtgccggatctgacccatggggaggaagacattggtaaaagaggaaataataggaatgggcagttattggaaaatcctcgctttgggaaaatgccattggaattggtccggaagccaatttctcagagccagatcagtgagttctcttttctagggtccaactgggacagcttccaagggatggtgacttcattcccaagtggggaggccacccctcggcggctgctttcctatggctgttgtagcaagaggccaaacagtaagcagatgcgggccacagggccctgctttgggggccagtgggctcagagagaaggtgtgaagtcacctgtctgttctagtcattccaatggacattgtactggcccaggaggaaagaaccagatgtggttgtccagtcatccaaagcaagtctctagcacaaagcccgttccactgaactgcccttctccagtgcctcctctgtatttggatgatgatggactcccctttcccacggatgtgatccagcataggttacggcaaatcgaagcagggtacaaacaagaggtggagcagctacgtcgacaggtgcgtgagcttcagatgaggctggacatccgtcactgctgtgcccctccagcagagccccccatggactatgaggatgattttacatgtttgaaggagtcagatggcagtgatactgaggattttggctctgatcacagtgaagactgcctttcagaagcaagctgggaacctgttgataagaaagagactgaggtgactcgctgggttccagaccatatggcatcacactgctataactgtgactgtgaattctggttggccaaacgaagacaccattgcagaaattgtgggaatgtattttgtgctggatgctgccacctgaagctgcccattcctgatcagcaactctatgacccagttctcgtctgtaactcatgttacgaacacattcaagtctctcgtgccagggaactcatgagccaacagctgaagaaacccattgctacagcttccagttgaatgccggggagaaacctgtccaattttagcaggtttgaagggaggatcttcttcagttgtagtttggaaggttccttggtgtggctcatgaaatcacagagctcagagataccatcttgagaaatcctccttggtatcatgaaactggagcagaggaattgcaatttagcaggaggtcctctactggtgataccctcaccttggggtaatggtcctaacccagacccagggtctggaagcttaatgttgagttggtgactccagcctctttctcctggaggtcacaagatgatgattgcgtagatgttgcctggtgcaaagtgccccaaacagcaatagaaaggcatatgtataaccaaactccaagtgataaccagacccatctctcctccaccttgacaaaagcagattatagtatacaaggtaggaattcctgtcctatttgagatgaactatatcctgtacctctgtgctctgtgtctgcatgaaggctcagcctttagaggcactccttctagttgcattagtactgtctttctgtggagtttggtttgaagactggctcagcaagtggaggtttcaatgtatttttcagttggctcatcagccagcattggtgaatattcagtttaggggaacagttctagggagtgagacatttttgggagcagaggaaaactctgctgatgttcggtcctggcaaacattgagttattttgagctgtgaaggcagtcgtctctgttacacagtggcagctcttgagttatgcactgtgaagaatgagaagggaaaagcaaaaattatccttgtgaaatatctgctgattgtgccctactctttgcacctgacttttcctagttgtcctggtgctaacacaggagctacaccttgatcctctcctggcatgaaaataaaacaaaggttttcgttgttgttgttccattgcccatttcccccatgttgtctttcccttggctgatgcctcctctgggtcacattgcttcttatcctgaacacttgacaccttgagggtagaatttagcgtttggtttttacctcctagcatatgctgtttggtatgtgagggtttcagtacaaatgctgctgtctatttctgtgcacttaacaatggaacccaaacagaagagaataaagccttgataccaaaattgggaaagaacatgtgtccatttggaccaaacgttgttggtttttaaaaaattttattttgtttttttgtttttgtttttgttttttttcatcttaatatgtaccagtggcacttaaccaaaagatacagtgatatagccatgtactgtgggtgggacagatacagtctccttggcctataatgaaaccactaggactttatacagttttccttaatttgttgacatataaatggtaaattatatttaggcttatcctgttttgaaatgatggtagtcatctttcttactgctactttcatgttgctttctagaaaacagcatttcattccaaaataactaggatctgcatttagaacaagaatcattatttgtcctgaccttttcagtcctacagagacgcatctgtggttcttttgtacttgccatagatgtaacctaaaaagttttggcatatttaggtcagcctagcggaactttttttttcatttaaatggagctgaataatggagattttgtgtctgcaaaattcctgagatcattgaaaaagtaacaagctgttccttgtttctgatacataaaattattttaagcattttatcaatcattaaaatttactgccagttgtgagtggctttttaattaacttgtctttcattgcacttcactctgcctgttttcaaggggagtaagattggtaacatttggggagactgtatctgtctacttagcgtggctgttttgagggactgtcccatcagtgaacaaactgcatggccttggagagagactctgggctcttggctcagatgtgttcatcaaatactcctttcagagctgttgtgggtgtaagtgacatgatgtggccaaaaatccaaactgtgcagttgcgttgtgacaaacatgcaatgtgctgtaaaaattcaatacagtttaaataaaatctctatattagtgctgc

SEQ ID NO: 19336 - DNA, 4102 bp, Homo sapiens
  source 1..4102: mol_type = unassigned DNA
cacacacgctctgtctgcctgccccgagtcccccgggaggccgcggggtttggggaagtgtttctaggagacggcgctcaccggctgcacctgcgccgttgacgccaccggggccggcagacagacccgcggcgctggctggtggagggagttcccgcttgctctctgtcgctgtcaccgccctgtttctgtagccgtatggtacgcctgtgagaccggctgccggctgacgtctccttgcgatggagcatatccggacgaccaaggtcgaacaagtaaaattacttgaccgattcagtaccagcaacaagtcattaacaggaacactgtatcttacggctacacatctattatttatcgactctcatcaaaaagaaacctggatattacaccaccatattgcctcagtagagaaacttgctttgactacttctggatgcccccttgtgatacagtgcaagaacttcagaactgtgcatttcattgttcccagagaaagagattgccatgatatttacaactctttgctacaactgtcaaaacaagcaaaatatgaagatctctatgcattttcttataatcccaaacaaaatgattcagaacgactacaaggctggcagctcattgatctcgctgaggaatataagaggatgggagtgccaaactcacactggcagttgtctgatgccaaccgggactacaagatttgtgaaacttaccccagagaactttatgttccccggatagcaagcaaaccaataattgttggtagttccaagttccggagcaagggaagattcccagttctttcctactatcatcaagataaggaggctgccatttgtcgatgtagtcagccactctctggattcagtgccaggtgcctggaggatgaacatttgcttcaagccattagtaaagccaatccagtcaatcgctatatgtacgtcatggataccaggccaaaactgaatgcaatggccaacagagcagctggaaaaggttatgaaaatgaagacaactattccaatattagatttcagtttgttggaattgaaaatattcatgtcatgaggtccagccttcagaaattattggaagtcaatggcactaaagggctttctgtcaatgatttctactccggtttggagagctcgggatggcttcgccatatcaaagctgttatggatgctgcaatcttcttggccaaagcaataacagttgaaaatgcaagtgtgttggtgcattgttccgatggttgggataggacttcccaggtttgttccctgggttctcttttattggattcctactacaggacaatcaaaggattcatggttttaatagaaaaggattggatctcttttggacataaattttcagagaggtgtggccagttggatggtgacccaaaggaagtctcaccagtgtttactcagttcttggaatgtgtgtggcatttgaccgaacagtttccacaagcctttgaattcagtgaagcatttcttcttcagatccatgagcatattcattcatgccagtttggaaacttccttggaaattgtcagaaggaaagagaagagctcaagttgaaggagaagacttattccctgtggccatttcttttggaagaccaaaagaagtacttcctctctacagttccgaatctcacagatttacagttttggagccaaatacagtatctttcaattttaagttttggaggaacatgtaccatcaatttgatcgaacactgcatcctaggcagtctgtatttaatataattatgaatatgaatgagcaaaataaacaattagagaaagatattaaagacctagaatctaaaattaaacaacgcaaaaataagcaaacagatggcatcctcaccaaggaattgttacattcagttcatcctgaatcacctaacctcaaaacttccctgtgttttaaagagcagactctgctacccgtaaatgatgctcttcgaactatagagggcagcagcccggcagataatcgttatagtgaatatgcagaagagttttctaaatcagaacctgctgtggtcagcttagagtatggtgtggcaagaatgacttgttagactcatagagttttttctgcaatgattgcagtacaagaaaaggattattgtgaggatggtctgtaagcataaccaaaaggaatttgtctaataacaattttagggtttaacagtaggctaatagttgaaggaaggataataactacccttgtgagagaaataagtcattttaattgcatttccagcaaggaatgacattcagttctgtaagaaatgagtggtatttgatgtatttactcaaaacacaatttgcactgtacactagtgaattgacgtttatgatttatgttaattcagccaaacataaataaccttccttaagtacaatttaacttcaagaaaacaaaatttgacaacatagtttcttaataaatgatatggcatgtactttcaattatgtagctttgtaactatgaatatttacatattttgccttttagtgatatttaatgttaaagtgccatgaaaaatatttctaagaaagccttaaattcccagtggattctttacccttaagttttacagcctacaacaagattttttgttttgtttttcttctggtcagccttgttttgtttgtaaagaattgtgctctcattactgctgggggtgcatgctacaatacttctatataaacacttgtagaagtacactgttcacgtttagcctgccccacttttgtattcaaaattaatgaaactgaaggtttattctgatcataatttgtttagtgctacatttgataatttattatttacagcttagaatattgatttcttgaatacgtataagcacatttgactgtcttttatatatggattactgcattccattgattcttattttgtggttggctttatttctttcacaactgtgtaagtttaaagagctaaagctctaaaactgttctgagaaacaatgaatagtacatgtatatgtatatttttaaactgccttattgctcaatgagttgctgttcctggagtatctaactttcagtttactcaaaaacttttgggtaaataaaaaagggaagtacagatagtttaggttgtgcatggttgcatgaattttgaagtcatttctatgtggagcattatttttcttcttgttaaatatagaaaaaaaaagagattctagtacaaagttactgtttaacaaaagcaacataaactctgggaaagatttcattttgccatgttatatttactgtttattctgtgtactagtacatatctttaaattaccaaaaaacaagaaacaaaacataaaaaccccaaaactatcacttggaattagcaatatcacccaactggctttaaaattgaaaatttaaataacatggtggcatgaagtacaattcgagtattaggcaatttgcatagtgttcctcatgctactttctgttacacctctattatattagttttgaatataaacatctttttcagaccaaaaaaaactttattgtatgagagcttatcttatcctgtttatttttccaatgcttttctgtaatacattatgtaatttaaaaaatattcctttttaaacagcaacagaaatgcactataaaatatagtatgtgattaaccaatcctgcttccatatttaagcactgggaatggaaacttaatctctgtgactacaaagggaagtttttgtgccttggtgttccagtcactgattgtggttttagaatcttctgtggctgacttcttgtattcaactctggtttattatcttaatcttcaacttcagacatatatttgtgtgtttatatgctcacaggtggactgagaaatcagttacatcttaagtgacctacagggtatatgttggcaaaagcagactgtgtatatgtcttataaagttgaatttatgttcagtgtgtttggaagtgtatagcatgtaaattacttcatatatgatttaaaggtaattaaatgttcacattttactttgaatgtttttcttctggataaaacaaatggaatc

SEQ ID NO: 19337 - DNA, 5659 bp, Homo sapiens
  source 1..5659: mol_type = unassigned DNA
tttcgttatgtgatatccctctacaggatgagttttaatggatgctggtgctaacatcgtatgaaattgaggtaggaggcgggactctgacaccagaccagattgaggactagctaatcatcatactttacataaggaatccgtaggattggagagttgattgtttcaaataaggctggtttccttatttggttatttccttagaataataactccaaatctgattatttccttagaatacattcttatgagtagaactgcagctcaaactaaatttggtgctgtccagtggtatggcgatggacttcagaacatcctccactcttgccctcaccccacaagaaccctttactcgggatccattctcacgcagtcttcctccccgaccgccccgcgcgtccgctcggcgggatgacaaagaccgcctcgggtggggtggtgagcagtaccggcctcctccagcagggggcgctgtgggatccgccgctgtccgggacgaaccagcaagccgctctcggtccacacacgctctgtctgcctgccccgagtcccccgggaggccgcggggtttggggaagtgtttctaggagacggcgctcaccggctgcacctgcgccgttgacgccaccggggccggcagacagacccgcggcgctggctggtggagggagttcccgcttgctctctgtcgctgtcaccgccctgtttctgtagccgtatggtacgcctgtgagaccggctgccggctgacgtctccttgcgatggagcatatccggacgaccaaggtcgaacaagtaaaattacttgaccgattcagtaccagcaacaagtcattaacaggaacactgtatcttacggctacacatctattatttatcgactctcatcaaaaagaaacctggatattacaccaccatattgcctcagtagagaaacttgctttgactacttctggatgcccccttgtgatacagtgcaagaacttcagaactgtgcatttcattgttcccagagaaagagattgccatgatatttacaactctttgctacaactgtcaaaacaagcaaaatatgaagatctctatgcattttcttataatcccaaacaaaatgattcagaacgactacaaggctggcagctcattgatctcgctgaggaatataagaggatgggagtgccaaactcacactggcagttgtctgatgccaaccgggactacaagatttgtgaaacttaccccagagaactttatgttccccggatagcaagcaaaccaataattgttggtagttccaagttccggagcaagggaagattcccagttctttcctactatcatcaagataaggaggctgccatttgtcgatgtagtcagccactctctggattcagtgccaggtgcctggaggatgaacatttgcttcaagccattagtaaagccaatccagtcaatcgctatatgtacgtcatggataccaggccaaaactgaatgcaatggccaacagagcagctggaaaaggttatgaaaatgaagacaactattccaatattagatttcagtttgttggaattgaaaatattcatgtcatgaggtccagccttcagaaattattggaagtcaatggcactaaagggctttctgtcaatgatttctactccggtttggagagctcgggatggcttcgccatatcaaagctgttatggatgctgcaatcttcttggccaaagcaataacagttgaaaatgcaagtgtgttggtgcattgttccgatggttgggataggacttcccaggtttgttccctgggttctcttttattggattcctactacaggacaatcaaaggattcatggttttaatagaaaaggattggatctcttttggacataaattttcagagaggtgtggccagttggatggtgacccaaaggaagtctcaccagtgtttactcagttcttggaatgtgtgtggcatttgaccgaacagtttccacaagcctttgaattcagtgaagcatttcttcttcagatccatgagcatattcattcatgccagtttggaaacttccttggaaattgtcagaaggaaagagaagagctcaagttgaaggagaagacttattccctgtggccatttcttttggaagaccaaaagaagtacttaaatcctctctacagttccgaatctcacagatttacagttttggagccaaatacagtatctttcaattttaagttttggaggaacatgtaccatcaatttgatcgaacactgcatcctaggcagtctgtatttaatataattatgaatatgaatgagcaaaataaacaattagagaaagatattaaagacctagaatctaaaattaaacaacgcaaaaataagcaaacagatggcatcctcaccaaggaattgttacattcagttcatcctgaatcacctaacctcaaaacttccctgtgttttaaagagcagactctgctacccgtaaatgatgctcttcgaactatagagggcagcagcccggcagataatcgttatagtgaatatgcagaagagttttctaaatcagaacctgctgtggtcagcttagagtatggtgtggcaagaatgacttgttagactcatagagttttttctgcaatgattgcagtacaagaaaaggattattgtgaggatggtctgtaagcataaccaaaaggaatttgtctaataacaattttagggtttaacagtaggctaatagttgaaggaaggataataactacccttgtgagagaaataagtcattttaattgcatttccagcaaggaatgacattcagttctgtaagaaatgagtggtatttgatgtatttactcaaaacacaatttgcactgtacactagtgaattgacgtttatgatttatgttaattcagccaaacataaataaccttccttaagtacaatttaacttcaagaaaacaaaatttgacaacatagtttcttaataaatgatatggcatgtactttcaattatgtagctttgtaactatgaatatttacatattttgccttttagtgatatttaatgttaaagtgccatgaaaaatatttctaagaaagccttaaattcccagtggattctttacccttaagttttacagcctacaacaagattttttgttttgtttttcttctggtcagccttgttttgtttgtaaagaattgtgctctcattactgctgggggtgcatgctacaatacttctatataaacacttgtagaagtacactgttcacgtttagcctgccccacttttgtattcaaaattaatgaaactgaaggtttattctgatcataatttgtttagtgctacatttgataatttattatttacagcttagaatattgatttcttgaatacgtataagcacatttgactgtcttttatatatggattactgcattccattgattcttattttgtggttggctttatttctttcacaactgtgtaagtttaaagagctaaagctctaaaactgttctgagaaacaatgaatagtacatgtatatgtatatttttaaactgccttattgctcaatgagttgctgttcctggagtatctaactttcagtttactcaaaaacttttgggtaaataaaaaagggaagtacagatagtttaggttgtgcatggttgcatgaattttgaagtcatttctatgtggagcattatttttcttcttgttaaatatagaaaaaaaaagagattctagtacaaagttactgtttaacaaaagcaacataaactctgggaaagatttcattttgccatgttatatttactgtttattctgtgtactagtacatatctttaaattaccaaaaaacaagaaacaaaacataaaaaccccaaaactatcacttggaattagcaatatcacccaactggctttaaaattgaaaatttaaataacatggtggcatgaagtacaattcgagtattaggcaatttgcatagtgttcctcatgctactttctgttacacctctattatattagttttgaatataaacatctttttcagaccaaaaaaaactttattgtatgagagcttatcttatcctgtttatttttccaatgcttttctgtaatacattatgtaatttaaaaaatattcctttttaaacagcaacagaaatgcactataaaatatagtatgtgattaaccaatcctgcttccatatttaagcactgggaatggaaacttaatctctgtgactacaaagggaagtttttgtgccttggtgttccagtcactgattgtggttttagaatcttctgtggctgacttcttgtattcaactctggtttattatcttaatcttcaacttcagacatatatttgtgtgtttatatgctcacaggtggactgagaaatcagttacatcttaagtgacctacagggtatatgttggcaaaagcagactgtgtatatgtcttataaagttgaatttatgttcagtgtgtttggaagtgtatagcatgtaaattacttcatatatgatttaaaggtaattaaatgttcacattttactttgaatgtttttcttctggataaaacaaatggaatcaagttgtagttgttttttttttcttctcacctaggcaagtagacttgcccattacattaacataacagcataaggtttgaggagtttattttccaaaagtttgttgataaataatacctgtttcatacaaaaataatttccagaatatttaaaataggtatagtgggctaaaaggcccatcagatgtaggtaataatgtcattaagttttcattttgttcctgtcacttgcttatattacaatcactatttttttgtgcccttgccaacttgatggaaggcagggtccattgagtacaaacattcgaggtgaaatgtctctccaaaggcagatctggatgtaaatatgaggaagaaaataactggctgacaagaggataattttattgagggtgttttgaaaaggtcagctaggctagaagtagctcagggaatcttgagtaaagatgaagggaactcttttaaaacaaattcaatttatttggtcgggtagcagagcagggaggtggtgtcagtcaagcctgttttgaaacattttttgcagaaggtcagctttaaaatattgaaaaatttccagttgacatgctaagttggattaaatgctgatcatttataaaactatatagttgctgcaaaagtaattggggcttttgccattgaaagtgatgacaaaaaccgcaattacttttgcaccaacctaatactacagttgcagacttttattagtgacgctgatcttcattagtcaagttttagttattttgttggcttttccatgtagaattccaagtgacattaacatactttgattaattaaagaaaatttggagactgtttaagatatatgtctagatatcaatgtaaactataagctttaggaacttacatctagaagaaagcctggaatctagaataattatctcaaaaaaaagtatatataccattgtacttgatataagaaaatgtaaacatgaaaccttgacattttaataaacagtatttgtgctactctagttatttctaggaaagtaaaa

SEQ ID NO: 19338 - DNA, 2337 bp, Homo sapiens
  source 1..2337: mol_type = unassigned DNA
cagtaccggcctcctccagcagggggcgctgtgggatccgccgctgtccgggacgaaccagcaagccgctctcggtccacacacgctctgtctgcctgccccgagtcccccgggaggccgcggggtttggggaagtgtttctaggagacggcgctcaccggctgcacctgcgccgttgacgccaccggggccggcagacagacccgcggcgctggctggtggagggagttcccgcttgctctctgtcgctgtcaccgccctgtttctgtagccgtatggtacgcctgtgagaccggctgccggctgacgtctccttgcgatggagcatatccggacgaccaaggtcgaacaagtaaaattacttgaccgattcagtaccagcaacaagtcattaacaggaacactgtatcttacggctacacatctattatttatcgactctcatcaaaaagaaacctggatattacaccaccatattgcctcagtagagaaacttgctttgactacttctggatgcccccttgtgatacagtgcaagaacttcagaactgtgcatttcattgttcccagagaaagagattgccatgatatttacaactctttgctacaactgtcaaaacaagcaaaatatgaagatctctatgcattttcttataatcccaaacaaaatgattcagaacgactacaaggctggcagctcattgatctcgctgaggaatataagaggatgggagtgccaaactcacactggcagttgtctgatgccaaccgggactacaagatttgtgaaacttaccccagagaactttatgttccccggatagcaagcaaaccaataattgttggtagttccaagttccggagcaagggaagattcccagttctttcctactatcatcaagataaggaggctgccatttgtcgatgtagtcagccactctctggattcagtgccaggtgcctggaggatgaacatttgcttcaagccattagtaaagccaatccagtcaatcgctatatgtacgtcatggataccaggccaaaactgaatgcaatggccaacagagcagctggaaaaggttatgaaaatgaagacaactattccaatattagatttcagtttgttggaattgaaaatattcatgtcatgaggtccagccttcagaaattattggaagtcaatggcactaaagggctttctgtcaatgatttctactccggtttggagagctcgggatggcttcgccatatcaaagctgttatggatgctgcaatcttcttggccaaagcaataacagttgaaaatgcaagtgtgttggtgcattgttccgatggttgggataggacttcccaggtttgttccctgggttctcttttattggattcctactacaggacaatcaaaggattcatggttttaatagaaaaggattggatctcttttggacataaattttcagagaggtgtggccagttggatggtgacccaaaggaagtctcaccagtgtttactcagttcttggaatgtgtgtggcatttgaccgaacagtttccacaagcctttgaattcagtgaagcatttcttcttcagatccatgagcatattcattcatgccagtttggaaacttccttggaaattgtcagaaggaaagagaagagctcaagttgaaggagaagacttattccctgtggccatttcttttggaagaccaaaagaagtacttaaatcctctctacagttccgaatctcacagatttacagttttggagccaaatacagtatctttcaattttaagttttggaggaacatgtaccatcaatttgatcgaacactgcatcctaggcagtctgtatttaatataattatgaatatgaatgagcaaaataaacaattagagaaagatattaaagacctagaatctctaacctcttactcatccttcaagatcatcgtaggccaatgaatccttgaatttgtggtcaacaagaggtcttctgtaggctgaagtcagggctgagtggtctgcttgtgatctcctaggaattcaagtaaatccatgtacttcttgaacatagctcatagcagaggactgagccgtgaaaatgcttacatgcctgcctcctctgacacattataagctccctgaggatggggaccaaggcttatttcatcgttgtatcctcagcatctgaccaatagcaggcactaagtcattactgaaaagaactgagcatgacacccaagggaacagatgaggtggaggtaggacaaggaagactgaggagtctccatggaaccttccagggagagacagtcaataaactctcatcagtc

SEQ ID NO: 19339 - DNA, 1963 bp, Homo sapiens
  source 1..1963: mol_type = unassigned DNA
cagtaccggcctcctccagcagggggcgctgtgggatccgccgctgtccgggacgaaccagcaagccgctctcggtccacacacgctctgtctgcctgccccgagtcccccgggaggccgcggggtttggggaagtgtttctaggagacggcgctcaccggctgcacctgcgccgttgacgccaccggggccggcagacagacccgcggcgctggctggtggagggagttcccgcttgctctctgtcgctgtcaccgccctgtttctgtagccgtatggtacgcctgtgagaccggctgccggctgacgtctccttgcgatggagcatatccggacgaccaaggtcgaacaagtaaaattacttgaccgattcagtaccagcaacaagtcattaacaggaacactgtatcttacggctacacatctattatttatcgactctcatcaaaaagaaacctggatattacaccaccatattgcctcagtagagaaacttgctttgactacttctggatgcccccttgtgatacagtgcaagaacttcagaactgtgcatttcattgttcccagagaaagagattgccatgatatttacaactctttgctacaactgtcaaaacaagcaaaatatgaagatctctatgcattttcttataatcccaaacaaaatgattcagaacgactacaaggctggcagctcattgatctcgctgaggaatataagaggatgggagtgccaaactcacactggcagttgtctgatgccaaccgggactacaagatttgtgaaacttaccccagagaactttatgttccccggatagcaagcaaaccaataattgttggtagttccaagttccggagcaagggaagattcccagttctttcctactatcatcaagataaggaggctgccatttgtcgatgtagtcagccactctctggattcagtgccaggtgcctggaggatgaacatttgcttcaagccattagtaaagccaatccagtcaatcgctatatgtacgtcatggataccaggccaaaactgaatgcaatggccaacagagcagctggaaaaggttatgaaaatgaagacaactattccaatattagatttcagtttgttggaattgaaaatattcatgtcatgaggtccagccttcagaaattattggaagtcaatggcactaaagggctttctgtcaatgatttctactccggtttggagagctcgggatggcttcgccatatcaaagctgttatggatgctgcaatcttcttggccaaagcaataacagttgaaaatgcaagtgtgttggtgcattgttccgatggttgggataggacttcccaggtttgttccctgggttctcttttattggattcctactacaggacaatcaaaggattcatggttttaatagaaaaggattggatctcttttggacataaattttcagagaggtgtggccagttggatggtgacccaaaggaagtctcaccagtgtttactcagttcttggaatgtgtgtggcatttgaccgaacagtttccacaagcctttgaattcagtgaagcatttcttcttcagatccatgagcatattcattcatgccagtttggaaacttccttggaaattgtcagaaggaaagagaagagctcaagttgaaggagaagacttattccctgtggccatttcttttggaagaccaaaagaagtacttaaatcctctctacagttccgaatctcacagatttacagttttggagccaaatacagtatctttcaattttaagttttggaggaacatgtaccatcaatttgatcgaacactgcatcctaggcagtctgtatttaatataattatgaatatgaatgagcaaaataaacaattagagaaagatattaaagacctagaatcttttacaagttttgctgctgcaagagtgatacaaggtcag

SEQ ID NO: 19340 - DNA, 3850 bp, Homo sapiens
  source 1..3850: mol_type = unassigned DNA
gcgcccgcccgggaccctgcagacgtgggccagccatggagcacatccgtacgcccaaggttgaaaatgtccgcttggtagatcgagtgtctcctaaaaaagcagctctaggtactttgtatttgacggctacccatgtcatattcgtggaaaattcacctgacccaagaaaagaaacatggattcttcacagtcagatttccaccattgagaaacaggcaacaaccgctaccggatgccctctgctgattcgctgcaagaactttcagataatacagctcatcatacctcaggaaagagattgccacgacgtgtacatctccctgatacgccttgcaaggccagtgaaatatgaggagttatactgcttttcattcaaccccatgctggataaagaagaaagagagcaaggctgggtgctgatcgatcttagtgaagaatacacgcggatgggcctccctaatcattactggcagctcagcgatgtgaatagagactacagagtctgtgactcttatcctactgaactgtacgttcccaaatcggccacggcacacatcatagtggggagttccaaattccggagtagacggcgatttcctgtcctttcttactattataaagataaccacgcctccatctgccggagcagccagcccctgtccggcttcagtgcccggtgcctagaggacgagcagatgctccaggccattaggaaagccaatccaggaagtgacttcgtttatgtcgttgacacccggcctaaacttaatgcaatggcaaatcgtgctgcagggaaaggctatgagaatgaagacaattattccaatatcaagtttcagtttatcgggatagagaacatccatgtcatgaggaacagtctgcagaaaatgctggaagtgtgtgaacttaaatctccctccatgagtgatttcctgtggggtctggagaactctggctggttaaggcacattaaagccataatggatgcaggaatcttcattgcaaaggcagtgtcagaggaaggggcaagtgtgcttgttcactgttctgatggctgggacaggaccgctcaggtgtgctcggtggcaagcctgctgctggaccctcactaccggactctgaagggcttcatggtattaattgaaaaggactggatttcctttggtcataagtttaatcaccgatatggcaatctagatggtgacccaaaagaaatctctccagttattgaccagttcattgagtgtgtttggcagttaatggaacaatttccctgtgcctttgagttcaatgagaggtttttgattcacattcaacatcacatttattcctgccagtttggaaacttcctatgtaacagccaaaaggagagacgagaactcaagattcaagaaagaacatactcattatgggctcacctgtggaagaatcgggccgactacctgaatcctctgtttagagctgatcacagccagactcagggaacccttcatctccctacaacaccatgtaacttcatgtacaagttttggagtggaatgtataaccgctttgaaaaggggatgcagccccgacagtcagttacagattacctaatggcagtgaaggaagaaactcagcagctagaggaagaactagaggccctggaagaaaggctggaaaaaattcaaaaggtccagttaaattgcactaaggtgaagagtaagcaaagtgagcccagcaagcactcagggttttctacctcagacaacagcatagccaacactccccaggattacagtgggaatatgaaatcatttccatcccggagcccttcacaaggcgatgaagattctgctctgattctaacccaagacaatctgaaaagttcagatccagatctgtcagccaacagtgaccaagagtccggggtggaggatttgagctgtcggtctccaagtggtggtgagcatgcaccgagtgaagatagtggcaaggaccgggattctgatgaagccgtgtttctcactgcctgaagtttccctttggagttccaaagtaaaggacacataagcaacacttccaaaaacaagggaacaaggtggtttattgtaaaaacaggaaatggtgcatgtcattgagaactactttaatgcagctatgaaaagggaaaaaagtgcccagttcttgatttcttagatactgaagaggacgtagtcatttcatttatcaaatataaggaaaattattcaccattttgaagctcaccctagactatgaaaattatattcactgcagagcaattacttctgtcattacctgaagtgatcagtatctatcttccttgtcatagcatgcatctctcaaaaagcctccactcctttccctcacatctgtgatcatcatgattcttttagttcacttctagatgcatattttgtgttttctaaagcatctgacattatcctcctttccgaccctcttatacatatttctaaaaacaggcacattggtgagatgcaccctttttagttaatagatgcattcctaaggagcttttaattgcttatctttcaggcataatcatcactttaacttttccttggagcatatattttgaattgtgagaataattttgttgcttttctctgagatctatagtctgtttctcctcattatttaaaaatgctaaaccttgtatctcactttttctctaacactgatttaatagctaacgaggtagaagcaacattcattctcctggtcttacatatgaatttaagtatcagctttcttgtaataaccttttattactgttctagagactacactaccgacagtgtgggccagccaccagcctgatctcaaagtatcacattataaagttagtagataaaacatctgtgagtgaaaatccagtttcaagaaccagagaattgggttgtcatgtctgtttaatgaagggaataggttttgtaatctatcattttagaaattatgtaactggctaatatggtttaattaaccttagtaacatctcatgaccactgactgctgaaagttctgaaaagaatttttgttttgttacactgcacatttaagggagagtccctcccctatcttatgagttaaaaaagacttcactaggtgacctaaattaaacttagtggggaaaagtggccatgtttggacataaataaatggtattcacactgtatggttttaatatattagtacattctagaatgtaaaaggattaaactttacaatttagatcaatattttgaatatgtgaaaggattaatttaaactttacaatttacatcaatattttgaatatctgattttttttaatgggagaattattacatttcgctgaaatgaggacgagggcaagaaagcaacattgctgatctctctagtatgaaagatttggagggagtgttgcaatatatataaatgaaaacatttaattgtgttcatcatatttaaaaatatagaatatattagagaactgtgatttaaaagtactgttaatgtaaaaaataaagcaagtgtaattaattctttcagaatataaaatttgggcattctctgctgagcagttcccaaattaagtacaaggaatgtttattcattttctgcaatatactatatgtaatagggaataccttgctaaaataaaacttaggatatagtggtaatggctttcacatttttataacataacataactcacttcacaaccttcttggagctgtccactcttagaaactctgttgcctaatattgaggatgtggctttaatttcttccgtttgacagtgtatgtctataaaaacaataaacattttttaaaaaatgacaaa

SEQ ID NO: 19341 - DNA, 1455 bp, Homo sapiens
  source 1..1455: mol_type = unassigned DNA
attctttgtgactctttgcggatcgtgtgttttctaggcagtgtcagaggaaggggcaagtgtgcttgttcactgttctgatggctgggacaggaccgctcaggtgtgctcggtggcaagcctgctgctggaccctcactaccggactctgaagggcttcatgatatggcaatctagatggtgacccaaaagaaatctctccagttattgaccagttcattgagtgtgtttggcagttaatggaacaatttccctgtgcctttgagttcaatgagaggtttttgattcacattcaacatcacatttattcctgccagtttggaaacttcctatgtaacagccaaaaggagagacgagaactcaagattcaagaaagaacatactcattatgggctcacctgtggaagaatcgggccgactacctgaatcctctgtttagagctgatcacagccagactcagggaacccttcatctccctacaacaccatgtaacttcatgtacaagttttggagtggaatgtataaccgctttgaaaaggggatgcagccccgacagtcagttacagattacctaatggcagtgaaggaagaaactcagcagctagaggaagaactagaggccctggaagaaaggctggaaaaaattcaaaaggtccagttaaattgcactaaggtgaagagtaagcaaagtgagcccagcaagcactcagggttttctacctcagacaacagcatagccaacactccccaggattacagtgggaatatgaaatcatttccatcccggagcccttcacaaggcgatgaagattctgctctgattctaacccaagacaatctgaaaagttcagatccagatctgtcagccaacagtgaccaagagtccggggtggaggatttgagctgtcggtctccaagtggtggtgagcatgcaccgagtgaagatagtggcaaggaccgggattctgatgaagccgtgtttctcactgcctgaagtttccctttggagttccaaagtaaaggacacataagcaacacttccaaaaacaagggaacaaggtggtttattgtaaaaacaggaaatggtgcatgtcattgagaactactttaatgcagctatgaaaagggaaaaaagtgcccagttcttgatttcttagatactgaagaggacgtagtcatttcatttatcaaatataaggaaaattattcaccattttgaagctcaccctagactatgaaaattatattcactgcagagcaattacttctgtcattacctgaagtgatcagtatctatcttccttgtcatagcatgcatctctcaaaaagcctccactcctttccctcacatctgtgatcatcatgattcttttagttcacttctagatgcatattttgtgttttctaaagcatctgacattatcctcctttccgaccctcttatacatatttct

SEQ ID NO: 19342 - DNA, 2158 bp, Homo sapiens
  source 1..2158: mol_type = unassigned DNA
gcgcccgcccgggaccctgcagacgtgggccagccatggagcacatccgtacgcccaaggttgaaaatgtccgcttggtagatcgagtgtctcctaaaaaagcagctctaggtactttgtatttgacggctacccatgtcatattcgtggaaaattcacctgacccaagaaaagaaacatggattcttcacagtcagatttccaccattgagaaacaggcaacaaccgctaccggatgccctctgctgattcgctgcaagaactttcagataatacagctcatcatacctcaggaaagagattgccacgacgtgtacatctccctgatacgccttgcaaggccagtgaaatatgaggagttatactgcttttcattcaaccccatgctggataaagaagaaagagagcaaggctgggtgctgatcgatcttagtgaagaatacacgcggatgggcctccctaatcattactggcagctcagcgatgtgaatagagactacagagtctgtgactcttatcctactgaactgtacgttcccaaatcggccacggcacacatcatagtggggagttccaaattccggagtagacggcgatttcctgtcctttcttactattataaagataaccacgcctccatctgccggagcagccagcccctgtccggcttcagtgcccggtgcctagaggacgagcagatgctccaggccattaggaaagccaatccaggaagtgacttcgtttatgtcgttgacacccggcctaaacttaatgcaatggcaaatcgtgctgcagggaaaggctatgagaatgaagacaattattccaatatcaagtttcagtttatcgggatagagaacatccatgtcatgaggaacagtctgcagaaaatgctggaagtgtgtgaacttaaatctccctccatgagtgatttcctgtggggtctggagaactctggctggttaaggcacattaaagccataatggatgcaggaatcttcattgcaaaggcagtgtcagaggaaggggcaagtgtgcttgttcactgttctgatggctgggacaggaccgctcaggtgtgctcggtggcaagcctgctgctggaccctcactaccggactctgaagggcttcatggtattaattgaaaaggactggatttcctttggtcataagtttaatcaccgatatggcaatctagatggtgacccaaaagaaatctctccagttattgaccagttcattgagtgtgtttggcagttaatggaacaatttccctgtgcctttgagttcaatgagaggtttttgattcacattcaacatcacatttattcctgccagtttggaaacttcctatgtaacagccaaaaggagagacgagaactcaagattcaagaaagaacatactcattatgggctcacctgtggaagaatcgggccgactacctgaatcctctgtttagagctgatcacagccagactcagggaacccttcatctccctacaacaccatgtaacttcatgtacaagttttggagtggaatgtataaccgctttgaaaaggggatgcagccccgacagtcagttacagattacctaatggcagtgaaggaagaaactcagcagctagaggaagaactagaggccctggaagaagtaagacatacttgctttgttaatctattttctgtgcttatttcttgaagagcaaggcttcatgaaagcctcttaagattcagtgcaatacaaatatttcacatttttagtcagtagaacacctgaaacacaaccccatccaggtcaggactcagataaccgaagcccaaacctaggcatttaatgcatttcacacatctggtttgtggctcagttccacaaatttttggttgttccttattttaggtcaacttgtttggttactgttatttgagagtagtaaaattaatttttttctggaaagtgtgaaaaagtaacagaataaaatcaaatatatgtacttgtaaaactctttccccacttttagaaattatgttaactatgatattaatctataattggtaaaggggagactgactgtaaagtcttatcttttggcttctatgaacttccctgtacttggacagggaggttataataaaatgcttttcctaattggataa

SEQ ID NO: 19343 - DNA, 2228 bp, Homo sapiens
  source 1..2228: mol_type = unassigned DNA
cttgacctattagttcctaaggtagaaaacgtgaaattggtggatcgttatgtgagtaagaaaccagctaatgggattctttatcttactgcaacccacctgatctatgtggaggcttcaggtgcagcccggaaagaaacatggattgcactccatcacattgccactgtggagaagttacccatcactagcctgggttgtcccctgaccctccgctgcaagaatttccgggtggcccactttgttttagattctgaccttgtgtgccatgaggtttatatttcactgctcaagctttctcagccagcattacctgaagatctttatgctttttcttataatcccaaatcctcaaaagagatgagggaaagtggatggaaactgattgacccaatatcagactttgggcgtatgggaatacccaacagaaactggaccataacagatgccaacattcgcttcagattcatgggcattgagaacatccatgtaatgcggagcagtctgcagaaactcttggaagtttgtgaattgaaaactccaacaatgagtgaatttcttagcggcctggagagctcagggtggttaagacacattaaagctattatggatgctggaattttcattacaaaggcagtgaaggtagaaaaggccagtgtcttagtccattgttctgatggatgggaccgcacagcacaagtctgctcagtggctagcatcctcctagatccattttataggacattcaaaggactcatgatcttgatagagaaggaatggatatccatgggccacaagttttcccaaaggtgtggccacctcgatggggactctaaagaagtgtcccctatcttcacccagttcctagactgtatctggcaattaatggaacagtttccctgtgcctttgagtttaatgaaaacttcctgctggagattcatgaccatgttttctcctgccagtttggaaacttccttggtaactgccagaaggatcgggaagatctaagagtctatgagaaaacacattctgtgtggcctttcttggttcagaggaaaccagacttcaggaaccctctctataaaggcttcactatgtatggggtactcaatcctagtactgtgccctacaacattcagttctggtgtgggatgtataaccgctttgacaaagggctgcagcccaagcagagtatgctagagagcctcctggaaattaagaaacagagagcaatgctggagacagatgtgcatgaactagaaaagaaactaaaagtccgtgatgagccaccagaagagatctgtacctgctctcaattaggaaacatattatcccagcatctgggaagtcctttgaccaatcctcttggctttatgggtatcaatggagacctgaataccctgatggagaatggcaccctatccagggaaggaggcctccgagctcagatggatcaagtaaaaagccagggtgcagacctccaccataactgttgtgagattgtgggcagccttagggccataaatatctctggggatgtgggcatctctgaggccatgggcatctctggagacatgtgcacctttgaggctacgggcttctccaaagacttaggaatctgtggggccatggacatctctgaggccactggcatctctggaaacttgggtatttctgaggccaggggtttctctggggacatgggcatcttgggggacacaggcatctccaaggccagcaccaaggaggcagactactccaagcatcagtgagttagttactcatcttccatgctaggtatacctacagcagctacaatgattcttgtcccagagagggctatgctgcttttccaattggtttaagtgggtgaagccagggcacccctctccccacttaagtctggaagggaattactttactgattaagtgaccaatatgttcatattaagcagtacagagtgtaggcaagagaaagaatatgttattgttctaaaatgggatttaactatagaaatgttgcctctcagctgagacacatattaagctggttctactgtctgttttccttaatgatcgacctgccctattttctatcctcactgcagtaatgtgaaagtgaagtggaaatattgtcacaatggtcaataatgacccttttgagggtatggagagatggtatacagcaggtaactgtgaattgcagaataaattgaaagaaaatttt

SEQ ID NO: 19344 - DNA, 2639 bp, Homo sapiens
  source 1..2639: mol_type = unassigned DNA
ggcggctagaccggtggcggcggcatctggagtagcactgagatcttccggtggcgggaactgcagtcatggatcatattacggtacccaaggtagaaaacgtgaaattggtggatcgttatgtgagtaagaaaccagctaatgggattctttatcttactgcaacccacctgatctatgtggaggcttcaggtgcagcccggaaagaaacatggattgcactccatcacattgccactgtggagaagttacccatcactagcctgggttgtcccctgaccctccgctgcaagaatttccgggtggcccactttgttttagattctgaccttgtgtgccatgaggtttatatttcactgctcaagctttctcagccagcattacctgaagatctttatgctttttcttataatcccaaatcctcaaaagagatgagggaaagtggatggaaactgattgacccaatatcagactttgggcgtatgggaatacccaacagaaactggaccataacagatgccaacagaaactatgagatatgcagcacctaccctcctgaaatagtggttcctaaatctgttaccttgggaacggtggttggaagttcaaagttcagaagtaaagaacgtgtccctgtgctctcctacctctacaaagagaacaatgctgccatttgccgctgtagccagcctctctctggattttacactcgctgtgtagatgatgagctcttgttggaggccattagccaaacaaacccagggagccagtttatgtatgttgtagacacaagaccaaagttgaatgccatggccaaccgagcagctgggaaggggtatgaaaatgaagacaactatgccaacattcgcttcagattcatgggcattgagaacatccatgtaatgcggagcagtctgcagaaactcttggaagtttgtgaattgaaaactccaacaatgagtgaatttcttagcggcctggagagctcagggtggttaagacacattaaagctattatggatgctggaattttcattacaaaggcagtgaaggtagaaaaggccagtgtcttagtccattgttctgatggatgggaccgcacagcacaagtctgctcagtggctagcatcctcctagatccattttataggacattcaaaggactcatgatcttgatagagaaggaatggatatccatgggccacaagttttcccaaaggtgtggccacctcgatggggactctaaagaagtgtcccctatcttcacccagttcctagactgtatctggcaattaatggaacagtttccctgtgcctttgagtttaatgaaaacttcctgctggagattcatgaccatgttttctcctgccagtttggaaacttccttggtaactgccagaaggatcgggaagatctaagagtctatgagaaaacacattctgtgtggcctttcttggttcagaggaaaccagacttcaggaaccctctctataaaggcttcactatgtatggggtactcaatcctagtactgtgccctacaacattcagttctggtgtgggatgtataaccgctttgacaaagggctgcagcccaagcagagtatgctagagagcctcctggaaattaagaaacagagagcaatgctggagacagatgtgcatgaactagaaaagaaactaaaagtccgtgatgagccaccagaagagatctgtacctgctctcaattaggaaacatattatcccagcatctgggaagtcctttgaccaatcctcttggctttatgggtatcaatggagacctgaataccctgatggagaatggcaccctatccagggaaggaggcctccgagctcagatggatcaagtaaaaagccagggtgcagacctccaccataactgttgtgagattgtgggcagccttagggccataaatatctctggggatgtgggcatctctgaggccatgggcatctctggagacatgtgcacctttgaggctacgggcttctccaaagacttaggaatctgtggggccatggacatctctgaggccactggcatctctggaaacttgggtatttctgaggccaggggtttctctggggacatgggcatcttgggggacacaggcatctccaaggccagcaccaaggaggcagactactccaagcatcagtgagttagttactcatcttccatgctaggtatacctacagcagctacaatgattcttgtcccagagagggctatgctgcttttccaattggtttaagtgggtgaagccagggcacccctctccccacttaagtctggaagggaattactttactgattaagtgaccaatatgttcatattaagcagtacagagtgtaggcaagagaaagaatatgttattgttctaaaatgggatttaactatagaaatgttgcctctcagctgagacacatattaagctggttctactgtctgttttccttaatgatcgacctgccctattttctatcctcactgcagtaatgtgaaagtgaagtggaaatattgtcacaatggtcaataatgacccttttgagggtatggagagatggtatacagcaggtaactgtgaattgcagaataaattgaaagaaaatttta

SEQ ID NO: 19345 - DNA, 1981 bp, Homo sapiens
  source 1..1981: mol_type = unassigned DNA
agattctgaccttgtgtgccatgaggtttatatttcactgctcaagctttctcagccagcattacctgaagatctttatgctttttcttataatcccaaatcctcaaaagagatgagggaaagtggatggaaactgattgacccaatatcagactttgggcgtatgggaatacccaacagaaactggaccataacagatgccaacattcgcttcagattcatgggcattgagaacatccatgtaatgcggagcagtctgcagaaactcttggaagtttgtgaattgaaaactccaacaatgagtgaatttcttagcggcctggagagctcagggtggttaagacacattaaagctattatggatgctggaattttcattacaaaggcagtgaaggtagaaaaggccagtgtcttagtccattgttctgatggatgggaccgcacagcacaagtctgctcagtggctagcatcctcctagatccattttataggacattcaaaggactcatgatcttgatagagaaggaatggatatccatgggccacaagttttcccaaaggtgtggccacctcgatggggactctaaagaagtgtcccctatcttcacccagttcctagactgtatctggcaattaatggaacagtttccctgtgcctttgagtttaatgaaaacttcctgctggagattcatgaccatgttttctcctgccagtttggaaacttccttggtaactgccagaaggatcgggaagatctaagagtctatgagaaaacacattctgtgtggcctttcttggttcagaggaaaccagacttcaggaaccctctctataaaggcttcactatgtatggggtactcaatcctagtactgtgccctacaacattcagttctggtgtgggatgtataaccgctttgacaaagggctgcagcccaagcagagtatgctagagagcctcctggaaattaagaaacagagagcaatgctggagacagatgtgcatgaactagaaaagaaactaaaagtccgtgatgagccaccagaagagatctgtacctgctctcaattaggaaacatattatcccagcatctgggaagtcctttgaccaatcctcttggctttatgggtatcaatggagacctgaataccctgatggagaatggcaccctatccagggaaggaggcctccgagctcagatggatcaagtaaaaagccagggtgcagacctccaccataactgttgtgagattgtgggcagccttagggccataaatatctctggggatgtgggcatctctgaggccatgggcatctctggagacatgtgcacctttgaggctacgggcttctccaaagacttaggaatctgtggggccatggacatctctgaggccactggcatctctggaaacttgggtatttctgaggccaggggtttctctggggacatgggcatcttgggggacacaggcatctccaaggccagcaccaaggaggcagactactccaagcatcagtgagttagttactcatcttccatgctaggtatacctacagcagctacaatgattcttgtcccagagagggctatgctgcttttccaattggtttaagtgggtgaagccagggcacccctctccccacttaagtctggaagggaattactttactgattaagtgaccaatatgttcatattaagcagtacagagtgtaggcaagagaaagaatatgttattgttctaaaatgggatttaactatagaaatgttgcctctcagctgagacacatattaagctggttctactgtctgttttccttaatgatcgacctgccctattttctatcctcactgcagtaatgtgaaagtgaagtggaaatattgtcacaatggtcaataatgacccttttgagggtatggagagatggtatacagcaggtaactgtgaattgcagaataaattgaaagaaaatttta

SEQ ID NO: 19346 - DNA, 2200 bp, Homo sapiens
  source 1..2200: mol_type = unassigned DNA
agaaacccgggttgaggcaggaggcggctagaccggtggcggcggcatctggagtagcactgagatcttccggtggcgggaactgcagtcatggatcatattacggtacccaaggtagaaaacgtgaaattggtggatcgttatgtgagtaagaaaccagctaatgggattctttatcttactgcaacccacctgatctatgtggaggcttcaggtgcagcccggaaagaaacatggattgcactccatcacattgccactgtggagaagttacccatcactagcctgggttgtcccctgaccctccgctgcaagaatttccgggtggcccactttgttttagattctgaccttgtgtgccatgaggtttatatttcactgctcaagctttctcagccagcattacctgaagatctttatgctttttcttataatcccaaatcctcaaaagagatgagggaaagtggatggaaactgattgacccaatatcagactttgggcgtatgggaatacccaacagaaactggaccataacagatgccaacagaaactatgagatatgcagcacctaccctcctgaaatagtggttcctaaatctgttaccttgggaacggtggttggaagttcaaagttcagaagtaaagaacgtgtccctgtgctctcctacctctacaaagagaacaatgctgccatttgccgctgtagccagcctctctctggattttacactcgctgtgtagatgatgagctcttgttggaggccattagccaaacaaacccagggagccagtttatgtatgttgtagacacaagaccaaagttgaatgccatggccaaccgagcagctgggaaggggtatgaaaatgaagacaactatgccaacattcgcttcagattcatgggcattgagaacatccatgtaatgcggagcagtctgcagaaactcttggaagtttgtgaattgaaaactccaacaatgagtgaatttcttagcggcctggagagctcagggtggttaagacacattaaagctattatggatgctggaattttcattacaaaggcagtgaaggtagaaaaggccagtgtcttagtccattgttctgatggatgggaccgcacagcacaagtctgctcagtggctagcatcctcctagatccattttataggacattcaaaggactcatgatctggcatttccttgtgctcataatgagaatagttctccaattagccaagatgaacctcatggacatcaccaagatcttctccctcctgcagcccgacaaggaggaggaggacactgacacagaggagaagcaggctctcaatcaagcagtgtatgacaacgactcctatactttggaccagcttttgcgccaggagcgttacaaacgtttcatcaacagcaggagtggctggggtgttcctgggacacccttgcgcttggctgcttcttatggccacttgagctgtttgcaagtcctcttagcccatggtgctgatgttgacagcttggatgtcaaggcacagacgccacttttcactgctgtcagtcatggccatctggactgtgtacgtgtgcttttggaagctggtgcctctcctggtggtagcatctacaacaactgttctcccgtgctcacagctgcccgtgatggtgctgttgctatcctgcaggagctcctagaccatggtgcagaggccaacgtcaaagctaaactaccagtctgggcatcaaacatagcttcatgttctggccccctctatttggccgcagtctacgggcacctggactgtttccgcctgcttttgctccacggggcagaccctgactacaactgcactgaccagggcctattggctcgtgtcccaagaccccgcaccctccttgaaatctgcctccatcataattgtgagccagagtatatccagctgttaatcgattttggtgctaatatctaccttccatctctctcccttgacctgacctcacaagatgataaaggcattgcattgctgctacaggcccgagccactccacggtcacttctatcacaggtccgtttagtcgtccgcagagccttgtgccaggctggccagccacaagccatcaaccagctggatattcctcccatgttgattagctacctaaaacaccaactgtaatcttgcagtctccccaggaacttatgat

SEQ ID NO: 19347 - DNA, 7472 bp, Homo sapiens
  source 1..7472: mol_type = unassigned DNA
gtcttccgagtttcgagacctgctgcttccgcccggagttgttgtgggctccagcagcgagtagccacttccgctaggagtccctagcggccagggcgtggaagcggattctgaggcggctttctcctactgccctccgcttgccaacgcgggacccggagcccaacggcagcggcggtccttgggcctgtggagaggggttctctgtggccgagtcctaggcctggtgaaccgcgcggtgcgggagaggcgcttgggcctcgtccagccccagcccctgtctccccgcggccggtgccggcggctgtaggcctcgccgcgcccacccagcctggggcgggcccagcctcaccgcccggcccgccccgccccacgggccagccccgcgccgggtgtttccgctacttccctgcggcggggtaaccgcctcgcacctaccgggctcggttccctggctccggccgcgggggagcatggagtttgcggagctgattaagaccccgcgggtggacaatgtggtgctgcaccggcctttctacccggctgtcgagggcaccctgtgcctgacgggccaccacttgatcctgtcctcccggcaggacaatacggaggagctgtggctcctccattcaaacatcgacgccatcgacaagcgatttgtaggatcactgggtaccatcatcataaaatgtaaagattttcgaattattcagttggatattcctggaatggaggaatgcttgaatatagccagttccattgaggcattgtctactctggactccatcactctgatgtaccctttcttttaccgtcctatgtttgaagtgatagaagatggctggcattccttccttcctgagcaagaatttgaactctattcttcagctaccagtgaatggaggctaagctatgtcaataaggaatttgctgtctgtccctcttacccaccaattgtcacagtgcccaaatccatcgatgatgaagctcttcggaaggtagctacatttcgacatggagggcgcttcccagtactaagctattaccacaaaaaaaatgggatggtaattatgcgaagtggtcagccactcactggtacaaacgggaggaggtgcaaggaggacgagaagctgataaatgctaccctcagggctggaaagcgtggctacatcattgacacccgatccctgaacgtggctcagcaaactagagccaaaggaggtggctttgaacaagaagctcattatcctcagtggaggcgaattcataagtccattgagaggtatcacattcttcaggagagcttaatcaaacttgtggaagcttgtaatgaccaaacacataacatggaccgatggctcagtaaattggaggcctctaactggctgactcacatcaaagagattctgacaactgcctgcctagcggctcagtgcatcgacagggaaggagcatcaatattgattcacggaacagaaggaactgattccacactccaggtgacctccttggcccagatcatcttagagccaagaagcaggaccattcgtggttttgaggccctgattgaaagagagtggctgcaggctggtcacccattccagcagcgctgtgcacagtcagcctactgtaacaccaagcagaagtgggaggctcctgtatttcttctcttcttggactgcgtgtggcagatccttcgtcagtttccctgttcttttgagtttaatgagaatttcctcatcatgctctttgagcatgcttatgcctcacagtttggaacatttctgggcaacaatgaaagtgaaagatgtaagttgaagctacagcagaagacgatgtctttgtggtcctgggttaatcagcccagtgagctgagtaaattcaccaatcccctctttgaagccaacaaccttgtcatctggccttcagttgctccgcagagtcttccactgtgggaaggtattttcctacgttggaatagatcctctaagtatttggatgaagcatatgaagaaatggttaacatcattgaatataataaagaattacaagcaaaagtcaatatccttcgaaggcagttggcagaactggaaacagaggacgggatgcaggagagtccctgaaaggtctcctcgcacccttcgcaaggaccttcttgggcctgtgtccgccgttctctccttgtgcccttcagttcacttttacacggtagccttgaagtgaaggctttagatgtgggacccccctaatgtaatggatttctcaatactgtatgaataatgaaacttactatcataaaccatgtttcatgtggcctgttagggcctgtcactttgggagccggaaggaggtgctagtcattttatttttacgtgaaatagatgacctatttaatgccatttgtgtttcatgccattttatccaaagctttttctctgtgtccactctccaaacagcattctagagcagtcaaggagacagctaatctctctagggactatttggtggtttaaaaaaagggtcagacttttaaacactctgaccatagaaatgtttttcaaaatggcaacaatggataaaccaaggattttgtgtttaacaatccatttccagtgtcttcgccacataaaatagccattttctttaaaatagttttggactaacgaagctgaaatctattctcattcttgtttgtcaagaaaggaaaatctgttattcaaggtaaattatttctacaagggcaacaggtatggtcctccgatatttacattaagaagagttaaatttattttaacgtagacactaaaagtatgtgcaatatacaattaaagtaggaatttgttactgattgagaattgttactggtgaattggttttcaggttttgagcatacatatacaatgtgtttcaaatgctgcttgtaaaattaaaccatcatctagaatagagttaatttattataatcaagctacaaataggttttcttaaaccagagatgcactgcccttgtctaaagttcttattgcactggtttatatgtgtatgtgtgttttattgtgtgtttttttaatttgtaagtattctaagagtttcctaatactaaggttaaaattttcatgttgacctgagccttttgcaaatttgctttggctctattgatttgtccattatgtgttaggcaaatataacttaagtggagggggaagtttatgaatataatatagctctgtgttttaaacctcagaaacagatttgagtgtttcagtattatagaaacagtgatgactattcatgctctgctagtctatgcctgcaactccaaatgtttgtggttcagtatttcccacctacatttctgtttggtgacattgctcattttaacaaatatgaccgagtctagtttttctttaaaaggatagtttatgagtaatctttaaaaccatttccataccatctgtatataaccatttcggtagagaacacactacactgaaccctgctttagagctgtgtgttgagctaaaaatataattttttaaaaattgactagcaaaatctatggccacactgagaagcctttgaaaatggcaaatacttttcatcaccaattgcccaattcatctttcttctgcttcctcagccttgtagcaaaggctacacagcagcccacagtccacagtctttttgggaaaattggcctgccaccttctttaagctcagtttatttttgacttactttctttgctgtagttatgaaccttggggcattaaaatcccatggcaaggagcataagagatgttctcgtagctctgcgttgtgtgaaatgtccatcttagttttgttaaaaaaaaaaaaaaaaaaaggaaacagcctcacttttttgtgctccctcagaattgcttgctatgtctgttaatacagctgagctttttgttttcttctctttttgtctcaagattgtatatgaaggaggcttttcttctcagctaacaggcatataaggaaaaccatctagagagttttctttagaagtgactcccattagcctggtgtggtggtgtgtgcctatagtcccagccactaggaaagctgaggcagaaggatcccttgagcctaggaggttgaggctgcagtgagctatgatcgcatcagtccactccagcctgagcaacagagcgagaccctgtgtctaagtaaagaaaaagccagaagtgactcccactgcttctgttgatcggccatagggcttccatgggtggaaacttgtgagggagtttgtattaggtctggtcatggagggatgatgtaccatcaaggtagacccatcttcctgatgcacatttgctgtgcgagccagagtacagtcataacacggtattcgcatttcgttttctctgtctcactgagacaacaatctatactgttttggcaagtttgcattttagtattaatttataattagggattgttcaaacttcagatctgtttacaggttgtaaaaataaacttcggtatcagtgcatctacagaagtgttatttggtaatccaaatattagagttttcccaaatccaaaaacggtcagaaataagtccattatcaatataatttgaagaagatttttagtagtactgtgaagttcgtgcttacctggatgagaagaataaatgacacggatacactcctgagaagacactcgttaaacattgcatcggagagctgcctttgataaatgtgctgttaaacacttgaatgaagagaatggtggcagaatgagtgagcaagcagattgccccagaggggccggtaataatcacgtgagggataatcagattcctgcgtattcagcatcttctctattcatgtggagtgaaagctggtttttatacaggagatacgtaaagtaggccccacaaataatatttttaaaatacaaaggatcaccacaatcctctattgaacatataaggatcctcagatttaaataagtactttttttttttttaatcagaagaacattgttgtttgattatatgtttttaaaaacctgaagcttttttggtggcaggacctttcaataaatatttatttggtcaaaattttttattttgattttattaaatgggaagaaagcaagcagaaatagtaaaattcagtaggtttaaaacaatctataaatgtattttatttccaagaaaacttagggtctcaaagcaagattttaaagtgatttttgagaagacttgggggggacaataatagacattcatgtcagatcccatatgggggatttttaaacatttctttgaactttgaggcctgatttaggggtgggattttattgctttttgttttaaaggatgaaattttgtggggttttagtctttgattcagtcagtatttggtttatgttaaataaaaaatcagtatcatggaaaagatatgaccataatttagtctcctcaagtgaaaaacaggagtaatgtttcgttgcactttgaaagatctgcttcaaggcataactcgtgtagttgtctggtttcagggatagctgtttgaattgtcattctaaagtaggtcatcaggttcacttattatccgaccttaatctgggataaaggttttggtatttgcccacttctagatagaatgaatgaaaacaacacaagcgttttatgagcactctttatcagaaaggtatttcctggaccagaaatgggcaatagttacaatagttgatcctctgttctggaagctttgaaatttatcagagaatgaagtcattcagtacatctgataaagttttgttgttgttgttgttgttgttgttttaattgggcaaccctcagaactgaagaggttcagagaactttccaggtttatactatacctcaagaccacatagattagctactgcttattctttcacatgggctaggcctgttctcctcctccagacctagtattctaagttattaccacatagtatttttatgttacccatcatctttaaaaacattataggctgggcatggtggcttacgcctgtaatcccagcactttgggaggccaaggcgggcggatcatgaggtcaggagatcgagaccatcctggctaacacggtgaaaacccatgtctactaaaaatacaaaaaattagccaggtgtggtggcgggcgcctgtagtcccagctactcaggaggctgaggcaggagaatggtgtgaacccgggaggcagagcttgcagtgagccgagatcgcaccactgcactccagcctgggcgaaagggcaagactccatctcaaaaaaaaaaaaaaaaaaagactcatttatccatttacatttattctcagatgataaaatatatactgatactataactttcttatggtatcagttttctttattttcttgaataaaattacttctaccttcatttggtctttataatccactgtccacagcatcttcctttaaaccaatagtcccagaagagaccctctgaaattctaggactggatattaaaatgcctgaacctgttatctaaatcctttttaagaaacttaatgttccagctcttgaactacactgtggaacagtaatttgtgcccaatttagtggaagataatgaggctcactgtaaacactacattgtcctgcaaagtaattctgatgagagtttactgacttctagagccattctctttaaccgtctgcaggtctaaggattaactatatttgtgatttgtaataaaactgagttgtacaacactgcctgtgtttgtctggccaagacatttgcttcacttttaaaatgcacgttatctttggagaggtgaattattctacaaaatgcaccctaaatctcattgtttaaaaccttactgatctaataccatctacacaaaaaaatgttgtagttgcagaacttagtttataaaaacaaagaatgtgtatttcttcaatagccgggtatttggattgttctcttgataatatttgaatgtgactcttggatttaagtgcactattattcatggcttatacaataaaattgcactgtatggcaaatatgtctataatgtatgctttgctgaaacctcaagagtgctgtaaggtacaggtttccatattgtgaacctgtgtacgcacacacacatatacatacagtcttagggaaaaaaaaaagcagaacttttgtaagtctgtgtaacattttaatattgtttgtaatattcactaggtgataatttcccctgtaccctataactgtaatcattcaccttgggttggccggtttgtcaagcttggtttactgaatcaagaaagagtcttgtcgaatgtggtactgttcttagtgtgtaatatttgcgtatggtgttcctctgcctcagaggacagttgcacagatggctagtgttaaatttctatagacgatggtaataaaatctgaatatatttaagtgctaa

SEQ ID NO: 19348 - DNA, 1541 bp, Homo sapiens
  source 1..1541: mol_type = unassigned DNA
gtttctccctaagtgcttctttggatctcaggctctaggtgcaatgtgaaggggagtccctgggcagactgatccctggctcagacagttcagtgggagaatcccaaaggccttttccctccttcctgagcctccgggcaaggagggagggatcttggttccagggtctcagtaccccctgtgccatttgagctgcttgcgctcatcatctctattaataaccaacttccctcccccactgccagtgctgcccccacgcctgcccagctcgtgttctccggtcacagcagctcagtcctccaaagctgctggaccccagggagagctgaccactgcccgagcagccggctgaatccacctccacaatgccgctctcaggaaccccggcccctaataagaagaggaaatccagcaagctgatcatggaactcactggaggtggacaggagagctcaggcttgaacctgggcaaaaagatcagtgtcccaagggatgtgatgttggaggaactgtcgctgcttaccaaccggggctccaagatgttcaaactgcggcagatgagggtggagaagtttatttatgagaaccaccctgatgttttctctgacagctcaatggatcacttccagaagttccttccaacagtggggggacagctgggcacagctggtcagggattctcatacagcaagagcaacggcagaggcggcagccaggcagggggcagtggctctgccggacagtatggctctgatcagcagcaccatctgggctctgggtctggagctgggggtacaggtggtcccgcgggccaggctggcagaggaggagctgctggcacagcaggggttggtgagacaggatcaggagaccaggcaggcggagaaggaaaacatatcactgtgttcaagacctatatttccccatgggagcgagccatgggggttgacccccagcaaaaaatggaacttggcattgacctgctggcctatggggccaaagctgaacttcccaaatataagtccttcaacaggacggcaatgccctatggtggatatgagaaggcctccaaacgcatgaccttccagatgcccaagtttgacctggggcccttgctgagtgaacccctggtcctctacaaccaaaacctctccaacaggccttctttcaatcgaacccctattccctggctgagctctggggagcctgtagactacaacgtggatattggcatccccttggatggagaaacagaggagctgtgaggtgtttcctcctctgatttgcatcatttcccctctctggctccaatttggagagggaatgctgagcagatagcccccattgttaatccagtatccttatgggaatggagggaaaaaggagagatctacctttccatcctttactccaagtccccactccacgcatccttcctcaccaactcagagctccccttctacttgctccatatggaacctgctcgtttatggaatttgctctgccaccagtaacagtcaataaacttcaaggaaaatgaa

SEQ ID NO: 19349 - DNA, 2597 bp, Homo sapiens
  source 1..2597: mol_type = unassigned DNA
atatagccagttgatgtcagctgaatgccagtctcttcagaaaagctcagtccccagtttgagtcagagtagggaccatgctgtcccaggttcaaggataaaaaccatcaggcccaagtgccatccatagtccatctccagagtcttcctccacaaactgggattcatccccgctgaaaaagcacaatctaacagcaagggaacaaaaaaaccatgctatcacataatactatgatgaagcagagaaaacagcaagcaacagccatcatgaaggaagtccatggaaatgatgttgatggcatggacctgggcaaaaaggtcagcatccccagagacatcatgttggaagaattatcccatctcagtaaccgtggtgccaggctatttaagatgcgtcaaagaagatctgacaaatacacatttgaaaatttccagtatcaatctagagcacaaataaatcacagtattgctatgcagaatgggaaagtggatggaagtaacttggaaggtggttcgcagcaagcccccttgactcctcccaacaccccagatccacgaagccctccaaatccagacaacattgctccaggatattctggaccactgaaggaaattcctcctgaaaaattcaacaccacagctgtccctaagtactatcaatctccctgggaacaagccattagcaatgatccggagcttttagaggctttatatcctaaacttttcaagcctgaaggaaaggcagaactgcctgattacaggagctttaacagggttgccacaccatttggaggttttgaaaaagcatcaagaatggttaaatttaaagttccagattttgagctactattgctaacagatcccaggtttatgtcctttgtcaatcccctttctggcagacggtcctttaataggactcctaagggatggatatctgagaatattcctatagtgataacaaccgaacctacagatgataccactgtaccagaatcagaagacctatgaaaagaaagttgtatgtgccacataaaactctgaatataaaagttgctgttctactattttaactactggcaaagccacttgcatttttcattagtagcaacaatagcaatttagtgattttccttttctgacattcaatttcaatctcagatcaaatactaataaacaattagaaatcttactttaaaaaacttataactcacttgtcttcattcataattttgttttcacctggtttaaagaatccagatattttactgcaaaagttcagatggaaaagtaattgacagtttcacctttgtctcattttatatgatttattacagtgtaagtttttcaagtggaatctagaatcaaaatacagggagagatatgaagacctattcagagtttcatctggggatgaaagctatggaagatgatgtacaaatgttattgatggagaaaatggttgggtgtgtcctttctggtgaccatgagaaaataatatgtcttgatgaagtcttttcattagtcactcttagaattctaaagtgctttgcacttttcaatatgttttgaatcattaggtaatttattctggatgatattctccaaaattcaattcagttattatattcatttagcattaagtcaaggagactgagaatgactcaagggacgtcatagtaccatagttttaaggaccaaggtgtgcccagaattcaagtttcacaaatcccaatgctgtgcattgattatgttcaactttatgtgtgcattcttagaagagtaagaacaaataaagtacaccgtaatatacatataaatacattcatgtttgtgagagaaggaaagagtaagtaatttgaattggcagctttctttgctaaatctttaaattctgttaagatcctcaagtaactggggagtacatgctttaggacacaaacaaaaacaaagggcatgaaagtatctgaaagcaatgtagcacatatctatcgtaatatatgtaatatattgacataaaagacacaaactaatataaagttatagttatatcttaaaatataattgaagaagcatatgacatataacttatagaaatcagtatcaattcctcccatttcaattcagttaagacttctgtgatagatgtttatagcagagaagaaatgtctcatcaatagaaaactatcagataaagtttaggagataggaagaaggactgtgtgtagtaatgaaaataccaagttgcaacattacatgtttacaaaaaaaaatctgtgtttgtagtgtggaagttggtgactgttttaatcatcatctagacttgttaagtagaaaaattttaaaaatttgcttatgaaaatataacccccagaaagtaacaatgacaaagtattatatttatatatattattgtagagaatttgtatatttttaaagatgtcttaagatatcttaattttatttataagttttggtgtttacctgttttaaaatgataatgttggcatctgtgataaactatcaatgaggctcccatcatgccattttttgttcattttaatctttaaaaaataaaaattaggcatattaattatgca

SEQ ID NO: 19350 - DNA, 3445 bp, Homo sapiens
  source 1..3445: mol_type = unassigned DNA
caggagagaagaaaggaaggaagaaaaggataagtcaagcaaagatattgaggagcaattcattcatccatctatctatccatccattccttccttcgacaaatatctgctgagttcctatcaagcaccattcttggcactaaggatataacagttaacaagcggaagctaccagcagctgaccctcaacatttccaggatgatccccaaggagcagaaggggccagtgatggctgccatgggggacctcactgaaccagtccctacgctggacctgggcaagaagctgagcgtgccccaggacctgatgatggaggagctgtcactacgcaacaacagagggtccctcctcttccagaagaggcagcgccgtgtgcagaagttcactttcgagttagcagccagccagcgggcgatgctggccggaagcgccaggaggaaggtgactggaacagcggagtcggggacggttgccaatgccaatggccctgaggggccgaactaccgctcggagctccacatcttcccggcctcacccggggcctcactcgggggtcccgagggcgcccaccctgcagccgcccctgctgggtgcgtccccagccccagcgccctggcgccaggctatgcggagccgctgaagggcgtcccgccagagaagttcaaccacaccgccatctccaagggctaccgctgcccttggcaggagttcgtcagctaccgggactaccagagcgatggccgaagtcacacccccagccccaacgactaccgaaatttcaacaagaccccggtgccatttggaggacccctcgtggggggcacttttcccaggccaggcacccccttcatcccggagcccctcagtggcttggaactcctccgtctcagacccagcttcaacagagtggcccagggctgggtccgtaacctcccagagtccgaggagctgtagccctagcctgaatcttcagttccccagtctcgggggcctggtaacatccggagccaagacttgtggacagcacttcacagttgaagaagggccttcacacacaaaacctgattgcaaatggcttcagaggtcaccaagttcagtcgtcccaaaacatgggtgtgtttcaaaattacctggggatgttgttccaaatccagacaactggactgtcccagacttgcagcatcagagtctcctgagtcgaggaatctgtattattaatagcaaccagggccgggtgtcgtggctcacgcctgtcatcccagcactttgggaggccgaggcaggaggatcacctgaggtcaggagtttgagaccagtctggccaaaatagtggaaccccgtcgctactaaaaatacaaaaatgagtcggacatggtggtgcatgcctgtaatcccagctacttgggaggctgagacaggagaatcacttgaactaggaggcagaggttgcagtgagccgagattgcgccactgcaccccagcctggacaacagagtgagactccttctcaaaagtaaataaataaatagcaaccagtactccaggtgattccagcataacttatccatggtttgtgtcattaggagtccacatccacacctctgctctttcctgttcctgtagtgtacactcccccggtgacagggtgctcactggcaccccatcttcctgtgaataactcaaataattagaaaatgttccttttactgagatgcagttggtcttcatctattcatgctctaaacagttcctaagcgctgactgtgcgctagacactgccaggcccgggcctcgaggaggaaaagacagtagggaagacattatagagcatgaagtcaccataattttccctaaagcatgcttattgacaattgaggaacaaagtgttgtggagcagaagaaggagtccctcaccctaggtgtgagatgggattctggaagcttcctgaaggatttgagtgggaccttgtgggaggcgtgagagtccatgaagggggtgtgagggggagggtatttctggaaagtggaccagcatgtgcaaaaatatggaactgagcacgggtgcagggtgttctgcagaagggagaaggctgtgctagaggagccagtgagggccagcatggggtgggcttcactaaggaaatggggaaggttttagtgatgggtcttgctgggtgctgtgtggggcgcatattggagaagggtaatgccagaagccaggaagcctgcaagggatgaggccatgggaatggagagaaggggccacccactgggcacctaacaggacaggtgcaaagtggggtgcttattaagattccttctttccactccattttgagcaggctgcttaaagtggtggtgatgatgatgatgatgatggcagctttatatcgagtgcctcagtgcttgggctggtagtagtttctctacatatcttatttctaattctcagaacaaccctgagagaaagatattgttgtccccactttacagatgtggatatttaggccaaaaggaggaagtgacttgtccaggggcagacaccaaatgggaatctgattccagtggatgtctcttttcagtgcactgggtggtcaatgcccactcgctctgaaatcatctgactgtgatgccctgccttggagtttagaagttgagtgcaggcttgggagtcagactggatggggtaggttctaactctgccactgctagccggatgaacttgagcaagtcatttcacatctccgagcctctgtttctccaagtgtaagatgaggacaagtataaaacctcctttatgggtttgttgtgaacacagtgcagggcacatttataataagagctcagtcaatggtaggtttcatgcaactgctgctctaggctggaaaagttgttcttgcactggatgcagcatgagaagctggctgctaagatgtcactgggggtcactaaagctgaagcctgaaggaaagcctctcattgctgtagagctctccctgcctctctctctgggggcgatggggaaggtcaggagtccagcccattcccagggtgtgtgggatagcgattgcattttccttttgctctggagtttcactccccttctgggtcccaagggcccaatggcctgacttttagaattgcttgcaattggtgttttctcttgaatttgggggctgccatttaaagccaggtttccatgagctgaagaccagccattcaagaatctgaaaagtagacaagaggactccagttgcctcaggttggttctgctgtgctctggaaagtaactgcagccaccaggtatgaaaaggagcctggtggggagaccactgcacccaaaacaaatcctttcttcttctgagaatgtgactttttctggtgttgtaaaaaagaaaaaaaaaagaatgctcattgtaaaaataaaaaaataataataagcaa

SEQ ID NO: 19351 - DNA, 1451 bp, Homo sapiens
  source 1..1451: mol_type = unassigned DNA
aagaaaggcaggagagaagaaaggaaggaagaaaaggataagtcaagcaaagatattgaggagcaattcattcatccatctatctatccatccattccttccttcgacaaatatctgctgagttcctatcaagcaccattcttggcactaaggatataacagttaacaagcggaagctaccagcagctgaccctcaacatttccaggtgactttggtgtgtgcatatgtgagtgtgtgtgtacacgtgggtgcaagccctctgtctgcacaggcctgttgccagggcacctgtcttccctagggtctggtgcttttagcctctggctccagctcctattgcagcccgaaataaggctgtgacccatggcaaggcaggaatgattctcatcagctgaagccagagctggctgcaggggacaccctgctcgctgcctactgactgctgaccgctgactgcctacagggacgccacgcaactctcagcttcccgacagaggtgttaatcttgagggtctaagattccctcctgcctattgtggtcccatcctctcaggatgatccccaaggagcagaaggggccagtgatggctgccatgggggacctcactgaaccagtccctacgctggacctgggcaagaagctgagcgtgccccaggacctgatgatggaggagctgtcactacgcaacaacagagggtccctcctcttccagaagaggcagcgccgtgtgcagaagttcactttcgagttagcagccagccagcgggcgatgctggccggaagcgccaggaggaaggtgactggaacagcggagtcggggacggttgccaatgccaatggccctgaggggccgaactaccgctcggagctccacatcttcccggcctcacccggggcctcactcgggggtcccgagggcgcccaccctgcagccgcccctgctgggtgcgtccccagccccagcgccctggcgccaggctatgcggagccgctgaagggcgtcccgccagagaagttcaaccacaccgccatctccaagggctaccgctgcccttggcaggagttcgtcagctaccgggactaccagagcgatggccgaagtcacacccccagccccaacgactaccgaaatttcaacaagaccccggtgccatttggaggacccctcgtggggggcacttttcccaggccaggcacccccttcatcccggagcccctcagtggcttggaactcctccgtctcagacccagcttcaacagagtggcccagggctgggtccgtaacctcccagagtccgaggagctgtagccctagcctgaatcttcagttccccagtctcgggggcctggtaacatccggagccaagacttgtggacagcacttcacagttgaagaagggccttcacacacaaaacctgattgcaaatggcttcagaggtcaccaagtt

SEQ ID NO: 19352 - DNA, 2850 bp, Homo sapiens
  source 1..2850: mol_type = unassigned DNA
tgagtttcatttcttcgcggcgcggggcggggctgggcgcggggtgaaagaggcgaagcgagagcggaggccgcactccagcactgcgcagggaccgccttggaccgcagttgccggccaggaatcccagtgtcacggtggacacgcctccctcgcgcccttgccgcccacctgctcacccagctcaggggctttggaattctgtggccacactgcgaggagatcggttctgggtcggaggctacaggaagactcccactccctgaaatctggagtgaagaacgccgccatccagccaccattccaaggaggtgcaggagaacagctctgtgataccatttaacttgttgacattacttttatttgaaggaacgtatattagagcttactttgcaaagaaggaagatggttgtttccgaagtggacatcgcaaaagctgatccagctgctgcatcccaccctctattactgaatggagatgctactgtggcccagaaaaatccaggctcggtggctgagaacaacctgtgcagccagtatgaggagaaggtgcgcccctgcatcgacctcattgactccctgcgggctctaggtgtggagcaggacctggccctgccagccatcgccgtcatcggggaccagagctcgggcaagagctccgtgttggaggcactgtcaggagttgcccttcccagaggcagcgggatcgtgaccagatgcccgctggtgctgaaactgaagaaacttgtgaacgaagataagtggagaggcaaggtcagttaccaggactacgagattgagatttcggatgcttcagaggtagaaaaggaaattaataaagcccagaatgccatcgccggggaaggaatgggaatcagtcatgagctaatcaccctggagatcagctcccgagatgtcccggatctgactctaatagaccttcctggcataaccagagtggctgtgggcaatcagcctgctgacattgggtataagatcaagacactcatcaagaagtacatccagaggcaggagacaatcagcctggtggtggtccccagtaatgtggacatcgccaccacagaggctctcagcatggcccaggaggtggaccccgagggagacaggaccatcggaatcttgacgaagcctgatctggtggacaaaggaactgaagacaaggttgtggacgtggtgcggaacctcgtgttccacctgaagaagggttacatgattgtcaagtgccggggccagcaggagatccaggaccagctgagcctgtccgaagccctgcagagagagaagatcttctttgagaaccacccatatttcagggatctgctggaggaaggaaaggccacggttccctgcctggcagaaaaacttaccagcgagctcatcacacatatctgtaaatctctgcccctgttagaaaatcaaatcaaggagactcaccagagaataacagaggagctacaaaagtatggtgtcgacataccggaagacgaaaatgaaaaaatgttcttcctgatagataaagttaatgcctttaatcaggacatcactgctctcatgcaaggagaggaaactgtaggggaggaagacattcggctgtttaccagactccgacacgagttccacaaatggagtacaataattgaaaacaattttcaagaaggccataaaattttgagtagaaaaatccagaaatttgaaaatcagtatcgtggtagagagctgccaggctttgtgaattacaggacatttgagacaatcgtgaaacagcaaatcaaggcactggaagagccggctgtggatatgctacacaccgtgacggatatggtccggcttgctttcacagatgtttcgataaaaaattttgaagagttttttaacctccacagaaccgccaagtccaaaattgaagacattagagcagaacaagagagagaaggtgagaagctgatccgcctccacttccagatggaacagattgtctactgccaggaccaggtatacaggggtgcattgcagaaggtcagagagaaggagctggaagaagaaaagaagaagaaatcctgggattttggggctttccagtccagctcggcaacagactcttccatggaggagatctttcagcacctgatggcctatcaccaggaggccagcaagcgcatctccagccacatccctttgatcatccagttcttcatgctccagacgtacggccagcagcttcagaaggccatgctgcagctcctgcaggacaaggacacctacagctggctcctgaaggagcggagcgacaccagcgacaagcggaagttcctgaaggagcggcttgcacggctgacgcaggctcggcgccggcttgcccagttccccggttaaccacactctgtccagccccgtagacgtgcacgcacactgtctgcccccgttcccgggtagccactggactgacgacttgagtgctcagtagtcagactggatagtccgtctctgcttatccgttagccgtggtgatttagcaggaagctgtgagagcagtttggtttctagcatgaagacagagccccaccctcagatgcacatgagctggcgggattgaaggatgctgtcttcgtactgggaaagggattttcagccctcagaatcgctccaccttgcagctctccccttctctgtattcctagaaactgacacatgctgaacatcacagcttatttcctcatttttataatgtcccttcacaaacccagtgttttaggagcatgagtgccgtgtgtgtgcgtcctgtcggagccctgtctcctctctctgtaataaactcatttctagcagaca

SEQ ID NO: 19353 - DNA, 3470 bp, Homo sapiens
  source 1..3470: mol_type = unassigned DNA
agtctgaagtcatgcaatttgacttttcctttctggaaaccagcgagcagaaatgaaaccgaaactgaattgtccgggaaattcgcggtgggggcggagagcgcagggagaagtaagcccagtgcaggatcctgaggcccgtgtttgcaggaccagggccggccttccgattccccattcattccagaagcaccgaaccacgctgtgcccggatcccaagtgcagcggcacccagcgtgggcctggggttgccggttgacccggtcctcagcctggtagcagaggccaggccagtgccacaaggcacctaagtccacctgggcctggagcaggacaggttgcaaaagaaaatatctcgggacccccaaactccttatgctaagggaaacatcgagcctgggaactgagccatcaacgctgccattctttttcccaaacagaaccctgttgtcagaggtacacccagagcaactccacaccgggtgcatgccacagcaactccatcttaaataggagctggtaaaacgaggctgatacctactgggctgcattcccagacggcatagcgaggaggtgctgaagagcgcaggtttggagaatgatcacctggattggaaccatagctctaccaatatggaacccagctccttaggcctcggtcttctcatggagaacatggtgtgataatcctactcctctgggagggtggctgttaagccttggaccgcagttgccggccaggaatcccagtgtcacggtggacacgcctccctcgcgcccttgccgcccacctgctcacccagctcaggggctttggaattctgtggccacactgcgaggagatcggttctgggtcggaggctacaggaagactcccactccctgaaatctggagtgaagaacgccgccatccagccaccattccaaggaggtgcaggagaacagctctgtgataccatttaacttgttgacattacttttatttgaaggaacgtatattagagcttactttgcaaagaaggaagatggttgtttccgaagtggacatcgcaaaagctgatccagctgctgcatcccaccctctattactgaatggagatgctactgtggcccagaaaaatccaggctcggtggctgagaacaacctgtgcagccagtatgaggagaaggtgcgcccctgcatcgacctcattgactccctgcgggctctaggtgtggagcaggacctggccctgccagccatcgccgtcatcggggaccagagctcgggcaagagctccgtgttggaggcactgtcaggagttgcccttcccagaggcagcgggatcgtgaccagatgcccgctggtgctgaaactgaagaaacttgtgaacgaagataagtggagaggcaaggtcagttaccaggactacgagattgagatttcggatgcttcagaggtagaaaaggaaattaataaagcccagaatgccatcgccggggaaggaatgggaatcagtcatgagctaatcaccctggagatcagctcccgagatgtcccggatctgactctaatagaccttcctggcataaccagagtggctgtgggcaatcagcctgctgacattgggtataagatcaagacactcatcaagaagtacatccagaggcaggagacaatcagcctggtggtggtccccagtaatgtggacatcgccaccacagaggctctcagcatggcccaggaggtggaccccgagggagacaggaccatcggaatcttgacgaagcctgatctggtggacaaaggaactgaagacaaggttgtggacgtggtgcggaacctcgtgttccacctgaagaagggttacatgattgtcaagtgccggggccagcaggagatccaggaccagctgagcctgtccgaagccctgcagagagagaagatcttctttgagaaccacccatatttcagggatctgctggaggaaggaaaggccacggttccctgcctggcagaaaaacttaccagcgagctcatcacacatatctgtaaatctctgcccctgttagaaaatcaaatcaaggagactcaccagagaataacagaggagctacaaaagtatggtgtcgacataccggaagacgaaaatgaaaaaatgttcttcctgatagataaagttaatgcctttaatcaggacatcactgctctcatgcaaggagaggaaactgtaggggaggaagacattcggctgtttaccagactccgacacgagttccacaaatggagtacaataattgaaaacaattttcaagaaggccataaaattttgagtagaaaaatccagaaatttgaaaatcagtatcgtggtagagagctgccaggctttgtgaattacaggacatttgagacaatcgtgaaacagcaaatcaaggcactggaagagccggctgtggatatgctacacaccgtgacggatatggtccggcttgctttcacagatgtttcgataaaaaattttgaagagttttttaacctccacagaaccgccaagtccaaaattgaagacattagagcagaacaagagagagaaggtgagaagctgatccgcctccacttccagatggaacagattgtctactgccaggaccaggtatacaggggtgcattgcagaaggtcagagagaaggagctggaagaagaaaagaagaagaaatcctgggattttggggctttccagtccagctcggcaacagactcttccatggaggagatctttcagcacctgatggcctatcaccaggaggccagcaagcgcatctccagccacatccctttgatcatccagttcttcatgctccagacgtacggccagcagcttcagaaggccatgctgcagctcctgcaggacaaggacacctacagctggctcctgaaggagcggagcgacaccagcgacaagcggaagttcctgaaggagcggcttgcacggctgacgcaggctcggcgccggcttgcccagttccccggttaaccacactctgtccagccccgtagacgtgcacgcacactgtctgcccccgttcccgggtagccactggactgacgacttgagtgctcagtagtcagactggatagtccgtctctgcttatccgttagccgtggtgatttagcaggaagctgtgagagcagtttggtttctagcatgaagacagagccccaccctcagatgcacatgagctggcgggattgaaggatgctgtcttcgtactgggaaagggattttcagccctcagaatcgctccaccttgcagctctccccttctctgtattcctagaaactgacacatgctgaacatcacagcttatttcctcatttttataatgtcccttcacaaacccagtgttttaggagcatgagtgccgtgtgtgtgcgtcctgtcggagccctgtctcctctctctgtaataaactcatttctagcagaca

SEQ ID NO: 19354 - DNA, 887 bp, Homo sapiens
  source 1..887: mol_type = unassigned DNA
gacgggcaggagacagatgccttcctcttgtctcaactgcaagaggcacctaagtccacctgggcctggagcaggacagaaccctgttgtcagaggtacacccagagcaactccacaccgggtgcatgccacagcaactccatcttaaataggagctggtaaaacgaggctgatacctactgggctgcattcccagacggcatagcgaggaggtgctgaagagcgcaggtttggagaatgatcacctggattggaaccatagctctaccaatatggaacccagctccttaggcctcggtcttctcatggagaacatggtgtgataatcctactcctctgggagggtggctgttaagccttggaccgcagttgccggccaggaatcccagtgtcacggtggacacgcctccctcgcgcccttgccgcccacctgctcacccagctcaggggctttggaattctgtggccacactgcgaggagatcggttctgggtcggaggctacaggaagactcccactccctgaaatctggagtgaagaacgccgccatccagccaccattccaaggaggtgcaggagaacagctctgtgataccatttaacttgttgacattacttttatttgaaggaacgtatattagaggcatctgctttattttaagcttactttgcaaagaaggaagatggttgtttccgaagtggacatcgcaaaagctgatccagctgctgcatcccaccctctattactgaatggagatgctactgtggcccagaaaaatccaggctcggtggctgagaacaacctgtgcagccagtatgaggagaaggtgcgcccctgcatcgacctcattgactccctgcgggctctaggtgtggagcaggacctg

SEQ ID NO: 19355 - DNA, 872 bp, Homo sapiens
  source 1..872: mol_type = unassigned DNA
gcggggtgaaagaggcgaagcgagagcggaggccgcactccagcactgcgcagggaccggaattctgtggccacactgcgaggagatcggttctgggtcggaggctacaggaagactcccactccctgaaatctggagtgaagaacgccgccatccagccaccattccaaggaggtgcaggagaacagctctgtgataccatttaacttgttgacattacttttatttgaaggaacgtatattagagcttactttgcaaagaaggaagatggttgtttccgaagtggacatcgcaaaagctgatccagctgctgcatcccaccctctattactgaatggagatgctactgtggcccagaaaaatccaggctcggtggctgagaacaacctgtgcagccagtatgaggagaaggtgcgcccctgcatcgacctcattgactccctgcgggctctaggtgtggagcaggacctggccctgccagccatcgccgtcatcggggaccagagctcgggcaagagctccgtgttggaggcactgtcaggagttgcccttcccagaggcagcgggatcgtgaccagatgcccgctggtgctgaaactgaagaaacttgtgaacgaagataagtggagaggcaaggtcagttaccaggactacgagattgagatttcggatgcttcagaggtagaaaaggaaattaataaagcccagaatgccatcgccggggaaggaatgggaatcagtcatgagctaatcaccctggagatcagctcccgagatgtcccggatctgactctaatagaccttcctggcataaccagagtggctgtgggcaatcagcctgctgacattgggtataagatcaagacactca

SEQ ID NO: 19356 - DNA, 516 bp, Homo sapiens
  source 1..516: mol_type = unassigned DNA
atctgattcagcaggcctgggttcgggcccgagaacctgcgtctcccgcgagttcccgcgaggcaagtgctgcaggtgcggggccaggagctaggtttcgtttctgcgcccggagccgccctcagcacaggccttggaccgcagttgccggccaggaatcccagtgtcacggtggacacgcctccctcgcgcccttgccgcccacctgctcacccagctcaggggctttggaattctgtggccacactgcgaggagatcggttctgggtcggaggctacaggaagactcccactccctgaaatctggagtgaagaacgccgccatccagccaccattccaaggaggtgcaggagaacagctctgtgataccatttaacttgttgacattacttttatttgaaggaacgtatattagagcttactttgcaaagaaggaagatggttgtttccgaagtggacatcgcaaaagctgatccagctgctgcatcccaccctctattactgaatggagatgc

SEQ ID NO: 19357 - DNA, 905 bp, Homo sapiens
  source 1..905: mol_type = unassigned DNA
tcttcgcggcgcggggcggggctgggcgcggggtgaaagaggcgaagcgagagcggaggccgcactccagcactgcgcagggaccggaattctgtggccacactgcgaggagatcggttctgggtcggaggctacaggaagactcccactccctgaaatctggagtgaagaacgccgccatccagccaccattccaaggaggtgcaggagaacagctctgtgataccatttaacttgttgacattacttttatttgaaggaacgtatattagaggcatctgctttattttaagcttactttgcaaagaaggaagatggttgtttccgaagtggacatcgcaaaagctgatccagctgctgcatcccaccctctattactgaatggagatgctactgtggcccagaaaaatccaggctcggtggctgagaacaacctgtgcagccagtatgaggagaaggtgcgcccctgcatcgacctcattgactccctgcgggctctaggtgtggagcaggacctggccctgccagccatcgccgtcatcggggaccagagctcgggcaagagctccgtgttggaggcactgtcaggagttgcccttcccagaggcagcgggatcgtgaccagatgcccgctggtgctgaaactgaagaaacttgtgaacgaagataagtggagaggcaaggtcagttaccaggactacgagattgagatttcggatgcttcagaggtagaaaaggaaattaataaagcccagaatgccatcgccggggaaggaatgggaatcagtcatgagctaatcaccctggagatcagctcccgagatgtcccggatctgactctaatagaccttcctggcataaccagagtggctgtgggcaatcagcctgctgacattgggtataag

SEQ ID NO: 19358 - DNA, 281 bp, Homo sapiens
  source 1..281: mol_type = unassigned DNA
cccagaagactggtactcctgagaggcagatgaagtggtggtctttgatatcgagcctgggatgccctgggcacatgaggaggtgcaggagaacagctctgtgataccatttaacttgttgacattacttttatttgaaggaacgtatattagagcttactttgcaaagaaggaagatggttgtttccgaagtggacatcgcaaaagctgatccagctgctgcatcccaccctctattactgaatggagatgctactgtggcccagaaaaatccaggctcg

SEQ ID NO: 19359 - DNA, 583 bp, Homo sapiens
  source 1..583: mol_type = unassigned DNA
actccagcactgcgcagggaccgccttggaccgcagttgccggccaggaatcccagtgtcacggtggacacgcctccctcgcgcccttgccgcccacctgctcacccagctcaggggctttggaattctgtggccacactgcgaggagatcggttctgggtcggaggctacaggaagactcccactccctgaaatctggagtgaagaacgccgccatccagccaccattccaaggaggtgcaggagaacagctctgtgataccatttaacttgttgacattacttttatttgaaggaacgtatattagaggcatctgctttattttaagcttactttgcaaagaaggaagatggttgtttccgaagtggacatcgcaaaagctgatccagctgctgcatcccaccctctattactgaatggagatgctactgtggcccagaaaaatccaggctcggtggctgagaacaacctgtgcagccagtatgaggagaaggtgcgcccctgcatcgacctcattgactccctgcgggctctaggtgtggagcaggacctggccctgccagccatcgccgtcatcgggga

SEQ ID NO: 19360 - DNA, 2663 bp, Homo sapiens
  source 1..2663: mol_type = unassigned DNA
tttcttcgcggcgcggggcggggctgggcgcggggtgaaagaggcgaagcgagagcggaggccgcactccagcactgcgcagggaccggaattctgtggccacactgcgaggagatcggttctgggtcggaggctacaggaagactcccactccctgaaatctggagtgaagaacgccgccatccagccaccattccaagcttactttgcaaagaaggaagatggttgtttccgaagtggacatcgcaaaagctgatccagctgctgcatcccaccctctattactgaatggagatgctactgtggcccagaaaaatccaggctcggtggctgagaacaacctgtgcagccagtatgaggagaaggtgcgcccctgcatcgacctcattgactccctgcgggctctaggtgtggagcaggacctggccctgccagccatcgccgtcatcggggaccagagctcgggcaagagctccgtgttggaggcactgtcaggagttgcccttcccagaggcagcgggatcgtgaccagatgcccgctggtgctgaaactgaagaaacttgtgaacgaagataagtggagaggcaaggtcagttaccaggactacgagattgagatttcggatgcttcagaggtagaaaaggaaattaataaagcccagaatgccatcgccggggaaggaatgggaatcagtcatgagctaatcaccctggagatcagctcccgagatgtcccggatctgactctaatagaccttcctggcataaccagagtggctgtgggcaatcagcctgctgacattgggtataagatcaagacactcatcaagaagtacatccagaggcaggagacaatcagcctggtggtggtccccagtaatgtggacatcgccaccacagaggctctcagcatggcccaggaggtggaccccgagggagacaggaccatcggaatcttgacgaagcctgatctggtggacaaaggaactgaagacaaggttgtggacgtggtgcggaacctcgtgttccacctgaagaagggttacatgattgtcaagtgccggggccagcaggagatccaggaccagctgagcctgtccgaagccctgcagagagagaagatcttctttgagaaccacccatatttcagggatctgctggaggaaggaaaggccacggttccctgcctggcagaaaaacttaccagcgagctcatcacacatatctgtaaatctctgcccctgttagaaaatcaaatcaaggagactcaccagagaataacagaggagctacaaaagtatggtgtcgacataccggaagacgaaaatgaaaaaatgttcttcctgatagataaagttaatgcctttaatcaggacatcactgctctcatgcaaggagaggaaactgtaggggaggaagacattcggctgtttaccagactccgacacgagttccacaaatggagtacaataattgaaaacaattttcaagaaggccataaaattttgagtagaaaaatccagaaatttgaaaatcagtatcgtggtagagagctgccaggctttgtgaattacaggacatttgagacaatcgtgaaacagcaaatcaaggcactggaagagccggctgtggatatgctacacaccgtgacggatatggtccggcttgctttcacagatgtttcgataaaaaattttgaagagttttttaacctccacagaaccgccaagtccaaaattgaagacattagagcagaacaagagagagaaggtgagaagctgatccgcctccacttccagatggaacagattgtctactgccaggaccaggtatacaggggtgcattgcagaaggtcagagagaaggagctggaagaagaaaagaagaagaaatcctgggattttggggctttccagtccagctcggcaacagactcttccatggaggagatctttcagcacctgatggcctatcaccaggaggccagcaagcgcatctccagccacatccctttgatcatccagttcttcatgctccagacgtacggccagcagcttcagaaggccatgctgcagctcctgcaggacaaggacacctacagctggctcctgaaggagcggagcgacaccagcgacaagcggaagttcctgaaggagcggcttgcacggctgacgcaggctcggcgccggcttgcccagttccccggttaaccacactctgtccagccccgtagacgtgcacgcacactgtctgcccccgttcccgggtagccactggactgacgacttgagtgctcagtagtcagactggatagtccgtctctgcttatccgttagccgtggtgatttagcaggaagctgtgagagcagtttggtttctagcatgaagacagagccccaccctcagatgcacatgagctggcgggattgaaggatgctgtcttcgtactgggaaagggattttcagccctcagaatcgctccaccttgcagctctccccttctctgtattcctagaaactgacacatgctgaacatcacagcttatttcctcatttttataatgtcccttcacaaacccagtgttttaggagcatgagtgccgtgtgtgtgcgtcctgtcggagccctgtctcctctctctgtaataaactcatttctagcag

SEQ ID NO: 19361 - DNA, 3042 bp, Homo sapiens
  source 1..3042: mol_type = unassigned DNA
atttctctccctgtttgttgatgacggagcaggggagggagtggttcatatgccacataaaagtgaagtggaggaaagggaagagatgatttctccatcctgaacgtgcagcgagcttgtcaggaagatcggaggtgccaagtagcagagaaagcatcccccagctctgacagggagacagcacatgtctaaggcccacaagccttggccctaccggaggagaagtcaattttcttctcgaaaatacctgaaaaaagaaatgaattccttccagcaacagccaccgccattcggcacagtgccaccacaaatgatgtttcctccaaactggcagggggcagagaaggacgctgctttcctcgccaaggacttcaactttctcactttgaacaatcagccaccaccaggaaacaggagccaaccaagggcaatggggcccgagaacaacctgtacagccagtacgagcagaaggtgcgcccctgcattgacctcatcgactccctgcgggctctgggtgtggagcaggacctggccctgccagccatcgccgtcatcggggaccagagctcgggcaagagctctgtgctggaggcactgtcaggagtcgcgcttcccagaggcagcggaatcgtaaccaggtgtccgctggtgctgaaactgaaaaagcagccctgtgaggcatgggccggaaggatcagctaccggaacaccgagctagagcttcaggaccctggccaggtggagaaagagatacacaaagcccagaacgtcatggccgggaatggccggggcatcagccatgagctcatcagcctggagatcacctcccctgaggttccagacctgaccatcattgaccttcccggcatcaccagggtggctgtggacaaccagccccgagacatcggactgcagatcaaggctctcatcaagaagtacatccagaggcagcagacgatcaacttggtggtggttccctgtaacgtggacattgccaccacggaggcgctgagcatggcccatgaggtggacccggaaggggacaggaccatcggtatcctgaccaaaccagatctaatggacaggggcactgagaaaagcgtcatgaatgtggtgcggaacctcacgtaccccctcaagaagggctacatgattgtgaagtgccggggccagcaggagatcacaaacaggctgagcttggcagaggcaaccaagaaagaaattacattctttcaaacacatccatatttcagagttctcctggaggaggggtcagccacggttccccgactggcagaaagacttaccactgaactcatcatgcatatccaaaaatcgctcccgttgttagaaggacaaataagggagagccaccagaaggcgaccgaggagctgcggcgttgcggggctgacatccccagccaggaggccgacaagatgttctttctaattgagaaaatcaagatgtttaatcaggacatcgaaaagttagtagaaggagaagaagttgtaagggagaatgagacccgtttatacaacaaaatcagagaggattttaaaaactgggtaggcatacttgcaactaatacccaaaaagttaaaaatattatccacgaagaagttgaaaaatatgaaaagcagtatcgaggcaaggagcttctgggatttgtcaactacaagacatttgagatcatcgtgcatcagtacatccagcagctggtggagcccgcccttagcatgctccagaaagccatggaaattatccagcaagctttcattaacgtggccaaaaaacattttggcgaatttttcaaccttaaccaaactgttcagagcacgattgaagacataaaagtgaaacacacagcaaaggcagaaaacatgatccaacttcagttcagaatggagcagatggttttttgtcaagatcagatttacagtgttgttctgaagaaagtccgagaagagatttttaaccctctggggacgccttcacagaatatgaagttgaactctcattttcccagtaatgagtcttcggtttcctcctttactgaaataggcatccacctgaatgcctacttcttggaaaccagcaaacgtctcgccaaccagatcccatttataattcagtattttatgctccgagagaatggtgactccttgcagaaagccatgatgcagatactacaggaaaaaaatcgctattcctggctgcttcaagagcagagtgagaccgctaccaagagaagaatccttaaggagagaatttaccggctcactcaggcgcgacacgcactctgtcaattctccagcaaagagatccactgaagggcggcgatgcctgtggttgttttcttgtgcgtactcattcattctaaggggagtcggtgcaggatgccgcttctgctttggggccaaactcttctgtcactatcagtgtccatctctactgtactccctcagcatcagagcatgcatcaggggtccacacaggctcagctctctccaccacccagctcttccctgaccttcacgaagggatggctctccagtccttgggtcccgtagcacacagttacagtgtcctaagatactgctatcattcttcgctaatttgtatttgtattcccttccccctacaagattatgagaccccagagggggaaggtctgggtcaaattcttcttttgtatgtccagtctcctgcacagcacctgcagcattgtaactgcttaataaatgacatctcactgaacgaatgagtgctgtgtaagtgatggagatacctgaggctattgctcaagcccaggccttggacatttagtgactgttagccggtccctttcagatccagtggccatgccccctgcttcccatggttcactgtcattgtgtttcccagcctctccactcccccgccagaaaggagcctgagtgattctcttttcttcttgtttccctgattatgatgagcttccattgttctgttaagtcttgaagaggaatttaataaagcaaagaaactttttaaaaacgta

SEQ ID NO: 19362 - DNA, 843 bp, Homo sapiens
  source 1..843: mol_type = unassigned DNA
agaccttcaagttaattgttggaacctgcggctctaacacttccagcaaagctacttctgtgaaagctgtgacgagcagaggaaatgggacaggagaggagctgaatcctgagattgtatcgctaggagcccccaaagtacgatgacggtcctcgggccagcatgggggtgcattggcaccatgtaaggaaaggggccctcccgtggcaccgttggagtggggcggtgtggggttgttcggagagaaaagtttcccatgagctctgtttcagcaaacggcgatgaccacttccgtggcaactaaacagtcttgccttcctgcacgtggacatttttcttcatgcatatttctcttgcaaatggttctattgtttgtataacagtatttcatgagcggagaagagttggaagcaaaaatctgttcatgagaaatcctttattaagctcctactgtatgccaggtactttgggctgcaggtacagctgtgaaaaaaaacagcaggcgggaaccagccctgggacaggctccacacactcactgagcaccgcctcctgcacagcgcagtccctgctctcagcctgagcaggcgcagcagccctgccctcccaagaaaggggatggtgagaagcctagtgtcccctccacagagaccagcgccacacatgacagccacacatgacagtgttggtaccagcactcagtctttgagccacaagtgcttataagatagcttgtcaggaagatcggaggtgccaagtagcagagaaagcatcccccagctctgacagggagacagcacatgtctaaggcccacaagccttggccctaccggaggagaagtc

SEQ ID NO: 19363 - DNA, 604 bp, Homo sapiens
  source 1..604: mol_type = unassigned DNA
taaacagtcttgccttcctgcacgtggacatttttcttcatgcatatttctcttgcaaatggttctattgtttgtataacagtatttcatgagcggagaagagttggaagcaaaaatctgttcatgagaaatagcttgtcaggaagatcggaggtgccaagtagcagagaaagcatcccccagctctgacagggagacagcacatgtctaaggcccacaagccttggccctaccggaggagaagtcaattttcttctcgaaaatacctgaaaaaagaaatgaattccttccagcaacagccaccgccattcggcacagtgccaccacaaatgatgtttcctccaaactggcagggggcagagaaggacgctgctttcctcgccaaggacttcaactttctcactttgaacaatcagccaccaccaggaaacaggagccaaccaagggcaatggggcccgagaacaacctgtacagccagtacgagcagaaggtgcgcccctgcattgacctcatcgactccctgcgggctctgggtgtggagcaggacctggccctgccagccatcgccgtcatcggggaccagagctcgggcaagagctctgt

SEQ ID NO: 19364 - DNA, 618 bp, Homo sapiens
  source 1..618: mol_type = unassigned DNA
gaagtggaggaaagggaagagatgatttctccatcctgaacgtgcagcgggtcttcctgctctgtttcccaggctggagtgcaatggtaccatcatagctcactgcagccttaaacttccgggctcaagtgatcctcctgcctcggcctcccaatgcattgggattacagagcttgtcaggaagatcggaggtgccaagtagcagagaaagcatcccccagctctgacagggagacagcacatgtctaaggcccacaagccttggccctaccggaggagaagtcaattttcttctcgaaaatacctgaaaaaagaaatgaattccttccagcaacagccaccgccattcggcacagtgccaccacaaatgatgtttcctccaaactggcagggggcagagaaggacgctgctttcctcgccaaggacttcaactttctcactttgaacaatcagccaccaccaggaaacaggagccaaccaagggcaatggggcccgagaacaacctgtacagccagtacgagcagaaggtgcgcccctgcattgacctcatcgactccctgcgggctctgggtgtggagcaggacctggccctgccagccatcgccgtcatcgggga

SEQ ID NO: 19365 - DNA, 582 bp, Homo sapiens
  source 1..582: mol_type = unassigned DNA
ataaaagtgaagtggaggaaagggaagagatgatttctccatcctgaacgtgcagcgcctttattaagctcctactgtatgccaggtactttgggctgcaggtacagctgtgaaaaaaaacagagcttgtcaggaagatcggaggtgccaagtagcagagaaagcatcccccagctctgacagggagacagcacatgtctaaggcccacaagccttggccctaccggaggagaagtcaattttcttctcgaaaatacctgaaaaaagaaatgaattccttccagcaacagccaccgccattcggcacagtgccaccacaaatgatgtttcctccaaactggcagggggcagagaaggacgctgctttcctcgccaaggacttcaactttctcactttgaacaatcagccaccaccaggaaacaggagccaaccaagggcaatggggcccgagaacaacctgtacagccagtacgagcagaaggtgcgcccctgcattgacctcatcgactccctgcgggctctgggtgtggagcaggacctggccctgccagccatcgccgtcatcggggaccagagctcgg

SEQ ID NO: 19366 - DNA, 1257 bp, Homo sapiens
  source 1..1257: mol_type = unassigned DNA
aaagctggatggtcgtccgtcccaccatggcgggtgggtaaaggttcttttcctgggctgtgtcattccacccagagcaagggataagcctgtgatagccgtaaatccggaaccactaccaaggtgaaagaccttcaagttaattgttggaacctgcggctctaacacttccagcaaagctacttctgtgaaagctgtgacgagcagaggaaatgggacaggagaggagctgaatcctgagattgtatcgctaggagcccccaaaagcttgtcaggaagatcggaggtgccaagtagcagagaaagcatcccccagctctgacagggagacagcacatgtctaaggcccacaagccttggccctaccggaggagaagtcaattttcttctcgaaaatacctgaaaaaagaaatgaattccttccagcaacagccaccgccattcggcacagtgccaccacaaatgatgtttcctccaaactggcagggggcagagaaggacgctgctttcctcgccaaggacttcaactttctcactttgaacaatcagccaccaccaggaaacaggagccaaccaagggcaatggggcccgagaacaacctgtacagccagtacgagcagaaggtgcgcccctgcattgacctcatcgactccctgcgggctctgggtgtggagcaggacctggccctgccagccatcgccgtcatcggggaccagagctcgggcaagagctctgtgctggaggcactgtcaggagtcgcgcttcccagaggcagcgcccagaacgtcatggccgggaatggccggggcatcagccatgagctcatcagcctggagatcacctcccctgaggttccagacctgaccatcattgaccttcccggcatcaccagggtggctgtggacaaccagccccgagacatcggactgcaggtatcctgaccaaaccagatctaatggacaggggcactgagaaaagcgtcatgaatgtggtgcggaacctcacgtaccccctcaagaagggctacatgattgtgaagtgccggggccagcaggagatcacaaacaggctgagcttggcagaggcaaccaagaaagaaattacattctttcaaacacatccatatttcagagttctcctggaggaggggtcagccacggttccccgactggcagaaagacttaccactgaactcatcatgcatatccaaaaatcgctcccgttgttagaaggacaaataagggagagccaccaga

SEQ ID NO: 19367 - DNA, 837 bp, Homo sapiens
  source 1..837: mol_type = unassigned DNA
agcgagcccagctccggtcccagccccggccgtcccggcgtcgcttcggagcgcggcggcagctgactgcgccttcacgatccgctgggacccgcgagccccgccgccgttatgaacatccgcaatgcgaggccagaggacctaatgaacatgcagcactgcaacctcctctgcctgcccgagaactaccagatgaaatactacttctaccatggcctttcctggccccagctctcttacattgctgaggacgagaatgggaagattgtggggtatgtcctggccaaaatggaagaggacccagatgatgtgccccatggacatatcacctcattggctgtgaagcgttcccaccggcgcctcggtctggctcagaaactgatggaccaggcctctcgagccatgatagagaacttcaatgccaaatatgtctccctgcatgtcaggaagaggatcagtgaagtggagcccaaatactatgcagatggggaggacgcctatgccatgaagcgggacctcactcagatggccgacgagctgaggcggcacctggagctgaaagagaagggcaggcacgtggtgctgggtgccatcgagaacaaggtggagagcaaaggcaattcacctccgagctcaggagaggcctgtcgcgaggagaagggcctggctgccgaggatagtggtggggacagcaaggacctcagcgaggtcagcgagaccacagagagcacagatgtcaaggacagctcagaggcctccgactcagcctcctagagcctgccccatcccctcctcaccccacgagctttcacaataaattcgctccgtggcactggg

SEQ ID NO: 19368 - DNA, 1772 bp, Homo sapiens
  source 1..1772: mol_type = unassigned DNA
cgcgccgagggaggggccggctccagctccggggcagcgcccgccccgcccccaggcccgccccgcgctgaccggctccgcgcattggcccgccccgtgcgctggcctgtcccgcgcattggccaagcggccgggaggacgggcccggcggccgtgcacttccggccggtggccggcccggcgcgcaccgccccttccgccgtcgcccagcgagcccagctccggtcccagccccggccgtcccggcgtcgcttcggagcgcggcggcagctgactgcgccttcacgatccgctgggacccgcgagccccgccgccgttatgaacatccgcaatgcgaggccagaggacctaatgaacatgcagcactgcaacctcctctgcctgcccgagaactaccagatgaaatactacttctaccatggcctttcctggccccagctctcttacattgctgaggacgagaatgggaagattgtggggtatgtcctggccaaaatggaagaggacccagatgatgtgccccatggacatatcacctcattggctgtgaagcgttcccaccggcgcctcggtctggctcagaaactgatggaccaggcctctcgagccatgatagagaacttcaatgccaaatatgtctccctgcatgtcaggaagagtaaccgggccgccctgcacctctattccaacaccctcaactttcagatcagtgaagtggagcccaaatactatgcagatggggaggacgcctatgccatgaagcgggacctcactcagatggccgacgagctgaggcggcacctggagctgaaagagaagggcaggcacgtggtgctgggtgccatcgagaacaaggtggagagcaaaggcaattcacctccgagctcaggagaggcctgtcgcgaggagaagggcctggctgccgaggatagtggtggggacagcaaggacctcagcgaggtcagcgagaccacagagagcacagatgtcaaggacagctcagaggcctccgactcagcctcctagagcctgccccatcccctcctcaccccacgagctttcacaataaattcgctccgtggcactggggaactttgtgtgtgagcgcgcgcacatttagagggtgtgtttctccaggtcctctggtggggatgtgagccttggccttttgacccagagcatcctgccaggcccgagtacaaggaaagagctttggaggtgggactccctagtctcatgaccttcagcagctgtggccccggggaaggaggccctggacttatgggagagaccctgccttggaggtctgcttggccacgctgaatgtgttttgtggcacaagccggggctgctcaggctcaaagctcaacagcagggctcccactcttggtggccttcagttctcttcccaccttcaccttcagactttctctccctaatcacacctgcttcgggctacagcagctccccagcatacccgtgggctccagatgtggacatccaactgctcattgggcttatctacaaatgtcctgtctgagtaatgacccagccagatgccccatcaacagtccttgagtcctccctcccctgccaccctaatggtcagtgagtccatgatacctcttgagtctactccctaacctgagtttgcatttgaaaataatttatttttagtacaattccccgcgtttccccattgacattttgtattagttggtgtatttgttattgttgatgcgccaatactgataagttattgtaaactaca

SEQ ID NO: 19369 - DNA, 824 bp, Homo sapiens
  source 1..824: mol_type = unassigned DNA
cccagctccggtcccagccccggccgtcccggcgtcgcttcggagcgcggcggcagctgactgcgccttcacgatccgctgggacccgcgagccccgccgccgttatgaacatccgcaatgcgaggccagaggacctaatgaacatgcagcactgcaacctcctctgcctgcccgagaactaccagatgaaatactacttctaccatggcctttcctggccccagctctcttacattgctgaggacgagaatgggaagattgtggggtatgtcctggccaaaatggaagaggacccagatgatgtgccccatggacatatcacctcattggctgtgaagcgttcccaccggcgcctcggtctggctcagaaactgatggaccaggcctctcgagccatgatagagaacttcaatgccaaatatgtctccctgcatgtcaggaagagatcagtgaagtggagcccaaatactatgcagatggggaggacgcctatgccatgaagcgggacctcactcagatggccgacgagctgaggcggcacctggagctgaaagagaagggcaggcacgtggtgctgggtgccatcgagaacaaggtggagagcaaaggcaattcacctccgagctcaggagaggcctgtcgcgaggagaagggcctggctgccgaggatagtggtggggacagcaaggacctcagcgaggtcagcgagaccacagagagcacagatgtcaaggacagctcagaggcctccgactcagcctcctagagcctgccccatcccctcctcaccccacgagctttcacaataaattcgctccgtggc

SEQ ID NO: 19370 - DNA, 2522 bp, Homo sapiens
  source 1..2522: mol_type = unassigned DNA
tccgggctgcgctgccggcagggagcgggaggcggaagtgccgcgggctgccgcctccgtcccggctgcggcccctgccggttacataactcgttgcgggctccgcgcggtcccacttcccggctcccttcgcctccaggatgcgctgagccctacaacacccccagcggccgccggctcccccacgaggtacccagactcatggtatcgtgatatcacatccaacaagaagttcttttcccttgctgcaacctacagaggtgccattgtgggaatgatagtagctgaaattaagaacaggaccaaaatacataaagaggatggagatattctagcatccaacttctctgttgacacacaagtcgcgtacatcctaagtctgggcgtcgtgaaagagttcaggaagcacggcataggttccctcttacttgaaagtttaaaggatcacatatcaaccaccgcccaggaccactgcaaagccatttacctgcatgtcctcaccaccaacaacacagcaataaacttctatgaaaacagagacttcaagcagcaccactatctcccctattactactccattcgaggggtcctcaaagatggcttcacctatgtcctctacatcaacggcggccaccctccctggacgattttggactacatccagcacctgggctctgcactagccagcctgagcccctgctccattccgcacagagtctaccgccaggcccacagcctgctctgcagcttcctgccatggtcgggcatctcttccaagagtggcatcgagtacagccggaccatgtgatgtcggctgggcagccgccaccaggccccacccttcggccgcccgcagagcccgccttcctgtccatctgaccccttctgttttctgcaaggagctgccagccatctaactgggctcgtcggcctgccccagctgcaggcccggtgctacacgggctcgggaacagaacatcgtgggcatgcgcagagcatgcccatccgtggcaggtacgccacagcagacacaaaggctcttcagctcccctccctgcttctggaaacctctgcctgctgccctggccctgcccccctgcgcatgcaccgtccccagggctgacccagtgtggctgcattcactgggaggggcctgccctcactgggcctctcccactccgctgcctgttcttgcagctccttcctggaaagctggaggggactttctcctgcaagggaggaacgcaagtattatggacacacttgaccgtaaaggcacaggagcctcggaacaagggggcgcaataaagggaatggcccgtccccttccagaaccagcccaaagaagcctggggggtgaggagtggcccccactcctccatgaggggctgatgaggggtgggcagcctgggggaggctttcctcgcaagcacagagctctgaggctcagccccctggcacaggcggtcacgcatcaggacggttcctactcctcagcaccttccgtgcagttaccagtgccctgggaggtcacactgcccgtcggaccttggcatgctccattcagctgacctgctgaggacaggcatcgccgagactccttgggtcctccccgccctccctcatgctgccacaagctgctgctccaaggcctggccacatgcagacaggaggaagctgagctcgacattaggcctcaaggctgccatctgtcttgtagggcctggccttgtgggcagggggcagtcctgtgccttgtgggccctcagcctctgagggcagagatgctgtcagtgccgcaggtgcatcacatacttctagcatcctctccaccctgcattccaaatgctgcttgctgcctgccctgccctccgatgcaggggtggggtggggggcggagtcccgcccagcatagctgcagtgtcacaaagccatggcagagggtcctagcggcgccaccctgccccagcctgaggaggagggagagggaggaacaaccctgggcagacggggcctcagggacctgtgtccttccgcctccagagctgcccagccacgggctctcagggtgctggggcagccccaggtcccctcttgaactcagctggggccaggggccctcagaatgaaggcaggcaccaggcaggagcagcatccccctccttgacggtgctggcaggagggccgcgccatgctgactgcttgaacctctgctgacctgacagtgctggcgggagggccgcaccatgctgactgcctgaatctctgctgaggctgcctgcctgccgggcccagctcagcgccctctccactgcgaatcagtggcgatcatgtgatttctatttctgccccacagggtaagggacgagtcttctggaaggctctgccatggacatttgtcctcgggctcagaggccccaccctgccccacacctgcccctgatcactgcagtgtccagcccagtgttgaacagattgtagcgttctgtctcattacgagcaaataaatagactttcattgg

SEQ ID NO: 19371 - DNA, 2601 bp, Homo sapiens
  source 1..2601: mol_type = unassigned DNA
gtagagtcttagggtgaccccagggggacgtaatgtttccgagaagaaggacagaaagaagactgggagacaccggaactcgaaagaaaatcggtaacaaaatcatacagaaaggctgtacctggaggaaggaagtgcggagccagcctgagttgggagaagagctccagagagtgtgaatgacagaggtggtgccatccagcgcgctcagcgaggtcagcctgcgcctcctctgccacgatgacatagacactgtgaagcacctgtgtggcgactggttccccatcgagtacccagactcatggtatcgtgatatcacatccaacaagaagttcttttcccttgctgcaacctacagaggtgccattgtgggaatgatagtagctgaaattaagaacaggaccaaaatacataaagaggatggagatattctagcatccaacttctctgttgacacacaagtcgcgtacatcctaagtctgggcgtcgtgaaagagttcaggaagcacggcataggttccctcttacttgaaagtttaaaggatcacatatcaaccaccgcccaggaccactgcaaagccatttacctgcatgtcctcaccaccaacaacacagcaataaacttctatgaaaacagagacttcaagcagcaccactatctcccctattactactccattcgaggggtcctcaaagatggcttcacctatgtcctctacatcaacggcggccaccctccctggacgattttggactacatccagcacctgggctctgcactagccagcctgagcccctgctccattccgcacagagtctaccgccaggcccacagcctgctctgcagcttcctgccatggtcgggcatctcttccaagagtggcatcgagtacagccggaccatgtgatgtcggctgggcagccgccaccaggccccacccttcggccgcccgcagagcccgccttcctgtccatctgaccccttctgttttctgcaaggagctgccagccatctaactgggctcgtcggcctgccccagctgcaggcccggtgctacacgggctcgggaacagaacatcgtgggcatgcgcagagcatgcccatccgtggcaggctcttcagctcccctccctgcttctggaaacctctgcctgctgccctggccctgcccccctgcgcatgcaccgtccccagggctgacccagtgtggctgcattcactgggaggggcctgccctcactgggcctctcccactccgctgcctgttcttgcagctccttcctggaaagctggaggggactttctcctgcaagggaggaacgcaagtattatggacacacttgaccgtaaaggcacaggagcctcggaacaagggggcgcaataaagggaatggcccgtccccttccagaaccagcccaaagaagcctggggggtgaggagtggcccccactcctccatgaggggctgatgaggggtgggcagcctgggggaggctttcctcgcaagcacagagctctgaggctcagccccctggcacaggcggtcacgcatcaggacggttcctactcctcagcaccttccgtgcagttaccagtgccctgggaggtcacactgcccgtcggaccttggcatgctccattcagctgacctgctgaggacaggcatcgccgagactccttgggtcctccccgccctccctcatgctgccacaagctgctgctccaaggcctggccacatgcagacaggaggaagctgagctcgacattaggcctcaaggctgccatctgtcttgtagggcctggccttgtgggcagggggcagtcctgtgccttgtgggccctcagcctctgagggcagagatgctgtcagtgccgcaggtgcatcacatacttctagcatcctctccaccctgcattccaaatgctgcttgctgcctgccctgccctccgatgcaggggtggggtggggggcggagtcccgcccagcatagctgcagtgtcacaaagccatggcagagggtcctagcggcgccaccctgccccagcctgaggaggagggagagggaggaacaaccctgggcagacggggcctcagggacctgtgtccttccgcctccagagctgcccagccacgggctctcagggtgctggggcagccccaggtcccctcttgaactcagctggggccaggggccctcagaatgaaggcaggcaccaggcaggagcagcatccccctccttgacggtgctggcaggagggccgcgccatgctgactgcttgaacctctgctgacctgacagtgctggcgggagggccgcaccatgctgactgcctgaatctctgctgaggctgcctgcctgccgggcccagctcagcgccctctccactgcgaatcagtggcgatcatgtgatttctatttctgccccacagggtaagggacgagtcttctggaaggctctgccatggacatttgtcctcgggctcagaggccccaccctgccccacacctgcccctgatcactgcagtgtccagcccagtgttgaacagattgtagcgttctgtctcattacgagcaaataaatagactttcattgga

SEQ ID NO: 19372 - DNA, 2647 bp, Homo sapiens
  source 1..2647: mol_type = unassigned DNA
ttccgggctgcgctgccggcagggagcgggaggcggaagtgccgcgggctgccgcctccgtcccggctgcggcccctgccggttacataactcgttgcgggctccgcgcggtcccacttcccggctcccttcgcctccaggatgcgctgagccctacaacacccccagcggccgccggctcccccacgaggtgtgaatgacagaggtggtgccatccagcgcgctcagcgaggtcagcctgcgcctcctctgccacgatgacatagacactgtgaagcacctgtgtggcgactggttccccatcgagtacccagactcatggtatcgtgatatcacatccaacaagaagttcttttcccttgctgcaacctacagaggtgccattgtgggaatgatagtagctgaaattaagaacaggaccaaaatacataaagaggatggagatattctagcatccaacttctctgttgacacacaagtcgcgtacatcctaagtctgggcgtcgtgaaagagttcaggaagcacggcataggttccctcttacttgaaagtttaaaggatcacatatcaaccaccgcccaggaccactgcaaagccatttacctgcatgtcctcaccaccaacaacacagcaataaacttctatgaaaacagagacttcaagcagcaccactatctcccctattactactccattcgaggggtcctcaaagatggcttcacctatgtcctctacatcaacggcggccaccctccctggacgattttggactacatccagcacctgggctctgcactagccagcctgagcccctgctccattccgcacagagtctaccgccaggcccacagcctgctctgcagcttcctgccatggtcgggcatctcttccaagagtggcatcgagtacagccggaccatgtgatgtcggctgggcagccgccaccaggccccacccttcggccgcccgcagagcccgccttcctgtccatctgaccccttctgttttctgcaaggagctgccagccatctaactgggctcgtcggcctgccccagctgcaggcccggtgctacacgggctcgggaacagaacatcgtgggcatgcgcagagcatgcccatccgtggcaggtacgccacagcagacacaaaggctcttcagctcccctccctgcttctggaaacctctgcctgctgccctggccctgcccccctgcgcatgcaccgtccccagggctgacccagtgtggctgcattcactgggaggggcctgccctcactgggcctctcccactccgctgcctgttcttgcagctccttcctggaaagctggaggggactttctcctgcaagggaggaacgcaagtattatggacacacttgaccgtaaaggcacaggagcctcggaacaagggggcgcaataaagggaatggcccgtccccttccagaaccagcccaaagaagcctggggggtgaggagtggcccccactcctccatgaggggctgatgaggggtgggcagcctgggggaggctttcctcgcaagcacagagctctgaggctcagccccctggcacaggcggtcacgcatcaggacggttcctactcctcagcaccttccgtgcagttaccagtgccctgggaggtcacactgcccgtcggaccttggcatgctccattcagctgacctgctgaggacaggcatcgccgagactccttgggtcctccccgccctccctcatgctgccacaagctgctgctccaaggcctggccacatgcagacaggaggaagctgagctcgacattaggcctcaaggctgccatctgtcttgtagggcctggccttgtgggcagggggcagtcctgtgccttgtgggccctcagcctctgagggcagagatgctgtcagtgccgcaggtgcatcacatacttctagcatcctctccaccctgcattccaaatgctgcttgctgcctgccctgccctccgatgcaggggtggggtggggggcggagtcccgcccagcatagctgcagtgtcacaaagccatggcagagggtcctagcggcgccaccctgccccagcctgaggaggagggagagggaggaacaaccctgggcagacggggcctcagggacctgtgtccttccgcctccagagctgcccagccacgggctctcagggtgctggggcagccccaggtcccctcttgaactcagctggggccaggggccctcagaatgaaggcaggcaccaggcaggagcagcatccccctccttgacggtgctggcaggagggccgcgccatgctgactgcttgaacctctgctgacctgacagtgctggcgggagggccgcaccatgctgactgcctgaatctctgctgaggctgcctgcctgccgggcccagctcagcgccctctccactgcgaatcagtggcgatcatgtgatttctatttctgccccacagggtaagggacgagtcttctggaaggctctgccatggacatttgtcctcgggctcagaggccccaccctgccccacacctgcccctgatcactgcagtgtccagcccagtgttgaacagattgtagcgttctgtctcattacgagcaaataaatagactttcattggagttcgtc

SEQ ID NO: 19373 - DNA, 954 bp, Homo sapiens
  source 1..954: mol_type = unassigned DNA
acataactcgttgcgggctccgcgcggtcccacttcccggctcccttcgcctccaggatgcgctgagccctacaacacccccagcggccgccggctcccccacgaggtgtgaatgacagaggtggtgccatccagcgcgctcagcgaggtcagcctgcgcctcctctgccacgatgacatagacactgtgaagcacctgtgtggcgactggttccccatcgagtacccagactcatggtatcgtgatatcacatccaacaagaagttcttttcccttgctgcaacctacagaggtgccattgtgggaatgatagtagctgaaattaagaacaggaccaaaatacataaagaggatggagatattctagcatccaacttctctgttgacacacaagtcgcgtacatcctaagtctgggcgtcgtgaaagagttcaggaagcacggcatagagccccacggactacatccagcacctgggctctgcactagccagcctgagcccctgctccattccgcacagagtctaccgccaggcccacagcctgctctgcagcttcctgccatggtcgggcatctcttccaagagtggcatcgagtacagccggaccatgtgatgtcggctgggcagccgccaccaggccccacccttcggccgcccgcagagcccgccttcctgtccatctgaccccttctgttttctgcaaggagctgccagccatctaactgggctcgtcggcctgccccagctgcaggcccggtgctacacgggctcgggaacagaacatcgtgggcatgcgcagagcatgcccatccgtggcaggtacgccacagcagacacaaaggctcttcagctcccctccctgcttctggaaacctctgcctgctgccctggccctgcccccctgcgcatgcaccgtccccagggctgacccagtgtggctgcattcactggga

SEQ ID NO: 19374 - DNA, 1149 bp, Homo sapiens
  source 1..1149: mol_type = unassigned DNA
gcttccgctggcggggtctcctccgtgagctccgggcctgtttgcctgctgaagtagagtcttagggtgaccccagggggacgtaatgtttccgagaagaaggacagaaagaagactgggagacaccggaactcgaaagaaaatcgcatacagaaaggctgtacctggaggaaggaagtgcggagccagcctgagttgggagaagagctccagagagtacccagactcatggtatcgtgatatcacatccaacaagaagttcttttcccttgctgcaacctacagaggtgccattgtgggaatgatagtagctgaaattaagaacaggaccaaaatacataaagaggatggagatattctagcatccaacttctctgttgacacacaagtcgcgtacatcctaagtctgggcgtcgtgaaagagttcaggaagcacggcataggttccctcttacttgaaagtttaaaggatcacatatcaaccaccgcccaggaccactgcaaagccatttacctgcatgtcctcaccaccaacaacacagcaataaacttctatgaaaacagagacttcaagcagcaccactatctcccctattactactccattcgaggggtcctcaaagatggcttcacctatgtcctctacatcaacggcggccaccctccctggacgattttggactacatccagcacctgggctctgcactagccagcctgagcccctgctccattccgcacagagtctaccgccaggcccacagcctgctctgcagcttcctgccatggtcgggcatctcttccaagagtggcatcgagtacagccggaccatgtgatgtcggctgggcagccgccaccaggccccacccttcggccgcccgcagagcccgccttcctgtccatctgaccccttctgttttctgcaaggagctgccagccatctaactgggctcgtcggcctgccccagctgcaggcccggtgctacacgggctcgggaacagaacatcgtgggcatgcgcagagcatgcccatccgtggcaggctcttcagctcccctccctgcttctggaaacctctgcctgctgccctggccctgcccccctgcgcatgcaccgtccccagggctgacccagtgtggctgcattcact

SEQ ID NO: 19375 - DNA, 2493 bp, Homo sapiens
  source 1..2493: mol_type = unassigned DNA
tgggctaccagtgggctcccatcctagccaacttcctgcacatcatggcagtcatcctgggcatctttggcaccgtgcagtaccgctcccggtacctcatcctgtatgcagcctggctggtgctctgggttggctggaatgcatttatcatctgcttctacttggaggttggacagctgtcccaggaccgggacttcatcatgaccttcaacacatccctgcaccgctcctggtggatggagaatgggccaggctgcctggtgacacctgttctgaactcccgcctggctctggaggaccaccatgtcatctctgtcactggctgcctgcttgactacccctacattgaagccctcagcagcgccctgcagatcttcctggcactgttcggcttcgtgttcgcctgctacgtgagcaaagtgttcctggaggaggaggacagctttgacttcatcggcggctttgactcctacggataccaggcgccccagaagacgtcgcatttacagctgcagcctctgtacacgtcggggtagcctctgccccgcgcccaccccggcgcctcgccctgggctgaccgcagctgccgcgagctcgggccaaggcgcaggcgtgtccccctggtggcccgcgcgctcactgcagcctgtgcccaaccccgcgtctgcatctggagatgcggacttggacgtggacttggacttggacttggatttgagcttggctcttcgcagcccggacttcggaggagtggggcggggcgggggaggggcaccacgggttttttgttttttgtttgtttgtttttaatctcagccttggcgtgagctggggccttcctctcttctccagcctctccctttcactcttcacccagcatcctgcccccctgtccaaaaacagcaggacatcagacccatcccatcccaccacactcactcaccagctctggggaaagctactgtgaactaggagcaggattcctgggttctaatcgcaggtccatcactgactgtgacgtctagcaaagcccttgccctctctgagcctcggtttccgcacctcaagtaattaatcccttagcaaatggactcttttagacttctcatttaactcaattccctgagctagactgggattaaaattctcattttgcagtacattaaaactgaggcccagagatgtgatttgcttgaggccacacagctagatttttggtggaagtgggccttgaacacagtgtactttctgcagtttctgactgtaaaacccagtgtctgctctctgagttccatttccaagcccccctccatcttggacctatgtggtctccaccatattcacacaccaccaccaccacttgccaatgcctctcttaaagcaatatacccattcgttctcttattgggaactggatggatgaagccccaaattcagccccacccacagagaagccttcctacactcagcctctgtccacccttggcaaatctttcaagctctctcctccaggaaagtggggccccaactcagtcactccacccccttccaggtccctgaggctggttctactgtatccccatcacctccacaactccactcacccctgacggctccatccacctcaccagttggaaggcttgtggtttcagagaggagcaatgctggtcagcgctgcccagactccagtgtttacagatcaccagcatttacaaccaatccaatggccagaagcctcctctaacaagcccagaaggagttctgaaggggcagatgggggtgtgagtagtcggggagtcgggattgccagcaccctcacccttccttgggggcaagtagaggtgagaacactttccccacctccctccacagacactcctgaggacgctgcatcccacgcactgcctggtgcgtccatagagagaggatcaggtctcagcatttcatctgtgaaagaggcatggccctgggttagaaaggagggcaggagacatggaggaactggggggcacccagatggtgcagatggtttgcacacctgagcctgtctgtggtgaccattccgctcctctcccactaccctccaatctatcattccctactctctaaggccaaaatatcctgagcaaggctggcaaccccaccccaccatcccaaatgcaagcagccaggcccaggagttcctctggcccccacaggcatggagctcccagctggtgggtacagcttgagaggggggcagctccctcaggctaagctactgcccttcactgggccagccctgcctccagccctcacctctctcaccccaactctcccccaagcccctttctactcaacgggtgtagccactggtgctttgaagccttttgtttttataagatggtttttgcaaggggaccaggttctcttttcactgggaccttgcaaggaggggagtgctctcctggtttctgtgcaggcgggttgattaaagatggtgttttcttctct

SEQ ID NO: 19376 - DNA, 2589 bp, Homo sapiens
  source 1..2589: mol_type = unassigned DNA
cggagccatgggcaagtgcagcgggcgctgcacgctggtcgccttctgctgcctgcagctggtggctgcgctggagcggcagatctttgacttcctgggctaccagtgggctcccatcctagccaacttcctgcacatcatggcagtcatcctgggcatctttggcaccgtgcagtaccgctcccggtacctcatcctgtatgcagcctggctggtgctctgggttggctggaatgcatttatcatctgcttctacttggaggttggacagctgtcccaggaccgggacttcatcatgaccttcaacacatccctgcaccgctcctggtggatggagaatgggccaggctgcctggtgacacctgttctgaactcccgcctggctctggaggaccaccatgtcatctctgtcactggctgcctgcttgactacccctacattgaagccctcagcagcgccctgcagatcttcctggcactgttcggcttcgtgttcgcctgctacgtgagcaaagtgttcctggaggaggaggacagctttgacttcatcggcggctttgactcctacggataccaggcgccccagaagacgtcgcatttacagctgcagcctctgtacacgtcggggtagcctctgccccgcgcccaccccggcgcctcgccctgggctgaccgcagctgccgcgagctcgggccaaggcgcaggcgtgtccccctggtggcccgcgcgctcactgcagcctgtgcccaaccccgcgtctgcatctggagatgcggacttggacgtggacttggacttggacttggatttgagcttggctcttcgcagcccggacttcggaggagtggggcggggcgggggaggggcaccacgggttttttgttttttgtttgtttgtttttaatctcagccttggcgtgagctggggccttcctctcttctccagcctctccctttcactcttcacccagcatcctgcccccctgtccaaaaacagcaggacatcagacccatcccatcccaccacactcactcaccagctctggggaaagctactgtgaactaggagcaggattcctgggttctaatcgcaggtccatcactgactgtgacgtctagcaaagcccttgccctctctgagcctcggtttccgcacctcaagtaattaatcccttagcaaatggactcttttagacttctcatttaactcaattccctgagctagactgggattaaaattctcattttgcagtacattaaaactgaggcccagagatgtgatttgcttgaggccacacagctagatttttggtggaagtgggccttgaacacagtgtactttctgcagtttctgactgtaaaacccagtgtctgctctctgagttccatttccaagcccccctccatcttggacctatgtggtctccaccatattcacacaccaccaccaccacttgccaatgcctctcttaaagcaatatacccattcgttctcttattgggaactggatggatgaagccccaaattcagccccacccacagagaagccttcctacactcagcctctgtccacccttggcaaatctttcaagctctctcctccaggaaagtggggccccaactcagtcactccacccccttccaggtccctgaggctggttctactgtatccccatcacctccacaactccactcacccctgacggctccatccacctcaccagttggaaggcttgtggtttcagagaggagcaatgctggtcagcgctgcccagactccagtgtttacagatcaccagcatttacaaccaatccaatggccagaagcctcctctaacaagcccagaaggagttctgaaggggcagatgggggtgtgagtagtcggggagtcgggattgccagcaccctcacccttccttgggggcaagtagaggtgagaacactttccccacctccctccacagacactcctgaggacgctgcatcccacgcactgcctggtgcgtccatagagagaggatcaggtctcagcatttcatctgtgaaagaggcatggccctgggttagaaaggagggcaggagacatggaggaactggggggcacccagatggtgcagatggtttgcacacctgagcctgtctgtggtgaccattccgctcctctcccactaccctccaatctatcattccctactctctaaggccaaaatatcctgagcaaggctggcaaccccaccccaccatcccaaatgcaagcagccaggcccaggagttcctctggcccccacaggcatggagctcccagctggtgggtacagcttgagaggggggcagctccctcaggctaagctactgcccttcactgggccagccctgcctccagccctcacctctctcaccccaactctcccccaagcccctttctactcaacgggtgtagccactggtgctttgaagccttttgtttttataagatggtttttgcaaggggaccaggttctcttttcactgggaccttgcaaggaggggagtgctctcctggtttctgtgcaggcgggttgattaaagatggtgttttcttctcta

SEQ ID NO: 19377 - DNA, 1446 bp, Homo sapiens
  source 1..1446: mol_type = unassigned DNA
tgggctaccagtgggctcccatcctagccaacttcctgcacatcatggcagtcatcctgggcatctttggcaccgtgcagtaccgctcccggtacctcatcctggaccgggacttcatcatgaccttcaacacatccctgcaccgctcctggtggatggagaatgggccaggctgcctggtgacacctgttctgaactcccgcctggctctggaggaccaccatgtcatctctgtcactggctgcctgcttgactacccctacattgaagccctcagcagcgccctgcagatcttcctggcactgttcggcttcgtgttcgcctgctacgtgagcaaagtgttcctggaggaggaggacagctttgacttcatcggcggctttgactcctacggataccaggcgccccagaagacgtcgcatttacagctgcagcctctgtacacgtcggggtagcctctgccccgcgcccaccccggcgcctcgccctgggctgaccgcagctgccgcgagctcgggccaaggcgcaggcgtgtccccctggtggcccgcgcgctcactgcagcctgtgcccaaccccgcgtctgcatctggagatgcggacttggacgtggacttggacttggacttggatttgagcttggctcttcgcagcccggacttcggaggagtggggcggggcgggggaggggcaccacgggttttttgttttttgtttgtttgtttttaatctcagccttggcgtgagctggggccttcctctcttctccagcctctccctttcactcttcacccagcatcctgcccccctgtccaaaaacagcaggacatcagacccatcccatcccaccacactcactcaccagctctggggaaagctactgtgaactaggagcaggattcctgggttctaatcgcaggtccatcactgactgtgacgtctagcaaagcccttgccctctctgagcctcggtttccgcacctcaagtaattaatcccttagcaaatggactcttttagacttctcatttaactcaattccctgagctagactgggattaaaattctcattttgcagtacattaaaactgaggcccagagatgtgatttgcttgaggccacacagctagatttttggtggaagtgggccttgaacacagtgtactttctgcagtttctgactgtaaaacccagtgtctgctctctgagttccatttccaagcccccctccatcttggacctatgtggtctccaccatattcacacaccaccaccaccacttgccaatgcctctcttaaagcaatatacccattcgttctcttattgggaactggatggatgaagccccaaattcagccccacccacagagaagccttcctacactcagcctctgtccacccttggcaaatctttcaagctctctcctccaggaaagtggggcccca

SEQ ID NO: 19378 - DNA, 1106 bp, Homo sapiens
  source 1..1106: mol_type = unassigned DNA
gtgggggctcgacggtggccgacgtgggacagtctggctgtggcaggggtctcggaaaccatgggttattgcagtggcaggtgcacgcttatctttatctgtggcatgcaactggtttgtgtgctggagaggcaaatatttgacttccttggatatcagtgggcacctatcctggcaaattttgtacatattattatcgtcattcttggtttgtttggaactattcaatatagacctcgttacataacaggatatgctgtctggctagtcctctgggttacgtggaatgtgtttgttatctgcttctatttggaggctggggacctctcaaaggaaacagaccttatcctgacttttaatatatcaatgcaccgatcttggtggatggagaatggaccaggatgtacggtgacgtcagtgacacctgccccagactgggccccagaagaccatcgctacatcacggtctcagggtgtttgctggagtaccagtacatagaagtggctcatagttccctccagattgtcctcgcagtaagtgttggcagccaaccgctccttctagtgcctctggggttgttttatttctgtgcgaactcagtgcacacaaatggaatctgtgggtaaagtgtggcctttttgctttttcctcattaatgcgacttttaacaggaaatcctcaggttaaactaaaccatcctctggacttagtgtgctgattttcttcgacaattagtaaataccctttgttatcatcagcattttacataggaaatccaatcagtcaagatgtgattacgtgacttttggtagacttttccaaggattctgaagggatgatcagagatttttttcataacgttctacagtactcaaaattataagatttccataagtgttttctcttttagtgcttcttttggctgtgctgctagccctgggatttctctttttcatttgccctatctccttcttccttcctagatttctcccaggcaccatccatcacctttaatctcccactttttttccagaaaaaatcacattttctatagattctaattctaagacattcatgcccccatttttcatagtactgtaacaat

SEQ ID NO: 19379 - DNA, 3115 bp, Homo sapiens
  source 1..3115: mol_type = unassigned DNA
gtgggggctcgacggtggccgacgtgggacagtctggctgtggcaggggtctcggaaaccatgggttattgcagtggcaggtgcacgcttatctttatctgtggcatgcaactggtttgtgtgctggagaggcaaatatttgacttccttggatatcagtgggcacctatcctggcaaattttgtacatattattatcgtcattcttggtttgtttggaactattcaatatagacctcgttacataacaggatatgctgtctggctagtcctctgggttacgtggaatgtgtttgttatctgcttctatttggaggctggggacctctcaaaggaaacagaccttatcctgacttttaatatatcaatgcaccgatcttggtggatggagaatggaccaggatgtacggtgacgtcagtgacacctgccccagactgggccccagaagaccatcgctacatcacggtctcagggtgtttgctggagtaccagtacatagaagtggctcatagttccctccagattgtcctcgcactggcaggtttcatctacgcctgttatgttgtgaaatgtataactgaagaagaggacagctttgatttcataggtggctttgactcttatggctatcaagggcctcagaagacatctcatttacaactacagcctatgtacatgtcaaaataatacagatgacttcagtatgtcagcccatggacctttcaaagaacttttttcgcagtggcctcctgcatttcatgaagagcaagaagcaactgagtttaaatacatacacgtattaacaaaacaaatgcaaagcctctacatacaacactgacacacacacacacacacacgtgagcacgcacacaccaattccacttgacctcctctttctaactgaaacagacaaatatgcaggacacgcccatcttggatttcctgaaagcaggcccctttctcccaggccttcggaaagttcagaaggagatgtgttgatgcccaacggttgccggccattgctaactcctctgcagcccagcgggttggcctctgtgagctgggaagtcatccaaggcacattagtttgagagctctgtcttctgcactccatacatcttgacagcaccacggctacttaggcaatgtaattgcaaaaacaaacgaaacatgccatgatgaccttgtacccgaagtccgaaatggcagattgtttgccctaaaggctgtaccgtacatacttgccttaacccacctacattgtgtgcccaagaatcccagtgcagacagccccaagccacttcctttaggctaacacactgctattaattctaaatgagttcaagcctgtgtgtttcatgtcaaggaacaagactgaatagctcagcagctccagtgtgtctgtataagaaaagtgccagctgtcagcaaagtgctttaccatagagcctccatggtggcccaaaagagacaagtaacaataacaatatctgtcatctttataattctaaaatatggtcttctgatggggttgggggtgggacagagtaaaacattaatctactaaactcactaatctactggaagcagaaagcagaaatggcttaactcgctgattttatttattgcactctaggtgcttttataagtatctacaattgtcttttactaacacagaaacagctgtggatttctatcaacagaggccaactgaatatgtattagctatgtttactcttttatatctaattcaaattgaagactctacgtaggtgaacttttttttctaacttcagtgtacaagattatttttgggtgggtggggggagcaatagttaccttggtgaaatatttgagatctttttgtggtatttgggggatctgttgtgtgttagagtgtatttcaaccctcctgtattattgtggcagaaaaactgtgctgttaacgtagttggcaacaagatgcctttggaaacttaatagtaggtcaatgtgtttatggaatattctgaactcctaggaaattttgttctatattttaaagcattatttggttttcattagtggaaaacataattagctcaggcttatcaggaactcagatgagtcatattttttcttggatacacctgagacattaaactcaattttttaaaactaacacaccattctttagtgcagtgaaattcaaaagttataaattggcatggagcaagttttttctttgatttctatgaagtttcagttattggattaaactactttagaccttagcccattcggatctacatacaccagttccattactgtgtttgcatggatgtctgtaatatacacacacatatacatttgaaaatgatagaggaacaaagagttatcattggaacataaactataaaaaaagattccagcactcatgcttgaatttcctcagtgggttgtatgtttgtccatacatacatgtataaaataaacaattgcaaacatgtcagtgaaacctcatatgacgcttttatagtgacatgcatgtttaatgtatgagaaaaatatttaccaatgtattgtcctttgagtcctaaaatataaatactatacatgccagaaactattctaatgtgacttttaatgtgactattaaaaatgaggtttcactgtacattcatgctgtgatgcgatttcaccttatagtacatgtatatgggtacagaaaataaaccctcatattcctgctttaagttacagccaagttttcaccaaatcacaactatcatcaccaccaaaattttaaaaaacagtagttgactactaaaaagtaatcagtggacaggtcatttatgggatcagtaagcacagtagtgtgattatatctgggaaaacatctacagttgtacagctgtatcctcctcaaaatccggtgaagaatgctatttttctaggctgagcttttgttataaacttaatattcagaaggcaagggttatgatcctgatgtgtcctttttttttgcatttgttaattctgaatgtatttttaacagaatgatttttttgacttactagtgtaatttgcattttaaaaataaatggaaaaatacttaagtttctgagccatccct

SEQ ID NO: 19380 - DNA, 3052 bp, Homo sapiens
  source 1..3052: mol_type = unassigned DNA
cttatttgtccctctggtatatttacaggtactgaagatggatggggatcattaggtttctcttattatattgtcccacaaatatcttaaccgtttgtgtgctggagaggcaaatatttgacttccttggatatcagtgggcacctatcctggcaaattttgtacatattattatcgtcattcttggtttgtttggaactattcaatatagacctcgttacataacaggatatgctgtctggctagtcctctgggttacgtggaatgtgtttgttatctgcttctatttggaggctggggacctctcaaaggaaacagaccttatcctgacttttaatatatcaatgcaccgatcttggtggatggagaatggaccaggatgtacggtgacgtcagtgacacctgccccagactgggccccagaagaccatcgctacatcacggtctcagggtgtttgctggagtaccagtacatagaagtggctcatagttccctccagattgtcctcgcactggcaggtttcatctacgcctgttatgttgtgaaatgtataactgaagaagaggacagctttgatttcataggtggctttgactcttatggctatcaagggcctcagaagacatctcatttacaactacagcctatgtacatgtcaaaataatacagatgacttcagtatgtcagcccatggacctttcaaagaacttttttcgcagtggcctcctgcatttcatgaagagcaagaagcaactgagtttaaatacatacacgtattaacaaaacaaatgcaaagcctctacatacaacactgacacacacacacacacacacgtgagcacgcacacaccaattccacttgacctcctctttctaactgaaacagacaaatatgcaggacacgcccatcttggatttcctgaaagcaggcccctttctcccaggccttcggaaagttcagaaggagatgtgttgatgcccaacggttgccggccattgctaactcctctgcagcccagcgggttggcctctgtgagctgggaagtcatccaaggcacattagtttgagagctctgtcttctgcactccatacatcttgacagcaccacggctacttaggcaatgtaattgcaaaaacaaacgaaacatgccatgatgaccttgtacccgaagtccgaaatggcagattgtttgccctaaaggctgtaccgtacatacttgccttaacccacctacattgtgtgcccaagaatcccagtgcagacagccccaagccacttcctttaggctaacacactgctattaattctaaatgagttcaagcctgtgtgtttcatgtcaaggaacaagactgaatagctcagcagctccagtgtgtctgtataagaaaagtgccagctgtcagcaaagtgctttaccatagagcctccatggtggcccaaaagagacaagtaacaataacaatatctgtcatctttataattctaaaatatggtcttctgatggggttgggggtgggacagagtaaaacattaatctactaaactcactaatctactggaagcagaaagcagaaatggcttaactcgctgattttatttattgcactctaggtgcttttataagtatctacaattgtcttttactaacacagaaacagctgtggatttctatcaacagaggccaactgaatatgtattagctatgtttactcttttatatctaattcaaattgaagactctacgtaggtgaacttttttttctaacttcagtgtacaagattatttttgggtgggtggggggagcaatagttaccttggtgaaatatttgagatctttttgtggtatttgggggatctgttgtgtgttagagtgtatttcaaccctcctgtattattgtggcagaaaaactgtgctgttaacgtagttggcaacaagatgcctttggaaacttaatagtaggtcaatgtgtttatggaatattctgaactcctaggaaattttgttctatattttaaagcattatttggttttcattagtggaaaacataattagctcaggcttatcaggaactcagatgagtcatattttttcttggatacacctgagacattaaactcaattttttaaaactaacacaccattctttagtgcagtgaaattcaaaagttataaattggcatggagcaagttttttctttgatttctatgaagtttcagttattggattaaactactttagaccttagcccattcggatctacatacaccagttccattactgtgtttgcatggatgtctgtaatatacacacacatatacatttgaaaatgatagaggaacaaagagttatcattggaacataaactataaaaaaagattccagcactcatgcttgaatttcctcagtgggttgtatgtttgtccatacatacatgtataaaataaacaattgcaaacatgtcagtgaaacctcatatgacgcttttatagtgacatgcatgtttaatgtatgagaaaaatatttaccaatgtattgtcctttgagtcctaaaatataaatactatacatgccagaaactattctaatgtgacttttaatgtgactattaaaaatgaggtttcactgtacattcatgctgtgatgcgatttcaccttatagtacatgtatatgggtacagaaaataaaccctcatattcctgctttaagttacagccaagttttcaccaaatcacaactatcatcaccaccaaaattttaaaaaacagtagttgactactaaaaagtaatcagtggacaggtcatttatgggatcagtaagcacagtagtgtgattatatctgggaaaacatctacagttgtacagctgtatcctcctcaaaatccggtgaagaatgctatttttctaggctgagcttttgttataaacttaatattcagaaggcaagggttatgatcctgatgtgtcctttttttttgcatttgttaattctgaatgtatttttaacagaatgatttttttgacttactagtgtaatttgcatttt

SEQ ID NO: 19381 - DNA, 576 bp, Homo sapiens
  source 1..576: mol_type = unassigned DNA
atgaaaatagtttgtgtgctggagaggcaaatatttgacttccttggatatcagtgggcacctatcctggcaaattttgtacatattattatcgtcattcttggtttgtttggaactattcaatatagacctcgttacataacaggatatgctgtctggctagtcctctgggttacgtggaatgtgtttgttatctgcttctatttggaggctggggacctctcaaaggaaacagaccttatcctgacttttaatatatcaatgcaccgatcttggtggatggagaatggaccaggatgtacggtgacgtcagtgacacctgccccagactgggccccagaagaccatcgctacatcacggtctcagggtgtttgctggagtaccagtacatagaagtggctcatagttccctccagattgtcctcgcactggcaggtttcatctacgcctgttatgttgtgaaatgtataactgaagaagaggacagctttgatttcataggtggctttgactcttatggctatcaagggcctcagaagacatctcatttacaactacagcctatgtacatgtaa

SEQ ID NO: 19382 - DNA, 420 bp, Homo sapiens
  source 1..420: mol_type = unassigned DNA
atgggttattgcagtggcaggtgcacgcttatctttatctgtggcatgcaactggtttgtgtgctggagaggcaaatatttgacttccttggatatcagtgggcacctatcctggcaaattttgtacatattattatcgtcattcttggtttgtttggaactattcaatatagacctcgttacataacaggatatgctgtctggctagtcctctgggttacgtggaatgtgtttgttatctgcttctatttggaggctggggacctctcaaagctggcaggtttcatctacgcctgttatgttgtgaaatgtataactgaagaagaggacagctttgatttcataggtggctttgactcttatggctatcaagggcctcagaagacatctcatttacaactacagcctatgtacatgtaa

SEQ ID NO: 19383 - DNA, 594 bp, Homo sapiens
  source 1..594: mol_type = unassigned DNA
atgggctgctgcaccggacgctgctcgctcatctgcctctgcgcgctgcagttggtctcagcattagagaggcagatctttgacttccttggtttccagtgggcgcctattcttggaaattttctacacataatagttgtcatattgggtttgtttgggaccattcagtacagacctcgatacataatggtgtatacagtgtggactgccctctgggtcacctggaatgtgttcattatctgcttttatttggaagtaggtggactctcaaaggacaccgatctaatgacattcaatatctctgtacatcggtcatggtggagagaacatgggcctggttgtgtcagaagagtgctgcctccctcagcccatggcatgatggacgattacacgtacgtctctgtcacaggctgcatcgttgacttccagtacctggaggtcatccacagtgctgtccaaatactactctctttggtgggttttgtgtatgcctgttatgtgatcagtatttccatggaagaagaagacacatattcatgtgatctgcaagtatgcaaacatctttttatccagatgctgcaaattattgaataa

SEQ ID NO: 19384 - DNA, 1988 bp, Homo sapiens
  source 1..1988: mol_type = unassigned DNA
agccgcgagcggcggccgcggggccgaggagcctgggccgggccgggcggggactactccggagtcaggaggcagcagcggcggaggacgaggatctctggcagtcagcgccgctcggacgccgccggcaccatgggctgctgcaccggacgctgctcgctcatctgcctctgcgcgctgcagttggtctcagcattagagaggcagatctttgacttccttggtttccagtgggcgcctattcttggaaattttctacacataatagttgtcatattgggtttgtttgggaccattcagtacagacctcgatacataatggtgtatacagtgtggactgccctctgggtcacctggaatgtgttcattatctgcttttatttggaagtaggtggactctcaaaggacaccgatctaatgacattcaatatctctgtacatcggtcatggtggagagaacatgggcctggttgtgtcagaagagtgctgcctccctcagcccatggcatgatggacgattacacgtacgtctctgtcacaggctgcatcgttgacttccagtacctggaggtcatccacagtgctgtccaaatactactctctttggtgggttttgtgtatgcctgttatgtgatcagtatttccatggaagaagaagacacatattcatgtgatctgcaagtatgcaaacatctttttatccagatgctgcaaattattgaataagcaagaattagtaagatattatcaccaaattgtcacatcagtcaagcctcatgtgcttcctaagaactgaggtgatgcattattttagagtgtcattctaaaccccagattcaacatcttcctaatctttctagtgcagtctaatatataaattttatgaaaagcataggtttttttttaaccagcagtgctctttgagaatttacattgattcctaaagattgccattgctttgtataaaatgttataaattatcttagcatcttacctggaatttccactaaattcaccaatttatgatttgtgaaatctgattttactttttgaaaattttcatgtgaatttcccattttcagtgttgtagcacctctctcttcctctaagatcctgcaagctcatcaaaagccatgatcttattataccagcagttttatttattcaatctttcaacaagtagttattgaacttctataatgtgccaggctctggagctcgccttacaccaaacagacacaatcgatccattcgaagtgtcgtaattacacattgagggaccaactagaccttttctcattgtaaacttggagcaaaagtaaattcattaaaataaatttacattatagtgccacaaaaaaatgaacagaaccagaaagcattttttacaaaaattaacagaacagtgtgatagaggggaaaaggatgtgagatcatggtgccctaccttcaatagggtggccagaaaacacctctctgaagaagcagcatttgagctgagacctgaagaacgaggagtcagtgatgcagagaacctcaggagatgccttccaatctgagaaaagaggtgtacaagcaacatggtgccggcacctgctcagcttttggaaaggactcaggaagcttttactcatgatggaaggcaaagcgggaggaggcacatcacatagcaagagtggaagcaagagagacgtcatgctcttttaagcaatcagctctcaggtgaactaatagagtgagaactcactcatttctgtggggagggcatcaagctatttataatggatccatcctcatgacacaaacactgctatctcccacctctaacactggagatgacacttgaacatgagatttggaggggacaaatatcaaaactatatcatatggtttgcagatattttcttccatccttgagttatcttttcattttgttaattgtttcctttgctgtgctgaagctttgtttaatgaaatcccatttgtct

SEQ ID NO: 19385 - DNA, 1114 bp, Homo sapiens
  source 1..1114: mol_type = unassigned DNA
acacacacacacccggacccagacagcccactccactttccagacgcccacctcctacatactcccctcccctaaacagacattcacccactcgccatctgtagcctccttccaaccccccgccccgcccgcctggctccccctccccaagaaacagacctgcacagtgggacgcagggacccccgccagacgctcgggtcgtgcgcaccgcactgacctcggcccgccccgccgggaaactaacaaaggcgggcgcgagccccgagccctggagccgcgagcggcggccgcggggccgaggagcctgggccgggccgggcggggactactccggagtcaggaggcagcagcggcggaggacgaggatctctggcagtcagcgccgctcggacgccgccggcaccatgggctgctgcaccggacgctgctcgctcatctgcctctgcgcgctgcagttggtgtcatgggtatttgataggcagatctttctcctcagtttccagtgggcgcctattcttggaaattttctacacataatagttgtcatattgggtttgtttgggaccattcagtacagacctcgatacataatggtgtatacagtgtggactgccctctgggtcacctggaatgtgttcattatctgcttttatttggaagtaggtggactctcaaaggacaccgatctaatgacattcaatatctctgtacatcggtcatggtggagagaacatgggcctggttgtgtcagaagagtgctgcctccctcagcccatggcatgatggacgattacacgtacgtctctgtcacaggctgcatcgttgacttccagtacctggaggtcatccacagtgctgtccaaatactactctctatatttttcctataggtttctgctgtggagccgtactcactgcagaccctgaaggaggaggaatacctgctttctgcccctcagtggtctcagctgccgttcttctcacatatgcatcatccatacacatcaagatgttttgcggctttatgtcagtatgagtaatcttggtcttactgtgtagatattctaacccttgaaggaaatgtcaaatgatactcttcagacaacgtactgg

SEQ ID NO: 19386 - DNA, 1430 bp, Homo sapiens
  source 1..1430: mol_type = unassigned DNA
gggtccaggctgcggcgcgtggggagcgggcggagcgggggcgggggccgagcgcggggcacccgggggcctcctgtataggcgggcaccatgggctcctgctccggccgctgcgcgctcgtcgtcctctgcgcttttcagctggtcgccgccctggagaggcaggtgtttgacttcctgggctaccagtgggcgcccatcctggccaactttgtccacatcatcatcgtcatcctgggactcttcggcaccatccagtaccggctgcgctatgtcatggtgtacacgctgtgggcagccgtctgggtcacctggaacgtcttcatcatctgcttctacctggaagtcggtggcctcttaaaggacagcgagctactgaccttcagcctctcccggcatcgctcctggtggcgtgagcgctggccaggctgtctgcatgaggaggtgccagcagtgggcctcggggccccccatggccaggccctggtgtcaggtgctggctgtgccctggagcccagctatgtggaggccctacacagttgcctgcagatcctgatcgcgcttctgggctttgtctgtggctgccaggtggtcagcgtgtttacggaggaagaggacagctttgatttcattggtggatttgatccatttcctctctaccatgtcaatgaaaagccatccagtctcttgtccaagcaggtgtacttgcctgcgtaagtgaggaaacagctgatcctgctcctgtggcctccagcctcagcgaccgaccagtgacaatgacaggagctcccaggccttgggacgcgcccccacccagcaccccccaggcggccggcagcacctgccctgggttctaagtactggacaccagccagggcggcagggcagtgccacggctggctgcagcgtcaagagagtttgtaatttcctttctcttaaaaaaaaaaaagaaaagaaaacatacaaaagaaaaggcaaaaccccacatgcccacctcctctggcaacatgggggtcacagctctgcccccaggctgtcgtctcgtcgaggagcccctccctcaggtgcccacctggggctgctggaccctcgggctgcaagcactgctgctgggatgcagcctccccaggaagtcaatgtgaggcccgagacccctcaagcggtgagggcccctgttgaacatggagggttcctaaccccaaactcgtgccagaagaacccccaccccacccaggagctgaggctgatggagccctagggtgggggctgggcttgaccaggaacagcagagccaggccccaaggcatagggcagggcacatggtggtgacgagcaggcagtactcttgtaaagggggctcttgggcaaacagtcccaaaggctcccccaggtatcatcaagttggtaaataaacaggaacatggccctca

SEQ ID NO: 19387 - DNA, 730 bp, Homo sapiens
  source 1..730: mol_type = unassigned DNA
aaaacctgaaattttgtggcacagcacctggtgagactgtgggtttgacaaatatctcaccactttatcatcaagttaaacattattcttttttattaaagcttaataattaaagcttaattctgcaagtgaaatttatatatactgctttattagtacatatatgacactttgttttcaaacattgccataacctgtttgaaggaacttgagcttcagggttacaaaactgcttctgctatgatggagaagaggaggaaaaaatgcttagataagagcaatttaacttaaatggaggaagtgtgtctatattgacaaaagtccaaagacttgttgagccagctaactgggctttttacaatggcttttcaagattgcagatgccgcctacagagacgacagtcatatttgagccccgaagctcgcgaatgtagcaggcgccccaagctcggtcctcaagaagccatggcggaatccaggggccgtctgtacctttggatgtgcttggctgctgcgctggcatctttcctgatgggatttatggtgggctggtttattaagcctctcaaagaaacgaccacttctgtgcgctatcatcaaagtatacggtggaaactggtatccgaaatgaaagctgaaaacatcaaatcatttcttcgttcttttacaaagcttcctcatctggcaggaacagaacaaaatttcttgcttgccaagaaaatccaaaccc

SEQ ID NO: 19388 - DNA, 3600 bp, Homo sapiens
  source 1..3600: mol_type = unassigned DNA
agttgcccgccaacaggaagaatgtctcctccctctgcagggcttcctttcccccatcgagggcccctggggaccacaggtccccagcgggtagggcggaggcgtggccttgcgaaggtcagcggaggccacccagagctcacagcctcctgccagcgcgctctctgtttctctgcagccccgaagctcgcgaatgtagcaggcgccccaagctcggtcctcaagaagccatggcggaatccaggggccgtctgtacctttggatgtgcttggctgctgcgctggcatctttcctgatgggatttatggtgggctggtttattaagcctctcaaagaaacgaccacttctgtgcgctatcatcaaagtatacggtggaaactggtatccgaaatgaaagctgaaaacatcaaatcatttcttcgttcttttacaaagcttcctcatctggcaggaacagaacaaaatttcttgcttgccaagaaaatccaaacccagtggaagaaatttggactagattcagccaagttggttcattatgatgtcctcttatcttaccccaatgagacaaatgccaactatatatcgattgtggatgaacatgaaactgagattttcaaaacatcataccttgaaccaccaccagatggctatgagaatgttacaaatattgtgccaccatataatgctttctcagcccaaggcatgccagagggagatcttgtatatgtgaactatgctcgcactgaagactttttcaaactagaaagagagatgggcatcaactgtactgggaagattgttattgcaagatatggaaaaatcttcagaggaaataaagttaaaaatgccatgttagcaggagccataggaatcatcttgtactcagatccagctgactactttgctcctgaggtacagccatatcccaaaggatggaatcttcctggaactgcagcccagagaggaaatgtgttaaatttgaatggtgctggtgacccactcactccaggctatccagcaaaagaatacactttcagacttgatgttgaagaaggagtgggaatcccccgaatacctgtacatcccattggatataatgatgcagaaatattattacgctacttgggaggaattgctccaccagataagagttggaagggagcccttaatgtgagttatagtatcggacctggctttacagggagtgattctttcaggaaggttagaatgcatgtttataacatcaataaaattacaaggatttacaatgtagttggaactatcagaggatctgtggaacctgacaggtatgttattctgggaggtcaccgggactcctgggtatttggagctattgacccaaccagtggggttgctgttttgcaagaaattgcccggagttttggaaaactgatgagtaaaggctggagacctagaagaactatcatttttgccagctgggatgcagaagaatttggacttctgggttccacagaatgggctgaggagaatgtcaaaatactccaggagagaagcattgcttatatcaactcggattcatctatagaaggcaattatactctcagagttgactgtactccccttctttaccaattagtgtataaactgacaaaagagatccccagccctgatgatgggtttgagagtaaatcactgtatgaaagctggttggaaaaagacccttcacctgaaaataaaaatttgcctagaatcaataagctgggatctggaagtgactttgaagcttattttcagagacttggaattgcttcaggcagagcccgttacactaagaataagaaaacagataagtacagcagctacccagtgtaccacacaatttatgagacatttgaattggtagagaaattttatgaccccacatttaaaaaacaactttctgtggctcaattacgaggagcactggtatatgagcttgtggattctaaaatcattccttttaatattcaagactatgcagaagctttgaaaaactatgcagcaagtatctataatctatctaagaaacatgatcaacaattgacagaccatggagtatcatttgactccttattttctgctgtgaaaaacttctcagaggctgcttcagattttcataaacgacttatacaagttgatcttaacaatcccattgcagtgagaatgatgaatgaccaactgatgctcctggaaagagcattcatcgatcctcttggtttaccaggaaagctgttctataggcacatcatatttgctccaagtagccacaacaaatatgctggagaatcatttcctggaatctatgatgctatctttgatattgaaaataaagccaactctcgtttggcctggaaagaagtaaagaaacatatttctattgcagcttttacaattcaagcagcagcaggaactctgaaagaagtattatagaaggtctcaagtggctagccattaaaggtgttgctaaaagtctgaggataaaattcacctttctgataacttatgaagccagggtgttctaaactcttttcatgtcatgttttgattataggctttggtcttttcatctgcaaagccttttttttttgctctttaaaagttaataattatattagcaaagtgttaatctaatgaagtaaaaaactcctgtgtggcagaaagtaaaagaaaattccctaaattatagcaaggaacatgaattctcagacattgtgagtgtgggaatgtaaaatggtaaaatcacttttgaaaacagtttggcagtttcctataaagttaaacatacacttttactttaggactccagaattccacttctagttatttattcaagagaaggaaaaacaatgatcacagcaatacttgtatgcatgttcattgcaacttaaaagcgtaaaaaccccaaatgtccatccacagacgaatgtataaactgtggtatccattacacaatagactacttactactcagcaataaaaatgaagtaactttcaataaatgcaatattattggcagacattgttgaaggaaaaaagccagacaaacaactacataaaatatgtttctatttagatgaagtggcaaactaatctgtagtgttaaaaattagattagtgattgcctgggccaagtggcaggttggggaggatggctgcaaagaagtatgaggaaactttctccaatagatgagaattttccgtatcttgatctgagtggcaaattgtaaacttaaaatatatataaaatttattgtatgaaaattaagcctcaataaacgtgattataaaaaacaagtctgcaaggaaaccagaatcatataccttctcttgtgaaatcaccatgaagtgtgaatggtcaggaaaaagccagtaatattcatacatttaataatttcagctctactgaataaacatataagtctgatgggtgatgaaaatagctactacaatcttcatattctaactcctataaagactgtatatcagaatctgcaaacttttatgcagatcccagtgactcaattacatgttcaactatgattaaagcttcaataaacttggttgttcatctacttca

SEQ ID NO: 19389 - DNA, 2594 bp, Homo sapiens
  source 1..2594: mol_type = unassigned DNA
gccaagagtccgcaggatgcagtggacgaaggtgttggggctggggctgggggctgctgccctcttggggctggggatcatcctcggccactttgccatccccaaaaaagccaactcactggccccccaggacctggacctggagatcctggagaccgtcatggggcagctggatgcccacaggatccgggagaacctcagagaactctccagggagccacacctggcctccagccctcgggatgaggacctggtgcagctgctgctgcagcgctggaaggacccagagtcaggcctggactcggccgaggcctccacgtacgaagtgctgctgtccttccctagccaggagcagcccaacgtcgtggacatcgtgggccccactgggggcatcatccactcctgccaccggactgaggagaacgtgaccggggagcaaggggggccagatgtggtacaaccctatgctgcctatgctccttctggaaccccacagggcctcctcgtctatgccaaccggggcgcggaagaagactttaaggagctacagactcagggcatcaaacttgaaggcaccattgccctgactcgatatgggggtgtagggcgtggggccaaggctgtgaacgctgccaagcacggggtagctggggtgctggtgtacacagaccctgccgacatcaacgatgggctgagctcacccgacgaaacctttcccaactcctggtacctgcccccctcaggagtggagcgaggctcctactacgagtattttggggaccctctgactccctaccttccagccgtcccctcttccttccgcgtggaccttgccaatgtctccggatttcccccaattcctacacagcccattggcttccaggatgcaagagacctgctctgtaacctcaacggaactttggccccagccacctggcagggagcactgggctgccactacaggttgggtcccggcttccggcctgacggagacttcccagcagacagccaggtgaatgtgagcgtctacaaccgcctggagctgaggaactcttccaacgtcctgggcatcatccgtggggctgtggagcctgatcgctacgtgctgtatgggaaccaccgagacagctgggtgcacggggctgtggaccccagcagtggcaccgccgtcctcctggagctctcccgtgtcctggggaccctgctgaagaagggcacctggcgtcctcgcagatcaatcgtgtttgcgagctggggggctgaggagtttgggctcattggctccacggaattcacagaagagttcttcaacaagctgcaggagcgcacggtggcctacatcaacgtggacatctcggtgtttgccaacgctacccttagggtgcaggggacgccccctgtccagagcgtcgtcttctctgcaaccaaagagatccgctcaccaggccctggcgacctgagcatctacgacaactggatccggtacttcaaccgcagcagcccggtgtacggcctggtccccagagcaagacttcagccaggatctaccccacctaccacacagcctttgacacctttgactatgtggacaagtttttggacccgggcttcagcagccatcaggctgtggcccggacagcggggagtgtgattctccggctcagtgacagcttcttcctgcccctcaaagtcagtgactacagtgagacactccgcagcttcctgcaggcagcccagcaagatcttggggccctgctggagcagcacagcatcagcctggggcctctggtgactgcagtggagaagtttgaggcagaagctgcagccttgggccaacgcatatcaacactgcagaagggcagccctgaccccctgcaggtccggatgctcaatgaccagttgatgctcttggaacggacctttctgaaccctagagccttcccagaggaacgctactacagccatgtgctctgggcacctcgcacgggctccgtagtcacattcccgggcctatccaatgcctgctccagggccagggacacagcttctggatctgaagcttgggctgaggtccagagacagctcagcattgtggtgacagccctggagggtgcggcagccaccctgaggcctgtggctgacctctgaccccagccctctttcttcagccctccctttactccaaccctctcctgcctgctttcctgagatgtcctggtcttccttggtgccagaagagggcactaccacaggaccctctcaagcttctcaggcaacagcttgaggtccctgaggggagtggcaagccctaatgcaactcaccctcatcctggtgcttaggtggcagagggtgggcagcaggggacagggatgggatggcaaaaccaccaactgcccttggtggcaggtgggtggagatgggatgcgtgccaacctcagatgccaactcaggtcatcaaggccaaggaccagtggcgaaagtgagtcttggggtaccttaggccttggctagtctgcgttcctctccctgcatgctgtgtatcctaactccctacaacagcccctcaaataaatcacatctagtgactggtacc

SEQ ID NO: 19390 - DNA, 2512 bp, Homo sapiens
  source 1..2512: mol_type = unassigned DNA
gccaagagtccgcaggatgcagtggacgaaggtgttggggctggggctgggggctgctgccctcttggggctggggatcatcctcggccactttgccatccccaaaaaagccaactcactggccccccaggacctggacctggagatcctggagaccgtcatggggcagctggatgcccacaggatccgggagaacctcagagaactctccagggagccacacctggcctccagccctcgggatgaggacctggtgcagctgctgctgcagcgctggaaggacccagagtcaggcctggactcggccgaggcctccacgtacgaagtgctgctgtccttccctagccaggagcagcccaacgtcgtggacatcgtgggccccactgggggcatcatccactcctgccaccggactgaggagaacgtgaccggggagcaaggggggccagatgtggtacaaccctatgctgcctatgctccttctggaaccccacagggcctcctcgtctatgccaaccggggcgcggaagaagactttaaggagctacagactcagggcatcaaacttgaaggcaccattgccctgactcgatatgggggtgtagggcgtggggccaaggctgtgaacgctgccaagcacggggtagctggggtgctggtgtacacagaccctgccgacatcaacgatgggctgagctcacccgacgaaacctttcccaactcctggtacctgcccccctcaggagtggagcgaggctcctactacgagtattttggggaccctctgactccctaccttccagccgtcccctcttccttccgcgtggaccttgccaatgtctccggatttcccccaattcctacacagcccattggcttccaggatgcaagagacctgctctgtaacctcaacggaactttggccccagccacctggcagggagcactgggctgccactacaggttgggtcccggcttccggcctgacggagacttcccagcagacagccaggtgaatgtgagcgtctacaaccgcctggagctgaggaactcttccaacgtcctgggcatcatccgtggggctgtggagcctgatcgctacgtgctgtatgggaaccaccgagacagctgggtgcacggggctgtggaccccagcagtggcaccgccgtcctcctggagctctcccgtgtcctggggaccctgctgaagaagggcacctggcgtcctcgcagatcaatcgtgtttgcgagctggggggctgaggagtttgggctcattggctccacggaattcacagaagagttcttcaacaagctgcaggagcgcacggtggcctacatcaacgtggacatctcggtgtttgccaacgctacccttagggtgcaggggacgccccctgtccagagcgtcgtcttctctgcaaccaaagagatccgctcaccaggccctggcgacctgagcatctacgacaactggatccggtacttcaaccgcagcagcccggtgtacggcctggtccccaggcttcagcagccatcaggctgtggcccggacagcggggagtgtgattctccggctcagtgacagcttcttcctgcccctcaaagtcagtgactacagtgagacactccgcagcttcctgcaggcagcccagcaagatcttggggccctgctggagcagcacagcatcagcctggggcctctggtgactgcagtggagaagtttgaggcagaagctgcagccttgggccaacgcatatcaacactgcagaagggcagccctgaccccctgcaggtccggatgctcaatgaccagttgatgctcttggaacggacctttctgaaccctagagccttcccagaggaacgctactacagccatgtgctctgggcacctcgcacgggctccgtagtcacattcccgggcctatccaatgcctgctccagggccagggacacagcttctggatctgaagcttgggctgaggtccagagacagctcagcattgtggtgacagccctggagggtgcggcagccaccctgaggcctgtggctgacctctgaccccagccctctttcttcagccctccctttactccaaccctctcctgcctgctttcctgagatgtcctggtcttccttggtgccagaagagggcactaccacaggaccctctcaagcttctcaggcaacagcttgaggtccctgaggggagtggcaagccctaatgcaactcaccctcatcctggtgcttaggtggcagagggtgggcagcaggggacagggatgggatggcaaaaccaccaactgcccttggtggcaggtgggtggagatgggatgcgtgccaacctcagatgccaactcaggtcatcaaggccaaggaccagtggcgaaagtgagtcttggggtaccttaggccttggctagtctgcgttcctctccctgcatgctgtgtatcctaactccctacaacagcccctcaaataaatcacatctagtgactggtacc

SEQ ID NO: 19391 - DNA, 2699 bp, Homo sapiens
  source 1..2699: mol_type = unassigned DNA
ctaccccagctggccaagagtccgcaggatgcagtggacgaaggtgttggggctggggctgggggctgctgccctcttggggctggggatcatcctcggccactttgccatccccaaaaaagccaactcactggccccccaggacctggacctggagatcctggagaccgtcatggggcagctggatgcccacaggatccgggagaacctcagagaactctccagggagccacacctggcctccagccctcgggatgaggacctggtgcagctgctgctgcagcgctggaaggacccagagtcaggcctggactcggccgaggcctccacgtacgaagtgctgctgtccttccctagccaggagcagcccaacgtcgtggacatcgtgggccccactgggggcatcatccactcctgccaccggactgaggagaacgtgaccggggagcaaggggggccagatgtggtacaaccctatgctgcctatgctccttctggaaccccacagggcctcctcgtctatgccaaccggggcgcggaagaagactttaaggagctacagactcagggcatcaaacttgaaggcaccattgccctgactcgatatgggggtgtagggcgtggggccaaggctgtgaacgctgccaagcacggggtagctggggtgctggtgtacacagaccctgccgacatcaacgatgggctgagctcacccgacgaaacctttcccaactcctggtacctgcccccctcaggagtggagcgaggctcctactacgagtattttggggaccctctgactccctaccttccagccgtcccctcttccttccgcgtggaccttgccaatgtctccggatttcccccaattcctacacagcccattggcttccaggatgcaagagacctgctctgtaacctcaacggaactttggccccagccacctggcagggagcactgggctgccactacaggttgggtcccggcttccggcctgacggagacttcccagcagacagccaggtgaatgtgagcgtctacaaccgcctggagctgaggaactcttccaacgtcctgggcatcatccgtggggctgtggagcctgatcgctacgtgctgtatgggaaccaccgagacagctgggtgcacggggctgtggaccccagcagtggcaccgccgtcctcctggagctctcccgtgtcctggggaccctgctgaagaagggcacctggcgtcctcgcagatcaatcgtgtttgcgagctggggggctgaggagtttgggctcattggctccacggaattcacagaagagttcttcaacaagctgcaggagcgcacggtggcctacatcaacgtggacatctcggtgtttgccaacgctacccttagggtgcaggggacgccccctgtccagagcgtcgtcttctctgcaaccaaagagatccgctcaccaggccctggcgacctgagcatctacgacaactggatccggtacttcaaccgcagcagcccggtgtacggcctggtccccagcttgggttctctgggtgctggcagcgactatgcacccttcgttcacttcctgggcatctcctccatggacattgcctatacctatgaccggagcaagacttcagccaggatctaccccacctaccacacagcctttgacacctttgactatgtggacaagtttttggacccgggcttcagcagccatcaggctgtggcccggacagcggggagtgtgattctccggctcagtgacagcttcttcctgcccctcaaagtcagtgactacagtgagacactccgcagcttcctgcaggcagcccagcaagatcttggggccctgctggagcagcacagcatcagcctggggcctctggtgactgcagtggagaagtttgaggcagaagctgcagccttgggccaacgcatatcaacactgcagaagggcagccctgaccccctgcaggtccggatgctcaatgaccagttgatgctcttggaacggacctttctgaaccctagagccttcccagaggaacgctactacagccatgtgctctgggcacctcgcacgggctccgtagtcacattcccgggcctatccaatgcctgctccagggccagggacacagcttctggatctgaagcttgggctgaggtccagagacagctcagcattgtggtgacagccctggagggtgcggcagccaccctgaggcctgtggctgacctctgaccccagccctctttcttcagccctccctttactccaaccctctcctgcctgctttcctgagatgtcctggtcttccttggtgccagaagagggcactaccacaggaccctctcaagcttctcaggcaacagcttgaggtccctgaggggagtggcaagccctaatgcaactcaccctcatcctggtgcttaggtggcagagggtgggcagcaggggacagggatgggatggcaaaaccaccaactgcccttggtggcaggtgggtggagatgggatgcgtgccaacctcagatgccaactcaggtcatcaaggccaaggaccagtggcgaaagtgagtcttggggtaccttaggccttggctagtctgcgttcctctccctgcatgctgtgtatcctaactccctacaacagcccctcaaataaatcacatctagtgactggtaccaa

SEQ ID NO: 19392 - DNA, 2271 bp, Homo sapiens
  source 1..2271: mol_type = unassigned DNA
gccaagagtccgcaggatgcagtggacgaaggtgttggggctggggctgggggctgctgccctcttggggctggggatcatcctcggccactttgccatccccaaaaaagccaactcactggccccccaggacctggacctggagatcctggagaccgtcatggggcagctggatgcccacaggatccgggagaacctcagagaactctccagggagccacacctggcctccagccctcgggatgaggacctggtgcagctgctgctgcagcgctggaaggacccagagtcaggcctggactcggccgaggcctccacgtacgaagtgctgctgtccttccctagccaggagcagcccaacgtcgtggacatcgtgggccccactgggggcatcatccactcctgccaccggactgaggagaacgtgaccggggagcaaggggggccagatgtggtacaaccctatgctgcctatgctccttctggaaccccacagggcctcctcgtctatgccaaccggggcgcggaagaagactttaaggagctacagactcagggcatcaaacttgaaggcaccattgccctgactcgatatgggggtgtagggcgtggggccaaggctgtgaacgctgccaagcacggggtagctggggtgctggtgtacacagaccctgccgacatcaacgatgggctgagctcacccgacgaaacctttcccaactcctggtacctgcccccctcaggagtggagcgaggctcctactacgagtattttggggaccctctgactccctaccttccagccgtcccctcttccttccgcgtggaccttgccaatgtctccggatttcccccaattcctacacagcccattggcttccaggatgcaagagacctgctctgtaacctcaacggaactttggccccagccacctggcagggagcactgggctgccactacaggttgggtcccggcttccggcctgacggagacttcccagcagacagccaggtgaatgtgagcgtctacaaccgcctggagctgaggaactcttccaacgtcctgggcatcatccgtggggctgtggagcctgatcgctacgtgctgtatgggaaccaccgagacagctgggtgcacggggctgtggaccccagcagtggcaccgccgtcctcctggagctctcccgtgtcctggggaccctgctgaagaagggcacctggcgtcctcgcagatcaatcgtgtttgcgagctggggggctgaggagtttgggctcattggctccacggaattcacagaagagttcttcaacaagctgcaggagcgcacggtggcctacatcaacgtggacatctcggtgtttgccaacgctacccttagggtgcaggggacgccccctgtccagagcgtcgtcttctctgcaaccaaagagatccgctcaccaggccctggcgacctgagcatctacgacaactggatccggtacttcaaccgcagcagcccggtgtacggcctggtccccagcttgggttctctgggtgctggcagcgactatgcacccttcgttcacttcctgggcatctcctccatggacattgcctatacctatgaccggagcaagacttcagccaggatctaccccacctaccacacagcctttgacacctttgactatgtggacaagtttttggacccgggcttcagcagccatcaggctgtggcccggacagcggggagtgtgattctccggctcagtgacagcttcttcctgcccctcaaagtcagtgactacagtgagacactccgcagcttcctgcaggcagcccagcaagatcttggggccctgctggagcagcacagcatcagcctggggcctctggtgactgcagtggagaagtttgaggcagaagctgcagccttgggccaacgcatatcaacactgcagaagggcagccctgaccccctgcaggtccggatgctcaatgaccagttgatgctcttggaacggacctttctgaaccctagagccttcccagaggaacgctactacagccatgtgctctgggcacctcgcgggctccgtagtcacattccgggcctatccaatgcctgctccagggccagggacacagcttctggatctgaagcttgggctgaggtccagagacagctcagcattgtggtgacagccctggagggtgcggcagccaccctgaggcctgtggctgacctctgaccccagccctctttcttcagccctccctttactcc

SEQ ID NO: 19393 - DNA, 716 bp, Homo sapiens
  source 1..716: mol_type = unassigned DNA
acctcagggtcattagaaagccaccacagatctaggcatctaagcaggaataggagaggaaaggcaactgtagccacattaatcacttttatcaggaagataaatgcttttcccgaatctttcaacaggctttcattttacattgggcatatttttgtcatatagccttccctagctgcaagggaggcttttcaaacttctttatggaattcagcaagaaagtaaagaggataaaatgaagcacactggatgaatggtgtggcttgatgaaattaagaaatttggtacaactatataaaaatgaagatgacatggaaatttcaaagaagattaagactcagtggacctctttgggcctagaagatgtacagtttgtaaattactctgtgctgcttgatctgccaggcccttctcccagcactgtgactctgagcagcagtggtcaatgctttcatcctaatggccagccttgcagtgaagaagccagaaaagatagcagccaagacctgctctattcatatgcagcctattctgccaaaggaactctcaaggctgaagtcatcgatgtgagttatggaatggcagatgatttaaaaaggattaggaaaataaaaaacgtaacaaatcagatcgcactcctgaaattaggaaaattgccactgctttataagatgaaagttttagacaaagccgatcaaacctcacctctctattag

SEQ ID NO: 19394 - DNA, 4953 bp, Homo sapiens
  source 1..4953: mol_type = unassigned DNA
ttattcacagaagaaagcaggtagtatactgttacaatactacagtagaaagtcagaaggtcacaaagcttgcagggtaagtgacacaacttgaaactgcttggccctctttaaaaagaaataataaaatgggagagaatgaagcaagtttacctaacacgtctttgcaaggtaaaaagatggcctatcagaaggtccatgcagatcaaagagctccaggacactcacagtacttagacaatgatgaccttcaagccactgcccttgacttagagtgggacatggagaaggaactagaggagtctggttttgaccaattccagctagacggtgctgagaatcagaacctagggcattcagagactatagacctcaatcttgattccattcaaccagcaacttcacccaaaggaaggttccagagacttcaagaagaatctgactacattacccattatacacgatctgcaccaaagagcaatcgctgcaacttttgccacgtcttaaaaatactttgcacagccaccattttatttatttttgggattttgataggttattatgtacatacaaattgcccttcagatgctccatcttcaggaacagttgatcctcagttatatcaagagattctcaagacaatccaggcagaagatattaagaagtctttcagaaatttggtacaactatataaaaatgaagatgacatggaaatttcaaagaagattaagactcagtggacctctttgggcctagaagatgtacagtttgtaaattactctgtgctgcttgatctgccaggcccttctcccagcactgtgactctgagcagcagtggtcaatgctttcatcctaatggccagccttgcagtgaagaagccagaaaagatagcagccaagacctgctctattcatatgcagcctattctgccaaaggaactctcaaggctgaagtcatcgatgtgagttatggaatggcagatgatttaaaaaggattaggaaaataaaaaacgtaacaaatcagatcgcactcctgaaattaggaaaattgccactgctttataagctttcctcattggaaaaggctggatttggaggtgttcttctgtatatcgatccttgtgatttgccaaagactgtgaatcctagccatgataccttcatggtgtcactgaatccaggaggagacccttctacgcctggttacccaagtgtcgatgaaagttttagacaaagccgatcaaacctcacctctctattagtgcagcccatctctgcacccctcgttgcaaaactgatctcttcgccaaaagctagaaccaaaaatgaagcgtgtagctctctagagcttccaaataatgaaataagagtcgtcagcatgcaagttcagacagtcacaaaattgaaaacagttactaatgttgttggatttgtaatgggcttgacatctccagaccggtatatcatagttggcagccatcatcacactgcacacagttataatggacaagaatgggccagtagtactgcaataatcacagcgtttatccgtgccttgatgtcaaaagttaagagagggtggagaccagaccgaactattgttttctgttcttggggaggaacagcttttggcaatattggctcatatgaatggggagaggatttcaagaaggttcttcagaaaaatgttgtggcttatattagcctccacagtcccataagggggaactctagtctgtatcctgtagcatcaccatctcttcagcaactggtagtagagaaaaataatttcaactgtaccagaagagcccagtgcccagaaaccaatatcagttctatacagatacaaggtgatgctgattatttcatcaaccatcttggagttcccatcgtgcagtttgcttacgaggacatcaaaacattagagggtccaagttttctctccgaggcccgtttttctacacgagcaacaaaaattgaagaaatggatccctctttcaaccttcatgaaaccattactaagctctcaggagaagtgattttgcaaattgccaacgaacctgttctgccctttaatgcacttgatatagctttagaagttcaaaacaaccttaaaggtgatcaacccaacactcatcaactgttagccatggcgttacgcctgcgggagagtgctgaactttttcagtctgatgagatgcgacctgctaatgatcccaaggagagagcacccatccgcatccggatgctgaatgacattctccaagacatggagaaaagctttctggtaaagcaggcaccaccaggtttttatagaaacatcctctaccaccttgatgaaaagacaagccggttttcaatacttatagaggcttgggaacactgcaaaccccttgcatcaaatgagacccttcaagaagccctgtcagaggtgttgaacagcattaattcagctcaggtttacttcaaagcaggacttgatgtgttcaagagtgtcttggatgggaagaattgagaaaactctgagcatttttaaaagtttgtttacaattccacaagcaaaagctctaatttaaccagattttctgacattgaaggcttattttccccaatggctttttgacaagtataaagctattattacattgtattttttaaatgtaaatatagaaagaacattttgcacatttaatatttttcttatatctacatttctgaatatgtaaagcaagttattgaaataggacttaagaattacctattaaaaagaaatctgatatataaaaatatgtactattttaaggaaaaatttccaagaagttctggactatctttgttcctatggggagggcatataggaacacagtttattctctctgatagagctattaatgacttagtttctgtaaaagaaatggagagttgatatggttcagattaacttcactattaagtgttcaatatgaagaattcaagtattctgactgagtgattggttgacctaaaccactttgaatgtttctattttatgaaatgaagtttctcttcttaacacaactagatgtagtaatacactggttatgaaattgtatttttttaagtattaatgaaaaaagagccataagcattccaggagaaaatctcaagggagctacatagagcaatttaaatgcaaatttttttcctaacaacttacaaggtgactagctttgaaacccctaatttgcctcagttgattttctaagaatttcaggagtgatgtatgtcttaagagggagaaaaaaatatttcttattactttttctcttgtttctgttggaaacactgaagcagggactctaaaatgaaagcatctcacattggttttctttcttgtatcttttctgaaactccttgctgtaaggcagctttctcagagtactatatattttcaacagtaaagtagcagagtttctctttgaaacccaaaatgtcttctaaagaatcaaatttctatttctgcctctgacaaaaagaacttactatgaaagaaatagttgttttatcaataaaagccccttaatattatgaagaaacttttcatattttttcttctttatccttaattgtgactaagatggaaatctagaaaatattcatgcttctaagtttctgcagtgttactgtaagagagtgtctcgtctacacttcagttcttctctcatgtggaaaactaagctttttatattgacattgccattgaatagctctagcaactattattattcccccaaaccctaaaattctacctattaggtgtcaggttaaagttctaatttatctttagaaatttatgtgaaaaatggttttcctatactggataaagcaattccccttaggaaacatagcctcagagtatttcatataaattttctctatctaattcaaacatatctccccatgatacaccgccagagtgacattgcagacagtctgtgtatgtttaaattttcactttttatggatgagcataaacctagtcttagtttaaaggcaaactaaagttgaggggaaataattaatcaatactgattaattgatttataaggttcaacactgtctaccctaaataatttttatatgctcaaggcaaagcagggaatagaggcaattagctagataattcaagcagaaatccattttcatcgaaattgcctgtgtgcacatatttttagatgaaaaatgaaactaccttacaatattatttttttaaccaatgtatttgtttgcaaacatttgccatgttgaagagtgtgtataggaaaggtctagaaataaataggcttgtgcatacctaggcattcatgctctttcttcctcttcagagatcatcagaaaagaggtgggaatacacaagcaggtgcatgtaagcccaaaagctagaaagccttatatttaaccaaaggttgatgtgttcattccagttattcacttacagatgaaactaaaacaaataaaggcaagctattatcagtttggtagttcattattttagaacaaatttctaaattaatttattcccataacctacaatagcactgagaacagaaaacatgtttcttcttcattttgtttaaagattgcgtacctaggtaagtcacactgtatagataaaaaccttcttctgtattcctcacctctaaattatatgttatttgctatttgaaaactgtagttaactatggttttttattagtctattaaaagatacgtggagatattaaattatacctaaagcagacgtccaacaaattctgtacatgctgctttacatctttgcaacaaacctcttaactagcagcattatttctatagtgtgattacctgagggtgcctccaaatgtatatcatttcactcccctcccctccccacccccaatagattcaaataaataaaatcctgagcaaattaa

SEQ ID NO: 19395 - DNA, 3694 bp, Homo sapiens
  source 1..3694: mol_type = unassigned DNA
ctggaacgcttcggacttatcaggttaccggattcgagtcagaagcggcggcaggtctgaacgcttcggtaggataagtgcggtgggagggggctctgcggttttggggagcccagggcgggaacccggacccggctggaagtccggagcctggccgcagccccgcccctccgctctttcttggtgaccttaagccagtggctgcctttttctgagcccgggcggggccgaaggcggcccgtaggccctcgggactcccagcactgcagagggtgtgaggtctgacatccaagacacgttgtttcgtatttctgaaggaagaactgaagctccgggaagtgatggctggggatggggcgggcaacttggggaccgagtgtacgatccacgcctaaggttgagggcggccgagctagccaggcagccgtgaccccagtgcttttcagacgtttcttagcttccagagcccaacacatacagctgatacacgcagaccagatctggtcaggtcctcggaagctgagtccagagcgatgctgctgaagacagtgctcttgctgggacatgtggcccaggtgctgatgctggacaatgggctcctgcagacaccacccatgggctggctggcctgggaacgcttccgctgcaacattaactgtgatgaggacccaaagaactgcataagtgaacagctcttcatggagatggctgaccggatggcacaggatggatggcgggacatgggctacacatacctcaacattgatgactgctggatcggtggtcgcgatgccagtggccgcctgatgccggatcccaagcgcttccctcatggcattcctttcctggctgactacgttcactccctgggcctgaagttgggtatctacgcggacatgggcaacttcacctgcatgggttacccaggcaccacactggacaaggtggtccaggatgctcagaccttcgccgagtggaaggtagacatgctcaagctggatggctgcttctccacccccgaggagcgggcccaggggtaccccaagatggctgctgccctgaatgccacaggccgccccatcgccttctcctgcagctggccagcctatgaaggcggcctccccccaagggtgaactacagtctgctggcggacatctgcaacctctggcgtaactatgatgacatccaggactcctggtggagcgtgctctccatcctgaattggttcgtggagcaccaggacatactgcagccagtggccggccctgggcactggaatgaccctgacatgctgctcattgggaactttggtctcagcttagagcaatcccgggcccagatggccctgtggacggtgctggcagcccccctcttgatgtccacagacctgcgtaccatctccgcccagaacatggacattctgcagaatccactcatgatcaaaatcaaccaggatcccttaggcatccagggacgcaggattcacaaggaaaaatctctcatcgaagtgtacatgcggcctctgtccaacaaggctagcgccttagtcttcttcagctgcaggaccgatatgccttatcgctaccactcctcccttggccagctgaacttcaccgggtctgtgatatatgaggcccaggacgtctactcaggtgacatcatcagtggcctccgagatgaaaccaacttcacagtgatcatcaacccttcaggggtagtgatgtggtacctgtatcccatcaagaacctggagatgtcccagcagtgaggagctgggacatgtgacaggctgtggtggcaccactgagcctagaccatggagccttggcatgcccagggcaagtggggaggttctctgctccccaggcctgctcggtgactgaccccatcatacccaaagtgcaatctcacggccaggttctatgccctgtccaagcgtaaaccctcttggaaacttcttttggggcaattttcctgtggccttcctggcctctacttccatgtgcgcagccccacagacgttgctgagcaactcgccagcctcctgagctccatgcccatcaggactctagcctctgaccttgctgttgactctgaaatcaggatttggaagttttcgaattaggagtagagagatctgacctcttgccaggaatgcccatggatcatgtgattggcttttctacccatagagggccttgcagcctgataccacctgggagtgagggtcacaaaggagaccttggctccctcaggtcaccaataaacctgttctttaatcaagtagttgtaatatggacctggggtacctttagttagggactctggtggcactacacggggtgctggattcaaatctcacctctatggatgatgtctggcatcgtctggcccctccttttccaaagtgaccagaagattgtacttcctagagatgccagacttgcctcacacccaggagctgcccctgctgtgcctggtatgctggcagtggtgatggtgacaacacaatgaggccaagtagcaatgctcccaggtcctgcagcttgtgctctgcccagcagtgcccctggcccagcacctcagcctgctcttctctctggtggctccaccccaacccctacttcttttcctttatttctctcccaacctggctgcaaaggaggttcatattccccagatgtgtccacaaacctgtccaggagttgtgtcttaaaattgatttcctgtccctcttcctaaggacaggggtaacagtcaaagtgaaggaatgatgggttcttgcctgtcttgctttggtccgtatttcccaagccctcctcttttagccaaggctacagggcacttgtcttccctggtggctctcccctttggagagagctagtggcagagcaacctagctaggtcctccttgggctttgaatgcaggagcacccagtgccccaggccttgcactgtgctgcccaaggagtattttctgggtggatctcccatactcctcagggttctgaggtccttgtatttagggtatggtgtaaaaacttacatatgcacattttgttacatcatttaagatgattgaagctttactggttaagtatagggtcaccagagaaagttcctttccccagttgatgtcttgaggctgttgagaaacttaggacagaagcctacctcatcccaggcctgcccctccgtgcatagctctgcctttgggtcttgttcatagtgctgttcaggcaaaatggaatagtctcaggtgggaacaccttctcttgctagctccaggaaggctttgtgggaaatgagttgagaccatggacttgggagttgggggccagagttgagcctggacttgaccaattaattcccttacctttcagcccaagatagctacatgtctttacttgctgtataagttttccttttgtcctgggggtgcctgattgatcctatctcttcacccttcattctttcaacaaacatgccatctatctcccaggacatttattcccttctattcaaggccagttaggaatgcaattatttttttttttcagttaaatacagacttgtttggacgcaaggtaccctttctctttttaaaaactttttatcatgaaaactttcaaatacaaaaataaaatggtagagtgaacctccatgtacccagcatccagctccagtaaccat

SEQ ID NO: 19396 - DNA, 1869 bp, Homo sapiens
  source 1..1869: mol_type = unassigned DNA
gccccgccctcactggaacgcttcggacttatcaggttaccggattcgagtcagaagcggcggcaggtctgaacgcttcgcttccagagcccaacacatacagctgatacacgcagaccagatctggtcaggtcctcggaagctgagtccagagcgatgctgctgaagacagtgctcttgctgggacatgtggcccaggtgctgatgctggacaatgggctcctgcagacaccacccatgggctggctggcctgggaacgcttccgctgcaacattaactgtgatgaggacccaaagaactgcataagtgaacagctcttcatggagatggctgaccggatggcacaggatggatggcgggacatgggctacacatacctcaacattgatgactgctggatcggtggtcgcgatgccagtggccgcctgatgccggatcccaagcgcttccctcatggcattcctttcctggctgactacgttcactccctgggcctgaagttgggtatctacgcggacatgggcaacttcacctgcatgggttacccaggcaccacactggacaaggtggtccaggatgctcagaccttcgccgagtggaaggtagacatgctcaagctggatggctgcttctccacccccgaggagcgggcccaggggtaccccaagatggctgctgccctgaatgccacaggccgccccatcgccttctcctgcagctggccagcctatgaaggcggcctccccccaagggtgaactacagtctgctggcggacatctgcaacctctggcgtaactatgatgacatccaggactcctggtggagcgtgctctccatcctgaattggttcgtggagcaccaggacatactgcagccagtggccggccctgggcactggaatgaccctgacatgctgctcattgggaactttggtctcagcttagagcaatcccgggcccagatggccctgtggacggtgctggcagcccccctcttgatgtccacagacctgcgtaccatctccgcccagaacatggacattctgcagaatccactcatgatcaaaatcaaccaggatcccttaggcatccagggacgcaggattcacaaggaaaaatctctcatcgaagtgtacatgcggcctctgtccaacaaggctagcgccttagtcttcttcagctgcaggaccgatatgccttatcgctaccactcctcccttggccagctgaacttcaccgggtctgtgatatatgaggcccaggacgtctactcaggtgacatcatcagtggcctccgagatgaaaccaacttcacagtgatcatcaacccttcaggggtagtgatgtggtacctgtatcccatcaagaacctggagatgtcccagcagtgaggagctgggacatgtgacaggctgtggtggcaccactgagcctagaccatggagccttggcatgcccagggcaagtggggaggttctctgctccccaggcctgctcggtgactgaccccatcatacccaaagtgcaatctcacggccaggttctatgccctgtccaagcgtaaaccctcttggaaacttcttttggggcaattttcctgtggccttcctggcctctacttccatgtgcgcagccccacagacgttgctgagcaactcgccagcctcctgagctccatgcccatcaggactctagcctctgaccttgctgttgactctgaaatcaggatttggaagttttcgaattaggagtagagagatctgacctcttgccaggaatgcccatggatcatgtgattggcttttctacccatagagggccttgcagcctgataccacctgggagtgagggtcacaaaggagaccttg

SEQ ID NO: 19397 - DNA, 1856 bp, Homo sapiens
  source 1..1856: mol_type = unassigned DNA
ctggaacgcttcggacttatcaggttaccggattcgagtcagaagcggcggcaggtctgaacgcttcgagcccaacacatacagctgatacacgcagaccagatctggtcaggtcctcggaagctgagtccagagcgatgctgctgaagacagtgctcttgctgggacatgtggcccaggtgctgatgctggacaatgggctcctgcagacaccacccatgggctggctggcctgggaacgcttccgctgcaacattaactgtgatgaggacccaaagaactgcataagtgaacagctcttcatggagatggctgaccggatggcacaggatggatggcgggacatgggctacacatacctcaacattgatgactgctggatcggtggtcgcgatgccagtggccgcctgatgccggatcccaagcgcttccctcatggcattcctttcctggctgactacgttcactccctgggcctgaagttgggtatctacgcggacatgggcaacttcacctgcatgggttacccaggcaccacactggacaaggtggtccaggatgctcagaccttcgccgagtggaaggtagacatgctcaagctggatggctgcttctccacccccgaggagcgggcccaggggtaccccaagatggctgctgccctgaatgccacaggccgccccatcgccttctcctgcagctggccagcctatgaaggcggcctccccccaagggtgaactacagtctgctggcggacatctgcaacctctggcgtaactatgatgacatccaggactcctggtggagcgtgctctccatcctgaattggttcgtggagcaccaggacatactgcagccagtggccggccctgggcactggaatgaccctgacatgctgctcattgggaactttggtctcagcttagagcaatcccgggcccagatggccctgtggacggtgctggcagcccccctcttgatgtccacagacctgcgtaccatctccgcccagaacatggacattctgcagaatccactcatgatcaaaatcaaccaggatcccttaggcatccagggacgcaggattcacaaggaaaaatctctcatcgaagtgtacatgcggcctctgtccaacaaggctagcgccttagtcttcttcagctgcaggaccgatatgccttatcgctaccactcctcccttggccagctgaacttcaccgggtctgtgatatatgaggcccaggacgtctactcaggtgacatcatcagtggcctccgagatgaaaccaacttcacagtgatcatcaacccttcaggggtagtgatgtggtacctgtatcccatcaagaacctggagatgtcccagcagtgaggagctgggacatgtgacaggctgtggtggcaccactgagcctagaccatggagccttggcatgcccagggcaagtggggaggttctctgctccccaggcctgctcggtgactgaccccatcatacccaaagtgcaatctcacggccaggttctatgccctgtccaagcgtaaaccctcttggaaacttcttttggggcaattttcctgtggccttcctggcctctacttccatgtgcgcagccccacagacgttgctgagcaactcgccagcctcctgagctccatgcccatcaggactctagcctctgaccttgctgttgactctgaaatcaggatttggaagttttcgaattaggagtagagagatctgacctcttgccaggaatgcccatggatcatgtgattggcttttctacccatagagggccttgcagcctgataccacctgggagtgagggtcacaaaggagaccttggctccc

SEQ ID NO: 19398 - DNA, 1801 bp, Homo sapiens
  source 1..1801: mol_type = unassigned DNA
gcgcacgcgcaacctaacgcgggactgccagcaacttccgggcgtttacaggcaggcaggtcagtgatgtgtcctaagggtccgaccgacctagatacccctctttgattcctcctcttgggattagtgtccatctctggaagcaggatccaggaggacgggaggggccgctgcggaccgcagtcgctccacctggaggagacaccagaaggaagacagcctgagggacgcagccatccccggctcctaccggcgccccgccccgcgcatgcgcacgcgcacagggagtcagctggctgcgcgggaggtcacgggaagtggggcggtgcccagacagctggagggaaggaggtgtcaggcggggagagacgcaaacggcgggaccagcagcgacggtagcagcagcatggccgcgatctatgggggtgtagaggggggaggcacacgatccgaggtccttttagtctcagaggatgggaagatcctggcagaagcagatggactgagcacaaaccactggctgatcgggacagacaagtgtgtggagaggatcaatgagatggtgaacagggccaaacggaaagcaggggtggatcctctggtaccgctgcgaagcttgggcctatctctgagcggtggggaccaggaggacgcggggaggatcctgatcgaggagctgagggaccgatttccctacctgagtgaaagctacttaatcaccaccgatgccgccggctccatcgccacagctacaccggatggtggagttgtgctcatatctggaacaggctccaactgcaggctcatcaaccctgatggctccgagagtggctgcggcggctggggccatatgatgggtgatgagggttcagcctactggatcgcacaccaagcagtgaaaatagtgtttgactccattgacaacctagaggcggctcctcatgatatcggctacgtcaaacaggccatgttccactatttccaggtgccagatcggctagggatactcactcacctgtatagggactttgataaatgcaggtttgctgggttttgccggaaaattgcagaaggtgctcagcagggagaccccctttcccgctatatcttcaggaaggctggggagatgctgggcagacacatcgtagcagtgttgcccgagattgacccggtcttgttccagggcaagattggactccccatcctgtgcgtgggctctgtgtggaagagctgggagctgctgaaggaaggttttcttctggcgctgacccagggcagagagatccaggctcagaacttcttctccagcttcaccctgatgaagctgaggcactcctccgctctgggtggggccagcctaggggccaggcacatcgggcacctcctccccatggactatagcgccaatgccattgccttctattcctacaccttttcctagggggctggtcccggctccaccccctccaagctcagtggacactgggtctgaaaggaaggagtcttttgcttcctttctcctttttacaaaaacaaacatagaagaaaataaatgcactttatccactccccaattggactgcattatcaaacacatgtgctatgtacatcctcagtgcacctgccagcagatatcctggagggctcatgagtgaatttagtccaagatttaaagccctgcccccaggtgctcagcctgtgatctgtatccactcagcatgcacttgggcagatgatttgtctgtgtgctacccttccccccatattaccatacatatgcactgtgtggctgccagttaat

SEQ ID NO: 19399 - DNA, 1778 bp, Homo sapiens
  source 1..1778: mol_type = unassigned DNA
actgccagcaacttccgggcgtttacaggcaggcaggtcagtgatgtgtcctaagggtccgaccgacctagatacccctctttgattcctcctcttgggattagtgtccatctctggaagcaggatccaggaggacgggaggggccgctgcggaccgcagtcgctccacctggaggagacaccagaaggaagacagcctgagggacgcagccatccccggctcctaccggcgccccgccccgcgcatgcgcacgcgcacagggagtcagctggctgcgcgggaggtcacgggaagtggggcggtgcccagacagctggagggaaggaggtgtcaggcggggagagacgcaaacggcgggaccagcagcgacggtagcagcagcatggccgcgatctatgggggtgtagaggggggaggcacacgatccgaggtccttttagtctcagaggatgggaagatcctggcagaagcagatggactgagcacaaaccactggctgatcgggacagacaagtgtgtggagaggatcaatgagatggtgaacagggccaaacggaaagcaggggtggatcctctggtaccgctgcgaagcttgggcctatctctgagcggtggggaccaggaggacgcggggaggatcctgatcgaggagctgagggaccgatttccctacctgagtgaaagctacttaatcaccaccgatgccgccggctccatcgccacagctacaccggatggtggagttgtgctcatatctggaacaggctccaactgcaggctcatcaaccctgatggctccgagagtggctgcggcggctggggccatatgatgggtgatgagggttcagcctactggatcgcacaccaagcagtgaaaatagtgtttgactccattgacaacctagaggcggctcctcatgatatcggctacgtcaaacaggccatgttccactatttccaggtgccagatcggctagggatactcactcacctgtatagggactttgataaatgcaggtttgctgggttttgccggaaaattgcagaaggtgctcagcagggagaccccctttcccgctatatcttcaggaaggctggggagatgctgggcagacacatcgtagcagtgttgcccgagattgacccggtcttgttccagggcaagattggactccccatcctgtgcgtgggctctgtgtggaagagctgggagctgctgaaggaaggttttcttctggcgctgacccagggcagagagatccaggctcagaacttcttctccagcttcaccctgatgaagctgaggcactcctccgctctgggtggggccagcctaggggccaggcacatcgggcacctcctccccatggactatagcgccaatgccattgccttctattcctacaccttttcctagggggctggtcccggctccaccccctccaagctcagtggacactgggtctgaaaggaaggagtcttttgcttcctttctcctttttacaaaaacaaacatagaagaaaataaatgcactttatccactccccaattggactgcattatcaaacacatgtgctatgtacatcctcagtgcacctgccagcagatatcctggagggctcatgagtgaatttagtccaagatttaaagccctgcccccaggtgctcagcctgtgatctgtatccactcagcatgcacttgggcagatgatttgtctgtgtgctacccttccccccatattaccatacatatgcactgtgtggctgccagttaat

SEQ ID NO: 19400 - DNA, 2202 bp, Homo sapiens
  source 1..2202: mol_type = unassigned DNA
acccgaggccccggtccaatatggcgacctccacgggtcgctggcttctcctccggcttgcactattcggcttcctctgggaagcgtccggcggcctcgactcgggggcctcccgcgacgacgacttgctactgccctatccacgcgcgcgcgcgcgcctcccccgggactgcacacgggtgcgcgccggcaaccgcgagcacgagagttggcctccgcctcccgcgactcccggcgccggcggtctggccgtgcgcaccttcgtgtcgcacttcagggaccgcgcggtggccggccacctgacgcgggccgttgagcccctgcgcaccttctcggtgctggagcccggtggacccggcggctgcgcggcgagacgacgcgccaccgtggaggagacggcgcgggcggccgactgccgtgtcgcccagaacggcggcttcttccgcatgaactcgggcgagtgcctggggaacgtggtgagcgacgagcggcgggtgagcagctccggggggctgcagaacgcgcagttcgggatccgccgcgacgggaccctggtcaccgggtacctgtctgaggaggaggtgctggacactgagaacccatttgtgcagctgctgagtggggtcgtgtggctgattcgtaatggaagcatctacatcaacgagagccaagccacagagtgtgacgagacacaggagacaggttcctttagcaaatttgtgaatgtgatatcagccaggacggccattggccacgaccggaaagggcagctggtgctctttcatgcagacggccaaacggagcagcgtggcatcaacctgtgggaaatggcggagttcctgctgaaacaggacgtggtcaacgccatcaacctggatgggggtggctctgccacctttgtgctcaacgggaccttggccagttacccgtcagatcactgccaggacaacatgtggcgctgtccccgccaagtgtccaccgtggtgtgtgtgcacgaaccccgctgccagccgcctgactgccacggccacgggacctgcgtggacgggcactgccaatgcaccgggcacttctggcggggtcccggctgtgatgagctggactgtggcccctctaactgcagccagcacggactgtgcacggagaccggctgccgctgtgatgccggatggaccgggtccaactgcagtgaagagtgtccccttggctggcatgggccgggctgccagaggccttgtaagtgtgagcaccattgtccctgtgaccccaagactggcaactgcagcgtctccagagtaaagcagtgtctccagccacctgaagccaccctgagggcgggagaactctcctttttcaccaggaccgcctggctagccctcaccctggcgctggccttcctcctgctgatcagcactgcagcaaacctgtccttgctcctgtccagagcagagaggaaccggcgcctgcatggggactatgcataccacccgctgcaggagatgaacggggagcctctggccgcagagaaggagcagccagggggcgcccacaaccccttcaaggactgaagcctcaagctgcccggggtggcacgtcgcgaaagcttgtttccccacggtctggcttctgcaggggaaatttcaaggccactggcgtggaccatctgggtgtcctcagcccctgtggggcagccaagttcctgatagcacttgtgcctcagcccctcacctggccacctgccagggcacctgcaaccctagcaataccatgctcgctggagaggctcagctgcctgcttctggcctgcctgtgtctgctgccgagaagcccgtgcccccgggagggctgccgcactgccaaagagtctccctcctcctggggaaggggctgccaacgaaccagactcagtgaccacgtcatgacagaacagcacatcctggccagcacccctggctggagtgggttaaagggacgagtctgccttcctggctgtgacacgggaccccttttctacagacctcatcactggatttgccaactagaattcgatttcctgtcataggaagctccttggaagaagggatggggggatgagatcatgtttacagacctgttttgtcatcctgctgccaagaagttttttaatcacttgaataaattgatataataaaaggagccaccaggtggtgtgtggattctgaa

SEQ ID NO: 19401 - DNA, 2073 bp, Homo sapiens
  source 1..2073: mol_type = unassigned DNA
gacccgaggccccggtccaatatggcgacctccacgggtcgctggcttctcctccggcttgcactattcggcttcctctgggaagcgtccggcggcctcgactcgggggcctcccgcgacgacgacttgctactgccctatccacgcgcgcgcgcgcgcctcccccgggactgcacacgggtgcgcgccggcaaccgcgagcacgagagttggcctccgcctcccgcgactcccggcgccggcggtctggccgtgcgcaccttcgtgtcgcacttcagggaccgcgcggtggccggccacctgacgcgggccgttgagcccctgcgcaccttctcggtgctggagcccggtggacccggcggctgcgcggcgagacgacgcgccaccgtggaggagacggcgcgggcggccgactgccgtgtcgcccagaacggcggcttcttccgcatgaactcgggcgagtgcctggggaacgtggtgagcgacgagcggcgggtgagcagctccggggggctgcagaacgcgcagttcgggatccgccgcgacgggaccctggtcaccgggtacctgtctgaggaggaggtgctggacactgagaacccatttgtgcagctgctgagtggggtcgtgtggctgattcgtaatggaagcatctacatcaacgagagccaagccacagagtgtgacgagacacaggagacaggttcctttagcaaatttgtgaatgtgatatcagccaggacggccattggccacgaccggaaagggcagctggtgctctttcatgcagacggccaaacggagcagcgtggcatcaacctgtgggaaatggcggagttcctgctgaaacaggacgtggtcaacgccatcaacctggatgggggtggctctgccacctttgtgctcaacgggaccttggccagttacccgtcagatcactgccaggacaacatgtggcgctgtccccgccaagtgtccaccgtggtgtgtgtgcacgaaccccgctgccagccgcctgactgccacggccacgggacctgcgtggacgggcactgccaatgcaccgggcacttctggcggggtcccggctgtgatgagctggactgtggcccctctaactgcagccagcacggactgtgcacggagaccggctgccgctgtgatgccggatggaccgggtccaactgcagtgaagtaaagcagtgtctccagccacctgaagccaccctgagggcgggagaactctcctttttcaccaggaccgcctggctagccctcaccctggcgctggccttcctcctgctgatcagcactgcagcaaacctgtccttgctcctgtccagagcagagaggaaccggcgcctgcatggggactatgcataccacccgctgcaggagatgaacggggagcctctggccgcagagaaggagcagccagggggcgcccacaaccccttcaaggactgaagcctcaagctgcccggggtggcacgtcgcgaaagcttgtttccccacggtctggcttctgcaggggaaatttcaaggccactggcgtggaccatctgggtgtcctcagcccctgtggggcagccaagttcctgatagcacttgtgcctcagcccctcacctggccacctgccagggcacctgcaaccctagcaataccatgctcgctggagaggctcagctgcctgcttctggcctgcctgtgtctgctgccgagaagcccgtgcccccgggagggctgccgcactgccaaagagtctccctcctcctggggaaggggctgccaacgaaccagactcagtgaccacgtcatgacagaacagcacatcctggccagcacccctggctggagtgggttaaagggacgagtctgccttcctggctgtgacacgggaccccttttctacagacctcatcactggatttgccaactagaattcgatttcctgtcataggaagctccttggaagaagggatggggggatgagatcatgtttacagacctgttttgtcatcctgctgccaagaagttttttaatcacttgaataaattgatataataaaagg

SEQ ID NO: 19402 - DNA, 2780 bp, Homo sapiens
  source 1..2780: mol_type = unassigned DNA
agtagggaagtagctatggcagtgcctgatacaaaataaactccaaatgtgtatttattagatggttggatggaagttatttgcgtgtgaaagcgcgttttacccgaaggcgctctgtgagggccagcgggtccccttcggccctggagccggggtcacacgctccccaccgcgtgcggtcacgagacgcccccaagggagtatcctggtacccggaagccgcgactcctggccctgagcccgggcttagccttcgggtccacgtggccggaggccggcagctgattggacgcgggccgccccaccccctggccgtcgcgggacccgcaggactgagaccatggaggcggtggcggtggccgcggcggtgggggtccttctcctggccggggccgggggcgcggcaggcgacgaggcccgggaggcggcggccgtgcgggcgctcgtggcccggctgctggggccaggccccgcggccgacttctccgtgtcggtggagcgcgctctggctgccaagccgggcttggacacctacagcctgggcggcggcggcgcggcgcgcgtgcgggtgcgcggctccacgggcgtggcggccgccgcggggctgcaccgctacctgcgcgacttctgtggctgccacgtggcctggtccggctctcagctgcgcctgccgcggccactgccagccgtgccgggggagctgaccgaggccacgcccaacaggtaccgctattaccagaatgtgtgcacgcaaagctactctttcgtgtggtgggactgggcccgctgggagcgagagatagactggatggcgctgaatggcatcaacctggcactggcctggagcggccaggaggccatctggcagcgggtgtacctggccttgggcctgacccaggcagagatcaatgagttctttactggtcctgccttcctggcctgggggcgaatgggcaacctgcacacctgggatggccccctgcccccctcctggcacatcaagcagctttacctgcagcaccgggtcctggaccagatgcgctccttcggcatgaccccagtgctgcctgcattcgcggggcatgttcccgaggctgtcaccagggtgttccctcaggtcaatgtcacgaagatgggcagttggggccactttaactgttcctactcctgctccttccttctggctccggaagaccccatattccccatcatcgggagcctcttcctgcgagagctgatcaaagagtttggcacagaccacatctatggggccgacactttcaatgagatgcagccaccttcctcagagccctcctaccttgccgcagccaccactgccgtctatgaggccatgactgcagtggatactgaggctgtgtggctgctccaaggctggctcttccagcaccagccgcagttctgggggcccgcccagatcagggctgtgctgggagctgtgccccgtggccgcctcctggttctggacctgtttgctgagagccagcctgtgtatacccgcactgcctccttccagggccagcccttcatctggtgcatgctgcacaactttgggggaaaccatggtctttttggagccctagaggctgtgaacggaggcccagaagctgcccgcctcttccccaactccaccatggtaggcacgggcatggcccccgagggcatcagccagaacgaagtggtctattccctcatggctgagctgggctggcgaaaggacccagtgccagatttggcagcctgggtgaccagctttgccgcccggcggtatggggtctcccacccggacgcaggggcagcgtggaggctactgctccggagtgtgtacaactgctccggggaggcctgcaggggccacaatcgtagcccgctggtcaggcggccgtccctacagatgaataccagcatctggtacaaccgatctgatgtgtttgaggcctggcggctgctgctcacatctgctccctccctggccaccagccccgccttccgctacgacctgctggacctcactcggcaggcagtgcaggagctggtcagcttgtactatgaggaggcaagaagcgcctacctgagcaaggagctggcctccctgttgagggctggaggcgtcctggcctatgagctgctgccggcactggacgaggtgctggctagtgacagccgcttcttgctgggcagctggctagagcaggcccgagcagcggcagtcagtgaggccgaggccgatttctacgagcagaacagccgctaccagctgaccttgtgggggccagaaggcaacatcctggactatgccaacaagcagctggcggggttggtggccaactactacacccctcgctggcggcttttcctggaggcgctggttgacagtgtggcccagggcatccctttccaacagcaccagtttgacaaaaatgtcttccaactggagcaggccttcgttctcagcaagcagaggtaccccagccagccgcgaggagacactgtggacctggccaagaagatcttcctcaaatattacccccgctgggtggccggctcttggtgatagattcgccaccactgggccttgttttccgctaattccagggcagattccagggcccagagctggacagacatcacaggataacccaggcctgggaggaggccccacggcctgctggtggggtctgacctggggggattggagggaaatgacctgccctccaccaccacccaaagtgtgggattaaagtactgttttctttccactt

SEQ ID NO: 19403 - DNA, 2206 bp, Homo sapiens
  source 1..2206: mol_type = unassigned DNA
gcgggacccgcaggactgagaccatggaggcggtggcggtggccgcggcggtgggggtccttctcctggccggggccgggggcgcggcaggcgacgaggcccgggaggcggcggccgtgcgggcgctcgtggcccggctgctggggccaggccccgcggccgacttctccgtgtcggtggagcgcgctctggctgccaagccgggcttggacacctacagcctgggcggcggcggcgcggcgcgcgtgcgggtgcgcggctccacgggcgtggcggccgccgcggggctgcaccgctacctgcgcgacttctgtggctgccacgtggcctggtccggctctcagctgcgcctgccgcggccactgccagccgtgccgggggagctgaccgaggccacgcccaacaggtaccgctattaccagaatgtgtgcacgcaaagctactctttcgtgtggtgggactgggcccgctgggagcgagagatagactggatggcgctgaatggcatcaacctggcactggcctggagcggccaggaggccatctggcagcgggtgtacctggccttgggcctgacccaggcagagatcaatgagttctttactggtcctgccttcctggcctgggggcgaatgggcaacctgcacacctgggatggccccctgcccccctcctggcacatcaagcagctttacctgcagcaccgggtcctggaccagatgcgctccttcggcatgaccccagtgctgcctgcattcgcggggcatgttcccgaggctgtcaccagtggatactgaggctgtgtggctgctccaaggctggctcttccagcaccagccgcagttctgggggcccgcccagatcagggctgtgctgggagctgtgccccgtggccgcctcctggttctggacctgtttgctgagagccagcctgtgtatacccgcactgcctccttccagggccagcccttcatctggtgcatgctgcacaactttgggggaaaccatggtctttttggagccctagaggctgtgaacggaggcccagaagctgcccgcctcttccccaactccaccatggtaggcacgggcatggcccccgagggcatcagccagaacgaagtggtctattccctcatggctgagctgggctggcgaaaggacccagtgccagatttggcagcctgggtgaccagctttgccgcccggcggtatggggtctcccacccggacgcaggggcagcgtggaggctactgctccggagtgtgtacaactgctccggggaggcctgcaggggccacaatcgtagcccgctggtcaggcggccgtccctacagatgaataccagcatctggtacaaccgatctgatgtgtttgaggcctggcggctgctgctcacatctgctccctccctggccaccagccccgccttccgctacgacctgctggacctcactcggcaggcagtgcaggagctggtcagcttgtactatgaggaggcaagaagcgcctacctgagcaaggagctggcctccctgttgagggctggaggcgtcctggcctatgagctgctgccggcactggacgaggtgctggctagtgacagccgcttcttgctgggcagctggctagagcaggcccgagcagcggcagtcagtgaggccgaggccgatttctacgagcagaacagccgctaccagctgaccttgtgggggccagaaggcaacatcctggactatgccaacaagcagctggcggggttggtggccaactactacacccctcgctggcggcttttcctggaggcgctggttgacagtgtggcccagggcatccctttccaacagcaccagtttgacaaaaatgtcttccaactggagcaggccttcgttctcagcaagcagaggtaccccagccagccgcgaggagacactgtggacctggccaagaagatcttcctcaaatattacccccgctgggtggccggctcttggtgatagattcgccaccactgggccttgttttccgctaattccagggcagattccagggcccagagctggacagacatcacaggataacccaggcctgggaggaggccccacggcctgctggtggggtctgacctggggggattggagggaaatgacctgccctccaccaccacccaaagtgtgggattaaagtactgttttctttccactt

SEQ ID NO: 19404 - DNA, 1530 bp, Homo sapiens
  source 1..1530: mol_type = unassigned DNA
ttccagacctaccagcagctcaatggccttcccaaagaagaaacttcagggtcttgtggctgcaaccatcacgccaatgactgagaatggagaaatcaacttttcagtaattggtcagtatgtggattatcttgtgaaagaacagggagtgaagaacatttttgtgaatggcacaacaggagaaggcctgtccctgagcgtctcagagcgtcgccaggttgcagaggagtgggtgacaaaagggaaggacaagctggatcaggtgataattcacgtaggagcactgagcttgaaggagtcacaggaactggcccaacatgcagcagaaataggagctgatggcatcgctgtcattgcaccgttcttcctcaagccatggaccaaagatatcctgattaatttcctaaaggaagtggctgctgccgcccctgccctgccattttattactatcacattcctgccttgacaggggtaaagattcgtgctgaggagttgttggatgggattctggataagatccccaccttccaagggctgaaattcagtgatacagatctcttagacttcgggcaatgtgttgatcagaatcgccagcaacagtttgctttcctttttggggtggatgagcaactgttgagtgctctggtgatgggagcaactggagcagtgggcagtacctataactacctgggaaaaaagacaaaccagatgttggaggcttttgaacaaaaggacttctctttagccctgaactatcagttttgtatccagagatttatcaactttgttgtcaaactaggttttggagtgtcacagaccaaagccatcatgactctggtctctgggattccaatgggcccaccccggcttccactgcagaaagcctccagggagtttactgatagtgctgaagctaaactgaagagcctggatttcctttctttcactgatttaaaggatggaaacttggaagctggtagctagtgcctctctatcaaatcagggtttgcaccttgagacataatctaccttaaatagtgcatttttttctcagggaattttagatgaacttgaataaactctcctagcaaatgaaatctcacaataagcattgaggtaccttttgtgagccttaaaaagtcttattttgtgaaggggcaaaaactctaggagtcacaactctcagtcattcatttcacagatttttttgtggagaaatttctgtttatatggatgaaatggaatcaagaggaaaattgtaattgattaattccatctgtctttaggagctctcattatctcggtctctggttcctaatcctattttaaagttgtctaattttaaaccactataatatgtcttcattttaataaatattcatttggaatctaggaaaactctgagctactgcatttaggcaggcactttaataccaaactgtaacatgtctcaactgtatacaactcaaaatacaccagctcatttggctgctcagtctaactctagaatggatgcttttgaattcatt

SEQ ID NO: 19405 - DNA, 352 bp, Homo sapiens
  source 1..352: mol_type = unassigned DNA
ttccagacctaccagcagctcaatggccttcccaaagaagaaacttcagggtcttgtggctgcaaccatcacgccaatgactgagaatggagaaatcaacttttcagtaattggtcagtatgtggattatcttgtgaaagaacagggagtgaagaacatttttgtgaatggcacaacaggagaaggcctgtccctgagcgtctcagagcgtcgccaggttgcagaggagtgggtgacaaaagggaaggacaagtcaaaccatcataagttggggaccatccgcacaacccaaagtagacggagtagctttagaagacagctgaaggcctggcacagtggctcacacctgtaa

SEQ ID NO: 19406 - DNA, 873 bp, Homo sapiens
  source 1..873: mol_type = unassigned DNA
gcggctgcacggacaagagcggaggcctggagaaatcaacttttcagtaattggtcagtatgtggattatcttgtgaaagaacagggagtgaagaacatttttgtgaatggcacaacaggagaaggcctgtccctgagcgtctcagagcgtcgccaggttgcagaggagtgggtgacaaaagggaaggacaagtgagtggctgcatgaggataaaaatgccctttggcaacagctgtattcagtgagcctcttccccagaggatacgccctccctgcttcctggtcagagccggggcttgaggtcagctggtgggaagatgagcagggcccccgggatcctggcttcttggagaagagccccctccctttctgtgcagaagggcagccaaactgctagacacacctgccacccagaggttccgctgggaaactgcttcttacctgtctacaaggccagtcccctcacagttacccgtctttgggctgaaaggctggatcaggtgataattcacgtaggagcactgagcttgaaggagtcacaggaactggcccaacatgcagcagaaataggagctgatggcatcgctgtcattgcaccgttcttcctcaagccatggaccaaagatatcctgattaatttcctaaaggaagtggctgctgccgcccctgccctgccattttattactatcacattcctgccttgacaggggtaaagattcgtgctgaggagttgttggatgggattctggataagatccccaccttccaagggctgaaattcagtgatacagatctcttagacttcgggcaatgtgttgatcagaatcgccagcaacagtttgctttcctttttggggtggatgagcatctc

SEQ ID NO: 19407 - DNA, 745 bp, Homo sapiens
  source 1..745: mol_type = unassigned DNA
ttccagacctaccagcagctcaatggccttcccaaagaagaaacttcagggtcttgtggctgcaaccatcacgccaatgactgagaatggagaaatcaacttttcagtaattggtcagtatgtggattatcttgtgaaagaacagggagtgaagaacatttttgtgaatggcacaacaggagaaggcctgtccctgagcgtctcagagcgtcgccaggttgcagaggagtgggtgacaaaagggaaggacaagctggatcaggtgataattcacgtaggagcactgagcttgaaggagtcacaggaactggcccaacatgcagcagaaataggagctgatggcatcgctgtcattgcaccgttcttcctcaagccatggaccaaagatatcctgattaatttcctaaaggaagtggctgctgccgcccctgccctgccattttattactatcacattcctgccttgacaggggtaaagattcgtgctgaggagttgttggatgggattctggataagatccccaccttccaagggctgaaattcagtgatacagatctcttagacttcgggcaatgtgttgatcagaatcgccagcaacagtttgctttcctttttggggtggatgagttttgtatccagagatttatcaactttgttgtcaaactagaaaactcaaaactcaaagtttcaaagaaccaaaggactcttcctctgggcaccacaaacttccccttcctccactga

SEQ ID NO: 19408 - DNA, 2231 bp, Homo sapiens
  source 1..2231: mol_type = unassigned DNA
acttaatgggctcaaggtcacctacctgacctaccagcagctcaatggccttcccaaagaagaaacttcagggtcttgtggctgcaaccatcacgccaatgactgagaatggagaaatcaacttttcagtaattggtcagtatgtggattatcttgtgaaagaacagggagtgaagaacatttttgtgaatggcacaacaggagaaggcctgtccctgagcgtctcagagcgtcgccaggttgcagaggagtgggtgacaaaagggaaggacaagctggatcaggtgataattcacgtaggagcactgagcttgaaggagtcacaggaactggcccaacatgcagcagaaataggagctgatggcatcgctgtcattgcaccgttcttcctcaagccatggaccaaagatatcctgattaatttcctaaaggaagtggctgctgccgcccctgccctgccattttattactatcacattcctgccttgacaggggtaaagattcgtgctgaggagttgttggatgggattctggataagatccccaccttccaagggctgaaattcagtgatacagatctcttagacttcgggcaatgtgttgatcagaatcgccagcaacagtttgctttcctttttggggtggatgagcaactgttgagtgctctggtgatgggagcaactggagcagtgggcagtacctataactacctgggaaaaaagacaaaccagatgttggaggcttttgaacaaaaggacttctctttagccctgaactatcagttttgtatccagagatttatcaactttgttgtcaaactaggttttggagtgtcacagaccaaagccatcatgactctggtctctgggattccaatgggcccaccccggcttccactgcagaaagcctccagggagtttactgatagtgctgaagctaaactgaagagcctggatttcctttctttcactgatttaaaggatggaaacttggaagctggtagctagtgcctctctatcaaatcagggtttgcaccttgagacataatctaccttaaatagtgcatttttttctcagggaattttagatgaacttgaataaactctcctagcaaatgaaatctcacaataagcattgaggtaccttttgtgagccttaaaaagtcttattttgtgaaggggcaaaaactctaggagtcacaactctcagtcattcatttcacagatttttttgtggagaaatttctgtttatatggatgaaatggaatcaagaggaaaattgtaattgattaattccatctgtctttaggagctctcattatctcggtctctggttcctaatcctattttaaagttgtctaattttaaaccactataatatgtcttcattttaataaatattcatttggaatctaggaaaactctgagctactgcatttaggcaggcactttaataccaaactgtaacatgtctcaactgtatacaactcaaaatacaccagctcatttggctgctcagtctaactctagaatggatgcttttgaattcatttcgatgtcaccacttttcgctctttaaaaacactgggtcaggtgaggacttgtttcagttcctataactaagtaaagggcggctttctcataacaaaggaaaaagtcttccccaaagatgaatttaagtctccacttttttctatacagaaaactcaaaactcaaagtttcaaagaaccaaaggactcttcctctgggcaccacaaacttccccttcctccactgagaagactgtctctcccgcaggaccctgaattattgaaatcgaaggctgacttcctttctgcagtgagcccaggggctaatgttattatcctgtcacacttgcaactagtgacttttgtttagtgatagaagatttggggaggacccaaaggactcagaactttctctccatacctccttttactcttttctttctgtgtaatgtatcaacaactgtttaatctcccttctaacaaaccttgatataagctttctgatatcaaagtatattgacagttaacccttactgattttaaacttgactatccagtctgttaattacctaagattttgttttcatttcatctctaattgttttgatcattggcagagaaagagtatttgaaattcatatcagttttgctccttattttaatctctttgaattaaaaataaaactttttcaaaatggaaa

SEQ ID NO: 19409 - DNA, 2418 bp, Homo sapiens
  source 1..2418: mol_type = unassigned DNA
gcggctgcacggacaagagcggaggcctggagaaatcaacttttcagtaattggtcagtatgtggattatcttgtgaaagaacagggagtgaagaacatttttgtgaatggcacaacaggagaaggcctgtccctgagcgtctcagagcgtcgccaggttgcagaggagtgggtgacaaaagggaaggacaagtgagtggctgcatgaggataaaaatgccctttggcaacagctgtattcagtgagcctcttccccagaggatacgccctccctgcttcctggtcagagccggggcttgaggtcagctggtgggaagatgagcagggcccccgggatcctggcttcttggagaagagccccctccctttctgtgcagaagggcagccaaactgctagacacacctgccacccagaggttccgctgggaaactgcttcttacctgtctacaaggccagtcccctcacagttacccgtctttgggctgaaaggctggatcaggtgataattcacgtaggagcactgagcttgaaggagtcacaggaactggcccaacatgcagcagaaataggagctgatggcatcgctgtcattgcaccgttcttcctcaagccatggaccaaagatatcctgattaatttcctaaaggaagtggctgctgccgcccctgccctgccattttattactatcacattcctgccttgacaggggtaaagattcgtgctgaggagttgttggatgggattctggataagatccccaccttccaagggctgaaattcagtgatacagatctcttagacttcgggcaatgtgttgatcagaatcgccagcaacagtttgctttcctttttggggtggatgagcaactgttgagtgctctggtgatgggagcaactggagcagtgggcagtacctataactacctgggaaaaaagacaaaccagatgttggaggcttttgaacaaaaggacttctctttagccctgaactatcagttttgtatccagagatttatcaactttgttgtcaaactaggttttggagtgtcacagaccaaagccatcatgactctggtctctgggattccaatgggcccaccccggcttccactgcagaaagcctccagggagtttactgatagtgctgaagctaaactgaagagcctggatttcctttctttcactgatttaaaggatggaaacttggaagctggtagctagtgcctctctatcaaatcagggtttgcaccttgagacataatctaccttaaatagtgcatttttttctcagggaattttagatgaacttgaataaactctcctagcaaatgaaatctcacaataagcattgaggtaccttttgtgagccttaaaaagtcttattttgtgaaggggcaaaaactctaggagtcacaactctcagtcattcatttcacagatttttttgtggagaaatttctgtttatatggatgaaatggaatcaagaggaaaattgtaattgattaattccatctgtctttaggagctctcattatctcggtctctggttcctaatcctattttaaagttgtctaattttaaaccactataatatgtcttcattttaataaatattcatttggaatctaggaaaactctgagctactgcatttaggcaggcactttaataccaaactgtaacatgtctcaactgtatacaactcaaaatacaccagctcatttggctgctcagtctaactctagaatggatgcttttgaattcatttcgatgtcaccacttttcgctctttaaaaacactgggtcaggtgaggacttgtttcagttcctataactaagtaaagggcggctttctcataacaaaggaaaaagtcttccccaaagatgaatttaagtctccacttttttctatacagaaaactcaaaactcaaagtttcaaagaaccaaaggactcttcctctgggcaccacaaacttccccttcctccactgagaagactgtctctcccgcaggaccctgaattattgaaatcgaaggctgacttcctttctgcagtgagcccaggggctaatgttattatcctgtcacacttgcaactagtgacttttgtttagtgatagaagatttggggaggacccaaaggactcagaactttctctccatacctccttttactcttttctttctgtgtaatgtatcaacaactgtttaatctcccttctaacaaaccttgatataagctttctgatatcaaagtatattgacagttaacccttactgattttaaacttgactatccagtctgttaattacctaagattttgttttcatttcatctctaattgttttgatcattggcagagaaagagtatttgaaattcatatcagttttgctccttattttaatctctttga

SEQ ID NO: 19410 - DNA, 1536 bp, Homo sapiens
  source 1..1536: mol_type = unassigned DNA
gggcggagcggctgcacggacaagagcggaggcctggaaggggaaactgaagcagaaagaggttacttaatgggctcaaggtcacctacctgacctaccagcagctcaatggccttcccaaagaagaaacttcagggtcttgtggctgcaaccatcacgccaatgactgagaatggagaaatcaacttttcagtaattggtcagtatgtggattatcttgtgaaagaacagggagtgaagaacatttttgtgaatggcacaacaggagaaggcctgtccctgagcgtctcagagcgtcgccaggttgcagaggagtgggtgacaaaagggaaggacaagctggatcaggtgataattcacgtaggagcactgagcttgaaggagtcacaggaactggcccaacatgcagcagaaataggagctgatggcatcgctgtcattgcaccgttcttcctcaagccatggaccaaagatatcctgattaatttcctaaaggaagtggctgctgccgcccctgccctgccattttattactatcacattcctgccttgacaggggtaaagattcgtgctgaggagttgttggatgggattctggataagatccccaccttccaagggctgaaattcagtgatacagatctcttagacttcgggcaatgtgttgatcagaatcgccagcaacagtttgctttcctttttggggtggatgagttttgtatccagagatttatcaactttgttgtcaaactagaaaactcaaaactcaaagtttcaaagaaccaaaggactcttcctctgggcaccacaaacttccccttcctccactgagaagactgtctctcccgcaggaccctgaattattgaaatcgaaggctgacttcctttctgcagtgagcccaggggctaatgttattatcctgtcacacttgcaactagtgacttttgtttagtgatagaagatttggggaggacccaaaggactcagaactttctctccatacctccttttactcttttctttctgtgtaatgtatcaacaactgtttaatctcccttctaacaaaccttgatataagctttctgatatcaaagtatattgacagttaacccttactgattttaaacttgactatccagtctgttaattacctaagattttgttttcatttcatctctaattgttttgatcattggcagagaaagagtatttgaaattcatatcagttttgctccttattttaatctctttgaattaaaaataaaactttttcaaaatggaaatttgaaattataagtagacttcaattatctttgctaatcctctctttaattagtcagctagttaaaagttgttatattcatatatcctcaaccctctttttgcctttgtagcttttaatttcctgaaagaagaaaatgagttgttcgtttttggttctgaggatgtgatatccgtacttactgatactaaagccaaatttaaattctaaaattaattcttgggtatccaataaacaaagaactatttttcta

SEQ ID NO: 19411 - DNA, 1389 bp, Homo sapiens
  source 1..1389: mol_type = unassigned DNA
gcggctgcacggacaagagcggaggcctggagaaatcaacttttcagtaattggtcagtatgtggattatcttgtgaaagaacagggagtgaagaacatttttgtgaatggcacaacaggagaaggcctgtccctgagcgtctcagagcgtcgccaggttgcagaggagtgggtgacaaaagggaaggacaaaagggcagccaaactgctagacacacctgccacccagaggttccgctgggaaactgcttcttacctgtctacaaggccagtcccctcacagttacccgtctttgggctgaaaggctggatcaggtgataattcacgtaggagcactgagcttgaaggagtcacaggaactggcccaacatgcagcagaaataggagctgatggcatcgctgtcattgcaccgttcttcctcaagccatggaccaaagatatcctgattaatttcctaaaggaagtggctgctgccgcccctgccctgccattttattactatcacattcctgccttgacaggggtaaagacaactgttgagtgctctggtgatgggagcaactggagcagtgggcagttttgtatccagagatttatcaactttgttgtcaaactaggttttggagtgtcacagaccaaagccatcatgactctggtctctgggattccaatgggcccaccccggcttccactgcagaaagcctccagggagtttactgatagtgctgaagctaaactgaagagcctggatttcctttctttcactgatttaaaggatggaaacttggaagctggtagctagtgcctctctatcaaatcagggtttgcaccttgagacataatctaccttaaatagtgcatttttttctcagggaattttagatgaacttgaataaactctcctagcaaatgaaatctcacaataagcattgaggtaccttttgtgagccttaaaaagtcttattttgtgaaggggcaaaaactctaggagtcacaactctcagtcattcatttcacagatttttttgtggagaaatttctgtttatatggatgaaatggaatcaagaggaaaattgtaattgattaattccatctgtctttaggagctctcattatctcggtctctggttcctaatcctattttaaagttgtctaattttaaaccactataatatgtcttcattttaataaatattcatttggaatctaggaaaactctgagctactgcatttaggcaggcactttaataccaaactgtaacatgtctcaactgtatacaactcaaaatacaccagctcatttggctgctcagtctaactctagaatggatgcttttgaattcatttcgatgtcaccacttttcgctctttaaaaacactgggtca

SEQ ID NO: 19412 - DNA, 3964 bp, Homo sapiens
  source 1..3964: mol_type = unassigned DNA
ggcgccgacacacgtttccagggctcttgagagaccataccctgggagtctcgcgggatctcacttttctcggcggcgcagggaatgagacagatcgcgggaattccacccgcgccgggagatggtctggtgacttcgcggctcctcccacgtctctctgggcagtccgccttgcgcatgcgcaggcggcggtggcaaggctacggttcgcgccagcggccggcgctatggggctgagccgcgtgcgggcggttttctttgacttggacaacactctcatcgacacggccggggcgagcaggagaggcatgttggaggtgataaaactcttacaatcaaaataccattataaagaagaggctgaaatcatctgtgataaagttcaagttaaactcagcaaggaatgttttcatccttacaatacatgcattactgatttaaggacttcacattgggaagaagcaatccaggaaacaaaaggtggtgcagccaatagaaaattggctgaagaatgttatttcctttggaaatctacacgtttacagcatatgacactagcagaagacgtcaaagccatgcttactgaacttcgaaaggaggtccgcctacttctattaacgaatggggacagacagacccagagggagaagattgaggcttgtgcctgtcagtcctattttgacgctgttgttgtaggtggagagcagagagaggagaaaccagcaccgtccatattttattactgctgcaatcttctcggagtacaacctggggactgtgtgatggtcggtgacacattagaaaccgacatccaaggaggcctcaatgcaggattgaaagcaacagtctggatcaataaaaatggaatagtgccactgaagtcctccccagttccgcattacatggtttcttctgtgctagagttacctgctctcttacaaagtatagactgcaaagtcagtatgtccacttaaagcacataaaagggcatgattatgaatgttagaatcaatttgctgagtatgaaataagaaaagttagggcactccacttatgataatccagctctaagaataattttacttatgatttaatggccaatattttgaaggtcttcccaaccctattgcttctaagttgtaacaaccaaccattgagtggtacttatatctgaaaattcagattgcatgaattcaggtcagtagtatagcccagaaaatttaaggaaatatattatttgttagtctgtatctggagctttttaaaattatgttattaatcttttagtatcttggctgcataatgccaagcaggattgctttacacatggatgcacaaatgtaaggtttatcttctggcttaaaaatagatatttttaaaaaatagattttctaaaacacagatttatgaaagcaagtgaatctggttaatatgaaataagtactaagtcacatgcaaatcaaggtattatatagtgaaattattttgcatattttgaaaacataaaccatagtttttgcctactttggatgtatactttcttttatgaacctgatttttctgtatgacatttttttttttttcagagggcagggagcaatttttctatggcatgtgacagattcctccagttagaaaaagctgttaaaatcaacacatggtgctcctttaccgtgacattttctcacctgtgcacagtgagccggtagcttccttttagtcttcacctctcaaggaaatgtttttactgtcttttcccagacacacagtggggttgagggagctaggctgttttgctagagataattgcaaggcacgtggcactaaaagtcatttttcttctgtggatccataagaggaacatttcctcagtgtagcctaacaatgcagcccccaatctgttcctttttttttttgaaatgggatctctgtcgcccaggttggagtgccatggcaccatctcggctcactgcaacctctgcctcctgagctcaagtgatcctcccacctcagcctcccaagggtgtgtgtgactacaagtacacactaccacgcccagctaatgtgtgtttttgtagagatgggattttgccatgttgcccaggctggtctcgaattcctggattcaagtgatcctcccacctcagcctcctaaagtcctaggattataggcatgagccactgtgcctggccccctcatctgatagaaaattagattttgctatgagccatttcctgagggccaatttaatactcgtgtgactcttcttagagttaccatctgccttaaatttcctctgtttttcacattcttggaaatatatcattgttttgcaaatttctatatctaattcagggtttaccaggagcttaataattaatggctacatagcaaggcatcgtcttggaaccggagaattttctctagactattaggctagacagtctcatgattatactaaccaaacctggagtaaagtggttgaaaaaaaagaaagtataaaggggcttattaaagtggttaataaatatgatttaggttggtttttgatatgtttttcttccaactgttatataagaaactactaatgtaaaatagtaggctatatgttgggatgtgtatagctatgtcttcaagactaatactcagagaatcaaattgtagattgtacctatctgtgagcctatttctttagccagttttctgtctactgccaagaaacagaattctctgcctcatgcaaatgccctttcgtgtttacttttcgctctagatttttaaaaatgtgattgtgcccttgactgtaccaaagtgctgttgctataacagtgaacatttgtgaacagaggatgtttgtagtttcaaatgcagtacccatatgaccttgatcatattttagctatttaaaaattaagttggaggattttggcagaagtagtcacatgcatgattgctctgatagattggttggcgtgtgctgcagggggcttgtccttttaactctcccacaggatggatgtaggcagtgtcacattcattatgctgagagtgaaggttcatcactcctgtatcatggtagcaaatctcaacaggatagcttctaggatgttaagtgagcagttctccagcagaaatgatgtagaaggaaaaaattgaataattaaatttccttgtcttcacagtttgtattctacagagtacagtaatgtattacattccatttgcacccttccttagggaagaactttgtggttatctaccttctgagtggaatgttacagaaaatattttaaaatattggaataaacctatgattttattaatattttttgttttagaataatattccttaaaattatgggtgatgttttgtcatctttattttttttcaaagtttccctgtagtggccttctcacacaaagccagaggccctccctaacactgcttacagaggtgggcctagaacagacatgaatggacactgcacctggaataccagcacctggtggggaggtttggttccatgtgcacctccacatacaaggcacgaacatctcagatctgggagtgcccaggacccagtggatgctcagtattgtaggaaagcaggtctttaccaaagttcttggtttattgctttcaaacttctttgcaaccttcagtaagaaacattttctatcataacctctttaacacatttatagtgttagataacactgtaactatatataaatataaatataacacatgtatataaataaatataaatataacattttatagtataacattaatatgtgtatgggatccagttttatatgtttaattttcataaaacattcttgttacgtgtgatgatatttttcattccattcttttttgaattagggaatatattcattgttgaacaagtactacttgtagtacacaagtcaaaaaaataaaagggtgaatggtgaaaa

SEQ ID NO: 19413 - DNA, 1170 bp, Homo sapiens
  source 1..1170: mol_type = unassigned DNA
agagtagaggcggcggcggcggcggccggacccagactggtagtgaggctttggaccccgagccgctgcaatgccgctggagctggagctgtgtcccgggcgctgggtgggcgggcaacacccgtgcttcatcattgccgagatcggccagaaccaccagggcgacctggacgtagccaagcgcatgatccgcatggccaaggagtgtggggctgattgtgctaagttccagaagagtgagctagaattcaagtttaatcggaaagccttggagaggccatacacctcgaagcattcctgggggaagacgtacggggagcacaaacgacatctggagttcagccatgaccagtacagggagctgcagaggtacgccgaggaggttgggatcttcttcactgcctctggcatggatgagatggcagttgaattcctgcatgaactgaatgttccatttttcaaagttggatctggagacactaataattttccttatctggaaaagacagccaaaaaaggtcgcccaatggtgatctccagtgggatgcagtcaatggacaccatgaagcaagtttatcagatcgtgaagcccctcaaccccaacttctgcttcttgcagtgtaccagcgcatacccgctccagcctgaggacgtcaacctgcgggtcatctcggaatatcagaagctctttcctgacattcccatagggtattctgggcatgaaacaggcatagcgatatctgtggccgcagtggctctgggggccaaggtgttggaacgtcacataactttggacaagacctggaaggggagtgaccactcggcctcgctggagcctggagaactggccgagctggtgcggtcagtgcgtcttgtggagcgtgccctgggctccccaaccaagcagctgctgccctgtgagatggcctgcaatgagaagctgggcaagtctgtggtggccaaagtgaaaattccggaaggcaccattctaacaatggacatgctcaccgtgaaggtgggtgagcccaaaggctatcctcctgaagacatctttaatctagtgggcaagaaggtcctggtcactgttgaagaggatgacaccatcatggaagaattggtagataatcatggcaaaaaaatcaagtcttaaaaataaagtgccattctctg

SEQ ID NO: 19414 - DNA, 715 bp, Homo sapiens
  source 1..715: mol_type = unassigned DNA
tttttctacttgtatgttattccttgcctgtcataacaacagtgtttttggacaatggtgaaaaggagctccctctttgatttttgtagatggcagttgaattcctgcatgaactgaatgttccatttttcaaagttggatctggagacactaataattttccttatctggaaaagacagccaaaaaaggggctggcacagtgttttaagagatgtctgtggagttcagttgaatgatgagaccagcagttgggatgtgttggggagagtcagaacctctaaagagaaagtgctgatggtgttggtgctggattactcaggtcgcccaatggtgatctccagtgggatgcagtcaatggacaccatgaagcaagtttatcagatcgtgaagcccctcaaccccaacttctgcttcttgcagtgtaccagcgcatacccgctccagcctgaggacgtcaacctgcgggtcatctcggaatatcagaagctctttcctgacattcccatagggtattctgggcatgaaacaggcatagcgatatctgtggccgcagtggctctgggggccaaggtgttggaacgtcacataactttggacaagacctggaaggggagtgaccactcggcctcgctggagcctggagaactggccgagctggtgcggtcagtgcgtcttgtggagcgtgccctgggctccccaaccaagcagctgctg

SEQ ID NO: 19415 - DNA, 1378 bp, Homo sapiens
  source 1..1378: mol_type = unassigned DNA
gaggacgtcaacctgcgggtcatctcggaatatcagaagctctttcctgacattcccatagggtattctgggcatgaaacaggcatagcgatatctgtggccgcagtggctctgggggccaaggtgttggaacgtcacataactttggacaagacctggaaggggagtgaccactcggcctcgctggagcctggagaactggccgagctggtgcggtcagtgcgtcttgtggagcgtgccctgggctccccaaccaagcagctgctgccctgtgagatggcctgcaatgagaaggtgtgtcctgccggactctactcggttctgctgccgtgtgtggaaaaaggataggctggcctgagagggatggtcaggaccagccctccctgagccaggctgatgaaatgatcagtgaatgtgctcccacccgtgtcagcttcttcaggcttctcttcagtaatgcatgtcactctggcctgtagcagcagcaggagacacatgttatctaactttagcagtttctctggccacctagggtcacattagagtcttccactaattctctgaagcccatggccccagtactcctagactccagaatatgtaacaggagtgaggccctggaataagtcaagtctgggctcccttggagcaggtaagccctgagaaacatttaggcacggtgttccctgaggtaccagaagagcctgtggcatttcctaagccagggtggcactggtgggaagggcagtgagtcgttgcagaggtgggtgggtgatgatgcagctattccttgtgcaacagtgaccttcagacagaggaactggtgggcctagaagcactgcctggcatgctgactatcagggcttcctggaagccgtggcctggaccttcttgccttctgagtcatagagccaggcaggcatcctggggctgccaggcacacacacacctaacctgtaggctgtcggggtcaaggcaaagaccaaacaccaggcatgcctgggactgttgtcaccttttattctagtggggcctacctgcttccccaaatcaaagatgcatctataccaggaaattaaaataaagtaaaaagaaatagtttctttatagaggaaacaggagagaattagaccagaaaccagagtaagatttataacagctgagcacttaatttggctctctgagcagacagtaaaacataacaggatgcatgattatcacttgacattttttcctggcaccacattccaagcagaattgattccttgtactcttacgtggaggatatagagtaataaaacacgtaatttatttgaaagcatttatagagaagacaaacactggtcatgagcttcaggtacccttcattccctcatct

SEQ ID NO: 19416 - DNA, 1815 bp, Homo sapiens
  source 1..1815: mol_type = unassigned DNA
ctttggaagtgagagcacttcctcatagaccttggatgtgggaggattgcattcagtctagttcctggttgccggctgaaataacctgaattcaagccaggaagaagcagcaatctgtcttctggattaaaactgaagatcaacctactttcaacttactaagaaaggggatcatggacattgaagcatatcttgaaagaattggctataagaagtctaggaacaaattggacttggaaacattaactgacattcttcaacaccagatccgagctgttccctttgagaaccttaacatccattgtggggatgccatggacttaggcttagaggccatttttgatcaagttgtgagaagaaatcggggtggatggtgtctccaggtcaatcatcttctgtactgggctctgaccactattggttttgagaccacgatgttgggagggtatgtttacagcactccagccaaaaaatacagcactggcatgattcaccttctcctgcaggtgaccattgatggcaggaactacattgtcgatgctgggtttggacgctcataccagatgtggcagcctctggagttaatttctgggaaggatcagcctcaggtgccttgtgtcttccgtttgacggaagagaatggattctggtatctagaccaaatcagaagggaacagtacattccaaatgaagaatttcttcattctgatctcctagaagacagcaaataccgaaaaatctactcctttactcttaagcctcgaacaattgaagattttgagtctatgaatacatacctgcagacatctccatcatctgtgtttactagtaaatcattttgttccttgcagaccccagatggggttcactgtttggtgggcttcaccctcacccataggagattcaattataaggacaatacagatctaatagagttcaagactctgagtgaggaagaaatagaaaaagtgctgaaaaatatatttaatatttccttgcagagaaagcttgtgcccaaacatggtgatagattttttactatttagaataaggagtaaaacaatcttgtctatttgtcatccagctcaccagttatcaactgacgacctatcatgtatcttctgtacccttaccttattttgaagaaaatcctagacatcaaatcatttcacctataaaaatgtcatcatatataattaaacagctttttaaagaaacataaccacaaaccttttcaaataataataataataataataaaaaatgtattttaaagatggcctgtggttatcttggaaattggtgatttatgctagaaagcttttaatgttggtttattgttgaattcctagaaaagttttattggtagatgagtaaataaaatattgtaaaaaaacttattgtctataaagtatattaaaacattgttggctaatataatttgaaaaaaagtggttttttggaagacttaggatattatggtgctacataatttttcctcgatgctctcttcctctcatctttcttgtctcttaaattgctttacttccttgcacactttgccatacaagaatgaacatgagcttttcttgtgtagatctgagttgaaatcctgtggacactgggcgaattactttttagatctgtagctctgactcctcaggcataaaatgggaataatgcttttacagtttagtggcggaactaaactcccaaaattatttgttatatggatcaagtaataacgtcagtaatgtttttggtacaaagtcattatttaataaaagttattgttccatcttgcttgccccccca

SEQ ID NO: 19417 - DNA, 2280 bp, Homo sapiens
  source 1..2280: mol_type = unassigned DNA
caagtcacatagggataaatcacaatagttggtcaactgttgaatcttgatccttcaactaaacaatattcatgaactctgcagaaaaacaccagcattttgctcaacattcaggaccctctagaagttgcctcattctactctcctttcttacctttcttttacacagctctccaaaatgtccacaaaagtgacttaagtcaggttcccccaaaccagacaccaagacaagaatccatgtgtgtgtgactgaaggaagtgctgggagagccccagctgcagcctggatgtgaactgcaactccaaagtgtgtccagactcaaggcaagggcactaggctttccagacctcctactaagtcattgatccagcactgccctgccaggacataaatccctggcacctcttgctctctgcaaaggagggcaaagcagcttcaggagcccttgggagtcctccaaagagagtctagggtacaggtccgaaagtagaagaacacagaaggcaggccaggggcactgtgagatggtaaaagagatctgaagggatccagaattcaagccaggaagaagcagcaatctgtcttctggattaaaactgaagatcaacctactttcaacttactaagaaaggggatcatggacattgaagcatatcttgaaagaattggctataagaagtctaggaacaaattggacttggaaacattaactgacattcttcaacaccagatccgagctgttccctttgagaaccttaacatccattgtggggatgccatggacttaggcttagaggccatttttgatcaagttgtgagaagaaatcggggtggatggtgtctccaggtcaatcatcttctgtactgggctctgaccactattggttttgagaccacgatgttgggagggtatgtttacagcactccagccaaaaaatacagcactggcatgattcaccttctcctgcaggtgaccattgatggcaggaactacattgtcgatgctgggtttggacgctcataccagatgtggcagcctctggagttaatttctgggaaggatcagcctcaggtgccttgtgtcttccgtttgacggaagagaatggattctggtatctagaccaaatcagaagggaacagtacattccaaatgaagaatttcttcattctgatctcctagaagacagcaaataccgaaaaatctactcctttactcttaagcctcgaacaattgaagattttgagtctatgaatacatacctgcagacatctccatcatctgtgtttactagtaaatcattttgttccttgcagaccccagatggggttcactgtttggtgggcttcaccctcacccataggagattcaattataaggacaatacagatctaatagagttcaagactctgagtgaggaagaaatagaaaaagtgctgaaaaatatatttaatatttccttgcagagaaagcttgtgcccaaacatggtgatagattttttactatttagaataaggagtaaaacaatcttgtctatttgtcatccagctcaccagttatcaactgacgacctatcatgtatcttctgtacccttaccttattttgaagaaaatcctagacatcaaatcatttcacctataaaaatgtcatcatatataattaaacagctttttaaagaaacataaccacaaaccttttcaaataataataataataataataaaaaatgtattttaaagatggcctgtggttatcttggaaattggtgatttatgctagaaagcttttaatgttggtttattgttgaattcctagaaaagttttattggtagatgagtaaataaaatattgtaaaaaaacttattgtctataaagtatattaaaacattgttggctaatataatttgaaaaaaagtggttttttggaagacttaggatattatggtgctacataatttttcctcgatgctctcttcctctcatctttcttgtctcttaaattgctttacttccttgcacactttgccatacaagaatgaacatgagcttttcttgtgtagatctgagttgaaatcctgtggacactgggcgaattactttttagatctgtagctctgactcctcaggcataaaatgggaataatgcttttacagtttagtggcggaactaaactcccaaaattatttgttatatggatcaagtaataacgtcagtaatgtttttggtacaaagtcattatttaataaaagttattgttccatcttgcttgccccccca

SEQ ID NO: 19418 - DNA, 2162 bp, Homo sapiens
  source 1..2162: mol_type = unassigned DNA
gtgggaggattgcattcagtctagttcctggttgccggctgaaataacctgctctccaaaatgtccacaaaagtgacttaagtcaggttcccccaaaccagacaccaagacaagaatccatgtgtgtgtgactgaaggaagtgctgggagagccccagctgcagcctggatgtgaactgcaactccaaagtgtgtccagactcaaggcaagggcactaggctttccagacctcctactaagtcattgatccagcactgccctgccaggacataaatccctggcacctcttgctctctgcaaaggagggcaaagcagcttcaggagcccttgggagtcctccaaagagagtctagggtacaggtccgaaagtagaagaacacagaaggcaggccaggggcactgtgagatggtaaaagagatctgaagggatccagaattcaagccaggaagaagcagcaatctgtcttctggattaaaactgaagatcaacctactttcaacttactaagaaaggggatcatggacattgaagcatatcttgaaagaattggctataagaagtctaggaacaaattggacttggaaacattaactgacattcttcaacaccagatccgagctgttccctttgagaaccttaacatccattgtggggatgccatggacttaggcttagaggccatttttgatcaagttgtgagaagaaatcggggtggatggtgtctccaggtcaatcatcttctgtactgggctctgaccactattggttttgagaccacgatgttgggagggtatgtttacagcactccagccaaaaaatacagcactggcatgattcaccttctcctgcaggtgaccattgatggcaggaactacattgtcgatgctgggtttggacgctcataccagatgtggcagcctctggagttaatttctgggaaggatcagcctcaggtgccttgtgtcttccgtttgacggaagagaatggattctggtatctagaccaaatcagaagggaacagtacattccaaatgaagaatttcttcattctgatctcctagaagacagcaaataccgaaaaatctactcctttactcttaagcctcgaacaattgaagattttgagtctatgaatacatacctgcagacatctccatcatctgtgtttactagtaaatcattttgttccttgcagaccccagatggggttcactgtttggtgggcttcaccctcacccataggagattcaattataaggacaatacagatctaatagagttcaagactctgagtgaggaagaaatagaaaaagtgctgaaaaatatatttaatatttccttgcagagaaagcttgtgcccaaacatggtgatagattttttactatttagaataaggagtaaaacaatcttgtctatttgtcatccagctcaccagttatcaactgacgacctatcatgtatcttctgtacccttaccttattttgaagaaaatcctagacatcaaatcatttcacctataaaaatgtcatcatatataattaaacagctttttaaagaaacataaccacaaaccttttcaaataataataataataataataaaaaatgtattttaaagatggcctgtggttatcttggaaattggtgatttatgctagaaagcttttaatgttggtttattgttgaattcctagaaaagttttattggtagatgagtaaataaaatattgtaaaaaaacttattgtctataaagtatattaaaacattgttggctaatataatttgaaaaaaagtggttttttggaagacttaggatattatggtgctacataatttttcctcgatgctctcttcctctcatctttcttgtctcttaaattgctttacttccttgcacactttgccatacaagaatgaacatgagcttttcttgtgtagatctgagttgaaatcctgtggacactgggcgaattactttttagatctgtagctctgactcctcaggcataaaatgggaataatgcttttacagtttagtggcggaactaaactcccaaaattatttgttatatggatcaagtaataacgtcagtaatgtttttggtacaaagtcattatttaataaaagttattgttccatcttgcttgccccccca

SEQ ID NO: 19419 - DNA, 1446 bp, Homo sapiens
  source 1..1446: mol_type = unassigned DNA
gctgtttatcatttgactcatcatttaatcttgatttccagcttctcacacttgaaagaagacataatacatttctcacaggattctgggactattaactgaacttatgtgtgtaaaaggaattcatacaatgaaagcactagaaataattattatacttataaccattgtatttttacatgtttaaaatatagccataattagcctactcaaatccaagtgtaaaagtaaaatgatttgctttcgttttgttttccttgcttaggggatcatggacattgaagcatatcttgaaagaattggctataagaagtctaggaacaaattggacttggaaacattaactgacattcttcaacaccagatccgagctgttccctttgagaaccttaacatccattgtggggatgccatggacttaggcttagaggccatttttgatcaagttgtgagaagaaatcggggtggatggtgtctccaggtcaatcatcttctgtactgggctctgaccactattggttttgagaccacgatgttgggagggtatgtttacagcactccagccaaaaaatacagcactggcatgattcaccttctcctgcaggtgaccattgatggcaggaactacattgtcgatgctgggtttggacgctcataccagatgtggcagcctctggagttaatttctgggaaggatcagcctcaggtgccttgtgtcttccgtttgacggaagagaatggattctggtatctagaccaaatcagaagggaacagtacattccaaatgaagaatttcttcattctgatctcctagaagacagcaaataccgaaaaatctactcctttactcttaagcctcgaacaattgaagattttgagtctatgaatacatacctgcagacatctccatcatctgtgtttactagtaaatcattttgttccttgcagaccccagatggggttcactgtttggtgggcttcaccctcacccataggagattcaattataaggacaatacagatctaatagagttcaagactctgagtgaggaagaaatagaaaaagtgctgaaaaatatatttaatatttccttgcagagaaagcttgtgcccaaacatggtgatagattttttactatttagaataaggagtaaaacaatcttgtctatttgtcatccagctcaccagttatcaactgacgacctatcatgtatcttctgtacccttaccttattttgaagaaaatcctagacatcaaatcatttcacctataaaaatgtcatcatatataattaaacagctttttaaagaaacataaccacaaaccttttcaaataataataataataataataaaaaatgtattttaaagatggcctgtggttatcttggaaattggtgatttatgctagaaagcttttaatgttggtttattgttgaattc

SEQ ID NO: 19420 - DNA, 1967 bp, Homo sapiens
  source 1..1967: mol_type = unassigned DNA
aacagattgacccagtcgacaggatctgaacttccagtgaccatcccaggaacagaaagcaactgtgttaccagttctgcttttcctggacctgttccaagctctcacgttccacatcacacatgggacatctagtgtcaggctcccagagagcaggaaccaggtgaaatataagagcacagtcctcccagccggtggcatggggataatcggacaatacaactctccacccttttttatgaattcaagccaggaagaagcagcaatctgtcttctggattaaaactgaagatcaacctactttcaacttactaagaaaggggatcatggacattgaagcatatcttgaaagaattggctataagaagtctaggaacaaattggacttggaaacattaactgacattcttcaacaccagatccgagctgttccctttgagaaccttaacatccattgtggggatgccatggacttaggcttagaggccatttttgatcaagttgtgagaagaaatcggggtggatggtgtctccaggtcaatcatcttctgtactgggctctgaccactattggttttgagaccacgatgttgggagggtatgtttacagcactccagccaaaaaatacagcactggcatgattcaccttctcctgcaggtgaccattgatggcaggaactacattgtcgatgctgggtttggacgctcataccagatgtggcagcctctggagttaatttctgggaaggatcagcctcaggtgccttgtgtcttccgtttgacggaagagaatggattctggtatctagaccaaatcagaagggaacagtacattccaaatgaagaatttcttcattctgatctcctagaagacagcaaataccgaaaaatctactcctttactcttaagcctcgaacaattgaagattttgagtctatgaatacatacctgcagacatctccatcatctgtgtttactagtaaatcattttgttccttgcagaccccagatggggttcactgtttggtgggcttcaccctcacccataggagattcaattataaggacaatacagatctaatagagttcaagactctgagtgaggaagaaatagaaaaagtgctgaaaaatatatttaatatttccttgcagagaaagcttgtgcccaaacatggtgatagattttttactatttagaataaggagtaaaacaatcttgtctatttgtcatccagctcaccagttatcaactgacgacctatcatgtatcttctgtacccttaccttattttgaagaaaatcctagacatcaaatcatttcacctataaaaatgtcatcatatataattaaacagctttttaaagaaacataaccacaaaccttttcaaataataataataataataataaaaaatgtattttaaagatggcctgtggttatcttggaaattggtgatttatgctagaaagcttttaatgttggtttattgttgaattcctagaaaagttttattggtagatgagtaaataaaatattgtaaaaaaacttattgtctataaagtatattaaaacattgttggctaatataatttgaaaaaaagtggttttttggaagacttaggatattatggtgctacataatttttcctcgatgctctcttcctctcatctttcttgtctcttaaattgctttacttccttgcacactttgccatacaagaatgaacatgagcttttcttgtgtagatctgagttgaaatcctgtggacactgggcgaattactttttagatctgtagctctgactcctcaggcataaaatgggaataatgcttttacagtttagtggcggaactaaactcccaaaattatttgttatatggatcaagtaataacgtcagtaatgtttttggtacaaagtcattatttaataaaagttattgttccatcttgcttgccccccc

SEQ ID NO: 19421 - DNA, 2332 bp, Homo sapiens
  source 1..2332: mol_type = unassigned DNA
acttcctcatagaccttggatgtgggaggattgcattcagtctagttcctggttgccggctgaaataacctgaccgagagcatcaccccctgaacatggacttgcagaattccacagaagagaggagactggcctagacagacagccccaggagctgagggcccaacaggctttctaccctggatgctgctcccatgccctgacatgaggcccactacaatgctctccaaaatgtccacaaaagtgacttaagtcaggttcccccaaaccagacaccaagacaagaatccatgtgtgtgtgactgaaggaagtgctgggagagccccagctgcagcctggatgtgaactgcaactccaaagtgtgtccagactcaaggcaagggcactaggctttccagacctcctactaagtcattgatccagcactgccctgccaggacataaatccctggcacctcttgctctctgcaaaggagggcaaagcagcttcaggagcccttgggagtcctccaaagagagtctagggtacaggtccgaaagtagaagaacacagaaggcaggccaggggcactgtgagatggtaaaagagatctgaagggatccagaattcaagccaggaagaagcagcaatctgtcttctggattaaaactgaagatcaacctactttcaacttactaagaaaggggatcatggacattgaagcatatcttgaaagaattggctataagaagtctaggaacaaattggacttggaaacattaactgacattcttcaacaccagatccgagctgttccctttgagaaccttaacatccattgtggggatgccatggacttaggcttagaggccatttttgatcaagttgtgagaagaaatcggggtggatggtgtctccaggtcaatcatcttctgtactgggctctgaccactattggttttgagaccacgatgttgggagggtatgtttacagcactccagccaaaaaatacagcactggcatgattcaccttctcctgcaggtgaccattgatggcaggaactacattgtcgatgctgggtttggacgctcataccagatgtggcagcctctggagttaatttctgggaaggatcagcctcaggtgccttgtgtcttccgtttgacggaagagaatggattctggtatctagaccaaatcagaagggaacagtacattccaaatgaagaatttcttcattctgatctcctagaagacagcaaataccgaaaaatctactcctttactcttaagcctcgaacaattgaagattttgagtctatgaatacatacctgcagacatctccatcatctgtgtttactagtaaatcattttgttccttgcagaccccagatggggttcactgtttggtgggcttcaccctcacccataggagattcaattataaggacaatacagatctaatagagttcaagactctgagtgaggaagaaatagaaaaagtgctgaaaaatatatttaatatttccttgcagagaaagcttgtgcccaaacatggtgatagattttttactatttagaataaggagtaaaacaatcttgtctatttgtcatccagctcaccagttatcaactgacgacctatcatgtatcttctgtacccttaccttattttgaagaaaatcctagacatcaaatcatttcacctataaaaatgtcatcatatataattaaacagctttttaaagaaacataaccacaaaccttttcaaataataataataataataataaaaaatgtattttaaagatggcctgtggttatcttggaaattggtgatttatgctagaaagcttttaatgttggtttattgttgaattcctagaaaagttttattggtagatgagtaaataaaatattgtaaaaaaacttattgtctataaagtatattaaaacattgttggctaatataatttgaaaaaaagtggttttttggaagacttaggatattatggtgctacataatttttcctcgatgctctcttcctctcatctttcttgtctcttaaattgctttacttccttgcacactttgccatacaagaatgaacatgagcttttcttgtgtagatctgagttgaaatcctgtggacactgggcgaattactttttagatctgtagctctgactcctcaggcataaaatgggaataatgcttttacagtttagtggcggaactaaactcccaaaattatttgttatatggatcaagtaataacgtcagtaatgtttttggtacaaagtcattatttaataaaagttattgttccatcttgcttgccccccc

SEQ ID NO: 19422 - DNA, 1948 bp, Homo sapiens
  source 1..1948: mol_type = unassigned DNA
acttcctcatagaccttggatgtgggaggattgcattcagtctagttcctggttgccggctgaaataacctgaccgagagcatcaccccctgaacatggacttgcagaattccacagaagagaggagactggcctagacagacagccccaggagctgagggcccaacaggctttctaccctggatgctgctcccatgccctgacatgaggcccactacaatgaattcaagccaggaagaagcagcaatctgtcttctggattaaaactgaagatcaacctactttcaacttactaagaaaggggatcatggacattgaagcatatcttgaaagaattggctataagaagtctaggaacaaattggacttggaaacattaactgacattcttcaacaccagatccgagctgttccctttgagaaccttaacatccattgtggggatgccatggacttaggcttagaggccatttttgatcaagttgtgagaagaaatcggggtggatggtgtctccaggtcaatcatcttctgtactgggctctgaccactattggttttgagaccacgatgttgggagggtatgtttacagcactccagccaaaaaatacagcactggcatgattcaccttctcctgcaggtgaccattgatggcaggaactacattgtcgatgctgggtttggacgctcataccagatgtggcagcctctggagttaatttctgggaaggatcagcctcaggtgccttgtgtcttccgtttgacggaagagaatggattctggtatctagaccaaatcagaagggaacagtacattccaaatgaagaatttcttcattctgatctcctagaagacagcaaataccgaaaaatctactcctttactcttaagcctcgaacaattgaagattttgagtctatgaatacatacctgcagacatctccatcatctgtgtttactagtaaatcattttgttccttgcagaccccagatggggttcactgtttggtgggcttcaccctcacccataggagattcaattataaggacaatacagatctaatagagttcaagactctgagtgaggaagaaatagaaaaagtgctgaaaaatatatttaatatttccttgcagagaaagcttgtgcccaaacatggtgatagattttttactatttagaataaggagtaaaacaatcttgtctatttgtcatccagctcaccagttatcaactgacgacctatcatgtatcttctgtacccttaccttattttgaagaaaatcctagacatcaaatcatttcacctataaaaatgtcatcatatataattaaacagctttttaaagaaacataaccacaaaccttttcaaataataataataataataataaaaaatgtattttaaagatggcctgtggttatcttggaaattggtgatttatgctagaaagcttttaatgttggtttattgttgaattcctagaaaagttttattggtagatgagtaaataaaatattgtaaaaaaacttattgtctataaagtatattaaaacattgttggctaatataatttgaaaaaaagtggttttttggaagacttaggatattatggtgctacataatttttcctcgatgctctcttcctctcatctttcttgtctcttaaattgctttacttccttgcacactttgccatacaagaatgaacatgagcttttcttgtgtagatctgagttgaaatcctgtggacactgggcgaattactttttagatctgtagctctgactcctcaggcataaaatgggaataatgcttttacagtttagtggcggaactaaactcccaaaattatttgttatatggatcaagtaataacgtcagtaatgtttttggtacaaagtcattatttaataaaagttattgttccatcttgcttgccccccc

SEQ ID NO: 19423 - DNA, 2066 bp, Homo sapiens
  source 1..2066: mol_type = unassigned DNA
acttcctcatagaccttggatgtgggaggattgcattcagtctagttcctggttgccggctgaaataacctgaccgagagcatcaccccctgaacatggacttgcagaattccacagaagagaggagactggcctagacagacagccccaggagctgagggcccaacaggctttctaccctggatgctgctcccatgccctgacatgaggcccactacaatgacgtgtacagaagggccatgctgttattactcttacacaaggaggcagccctcgagccacagggtccagctgttggctataatagcctaccggtctctgatgatcaccatgtttctggaattcaagccaggaagaagcagcaatctgtcttctggattaaaactgaagatcaacctactttcaacttactaagaaaggggatcatggacattgaagcatatcttgaaagaattggctataagaagtctaggaacaaattggacttggaaacattaactgacattcttcaacaccagatccgagctgttccctttgagaaccttaacatccattgtggggatgccatggacttaggcttagaggccatttttgatcaagttgtgagaagaaatcggggtggatggtgtctccaggtcaatcatcttctgtactgggctctgaccactattggttttgagaccacgatgttgggagggtatgtttacagcactccagccaaaaaatacagcactggcatgattcaccttctcctgcaggtgaccattgatggcaggaactacattgtcgatgctgggtttggacgctcataccagatgtggcagcctctggagttaatttctgggaaggatcagcctcaggtgccttgtgtcttccgtttgacggaagagaatggattctggtatctagaccaaatcagaagggaacagtacattccaaatgaagaatttcttcattctgatctcctagaagacagcaaataccgaaaaatctactcctttactcttaagcctcgaacaattgaagattttgagtctatgaatacatacctgcagacatctccatcatctgtgtttactagtaaatcattttgttccttgcagaccccagatggggttcactgtttggtgggcttcaccctcacccataggagattcaattataaggacaatacagatctaatagagttcaagactctgagtgaggaagaaatagaaaaagtgctgaaaaatatatttaatatttccttgcagagaaagcttgtgcccaaacatggtgatagattttttactatttagaataaggagtaaaacaatcttgtctatttgtcatccagctcaccagttatcaactgacgacctatcatgtatcttctgtacccttaccttattttgaagaaaatcctagacatcaaatcatttcacctataaaaatgtcatcatatataattaaacagctttttaaagaaacataaccacaaaccttttcaaataataataataataataataaaaaatgtattttaaagatggcctgtggttatcttggaaattggtgatttatgctagaaagcttttaatgttggtttattgttgaattcctagaaaagttttattggtagatgagtaaataaaatattgtaaaaaaacttattgtctataaagtatattaaaacattgttggctaatataatttgaaaaaaagtggttttttggaagacttaggatattatggtgctacataatttttcctcgatgctctcttcctctcatctttcttgtctcttaaattgctttacttccttgcacactttgccatacaagaatgaacatgagcttttcttgtgtagatctgagttgaaatcctgtggacactgggcgaattactttttagatctgtagctctgactcctcaggcataaaatgggaataatgcttttacagtttagtggcggaactaaactcccaaaattatttgttatatggatcaagtaataacgtcagtaatgtttttggtacaaagtcattatttaataaaagttattgttccatcttgcttgccccccc

SEQ ID NO: 19424 - DNA, 1322 bp, Homo sapiens
  source 1..1322: mol_type = unassigned DNA
tgagatcacttcccttgcagactttggaagggagagcactttattacagaccttggaagcaagaggattgcattcagcctagttcctggttgctggccaaagggatcatggacattgaagcatattttgaaagaattggctataagaactctaggaacaaattggacttggaaacattaactgacattcttgagcaccagatccgggctgttccctttgagaaccttaacatgcattgtgggcaagccatggagttgggcttagaggctatttttgatcacattgtaagaagaaaccggggtgggtggtgtctccaggtcaatcaacttctgtactgggctctgaccacaatcggttttcagaccacaatgttaggagggtatttttacatccctccagttaacaaatacagcactggcatggttcaccttctcctgcaggtgaccattgacggcaggaattacattgtcgatgctgggtctggaagctcctcccagatgtggcagcctctagaattaatttctgggaaggatcagcctcaggtgccttgcattttctgcttgacagaagagagaggaatctggtacctggaccaaatcaggagagagcagtatattacaaacaaagaatttcttaattctcatctcctgccaaagaagaaacaccaaaaaatatacttatttacgcttgaacctcgaacaattgaagattttgagtctatgaatacatacctgcagacgtctccaacatcttcatttataaccacatcattttgttccttgcagaccccagaaggggtttactgtttggtgggcttcatcctcacctatagaaaattcaattataaagacaatacagatctggtcgagtttaaaactctcactgaggaagaggttgaagaagtgctgagaaatatatttaagatttccttggggagaaatctcgtgcccaaacctggtgatggatcccttactatttagaataaggaacaaaataaacccttgtgtatgtatcacccaactcactaattatcaacttatgtgctatcagatatcctctctaccctcacgttattttgaagaaaatcctaaacatcaaatactttcatccataaaaatgtcagcatttattaaaaaacaataactttttaaagaaacataaggacacattttcaaattaataaaaataaaggcattttaaggatggcctgtgattatcttgggaagcagagtgattcatgctagaaaacatttaatattgatttattgttgaattcatagtaaatttttactggtaaatgaataaagaatattgtggaaaaa

SEQ ID NO: 19425 - DNA, 947 bp, Homo sapiens
  source 1..947: mol_type = unassigned DNA
agacggtatctcctggatgccagtgagcggctgagagctgaagctccctggacactcaaggctcttgtggtgacagtctgacgtaaaggcgtgcagggaggcctagctctgtctcctggacttagagatttcagacacagaagtctgtccatggctccttgtcacatccgcaaataccaggagagcgaccgccagtgggttgtgggcttgctctcccgggggatggccgagcatgccccagccaccttccggcaattgctgaagctgcctcgaaccctcatactcttacttggggggcccctcgccctactcctggtctctggatcctggcttctagccctcgtgttcagcatcagcctcttccctgccctgtggttccttgccaaaaaaccctggacggagtatgtggacatgacattgtgcacagacatgtctgacattaccaaatcctacctgagtgagcgtggctcctgcttctgggtggctgagtctgaagagaaggtggtgggcatggtaggagctctgcctgttgatgatcccaccttgagggagaagcggttgcagctgtttcatctctttgtggacagtgagcaccgtcgtcaggggatagcaaaagccctggtcaggactgtcctccagtttgcccgggaccagggctacagtgaagttatcctggacaccggcaccatccagctctctgctatggccctctaccagagcatgggcttcaagaagacgggccagtccttcttctgtgtgtgggccaggctagtggctcttcatacagttcatttcatctaccacctcccttcttctaaggtagggagtctgtgatctctttctgtgtgtattggtcagaatagaatccattcagctgtagcagcaagcaatccccaacctttcactgcaatgacctttcaatgcaataaaagcttattgtccattca

SEQ ID NO: 19426 - DNA, 5571 bp, Homo sapiens
  source 1..5571: mol_type = unassigned DNA
gagcgcatccctaacacggccttccgcggcctgcggcagcacccgcgcgcgcagctgctctacgccctgctggcggcgctgtgcttcgccgtgagccgctcgctgctgctgacgtgcctggtgccggccgcgctgctgggcctgcgctactactacagccgcaaggtgatccgcgcctacctggagtgcgcgctgcacacggacatggcggacatcgagcagtactacatgaagccgcccggctcctgcttctgggtggccgtgctggatggcaacgtggtgggcattgtggctgcacgggcccacgaggaggacaacacggtggagctgctgcggatgtctgtggactcacgtttccgaggcaagggcatcgccaaggcgctgggccggaaggtgctggagttcgccgtggtgcacaactactccgcggtggtgctgggcacgacggccgtcaaggtggccgcccacaagctctacgagtcgctgggcttcagacacatgggcgccagtgaccactacgtgctgccgggcatgaccctctcgctggctgagcgcctcttcttccaggtccgctaccaccgctaccgcctgcagctgcgcgaggagtgaccgccgccgctcgcccgcccgcccccccggccgccctgtccgcctttgcccgcctgcccgccgcccggcgcggcctgctttcagacgctcaattggcgtttgtgttgggtttccccttttcaacatcctgcggttgtctggctggttccggggggtgcggggctgttgttcttcggcgacactttggtgggggtgggttgtttgtcgccatagcccctcgcccttccccacctgcctgggcggcttgccacctgaagagtggcatcttggaccaccgcggctgtccatgacgctgccctgcccgccgccactggggaaggcccagccttgctcaccaagcacagaacctctgcagcagatcccggggccaggctccggccccgcctgcggccccagcgccactgcctgtggaggccccagctggccacggcgctgctttgctccgcgcatgccgagggtgtggcccggctgagcatgccgcatgcacacagccccgccctgccgccctgcccagactggacccggagacccgggctggtgagcgcccctgtccccagcccccagctggctgtgggagggcctgcccctgcccccacctcctggagggcctggtctgccccgcgccgcccggctctgtccacacctgctttgctctgacgccctccatttctctggctccggcccctcccctgcctgggctgtgctgactggtgtcatcacccaggtgactcccatggcgtccgtggcacagccagggtgggggtccatgggacccctctccccagtgcccactggatcgtgctggcctctcccagatgtccccggggacctcctgcctctggctgacggtccaccctgtgaatcttatcagcccaggctgctgccaacagcgcccagcccacagcttctcccagcctgaaaccaacacattttctaataagttatttagacagaatagcactctgcatgactttaattcttgggacaaaacggtagtttgtaccctaagacacagtttctggcccagtgtgatgggggtgggtggccgggtgggtggagcgttttgctgttggaaacctggagggaaaccctgattggatgtcatttcctgccatggagcacgcctcccagccctggcctgcagtgtgggcagggtggggggcaagggagtccgcagcctccgggaggaggggcagggcgctgccttgggctgggtgggaagaggggtggccgcctcggcttccgctggccatgctcctggtctctccttcctgaggtcacaggcaggggctgccctggacggggggcggggggggtggcctggaaggggagacagaggtggagggtggcacaggctgcacattcagcttagaagtggacctggctttggtggcaggagaagaataaacacttgcccagacccctttgtgtgggggaattggggaggggtcgtggcaggcagggtgggccacggaactgggtcccaggcatcaaggccacgtgcagggccatggagggatgcttctcacgaggcgcttcagaagcgagcgaagggacagagaagccctgcgtccaagggccttttgtcctgttagcaattgaggtgtgcagagcactgtacagaccccactcccctgtacattcctccctggaggtgcccggtccccgcttggggatgggagttttgtagactgtacagaaatcggcaccctattttcttgcagctcagattttgttaatctggaatatacagacagacgtaaagtgttttagcaaaatggaaacaaacagttgtgcctttttcctcttttggtttggtttgggtttggcctggggctggtcccagttggtgcggggcatgctgggggcaggaggggcagggcgggccaggtggagtcaggtcttgggggtgtcatgtcggggtgctgccagcgtcccttggtcctgtgcctttggagcctcgggctcctggggtgcagggtgcttgggggtggctgttggagcccaccgacgccagggcagggcctggaggcccagggactgccagtgtctccttgatattgatcctagcagatccccctcctgggggttctgagagtcctgggcagtgtggccttctctcattctggtggcatctgcgcccgtgagtgacctcttccttggctgcactgccctgtgggtggtgagacgcttggccttttttgttgctgccaggacttggtagagatggcaggaagggtgtgcggggtggttgtgtgcagaaccctgccgcccctgaggtgagcagaggcactggtgtgcctgccaggctggggcggagctgcccggaacccttgccaggccaatgtgtagcttggtggcgcccttgaaggccactggggggtaggtgtgtcctcccccggggctggaggccgggtgcctggtgggtgggcctgacctggcccacctcatccctccagcctgggatctcactgctctgcacatgtgcactgacgtgaattttatacgtttgtagaaactctgatgtaacttcttctacctctgaagcgccctcctgggccctgctgtcacgtggctggtgcggcttccccgagtgctggccccctgcccgctccccatgggcacccaccactcaaactctgcgtggtgaggcccggggaaagccaggccgggccctagcactgctcaggggcctggggctcctgggatttctgtgtgtttggaagcctctgtttttggagtggggggcgtggaaggcgggaggggctgacagtgcctggggccagagctgggcgaaggaggacatcctcactggacgagcactgcaggcctgacgagaggctccgggcagctgagggctgaagcgcctcgggatgccccacactgcccagagccacgggtcttgctgtgctgggggtggggtggccccaggcagctgccactgcccaggtgtgagtcgctgcagacctggtccctgagggtgggaggcctgcttgtgctgaagctgccatgtggtctggcccccagaagggctcctgagcgtagggagttgagccccgcagccgtggcggcatctcctcctccttcctccgccccatgcccagccttgcttccggctggtggcatgccttggggccgggcagcaggtgagaagctgcccccggagggaggggccaagggctgggtcagtctggcctgaggggtggatggctggccctgggggaaggctgggcctgggaggccctgtggacagcaggcctgaggccacgaggtcctggggccacccctctcctgctctgggtgtccttctcagagaagatggcagaaggctgcaggccctagaggggacgacgggctggggacgccctgagcttcctggctgtgtggcaggtgctggggaagctctctgggccatagggacctggctcccctctgagaggcccgcctgccctggggcacccagggctgtgctggtggcctgaggctgggaacttgggttcctgggctctgctggcgcctgggctttgtgggggccgaaggtggttgccccgccgggcagggggctgtgtgggccctcgtggggccaccttcctgtcagtgcccgagggacggtgggacagttgcccctgcgccaagggagcccactgccatcccccgtgggctggcgctgcagtcgcgcaccctgtgttgcctgctgacttgcttatgtctgtttggaagctgcttctgtttggccacaggcctgtgttcctgggctgatggccacagagctgacacttggggtttgagttccagacttgcagaccctgggatccgcttactcctccgcgccacggctgctgtgcttccagaggtggcgtgatgcctcccggggccatggtggggtgaaggatggcgagccggacataccattgttggatgtattttttttaaaacagcaataattagccattttaaaggagggatgtacctgtgtgtgtgcatgtgcacgtgtttgagcgtgtgtgtgtgtgcaagtgggttcttggatatgtgtagtgtgagcatgtgtgcatgtgtgagcctgtgcacgtgcatgttgtaggtgcataagcatgtacacgcgtgagcatgcatgtgtgtgtacacgtgtataggtgtacatgtgcatgagttgtgtacatgcgtgagcacgtgtatagatgtacgtgtgtgtgcgcatgtgtgcgtgtacatgtgtttgtgtcttgggtatgcataagcatgcacgtgtgtatgaatgtgcgtgtgtatgcatgagcacgtatgcatgtgtgatgcgcatgttcttgtgtacttctctgagggggcacatatgtatgagtgtatgagtgcatacatatgcatatggtgtacgtgtgtgtactttgtgtgtgggcatgtatgcgtatgagtacttgtgtgtggctggtgtatgggtgagcatgcacatgtgtatggatgcatatgtgagctgtacatgtagagtgtacatgtgtgttgcatgagcatgcatgcgtgcgagtgcctgtgtgtgtacttgcatatatgtggctgtgcaggtacccggcggtggtgggctggcagtgcccggggaagcaggtcctgctcacggcttccctgctgggccccaggccccgggctgagcctccctggcccctcttgcccctcagtggagcagggcctgggtggagggcctgggcagctccagggcaggtccggggaggccaggcttggggagcacagggggtggggttcacctgctgctgtttgttcccgaaactgtactgtgagcccacggcgggggcagattgttctgaggccccagatgtgccaaaacagcccccagggtgggggcgagcgagttctgaggagaggggctgcgggggccgggggtgggtgtgtgcccctcccctgaatggcccccaatgctgctgtttttcaataaaaccagagttgaaggca

SEQ ID NO: 19427 - DNA, 5870 bp, Homo sapiens
  source 1..5870: mol_type = unassigned DNA
atgcattgtgggcctcccgacatggtctgcgagacgaagatcgtggccgccgaggaccatgaggcgctgccgggggccaagaaggacgcgctgctcgccgccgccggcgccatgtggcccccgctgcccgccgcgcccgggccggccgccgcgccccccgcgcccccacctgccccggtggctcagcctcacggcggggcggggggcgcggggccgccgggggggcgcggcgtgtgcatccgcgagttccgtgcggccgagcaggaggcggcgcgccgcatcttctacgacggcatcatggagcgcatccctaacacggccttccgcggcctgcggcagcacccgcgcgcgcagctgctctacgccctgctggcggcgctgtgcttcgccgtgagccgctcgctgctgctgacgtgcctggtgccggccgcgctgctgggcctgcgctactactacagccgcaaggtgatccgcgcctacctggagtgcgcgctgcacacggacatggcggacatcgagcagtactacatgaagccgcccggctcctgcttctgggtggccgtgctggatggcaacgtggtgggcattgtggctgcacgggcccacgaggaggacaacacggtggagctgctgcggatgtctgtggactcacgtttccgaggcaagggcatcgccaaggcgctgggccggaaggtgctggagttcgccgtggtgcacaactactccgcggtggtgctgggcacgacggccgtcaaggtggccgcccacaagctctacgagtcgctgggcttcagacacatgggcgccagtgaccactacgtgctgccgggcatgaccctctcgctggctgagcgcctcttcttccaggtccgctaccaccgctaccgcctgcagctgcgcgaggagtgaccgccgccgctcgcccgcccgcccccccggccgccctgtccgcctttgcccgcctgcccgccgcccggcgcggcctgctttcagacgctcaattggcgtttgtgttgggtttccccttttcaacatcctgcggttgtctggctggttccggggggtgcggggctgttgttcttcggcgacactttggtgggggtgggttgtttgtcgccatagcccctcgcccttccccacctgcctgggcggcttgccacctgaagagtggcatcttggaccaccgcggctgtccatgacgctgccctgcccgccgccactggggaaggcccagccttgctcaccaagcacagaacctctgcagcagatcccggggccaggctccggccccgcctgcggccccagcgccactgcctgtggaggccccagctggccacggcgctgctttgctccgcgcatgccgagggtgtggcccggctgagcatgccgcatgcacacagccccgccctgccgccctgcccagactggacccggagacccgggctggtgagcgcccctgtccccagcccccagctggctgtgggagggcctgcccctgcccccacctcctggagggcctggtctgccccgcgccgcccggctctgtccacacctgctttgctctgacgccctccatttctctggctccggcccctcccctgcctgggctgtgctgactggtgtcatcacccaggtgactcccatggcgtccgtggcacagccagggtgggggtccatgggacccctctccccagtgcccactggatcgtgctggcctctcccagatgtccccggggacctcctgcctctggctgacggtccaccctgtgaatcttatcagcccaggctgctgccaacagcgcccagcccacagcttctcccagcctgaaaccaacacattttctaataagttatttagacagaatagcactctgcatgactttaattcttgggacaaaacggtagtttgtaccctaagacacagtttctggcccagtgtgatgggggtgggtggccgggtgggtggagcgttttgctgttggaaacctggagggaaaccctgattggatgtcatttcctgccatggagcacgcctcccagccctggcctgcagtgtgggcagggtggggggcaagggagtccgcagcctccgggaggaggggcagggcgctgccttgggctgggtgggaagaggggtggccgcctcggcttccgctggccatgctcctggtctctccttcctgaggtcacaggcaggggctgccctggacggggggcggggggggtggcctggaaggggagacagaggtggagggtggcacaggctgcacattcagcttagaagtggacctggctttggtggcaggagaagaataaacacttgcccagacccctttgtgtgggggaattggggaggggtcgtggcaggcagggtgggccacggaactgggtcccaggcatcaaggccacgtgcagggccatggagggatgcttctcacgaggcgcttcagaagcgagcgaagggacagagaagccctgcgtccaagggccttttgtcctgttagcaattgaggtgtgcagagcactgtacagaccccactcccctgtacattcctccctggaggtgcccggtccccgcttggggatgggagttttgtagactgtacagaaatcggcaccctattttcttgcagctcagattttgttaatctggaatatacagacagacgtaaagtgttttagcaaaatggaaacaaacagttgtgcctttttcctcttttggtttggtttgggtttggcctggggctggtcccagttggtgcggggcatgctgggggcaggaggggcagggcgggccaggtggagtcaggtcttgggggtgtcatgtcggggtgctgccagcgtcccttggtcctgtgcctttggagcctcgggctcctggggtgcagggtgcttgggggtggctgttggagcccaccgacgccagggcagggcctggaggcccagggactgccagtgtctccttgatattgatcctagcagatccccctcctgggggttctgagagtcctgggcagtgtggccttctctcattctggtggcatctgcgcccgtgagtgacctcttccttggctgcactgccctgtgggtggtgagacgcttggccttttttgttgctgccaggacttggtagagatggcaggaagggtgtgcggggtggttgtgtgcagaaccctgccgcccctgaggtgagcagaggcactggtgtgcctgccaggctggggcggagctgcccggaacccttgccaggccaatgtgtagcttggtggcgcccttgaaggccactggggggtaggtgtgtcctcccccggggctggaggccgggtgcctggtgggtgggcctgacctggcccacctcatccctccagcctgggatctcactgctctgcacatgtgcactgacgtgaattttatacgtttgtagaaactctgatgtaacttcttctacctctgaagcgccctcctgggccctgctgtcacgtggctggtgcggcttccccgagtgctggccccctgcccgctccccatgggcacccaccactcaaactctgcgtggtgaggcccggggaaagccaggccgggccctagcactgctcaggggcctggggctcctgggatttctgtgtgtttggaagcctctgtttttggagtggggggcgtggaaggcgggaggggctgacagtgcctggggccagagctgggcgaaggaggacatcctcactggacgagcactgcaggcctgacgagaggctccgggcagctgagggctgaagcgcctcgggatgccccacactgcccagagccacgggtcttgctgtgctgggggtggggtggccccaggcagctgccactgcccaggtgtgagtcgctgcagacctggtccctgagggtgggaggcctgcttgtgctgaagctgccatgtggtctggcccccagaagggctcctgagcgtagggagttgagccccgcagccgtggcggcatctcctcctccttcctccgccccatgcccagccttgcttccggctggtggcatgccttggggccgggcagcaggtgagaagctgcccccggagggaggggccaagggctgggtcagtctggcctgaggggtggatggctggccctgggggaaggctgggcctgggaggccctgtggacagcaggcctgaggccacgaggtcctggggccacccctctcctgctctgggtgtccttctcagagaagatggcagaaggctgcaggccctagaggggacgacgggctggggacgccctgagcttcctggctgtgtggcaggtgctggggaagctctctgggccatagggacctggctcccctctgagaggcccgcctgccctggggcacccagggctgtgctggtggcctgaggctgggaacttgggttcctgggctctgctggcgcctgggctttgtgggggccgaaggtggttgccccgccgggcagggggctgtgtgggccctcgtggggccaccttcctgtcagtgcccgagggacggtgggacagttgcccctgcgccaagggagcccactgccatcccccgtgggctggcgctgcagtcgcgcaccctgtgttgcctgctgacttgcttatgtctgtttggaagctgcttctgtttggccacaggcctgtgttcctgggctgatggccacagagctgacacttggggtttgagttccagacttgcagaccctgggatccgcttactcctccgcgccacggctgctgtgcttccagaggtggcgtgatgcctcccggggccatggtggggtgaaggatggcgagccggacataccattgttggatgtattttttttaaaacagcaataattagccattttaaaggagggatgtacctgtgtgtgtgcatgtgcacgtgtttgagcgtgtgtgtgtgtgcaagtgggttcttggatatgtgtagtgtgagcatgtgtgcatgtgtgagcctgtgcacgtgcatgttgtaggtgcataagcatgtacacgcgtgagcatgcatgtgtgtgtacacgtgtataggtgtacatgtgcatgagttgtgtacatgcgtgagcacgtgtatagatgtacgtgtgtgtgcgcatgtgtgcgtgtacatgtgtttgtgtcttgggtatgcataagcatgcacgtgtgtatgaatgtgcgtgtgtatgcatgagcacgtatgcatgtgtgatgcgcatgttcttgtgtacttctctgagggggcacatatgtatgagtgtatgagtgcatacatatgcatatggtgtacgtgtgtgtactttgtgtgtgggcatgtatgcgtatgagtacttgtgtgtggctggtgtatgggtgagcatgcacatgtgtatggatgcatatgtgagctgtacatgtagagtgtacatgtgtgttgcatgagcatgcatgcgtgcgagtgcctgtgtgtgtacttgcatatatgtggctgtgcaggtacccggcggtggtgggctggcagtgcccggggaagcaggtcctgctcacggcttccctgctgggccccaggccccgggctgagcctccctggcccctcttgcccctcagtggagcagggcctgggtggagggcctgggcagctccagggcaggtccggggaggccaggcttggggagcacagggggtggggttcacctgctgctgtttgttcccgaaactgtactgtgagcccacggcgggggcagattgttctgaggccccagatgtgccaaaacagcccccagggtgggggcgagcgagttctgaggagaggggctgcgggggccgggggtgggtgtgtgcccctcccctgaatggcccccaatgctgctgtttttcaataaaaccagagttgaaggc

SEQ ID NO: 19428 - DNA, 4988 bp, Homo sapiens
  source 1..4988: mol_type = unassigned DNA
ctcgcgggaggcggttttctcccgcctgctgtgctctgtgacctctctgctgcctcctccacggtctctgggcggagcaatccacactgctgagcctggggtggtttggaattcttcggcgaagtggagcgggctgagattcttcaccaaaggacatggatgaaaatgaaagcaaccagtctctgatgacaagcagccaatatcctaaagaagcagtaagaaaacgtcaaaattcagcacggaattccggagcaagtgattcttctaggttttctaggaaaagcttcaaactggattatagactagaagaagatgtaactaaatccaagaaaggaaaagatgggagatttgtgaatccgtggccaacatggaaaaacccctctattccaaatgttctcagatggctgataatggagaaagatcacagcagtgttccaagttctaaagaggaactagacaaagaactcccagtgcttaagccatattttatcactaaccctgaagaagctggagtgagggaagctggcttaagagtcacatggctgggacatgccacggtaatggtggaaatggatgagctcatatttctcacggatcccatctttagctctcgtgcttcaccatcgcagtacatgggtccaaagcgatttcgtcgttccccgtgcacaataagtgaactccctccaatagatgcggtccttatcagtcacaaccactatgaccatctggactacaattctgtcattgctttgaatgagcgatttggtaatgagttgagatggtttgtgcctttgggtctccttgactggatgcaaaaatgtggctgtgagaatgtgattgagttggactggtgggaggagaattgtgtccccggacatgataaggtcacttttgtctttacaccttcccagcactggtgtaaaaggactctaatggatgacaacaaggtgctatggggcagctggtctgtcttggggccttggaatcgattttttttcgcaggagatactggttattgccctgcttttgaagagataggaaaaagatttggaccttttgaccttgcagctattcccatcggagcttatgaaccgaggtggtttatgaaataccagcatgtagacccagaagaagctgtaaggattcacactgatgtccaaacaaagaaatctatggcaattcactggggaacttttgccttagcaaatgagcattacttagagcctccagtgaagctgaatgaagctctagagagatacggacttaacgctgaagatttttttgtcttgaagcatggagaatcaagatacctaaataatgatgatgaaaacttttaataaatgtgagcacaggcacttttaatgaaaaaggcatcatctaagtttaaaaacaaatgaaaagacttagaaattcatgaatattgtgattattttacatttggaaacaacttctgcaagtttatgttttatgttttgtgtaataacttgcttcctagtatgatcagctcatgtacactatgagagggttcaggggtgggtcatttaaataatgaattggctaatgtggattttaaatttcatatcatgatataagcactgcaatggaaatgtttttactaaaacattatatttttgtggtactagaatttcctgaggtgaaaaaccgatattgaagattcatttttcttttttccattcttcaggaccttcggcaaggtgagtcaaggctctctacctacctagatgtttttcagaggcctacaaatacaagtatctttcttatatgcacattctaataaatgatgaaattcagtccaacatgcttattataaacatagcaattcttgctctatcaaattagcttatatgccaaatattaaatatggtttatttaggtaagcataaaaacataggggctatcatttttaaagacttgattttctctattgtggtaaaatatataaatacatatttgccattttaaacatttaccattttaaccatttttaagtgtacagttctttcgcattaatgcacccatgaccaccattcacttaaatttttaaaagaacagtatattctttttttcctagagccttcagatgagagggaacagtatattctattgcacgtctacaattcccaaaagacctcttactttgggaggccaaggtgggtgggtcacttgaacccaggagtttgacatcaacctgggcaacatggtgacctcccgtctctctcggaaaaaaaaaaagaaaaaagaaaaagccgggtgaggtggtgtgtacctgtagtcacaggtacttgggaggctgaggtgggaggatcacttgagcccaggagatagaggctgcagtgagctgtgatcgtaccactgcactccagcctgggcgacaaaatgagaccctgtctcaaaagaaagccctctccttagctgagcagaggaagggaaggagtgtggctatgagaatatgatttatgccattttctgtttttaaatctagaagatcttctaagcacaaatacagctacaatgaaatattttacagacaaaatgttaatagaccatattctttgaattaaatttgtttttaattttctctacacattttttttttcctggagtctcttagctctaaatatatcaatcagatttataattttttttacctgattcagatgtcttacatttttatattaaatgaaccttaagcatgattcttttggtaagccagtatgaatgccagtggttggggggcggggggggagtcagttgacataagatttagtcctaataaggactctgtattcacttgattattctgacccttcctaagggagggaggtggattagataccactggaggcccattctgtattcctaatccagtctcagcactttattcatacaaaataatcaaaataggttttctacaccaaatgctacccaggcagtgctctataatttatttgcacacctgtatgtgtggtgccacgttagccactaaatctgaacttttaccctgctttcatcatggatttttttgtgtaacctgaaacaagtcaccagtgctcactgtgcctgtttcctcatttgcaacaagaggataattccgacctacctctgaaaaatgtgtagattaaatgagtttttaaagcactttagaaaatataagggagaaaatgatttcttaagatatcactgcctaatatagacaggtatatttgaaagctaaatacaggttaatgcttttgataatgtattgttcctgttgcaaatttaagcattatatattaggagactaaacattgaaaactttcactgatttttaaattggagtaatagcctaaataagtgtaaataatctttatcaaaatttagtgtttatctacaaagatgcgaatcagtcaaggggaaatgtgtatgcaatgtgtgtgtatatgatgtatgcgaacatatgtgattttggggtactaaagcacaaaaaaatcccccataaaataaaccttcctgaaaagactgatcataaactttttcactccaagcagatgtgaatcaagatgttaggtttatggtgagttagctttgaggtgtgttgccctaatactagccagcgttgttgtagccatattccctgctgctgcacgccgaattgaaaatccatctcttacctcttctctatgaagcaagccaggtatgtcttgcttaagtatttcttctccatgaatggccttaacattattttgtattcacgtgtactgtttaactgagggtctcaaagcactttaaactgttgtgttctatttccactcgtctggcctgcctcatttttctaggcccttttgtaagctgtaattttttattaccactcatgttctttctacactgacactattcattaagaacatcaagcttcatctctgcttacagaatctcaccttattgagtgggttccactttatttttcatttgttatctacattttgaagggtttatgtgcaaagtgaaaacaaattttgaaaaataagacaaatccattctcttcttcaattcagtctaatatgcattgtagtgtcttttaatcagtcttatcctctaagtcaacttcattttcctcttcgtgaatacccatagcaatatgtaagattttattgaagtttcctgtgataactgaggaatactttgctatgcctcactgcccaatagggtgggtcatcaattaggagaaatcccaaattataaaagccaacatatgccgtgacctacgtaggaaaagatgtatttgtgcatcttctttctgggtagttaaaaattactccctcttttctctagcattttgacatttcagactcaatgctctgatctctagggagtgtgattattcaaactaatgagaggacaagaagacacagttttagaatctactgctgctaaagcacattaaaaacaaatcctggtttttaatgtatgcatagtttcatatttaatgaatatgctttcattaaatagggaggtagatttgaaaaaaccgttataaagaaatgtgccttttggggaatgaatacttttgttcatgtctagcccactgggaattttgttttcaccttatactgagtcctttttctaatgtaaaaatatttcttccaagtttgatttctgtatcagggtaacattgagaacacacatatttctgtttgaggatttgtgacttcctatggaaacagtcttgcatctatgtatttacaaatgaaatttaaagtattcttaaagctttgccttaaatactgcttgcatactgatttacttaatgctaagcatggcaggggttataaatttaaatactataagacctggctgaatcccagatgtatcaataaattgttatagtagcttatggaaaatgctattaaagataaattttcatacattgtatttttagtcaagtaaaatatggatgaaaattaataaagtactgtcaagggaaaaaa

SEQ ID NO: 19429 - DNA, 565 bp, Homo sapiens
  source 1..565: mol_type = unassigned DNA
acactgctgagcctggggtggtttggaattcttcggcgaagtggagcgggctgagagtgggtttcccgtccccgagccctccctcatctcggagatgccgcacttgtgagcgacagggcttcatttgaattttcgcacctcgcgagttgcggagcctgcatctctgaagctgcctcgttcttcaccaaaggacatggatgaaaatgaaagcaaccagtctctgatgacaagcagccaatatcctaaagaagcagtaagaaaacgtcaaaattcagcacggaattccggagcaagtgattcttctaggttttctaggaaaagcttcaaactggattatagactagaagaagatgtaactaaatccaagaaaggaaaagatgggagatttgtgaatccgtggccaacatggaaaaacccctctattccaaatgttctcagatggctgataatggagaaagatcacagcagtgttccaagttctaaagaggaactagacaaagaactcccagtgcttaagccatattttatcactaaccctgaagaagctggagtgagggaagctggc

SEQ ID NO: 19430 - DNA, 2672 bp, Homo sapiens
  source 1..2672: mol_type = unassigned DNA
ggagagtagctgtctgggatttgagatcctatcttccctgcaaattaccaggttgcatcttcactgataggaatacatttcttcaccaaaggacatggatgaaaatgaaagcaaccagtctctgatgacaagcagccaatatcctaaagaagcagtaagaaaacgtcaaaattcagcacggaattccggagcaagtgattcttctaggttttctaggaaaagcttcaaactggattatagactagaagaagatgtaactaaatccaagaaaggaaaagatgggagatttgtgaatccgtggccaacatggaaaaacccctctattccaaatgttctcagatggctgataatggagaaagatcacagcagtgttccaagttctaaagaggaactagacaaagaactcccagtgcttaagccatattttatcactaaccctgaagaagctggagtgagggaagctggcttaagagtcacatggctgggacatgccacggtaatggtggaaatggatgagctcatatttctcacggatcccatctttagctctcgtgcttcaccatcgcagtacatgggtccaaagcgatttcgtcgttccccgtgcacaataagtgaactccctccaatagatgcggtccttatcagtcacaaccactatgaccatctggactacaattctgtcattgctttgaatgagcgatttggtaatgagttgagatggtttgtgcctttgggtctccttgactggatgcaaaaatgtggctgtgagaatgtgattgagttggactggtgggaggagaattgtgtccccggacatgataaggtcacttttgtctttacaccttcccagcactggtgtaaaaggactctaatggatgacaacaaggtgctatggggcagctggtctgtcttggggccttggaatcgattttttttcgcaggagatactggttattgccctgcttttgaagagataggaaaaagatttggaccttttgaccttgcagctattcccatcggagcttatgaaccgaggtggtttatgaaataccagcatgtagacccagaagaagctgtaaggattcacactgatgtccaaacaaagaaatctatggcaattcactggggaacttttgccttagcaaatgagcattacttagagcctccagtgaagctgaatgaagctctagagagatacggacttaacgctgaagatttttttgtcttgaagcatggagaatcaagatacctaaataatgatgatgaaaacttttaataaataatttcctgaggtgaaaaaccgatattgaagattcatttttcttttttccattcttcaggaccttcggcaagatgtgaatcaagatgttaggtttatggtgagttagctttgaggtgtgttgccctaatactagccagcgttgttgtagccatattccctgctgctgcacgccgaattgaaaatccatctcttacctcttctctatgaagcaagccaggtatgtcttgcttaagtatttcttctccatgaatggccttaacattattttgtattcacgtgtactgtttaactgagggtctcaaagcactttaaactgttgtgttctatttccactcgtctggcctgcctcatttttctaggcccttttgtaagctgtaattttttattaccactcatgttctttctacactgacactattcattaagaacatcaagcttcatctctgcttacagaatctcaccttattgagtgggttccactttatttttcatttgttatctacattttgaagggtttatgtgcaaagtgaaaacaaattttgaaaaataagacaaatccattctcttcttcaattcagtctaatatgcattgtagtgtcttttaatcagtcttatcctctaagtcaacttcattttcctcttcgtgaatacccatagcaatatgtaagattttattgaagtttcctgtgataactgaggaatactttgctatgcctcactgcccaatagggtgggtcatcaattaggagaaatcccaaattataaaagccaacatatgccgtgacctacgtaggaaaagatgtatttgtgcatcttctttctgggtagttaaaaattactccctcttttctctagcattttgacatttcagactcaatgctctgatctctagggagtgtgattattcaaactaatgagaggacaagaagacacagttttagaatctactgctgctaaagcacattaaaaacaaatcctggtttttaatgtatgcatagtttcatatttaatgaatatgctttcattaaatagggaggtagatttgaaaaaaccgttataaagaaatgtgccttttggggaatgaatacttttgttcatgtctagcccactgggaattttgttttcaccttatactgagtcctttttctaatgtaaaaatatttcttccaagtttgatttctgtatcagggtaacattgagaacacacatatttctgtttgaggatttgtgacttcctatggaaacagtcttgcatctatgtatttacaaatgaaatttaaagtattcttaaagctttgccttaaatactgcttgcatactgatttacttaatgctaagcatggcaggggttataaatttaaatactataagacctggctgaatcccagat

SEQ ID NO: 19431 - DNA, 575 bp, Homo sapiens
  source 1..575: mol_type = unassigned DNA
gcgcccgcggcccgggatcccgagtgtccggagctccgtggtttctgttggacctcgcgggaggcggttttctcccgcctgctgtgctctgtgacctctctgctgcctcctccacggtctctgggcggagcaatccacactgctgagcctggggtggtttggaattcttcggcgaagtggagcgggctgagagtgggtttcccgtccccgagccctccctcatctcggagatgccgcacttgtgagcgacagggcttcatttgaattttcgcacctcgcgagttgcggagcctgcatctctgaagctgcctcggtgaagagccacagcattattttttttctctttgggagagtagctgtctgggatttgagatcctatcttccctgcaaattaccagttacattggttatgaattagccgcagacatggacatcgtttagaaagaagttatgtaatctttaaaaagaagattacctatatcccacaatagtgtgatttttgttgcaagaaaatactgggtctgttaaagaagaaatttaggttcttcaccaaaggacatggatgaaaatgaaag

SEQ ID NO: 19432 - DNA, 1822 bp, Homo sapiens
  source 1..1822: mol_type = unassigned DNA
gaaggaggccaccgctggccctgctgtcagattcgaaggtcataataagggagtgacccggcgacgactcgccccaacgatggcgaggcggcgagagctgaagcgctgcctgcagctgctggcgtcctcggcggagccagcgcggcgggctcgggttaggaagaacccgagcgcctgccgcggtcgcccctcccgctacgcggcggcgctttgcgcggggactctgtggccggaagccgcggaactgaggcggcgcgcgctcccggccaccccaagcgcgagttcttcaccaaaggacatggatgaaaatgaaagcaaccagtctctgatgacaagcagccaatatcctaaagaagcagtaagaaaacgtcaaaattcagcacggaattccggagcaagtgattcttctaggttttctaggaaaagcttcaaactggattatagactagaagaagatgtaactaaatccaagaaaggaaaagatgggagatttgtgaatccgtggccaacatggaaaaacccctctattccaaatgttctcagatggctgataatggagaaagatcacagcagtgttccaagttctaaagaggaactagacaaagaactcccagtgcttaagccatattttatcactaaccctgaagaagctggagtgagggaagctggcttaagagtcacatggctgggacatgccacggtaatggtggaaatggatgagctcatatttctcacggatcccatctttagctctcgtgcttcaccatcgcagtacatgggtccaaagcgatttcgtcgttccccgtgcacaataagtgaactccctccaatagatgcggtccttatcagtcacaaccactatgaccatctggactacaattctgtcattgctttgaatgagcgatttggtaatgagttgagatggtttgtgcctttgggtctccttgactggatgcaaaaatgtggctgtgagaatgtgattgagttggactggtgggaggagaattgtgtccccggacatgataaggtcacttttgtctttacaccttcccagcactggtgtaaaaggactctaatggatgacaacaaggtgctatggggcagctggtctgtcttggggccttggaatcgattttttttcgcaggagatactggttattgccctgcttttgaagagataggaaaaagatttggaccttttgaccttgcagctattcccatcggagcttatgaaccgaggtggtttatgaaataccagcatgtagacccagaagaagctgtaaggattcacactgatgtccaaacaaagaaatctatggcaattcactggggaacttttgccttagcaaatgagcattacttagagcctccagtgaagctgaatgaagctctagagagatacggacttaacgctgaagatttttttgtcttgaagcatggagaatcaagatacctaaataatgatgatgaaaacttttaataaatgtgagcacaggcacttttaatgaaaaaggcatcatctaagtttaaaaacaaatgaaaagacttagaaattcatgaatattgtgattattttacatttggaaacaacttctgcaagtttatgttttatgttttgtgtaataacttgcttcctagtatgatcagctcatgtacactatgagagggttcaggggtgggtcatttaaataatgaattggctaatgtggattttaaatttcatatcatgatataagcactgcaatggaaatgtttttactaaaacattatatttttgtggtactagaatttcctgaggtgaaaaaccgatattgaagattca

SEQ ID NO: 19433 - DNA, 1822 bp, Homo sapiens; identical to SEQ ID NO: 19432
  source 1..1822: mol_type = unassigned DNA

SEQ ID NO: 19434 - DNA, 2380 bp, Homo sapiens
  source 1..2380: mol_type = unassigned DNA
aattcttcggcgaagtggagcgggctgagagtgggtttcccgtccccgagccctccctcatctcggagatgccgcacttgtgagcgacagggcttcatttgaattttcgcacctcgcgagttgcggagcctgcatctctgaagctgcctcggtgaagagccacagcattattttttttctctttgggagagtagctgtctgggatttgagatcctatcttccctgcaaattaccaggttgcatcttcactgataggaatacatttcttcaccaaaggacatggatgaaaatgaaagcaaccagtctctgatgacaagcagccaatatcctaaagaagcagtaagaaaacgtcaaaattcagcacggaattccggagcaagtgattcttctaggttttctaggaaaagcttcaaactggattatagactagaagaagatgtaactaaatccaagaaaggaaaagatgggagatttgtgaatccgtggccaacatggaaaaacccctctattccaaatgttctcagatggctgataatggagaaagatcacagcagtgttccaagttctaaagaggaactagacaaagaactcccagtgcttaagccatattttatcactaaccctgaagaagctggagtgagggaagctggcttaagagtcacatggctgggacatgccacggtaatggtggaaatggatgagctcatatttctcacggatcccatctttagctctcgtgcttcaccatcgcagtacatgggtccaaagcgatttcgtcgttccccgtgcacaataagtgaactccctccaatagatgcggtccttatcagtcacaaccactatgaccatctggactacaattctgtcattgctttgaatgagcgatttggtaatgagttgagatggtttgtgcctttgggtctccttgactggatgcaaaaatgtggctgtgagaatgtgattgagttggactggtgggaggagaattgtgtccccggacatgataaggtcacttttgtctttacaccttcccagcactggtgtaaaaggactctaatggatgacaacaaggtgctatggggcagctggtctgtcttggggccttggaatcgattttttttcgcaggagatactggttattgccctgcttttgaagagataggaaaaagatttggaccttttgaccttgcagctattcccatcggagcttatgaaccgaggtggtttatgaaataccagcatgtagacccagaagaagctgtaaggattcacactgatgtccaaacaaagaaatctatggcaattcactggggaacttttgccttagcaaatgagcattacttagagcctccagtgaagctgaatgaagctctagagagatacggacttaacgctgaagatttttttgtcttgaagcatggagaatcaagatacctaaataatgatgatgaaaacttttaataaatgtgagcacaggcacttttaatgaaaaaggcatcatctaagtttaaaaacaaatgaaaagacttagaaattcatgaatattgtgattattttacatttggaaacaacttctgcaagtttatgttttatgttttgtgtaataacttgcttcctagtatgatcagctcatgtacactatgagagggttcaggggtgggtcatttaaataatgaattggctaatgtggattttaaatttcatatcatgatataagcactgcaatggaaatgtttttactaaaacattatatttttgtggtactagaatttcctgaggtgaaaaaccgatattgaagattcatttttcttttttccattcttcaggaccttcggcaaggtgagtcaaggctctctacctacctagatgtttttcagaggcctacaaatacaagtatctttcttatatgcacattctaataaatgatgaaattcagtccaacatgcttattataaacatagcaattcttgctctatcaaattagcttatatgccaaatattaaatatggtttatttaggtaagcataaaaacataggggctatcatttttaaagacttgattttctctattgtggtaaaatatataaatacatatttgccattttaaacatttaccattttaaccatttttaagtgtacagttctttcgcattaatgcacccatgaccaccattcacttaaatttttaaaagaacagtatattctttttttcctagagccttcagatgagagggaacagtatattctattgcacgtctacaattcccaaaagacctcttactttgggaggccaaggtgggtgggtcacttgaacccaggagtttgacatcaacctgggcaacatggtgacctcccgtctctctcggaaaaaaaaaaagaa

SEQ ID NO: 19435 - DNA, 3220 bp, Homo sapiens
  source 1..3220: mol_type = unassigned DNA
ctcaaccccttctctcgtaggcccttctaccctccccgaagccgggctcccgggttccgcttccacagggccgccccctctcctccgagatccaacgcctcgcccctcggtaagaggcccaggactcagcccacggccccgccccccacttggctagtccgcccctggcgagacccctgctctcacccacccaggacttctcgctcccaggccgggtcctctcaccgtcaaggcccgccccctgccaacggtcctcacccattagccgaaggccccgcccctcacagattgccgcagggcaggggcggagacagcccgggccgtcccaggctccgcccccggaagcctcacttccgggcgcgagcacgccccgcctcgccccggcggcagagaggagactatggaacgtcaggtgctgctgagcgagcccgaggaggcggcggctctgtatcggggccttagccgccagcccgcgctgagcgccgcctgcctgggcccggaggtcaccacgcagtacggcggccaataccggacggtgcacactgagtggacccagagggacctggaacgcatggagaacattcgattctgccgccaatacctggtgttccatgacggggactcagtggtgtttgcaggacctgcaggcaacagtgtggagacccggggggaactgctgagcagagagtctccttcaggcaccatgaaagctgtgctgcgcaaggctggaggcacgggccctggggaagagaagcagttcctggaggtctgggagaagaaccggaagctcaagagcttcaacctgtcagcgctggagaaacatgggcctgtttatgaggatgactgctttggctgcctgtcctggtcgcactcggagacacacttgttgtatgtggcagagaagaagcgccccaaggccgagtccttctttcagaccaaagccttggacgtcagtgccagcgatgatgagatagccaggctgaagaagccagaccaagccatcaagggggatcagtttgtgttttatgaagactggggagaaaacatggtttccaaaagcatccctgtgctctgcgtgctggatgtcgagagtggcaacatctctgtgcttgagggggtccctgagaatgtgtcccctggacaggcattttgggcccctggagatgctggtgtggtgtttgtgggctggtggcatgagcccttccggttgggcatccgcttttgcaccaatcgcaggtcagccctgtattatgtggacctcatcggggggaagtgtgagctcctctcggatgactccctggctgtctcttctccccggctgagcccagaccaatgtcgcattgtctacctgcagtacccatctctgatcccccatcaccaatgcagccagctgtgcctgtatgactggtataccaaggttacctcagtggtggtagatgttgtgcctcggcagctgggagagaacttctctgggatctactgcagccttctgcctttgggatgctggtcagctgacagccagagagtggtctttgactcggctcagcgcagccggcaggacctgtttgctgtggacacccaagtgggcactgtgacctccctcacagctggagggtcaggtgggagctggaagttgctcacaattgaccaggacctcatggtggcacagttttccacacccagcctacctccaaccctgaaagttgggttcctgccttctgcagggaaggagcagtcagtgttgtgggtgtccctggaggaggccgagcccattcccgacatccactggggcatccgggtgctacagccacccccagagcaagagaatgtgcagtatgctggccttgactttgaagcaatcctgctgcagcctggcagccctccagataagacccaagtgcccatggtggtcatgccccacggggggccccattcatcctttgtcactgcctggatgctgttcccagccatgctttgcaagatgggctttgcggtactactagtgaactatcgtggctccacgggctttggccaggacagcatcctctccctcccaggcaatgtgggccaccaggatgtgaaggatgtccagtttgcagtggaacaggtgctccaggaggaacactttgatgcaagccatgtggcccttatgggtggttcccatggtggcttcatttcctgccacttgattggtcagtacccagagacctacagggcctgcgtggcccggaaccccgtgatcaacatcgcctccatgttgggctccactgacatccctgactggtgcgtggtggaggctggctttcctttcagcagtgactgcctgccagacctcagcgtgtgggctgagatgctggacaaatcgcccatcagatacatccctcaggtgaagacaccactgttactgatgttgggccaggaggaccggcgtgtgcccttcaagcagggcatggagtattaccgtgccctcaagacccggaatgtgcctgttcggctcctgctctatcccaaaagcacccacgcattatcagaggtggaggtggagtcagacagcttcatgaatgctgtgctctggctacgcacacacttgggcagctgaagccctgccattctgcatgagctgatcagcctgtgccacacttcgctcttgaggagctcaacggtctggcagggcagcaggaggctttctgggctctggactccacggatgcgtgggcagaggaatgtgggctatgtagtcataataaattaggacacagagcctggttcctgctggtactttgtaccaaaccatccccaaccccacctcccactctggggtgcagagaccctaggttctgggtgtggcagccacaagggcttcatctgcctccagtgtgagaagggagggaacagtgagaggcttagcctctgcctgtcctggcaaccaggactctgtaccagcctagcttccctgctgcagccccttccattagcaactactctgtaccacccttcccaagagtatgtctggaggactagtgtgaggccctgtctttccacggcacccatgggcaaaagtagtcccagggacattgccttggttggggaagcccctaggctggacagatcacctagcccagggtgtgctgggctcaagccacccgagccctagcaaggagtcactgacacatttcctggaagcaaaggctaagaagcatctgtacaggcataaagagga

SEQ ID NO: 19436 - DNA, 4293 bp, Homo sapiens
  source 1..4293: mol_type = unassigned DNA
gtcctgaacagactgcagagtaaatatggctccctgtacagaagagataatgtcatcctgagtggcactcacactcattcaggtcctgcaggatatttccagtataccgtgtttgtaattgccagtgaaggatttagcaatcaaacttttcagcacatggtcactggtatcttgaagagcattgacatagcacacacaaatatgaaaccaggcaaaatcttcatcaataaaggaaatgtggatggtgtgcagatcaacagaagtccgtattcttaccttcaaaatccgcagtcagagagagcaaggtattcttcaaatacagacaaggaaatgatagttttgaaaatggtagatttgaatggagatgacttgggccttatcagctggtttgccatccacccggtcagcatgaacaacagtaaccatcttgtaaacagtgacaatgtgggctatgcatcttacctgcttgagcaagagaagaacaaaggatatctacctggacaggggccatttgtagcagccttttcttcatcaaacctaggagatgtgtcccccaacattcttggaccacgttgcatcaacacaggagagtcctgtgataacgccaatagcacttgtcccattggtgggcctagcatgtgcattgctaagggacctggacaggatatgtttgacagcacacaaattataggacgggccatgtatcagagagcaaaggaactctatgcctctgcctcccaggaggtaacaggaccactggcttcagcacaccagtgggtggatatgacagatgtgactgtctggctcaattccacacatgcatcaaaaacatgtaaaccagcattgggctacagttttgcggctggcactattgatggagttggaggcctcaattttacacaggggaaaacagaaggggatccattttgggacaccattcgggaccagatcctgggaaagccatctgaagaaattaaagaatgtcataaaccaaagcccatccttcttcacaccggagaactatcaaaacctcacccctggcatccagacattgttgatgttcagattattacccttgggtccttggccataactgccatccccggggagtttacgaccatgtctggacgaagacttcgagaggcagttcaagcagaatttgcatctcatgggatgcagaacatgactgttgttatttcaggtctatgcaacgtctatacacattacattaccacttatgaagaataccaggctcagcgatatgaggcagcatcgacaatttatggaccgcacacattatctgcttacattcagctcttcagaaaccttgctaaggctattgctacggacacggtagccaacctgagcagaggtccagaacctccctttttcaaacaattaatagttccattaattcctagtattgtggatagagcaccaaaaggcagaactttcggggatgtcctgcagccagcaaaacctgaatacagagtgggggaagttgctgaagttatatttgtaggtgctaacccgaagaattcagtacaaaaccagaaccatcagaccttcctcactgtggagaaatatgaggctacttcaacatcgtggcagatagtgtgtaatgatgcctcctgggagactcgtttttattggcacaagggactcctgggtctgagtaatgcaacagtggaatggcatattccagacactgcccagcctggaatctacagaataagatattttggacacaatcggaagcaggacattctgaagcctgctgtcatactttcatttgaaggcacttccccggcttttgaagttgtaactatttagtgaaaagttgatagatcatttaaagaacagctttactctctacacattatataagtgatttcaaatgaatgtgaactagtgaactaccatgttgacttctataatcgtccctgtttggggacagatagtttactgctaatggggtggaggggtgtgtgtgtgtgtgtgtgtgtgtgtgtgtgagagagagagagagagagagagagagagagagagagagagagagagagagagaggtttgtcccgtatatcttgctccagcagccatatatcttgtggtctacagcctaaagcatgatttcccttgaagtcttggggttgtttaaaggagagtcccttcaatataaaacctctgaaatattagtgagaatggctcactaatgtgaacaatgtttaaattatttatttatatatagaattactgaatattagtactgggaaaatttatagaaatcatctagtcttacccttcatcttacatataagaaaaatggtcttttcttctaatcacatttacaaaatatgatataaaccttgaccatgaatgtatgagcctaattagagaaacagaaaatcagcatgtcagttttccttcattcaaaataacatagtctttctaagcagtcattctggagttaacatgcctagttcagagccgctgtggatgctcaaatcatttctggaattgccttcaggacacaattatgagaaagtcagacttccaatattttgatcatgccttgtgttttcctaagtgtccttatcccactggattgtgtctcttactcccaagacttattccaaatgattttttgagtcttttcattaatcaaattcaccccaaaccagaaagttttgccattagcgtagatattaaaaatattactggctgggaaagcactcctcaaagcagaggttctaaattaatttatctgttcttttaccatttgctcactcactcactcatggacccattcaatcatagaatatttaagatttatatgcccagaattataatagtgcctaggccttgataattagtgaatttgtacttggggtgaatgtgtaagtgtcaaaaggtaactattatgaaggagaaaataatcgatttaatatgtaaattctggggaggcatttaaaaaatcagtaatcttcaagttatatcttgtgtatcatctgtgttggatactctaatttggggggaaagaggctccagacagtttgctaaatactattttgaaagttatttttgggcattgtaaaataccttgcttcataccccaaagaataagatatgacagtctgacatcgattgtctgaaagtactaattgcatttaaaattctttaagttaactacaagctcccagactgcaaagcaaatttccaaaccccaggtcatacttttgtatgtatgtaaaagctttagcattttagggaaaaaaatcaatctgtattttaaaaataaactttgaggtttgaaaataataacaatattcataatggtagtattaacatctattatgtataacttaatctcaacataatttattgaattagaatgaacctggaacactttttgatgaattggtatcctagaggctgtttccttgggcattaactgctggaggattaggtaatcagggattccaagtgttgtgatcttttttctaatgacgccacagtcttcagtgtaaaagttcagaagcctaaaagaacaagtgatcctgaaagtagctgattccagacaagaaaattatattagaactcatgatatggttttttaaagtatttgttattactcagaagggttcatgaatcagtttccactacctctattccttctattgaagctttcctcaaatctacttgtgattcctgatagctcactggcaactgtaccaaggtggccactgtatcatctactgatccttctgcacctagcactcttggctccagataacgcacagaaacctattttctcaccagctgtcatttcttctagggcatgcagttctatgttcgcagttcatgtgtaaaaacaaaaccaaattcctggattatcaatatcagttctttacctgtgcataaaagaatatcatgaagtaattgaacttatctgttgatataaaaacacagatccaattcatgtctgtggatgctgcagggactggctcactggagccaaaccatgtggcagaaactcctgaaattggtggaaaaagtggaatatggcagattgggtaggtaggagaacaattttggagattttgtttctcatgttaaaatgtctgcattttatttgctgtaccctgcctactctggttttaaggattttttgacttctttgaaaagcactgaataatctcttttccaggtctagattttttgatgagtactgtgtaaaattgtcaatattcaatggattatttaataataaattaagaattacactcataaaa

SEQ ID NO: 19437 - DNA, 2050 bp, Homo sapiens
  source 1..2050: mol_type = unassigned DNA
atggactctgagaaatcttctgagtggcggagtgatgtcctgaacagactgcagagtaaatatggctccctgtacagaagagataatgtcatcctgagtggcactcacactcattcaggtcctgcaggatatttccagtataccgtgtttgtaattgccagtgaaggatttagcaatcaaacttttcagcacatggtcactggtatcttgaagagcattgacatagcacacacaaatatgaaaccaggcaaaatcttcatcaataaaggaaatgtggatggtgtgcagatcaacagaagtccgtattcttaccttcaaaatccgcagtcagagagagcaaggtattcttcaaatacagacaaggaaatgatagttttgaaaatggtagatttgaatggagatgacttgggccttatcagctggtttgccatccacccggtcagcatgaacaacagtaaccatcttgtaaacagtgacaatgtgggctatgcatcttacctgcttgagcaagagaagaacaaaggatatctacctggacaggggccatttgtagcagccttttcttcatcaaacctaggagatgtgtcccccaacattcttggaccacgttgcatcaacacaggagagtcctgtgataacgccaatagcacttgtcccattggtgggcctagcatgtgcattgctaagggacctggacaggatatgtttgacagcacacaaattataggacgggccatgtatcagagagcaaaggaactctatgcctctgcctcccaggaggtaacaggaccactggcttcagcacaccagtgggtggatatgacagatgtgactgtctggctcaattccacacatgcatcaaaaacatgtaaaccagcattgggctacagttttgcggctggcactattgatggagttggaggcctcaattttacacaggggaaaacagaaggggatccattttgggacaccattcgggaccagatcctgggaaagccatctgaagaaattaaagaatgtcataaaccaaagcccatccttcttcacaccggagaactatcaaaacctcacccctggcatccagacattgttgatgttcagattattacccttgggtccttggccataactgccatccccggggagtttacgaccatgtctggacgaagacttcgagaggcagttcaagcagaatttgcatctcatgggatgcagaacatgactgttgttatttcaggtctatgcaacgtctatacacattacattaccacttatgaagaataccaggctcagcgatatgaggcagcatcgacaatttatggaccgcacacattatctgcttacattcagctcttcagaaaccttgctaaggctattgctacggacacggtagccaacctgagcagaggtccagaacctccctttttcaaacaattaatagttccattaattcctagtattgtggatagagcaccaaaaggcagaactttcggggatgtcctgcagccagcaaaacctgaatacagagtgggggaagttgctgaagttatatttgtaggtgctaacccgaagaattcagtacaaaaccagaaccatcagaccttcctcactgtggagaaatatgaggctacttcaacatcgtggcagatagtgtgtaatgatgcctcctgggagactcgtttttattggcacaagggactcctgggtctgagtaatgcaacagtggaatggcatattccagacactgcccagcctggaatctacagaataagatattttggacacaatcggaagcaggacattctgaagcctgctgtcatactttcatttgaaggcacttccccggcttttgaagttgtaactatttagtgaaaagttgatagatcatttaaagaacagctttactctctacacattatataagtgatttcaaatgaatgtgaactagtgaactaccatgttgacttctataatcgtccctgtttggggacagatagtttactgctaatggggtggaggggtgtgtgtgtgtgtgtgtgtgtgtgtgtgt

SEQ ID NO: 19438 - DNA, 3235 bp, Homo sapiens
  source 1..3235: mol_type = unassigned DNA
agtgggcgggcgcggcgcattgctgctcggcggcgccggcgccggggtccgggcggccatggggcaacaggcggccagggcgccaagggccaggtagcgacggctggcggcggcgcggcggcggggcctgcgggctcggtccggcatgtagacgcccccgcaggcgcccgcggcagcgaacggcatcagtgtttttctgaccgaagttctcatttcctgacaatggaaatggaacaagaaaaaatgaccatgaataaggaattgagtccagacgcggctgcttactgctgctcggcctgccacggcgatgagacctggagttacaaccaccccatccggggccgggccaagtctcgcagcctgtctgcctcgcccgccctggggagcaccaaggagttcaggaggacacgctctcttcatgggccatgcccggtgaccacttttggaccaaaggcctgtgtgctgcagaacccccagaccatcatgcacattcaggaccccgcgagccagcggctgacgtggaacaagtccccaaagagcgtccttgtcatcaagaagatgagagatgccagcctactgcagccgttcaaggagctctgcacgcacctcatggaggagaacatgatcgtgtatgtggaaaagaaagtgctagaagaccctgccatcgccagcgatgaaagctttggggcagtgaagaagaaattctgtacctttcgagaagattatgatgacatttccaatcagatagacttcatcatctgcctggggggagacgggacgctgctgtacgcttcctcgcttttccagggcagcgtccctccggtcatggccttccacctgggctccctgggcttcctgaccccattcagctttgagaactttcagtcccaagttactcaggtgatagaggggaacgcagctgttgttctccggagtcggctgaaggtcagggtggtgaaggagctccgggggaagaagacggccgtgcacaatgggctgggtgagaacggctcgcaggctgcaggcctggacatggatgtcgggaagcaggccatgcagtaccaggtcctgaatgaggtggtgattgacagaggcccctcctcctacctgtccaatgtggatgtctacctggacggacacctcatcaccacggtgcagggcgacggagtgatcgtgtccaccccgacgggcagcacggcgtatgcggccgcggccggggcctccatgatccaccccaacgtgccggccatcatgatcacgcccatctgcccccactcgctgtccttccggcccatcgtggtccccgcaggggtcgagctgaagatcatgctgtcacctgaagcaaggaacacagcatgggtgtcctttgatggacggaagagacaagagatccgccatggagacagcatcagcatcactacctcatgctacccgctcccctccatctgtgtgcgggaccccgtgagcgactggtttgagagcctcgcccagtgcctgcattggaacgtccggaagaagcaagcccacttcgaggaggaggaggaggaggaggaggagggctaggtcaagcccctatccaggcccgaatccttccgctgccctccaagcgccctctggggacagaccaatctgcgtgtgtctgtgaccgcctgtctcagtggcacggccacttcctttctgtagctgggttagagcctgggtctgccttttgtccagatcagctgtttttttaaaatgtctgactttttttgcatttctaaagaagcgtgagaaatgggctgggagtgcttctgtcctgctgacaccccgcggtgggtccctggagcgcggcctccagctgccgcaatttccatgccaggatatttttccgcaaatcagtcggttgaaattcagaggagtcagaatgactcgacctgtccttcaatgttgataataaatgtctcagccaaaaaccttccttgagctgccatgcttttccccttgacctgcacctcttcccctaaaacttctgcagggaagcccctggcggaggcgccattgaaagcatggtcttgccagtggctggcaaggcggttttgttctgctcagtttctggagagggttggatgcgtcccctgccatccagccctccccgcttgaggccagcactgagtctgggacactcagcgggaagggggctggcatcgccagcgacccacacattcctcacgtagcttctgctcccaggaaggtagtttaaatcctgtatatactttttagagactcttttaaactttctgaagtgctgatgtacatactttctcgtacacacttttgtgaagatttcaaggggaagggagtcgtctgccattcaatgtttacatttatgttctgcaagacgctgtcctcagggaccattaggggaccattctgttcagtgcgatcctgatggtccgggagatgagggtttccggggctagtgatcgtgatcccttttatttgcaactgtaatgagaatttttcacactaacacagcgagggactcaacacgctgattctcctcctgcctctcccgtgagtctccagcctgcccagcaccggcagctgtggagcacgtggatgctgcctaccccggcgcccgcgtcttccacgggcacaggtgtgtggaggccgtggtcggaccctggtgtcctggttactgctgcccgggtgtcttttttttgagtaactgctctctgagttttgcacacgaagttgccctcatctgctggagatcgataaggaaggcacaagacgttctcctctgcccgtgaggagcttcccgcagccgcctggcccagcctgggcacgttctccgaggcatgtgtctccctgctcaccctcgtctgggcacctcagcatctgtggacttgagcgtccaaaaaccctgagtgtgattctgggcagccggcctggcttgaagtccgccatgaccctgggcacaggggaagcccagccgtgggcttaggagagagggaccagcgcccagcgttagggctggaagacggcagtgttcagaattccagccgctcatctgaacacagaaggtgtgaactgacctctaaagcagcgtgagatgggaatgatctagaaaactttggatttttgaagtaaattttaatgtttcatattaatttcttgaaaatgtattaaatgtcattgaaagccttattacgcttttcagatcctttcaataaacaagacttgtagaaaataa

SEQ ID NO: 19439 - DNA, 3098 bp, Homo sapiens
  source 1..3098: mol_type = unassigned DNA
gtagacgtggcgggcggacccgggggcgccctccggacgcggcaggcatcagtgtttttctgaccgaagttctcatttcctgacaatggaaatggaacaagaaaaaatgaccatgaataaggaattgagtccagacgcggctgcttactgctgctcggcctgccacggcgatgagacctggagttacaaccaccccatccggggccgggccaagtctcgcagcctgtctgcctcgcccgccctggggagcaccaaggagttcaggaggacacgctctcttcatgggccatgcccggtgaccacttttggaccaaaggcctgtgtgctgcagaacccccagaccatcatgcacattcaggaccccgcgagccagcggctgacgtggaacaagtccccaaagagcgtccttgtcatcaagaagatgagagatgccagcctactgcagccgttcaaggagctctgcacgcacctcatggaggagaacatgatcgtgtatgtggaaaagaaagtgctagaagaccctgccatcgccagcgatgaaagctttggggcagtgaagaagaaattctgtacctttcgagaagattatgatgacatttccaatcagatagacttcatcatctgcctggggggagacgggacgctgctgtacgcttcctcgcttttccagggcagcgtccctccggtcatggccttccacctgggctccctgggcttcctgaccccattcagctttgagaactttcagtcccaagttactcaggtgatagaggggaacgcagctgttgttctccggagtcggctgaaggtcagggtggtgaaggagctccgggggaagaagacggccgtgcacaatgggctgggtgagaacggctcgcaggctgcaggcctggacatggatgtcgggaagcaggccatgcagtaccaggtcctgaatgaggtggtgattgacagaggcccctcctcctacctgtccaatgtggatgtctacctggacggacacctcatcaccacggtgcagggcgacggagtgatcgtgtccaccccgacgggcagcacggcgtatgcggccgcggccggggcctccatgatccaccccaacgtgccggccatcatgatcacgcccatctgcccccactcgctgtccttccggcccatcgtggtccccgcaggggtcgagctgaagatcatgctgtcacctgaagcaaggaacacagcatgggtgtcctttgatggacggaagagacaagagatccgccatggagacagcatcagcatcactacctcatgctacccgctcccctccatctgtgtgcgggaccccgtgagcgactggtttgagagcctcgcccagtgcctgcattggaacgtccggaagaagcaagcccacttcgaggaggaggaggaggaggaggaggagggctaggtcaagcccctatccaggcccgaatccttccgctgccctccaagcgccctctggggacagaccaatctgcgtgtgtctgtgaccgcctgtctcagtggcacggccacttcctttctgtagctgggttagagcctgggtctgccttttgtccagatcagctgtttttttaaaatgtctgactttttttgcatttctaaagaagcgtgagaaatgggctgggagtgcttctgtcctgctgacaccccgcggtgggtccctggagcgcggcctccagctgccgcaatttccatgccaggatatttttccgcaaatcagtcggttgaaattcagaggagtcagaatgactcgacctgtccttcaatgttgataataaatgtctcagccaaaaaccttccttgagctgccatgcttttccccttgacctgcacctcttcccctaaaacttctgcagggaagcccctggcggaggcgccattgaaagcatggtcttgccagtggctggcaaggcggttttgttctgctcagtttctggagagggttggatgcgtcccctgccatccagccctccccgcttgaggccagcactgagtctgggacactcagcgggaagggggctggcatcgccagcgacccacacattcctcacgtagcttctgctcccaggaaggtagtttaaatcctgtatatactttttagagactcttttaaactttctgaagtgctgatgtacatactttctcgtacacacttttgtgaagatttcaaggggaagggagtcgtctgccattcaatgtttacatttatgttctgcaagacgctgtcctcagggaccattaggggaccattctgttcagtgcgatcctgatggtccgggagatgagggtttccggggctagtgatcgtgatcccttttatttgcaactgtaatgagaatttttcacactaacacagcgagggactcaacacgctgattctcctcctgcctctcccgtgagtctccagcctgcccagcaccggcagctgtggagcacgtggatgctgcctaccccggcgcccgcgtcttccacgggcacaggtgtgtggaggccgtggtcggaccctggtgtcctggttactgctgcccgggtgtcttttttttgagtaactgctctctgagttttgcacacgaagttgccctcatctgctggagatcgataaggaaggcacaagacgttctcctctgcccgtgaggagcttcccgcagccgcctggcccagcctgggcacgttctccgaggcatgtgtctccctgctcaccctcgtctgggcacctcagcatctgtggacttgagcgtccaaaaaccctgagtgtgattctgggcagccggcctggcttgaagtccgccatgaccctgggcacaggggaagcccagccgtgggcttaggagagagggaccagcgcccagcgttagggctggaagacggcagtgttcagaattccagccgctcatctgaacacagaaggtgtgaactgacctctaaagcagcgtgagatgggaatgatctagaaaactttggatttttgaagtaaattttaatgtttcatattaatttcttgaaaatgtattaaatgtcattgaaagccttattacgcttttcagatcctttcaataaacaagacttgtagaaaataa

SEQ ID NO: 19440 - DNA, 1789 bp, Homo sapiens
  source 1..1789: mol_type = unassigned DNA
agttgcttttacaacaactttaccaagtctcatcacaattgtgttttgctttgagttttgagtatgaagagcttaggcttctagtgtgggcgcacagtcaggaccataccgatggggcggccgcgtgttcgccaagcgtggcctggatgctgtggacacactggccggctcccagcaggcaggggctacctcgcgagccacatgtgtgacccggcaggtgctgagctcataggggatggcatgagtgaccccacgcctcccagtaatgcctgcacagggcacattcaggaccccgcgagccagcggctgacgtggaacaagtccccaaagagcgtccttgtcatcaagaagatgagagatgccagcctactgcagccgttcaaggagctctgcacgcacctcatggaggagaacatgatcgtgtatgtggaaaagaaagtgctagaagaccctgccatcgccagcgatgaaagctttggggcagtgaagaagaaattctgtacctttcgagaagattatgatgacatttccaatcagatagacttcatcatctgcctggggggagacgggacgctgctgtacgcttcctcgcttttccagggcagcgtccctccggtcatggccttccacctgggctccctgggcttcctgaccccattcagctttgagaactttcagtcccaagttactcaggtgatagaggggaacgcagctgttgttctccggagtcggctgaaggtcagggtggtgaaggagctccgggggaagaagacggccgtgcacaatgggctgggtgagaacggctcgcaggctgcaggcctggacatggatgtcgggaagcaggccatgcagtaccaggtcctgaatgaggtggtgattgacagaggcccctcctcctacctgtccaatgtggatgtctacctggacggacacctcatcaccacggtgcagggcgacggagtgatcgtgtccaccccgacgggcagcacggcgtatgcggccgcggccggggcctccatgatccaccccaacgtgccggccatcatgatcacgcccatctgcccccactcgctgtccttccggcccatcgtggtccccgcaggggtcgagctgaagatcatgctgtcacctgaagcaaggaacacagcatgggtgtcctttgatggacggaagagacaagagatccgccatggagacagcatcagcatcactacctcatgctacccgctcccctccatctgtgtgcgggaccccgtgagcgactggtttgagagcctcgcccagtgcctgcattggaacgtccggaagaagcaagcccacttcgaggaggaggaggaggaggaggaggagggctaggtcaagcccctatccaggcccgaatccttccgctgccctccaagcgccctctggggacagaccaatctgcgtgtgtctgtgaccgcctgtctcagtggcacggccacttcctttctgtagctgggttagagcctgggtctgccttttgtccagatcagctgtttttttaaaatgtctgactttttttgcatttctaaagaagcgtgagaaatgggctgggagtgcttctgtcctgctgacaccccgcggtgggtccctggagcgcggcctccagctgccgcaatttccatgccaggatatttttccgcaaatcagtcggttgaaattcagaggagtcagaatgactcgacctgtccttcaatgttgataataaatgtctcagccaaaaaccttccttgagctgccatgcttttccccttgacctgcacctctt

SEQ ID NO: 19441 - DNA, 3663 bp, Homo sapiens
  source 1..3663: mol_type = unassigned DNA
agtgggcgggcgcggcgcattgctgctcggcggcgccggcgccggggtccgggcggccatggggcaacaggcggccagggcgccaagggccaggtagcgacggctggcggcggcgcggcggcggggcctgcgggctcggtccggcatgtagacgcccccgcaggcgcccgcggcagcgaacggcatcagtgtttttctgaccgaagttctcatttcctgacaatggaaatggaacaagaaaaaatgaccatgaataaggaattgagtccagacgcggctgcttactgctgctcggcctgccacggcgatgagacctggagttacaaccaccccatccggggccgggccaagtctcgcagcctgtctgcctcgcccgccctggggagcaccaaggagttcaggaggacacgctctcttcatgggccatgcccggtgaccacttttggaccaaaggcctgtgtgctgcagaacccccagaccatcatagccactcctttgtcactcgcatctcagctgctgccttcaccagccgtcagtcactcgggccagggcggggtcaccggacaggtgcatgttctgcctcagccctcagaccagggcgtactcagtggtccccgagctgcccgaggccagacagccccgcaggaggaagcggtgacccaggaagaggtcgaggcgctggtttgtggtcacacacagcggtgggtgcctgggccggtgtacgacgccgctgctggtggctctggctgggctcagctgagcctcagggctggaatgggtgtaggccaggccactgggcacattcaggaccccgcgagccagcggctgacgtggaacaagtccccaaagagcgtccttgtcatcaagaagatgagagatgccagcctactgcagccgttcaaggagctctgcacgcacctcatggaggcacgcggggcaggggggaagggggcctggggtgcacatggagttgggggggcctccatccacatcaccgccccgagggtggggtctgcaggtggaatgagcaggttggcactttgcttccaggagaacatgatcgtgtatgtggaaaagaaagtgctagaagaccctgccatcgccagcgatgaaagctttggggcagtgaagaagaaattctgtacctttcgagaagattatgatgacatttccaatcagatagacttcatcatctgcctggggggagacgggacgctgctgtacgcttcctcgcttttccagggcagcgtccctccggtcatggccttccacctgggctccctgggcttcctgaccccattcagctttgagaactttcagtcccaagttactcaggtgatagaggggaacgcagctgttgttctccggagtcggctgaaggtcagggtggtgaaggagctccgggggaagaagacggccgtgcacaatgggctgggtgagaacggctcgcaggctgcaggcctggacatggatgtcgggaagcaggccatgcagtaccaggtcctgaatgaggtggtgattgacagaggcccctcctcctacctgtccaatgtggatgtctacctggacggacacctcatcaccacggtgcagggcgacggagtgatcgtgtccaccccgacgggcagcacggcgtatgcggccgcggccggggcctccatgatccaccccaacgtgccggccatcatgatcacgcccatctgcccccactcgctgtccttccggcccatcgtggtccccgcaggggtcgagctgaagatcatgctgtcacctgaagcaaggaacacagcatgggtgtcctttgatggacggaagagacaagagatccgccatggagacagcatcagcatcactacctcatgctacccgctcccctccatctgtgtgcgggaccccgtgagcgactggtttgagagcctcgcccagtgcctgcattggaacgtccggaagaagcaagcccacttcgaggaggaggaggaggaggaggaggagggctaggtcaagcccctatccaggcccgaatccttccgctgccctccaagcgccctctggggacagaccaatctgcgtgtgtctgtgaccgcctgtctcagtggcacggccacttcctttctgtagctgggttagagcctgggtctgccttttgtccagatcagctgtttttttaaaatgtctgactttttttgcatttctaaagaagcgtgagaaatgggctgggagtgcttctgtcctgctgacaccccgcggtgggtccctggagcgcggcctccagctgccgcaatttccatgccaggatatttttccgcaaatcagtcggttgaaattcagaggagtcagaatgactcgacctgtccttcaatgttgataataaatgtctcagccaaaaaccttccttgagctgccatgcttttccccttgacctgcacctcttcccctaaaacttctgcagggaagcccctggcggaggcgccattgaaagcatggtcttgccagtggctggcaaggcggttttgttctgctcagtttctggagagggttggatgcgtcccctgccatccagccctccccgcttgaggccagcactgagtctgggacactcagcgggaagggggctggcatcgccagcgacccacacattcctcacgtagcttctgctcccaggaaggtagtttaaatcctgtatatactttttagagactcttttaaactttctgaagtgctgatgtacatactttctcgtacacacttttgtgaagatttcaaggggaagggagtcgtctgccattcaatgtttacatttatgttctgcaagacgctgtcctcagggaccattaggggaccattctgttcagtgcgatcctgatggtccgggagatgagggtttccggggctagtgatcgtgatcccttttatttgcaactgtaatgagaatttttcacactaacacagcgagggactcaacacgctgattctcctcctgcctctcccgtgagtctccagcctgcccagcaccggcagctgtggagcacgtggatgctgcctaccccggcgcccgcgtcttccacgggcacaggtgtgtggaggccgtggtcggaccctggtgtcctggttactgctgcccgggtgtcttttttttgagtaactgctctctgagttttgcacacgaagttgccctcatctgctggagatcgataaggaaggcacaagacgttctcctctgcccgtgaggagcttcccgcagccgcctggcccagcctgggcacgttctccgaggcatgtgtctccctgctcaccctcgtctgggcacctcagcatctgtggacttgagcgtccaaaaaccctgagtgtgattctgggcagccggcctggcttgaagtccgccatgaccctgggcacaggggaagcccagccgtgggcttaggagagagggaccagcgcccagcgttagggctggaagacggcagtgttcagaattccagccgctcatctgaacacagaaggtgtgaactgacctctaaagcagcgtgagatgggaatgatctagaaaactttggatttttgaagtaaattttaatgtttcatattaatttcttgaaaatgtattaaatgtcattgaaagccttattacgcttttcagatcctttcaataaacaagacttgtag

SEQ ID NO: 19442 - DNA, 3653 bp, Homo sapiens
  source 1..3653: mol_type = unassigned DNA
aaatcccccaagttctcatgatccttgcttccctttccagtcacccttggtgccctgtacttcactgtggtcctgaactgaagagctgtgtttttcaggaagacttggccaggccgtgttccgtgtctctggattcaagtcccaggagtcctgaccagagagcaggcatcagtgtttttctgaccgaagttctcatttcctgacaatggaaatggaacaagaaaaaatgaccatgaataaggaattgagtccagacgcggctgcttactgctgctcggcctgccacggcgatgagacctggagttacaaccaccccatccggggccgggccaagtctcgcagcctgtctgcctcgcccgccctggggagcaccaaggagttcaggaggacacgctctcttcatgggccatgcccggtgaccacttttggaccaaaggcctgtgtgctgcagaacccccagaccatcatagccactcctttgtcactcgcatctcagctgctgccttcaccagccgtcagtcactcgggccagggcggggtcaccggacaggtgcatgttctgcctcagccctcagaccagggcgtactcagtggtccccgagctgcccgaggccagacagccccgcaggaggaagcggtgacccaggaagaggtcgaggcgctggtttgtggtcacacacagcggtgggtgcctgggccggtgtacgacgccgctgctggtggctctggctgggctcagctgagcctcagggctggaatgggtgtaggccaggccactgggcacattcaggaccccgcgagccagcggctgacgtggaacaagtccccaaagagcgtccttgtcatcaagaagatgagagatgccagcctactgcagccgttcaaggagctctgcacgcacctcatggaggcacgcggggcaggggggaagggggcctggggtgcacatggagttgggggggcctccatccacatcaccgccccgagggtggggtctgcaggtggaatgagcaggttggcactttgcttccaggagaacatgatcgtgtatgtggaaaagaaagtgctagaagaccctgccatcgccagcgatgaaagctttggggcagtgaagaagaaattctgtacctttcgagaagattatgatgacatttccaatcagatagacttcatcatctgcctggggggagacgggacgctgctgtacgcttcctcgcttttccagggcagcgtccctccggtcatggccttccacctgggctccctgggcttcctgaccccattcagctttgagaactttcagtcccaagttactcaggtgatagaggggaacgcagctgttgttctccggagtcggctgaaggtcagggtggtgaaggagctccgggggaagaagacggccgtgcacaatgggctgggtgagaacggctcgcaggctgcaggcctggacatggatgtcgggaagcaggccatgcagtaccaggtcctgaatgaggtggtgattgacagaggcccctcctcctacctgtccaatgtggatgtctacctggacggacacctcatcaccacggtgcagggcgacggagtgatcgtgtccaccccgacgggcagcacggcgtatgcggccgcggccggggcctccatgatccaccccaacgtgccggccatcatgatcacgcccatctgcccccactcgctgtccttccggcccatcgtggtccccgcaggggtcgagctgaagatcatgctgtcacctgaagcaaggaacacagcatgggtgtcctttgatggacggaagagacaagagatccgccatggagacagcatcagcatcactacctcatgctacccgctcccctccatctgtgtgcgggaccccgtgagcgactggtttgagagcctcgcccagtgcctgcattggaacgtccggaagaagcaagcccacttcgaggaggaggaggaggaggaggaggagggctaggtcaagcccctatccaggcccgaatccttccgctgccctccaagcgccctctggggacagaccaatctgcgtgtgtctgtgaccgcctgtctcagtggcacggccacttcctttctgtagctgggttagagcctgggtctgccttttgtccagatcagctgtttttttaaaatgtctgactttttttgcatttctaaagaagcgtgagaaatgggctgggagtgcttctgtcctgctgacaccccgcggtgggtccctggagcgcggcctccagctgccgcaatttccatgccaggatatttttccgcaaatcagtcggttgaaattcagaggagtcagaatgactcgacctgtccttcaatgttgataataaatgtctcagccaaaaaccttccttgagctgccatgcttttccccttgacctgcacctcttcccctaaaacttctgcagggaagcccctggcggaggcgccattgaaagcatggtcttgccagtggctggcaaggcggttttgttctgctcagtttctggagagggttggatgcgtcccctgccatccagccctccccgcttgaggccagcactgagtctgggacactcagcgggaagggggctggcatcgccagcgacccacacattcctcacgtagcttctgctcccaggaaggtagtttaaatcctgtatatactttttagagactcttttaaactttctgaagtgctgatgtacatactttctcgtacacacttttgtgaagatttcaaggggaagggagtcgtctgccattcaatgtttacatttatgttctgcaagacgctgtcctcagggaccattaggggaccattctgttcagtgcgatcctgatggtccgggagatgagggtttccggggctagtgatcgtgatcccttttatttgcaactgtaatgagaatttttcacactaacacagcgagggactcaacacgctgattctcctcctgcctctcccgtgagtctccagcctgcccagcaccggcagctgtggagcacgtggatgctgcctaccccggcgcccgcgtcttccacgggcacaggtgtgtggaggccgtggtcggaccctggtgtcctggttactgctgcccgggtgtcttttttttgagtaactgctctctgagttttgcacacgaagttgccctcatctgctggagatcgataaggaaggcacaagacgttctcctctgcccgtgaggagcttcccgcagccgcctggcccagcctgggcacgttctccgaggcatgtgtctccctgctcaccctcgtctgggcacctcagcatctgtggacttgagcgtccaaaaaccctgagtgtgattctgggcagccggcctggcttgaagtccgccatgaccctgggcacaggggaagcccagccgtgggcttaggagagagggaccagcgcccagcgttagggctggaagacggcagtgttcagaattccagccgctcatctgaacacagaaggtgtgaactgacctctaaagcagcgtgagatgggaatgatctagaaaactttggatttttgaagtaaattttaatgtttcatattaatttcttgaaaatgtattaaatgtcattgaaagccttattacgcttttcagatcctttcaataaacaagacttgtagaaaataa

SEQ ID NO: 19443 - DNA, 663 bp, Homo sapiens
  source 1..663: mol_type = unassigned DNA
agagcttaggcttctagtgtgggcgcacagtcaggaccataccgatggggcggccgcgtgttcgccaagcgtggcctggatgctgtggacacactggccggctcccagcaggcaggggctacctcgcgagccacatgtgtgacccggcaggtgctgagctcataggggatggcatgagtgaccccacgcctcccagtaatgcctgcacagggcacattcaggaccccgcgagccagcggctgacgtggaacaagtccccaaagagcgtccttgtcatcaagaagatgagagatgccagcctactgcagccgttcaaggagctctgcacgcacctcatggaggagaacatgatcgtgtatgtggaaaagaaagtgctagaagaccctgccatcgccagcgatgaaagctttggggcagtgaagaagaaattctgtacctttcgagaagattatgatgacatttccaatcagatagacttcatcatctgcctggggggagacgggacgctgctgtacgcttcctcgcttttccagggcagcgtccctccggtcatggccttccacctgggctccctgggcttcctgaccccattcagctttgagaactttcagtcccaagttactcaggtgatagaggggaacgcagctgttgttctccggagtc

SEQ ID NO: 19444 - DNA, 2773 bp, Homo sapiens
  source 1..2773: mol_type = unassigned DNA
agacggggcggggcgatccgtaggcagggcctgacgccgcagtcctccttggccggagcctcaacggatgggcggggagggggcggggccgggcaacccggaaggtccggcgtcccagccgcctacctcgctgggaccctggtcttgctgtcccccgctggcctcctgcccaagcgactgcggccaggatgggccggaaggtgaccgtggccacctgcgcactcaaccagtgggccctggacttcgagggcaatttgcaaagaattttaaagagtattgaaattgccaaaaacagaggagcaagatacaggcttggaccagagctggaaatatgcggctacggatgttgggatcattattacgagtcggacaccctcttgcactcgtttcaagtcctagcggcccttgtggagtctcccgtcactcaggacatcatctgcgacgtggggatgcctgtaatgcaccgaaacgtccgctacaactgcagagtgatattcctcaacaggaagatcctgctcatcagacccaagatggccttggccaatgaaggcaactaccgcgagctgcgctggttcaccccgtggtcgaggagtcggcacacagaggagtactttctgcctcggatgatacaggacctgacaaagcaggaaaccgtacccttcggagatgcggtgctggtgacatgggacacctgcattggaagtgagatctgtgaggagctctggacaccccacagcccgcacatcgacatgggcctggatggcgtggagatcatcaccaacgcctcgggcagccaccaagtgctgcgcaaagccaacaccagggtggatctcgtgactatggtcaccagcaagaacggtgggatttacttgctggccaaccagaagggttgtgacggggaccgcctgtactacgacggctgtgccatgattgccatgaacggaagcgtctttgctcaaggatcccagttttctctggatgacgtggaagtcctgacggccacgctggatctggaggacgtccggagctacagggcggagatttcatctcgaaacctggcggccagcagggcgagcccctaccccagagtgaaggtggactttgccctctcgtgccacgaggacttgctggcacccatctctgagcccatcgagtggaaataccacagccctgaggaggagataagccttggacctgcctgctggctctgggattttttaagacgaagtcaacaggcagggtttttgctgcccttgagtggcggggtggacagcgcagccaccgcctgcctcatctactccatgtgctgccaggtctgcgaggccgtgaggagtggaaatgaggaagtgctggctgatgtccgcaccatcgtgaaccagatcagctacaccccccaggatccccgagacctctgtggacgcatactgaccacctgctacatggccagcaagaactcctcccaggagacgtgcacccgggccagagagttggcccagcagattggaagccaccacatcagtctcaacatcgatccagccgtgaaggccgtcatgggcatcttcagcctggtgacggggaagagccctctgtttgcagctcatggaggaagcagcagggaaaacctggcgctgcaaaatgtgcaggctcgaatacggatggtcctcgcctatctgtttgctcagttgagcctctggtctcggggtgtccacggtgggctcctcgtgctgggatccgccaacgtggatgagagtctcctgggctacctgaccaagtacgactgctccagtgcggacatcaaccccataggcgggatcagcaagacggacctcagggccttcgtccagttctgcatccagcgcttccagcttcctgccctgcagagcatcctgttggcgccggccaccgcagagctggagcccttggctgatggacaggtgtcccagaccgacgaggaagatatggggatgacatatgcggagctctcggtctatgggaaactcaggaaggtggccaagatggggccctacagcatgttctgcaaactcctcggcatgtggagacacatctgcaccccgagacaggtcgctgacaaagtgaagcggtttttctccaagtactccatgaacagacacaagatgaccacgctcacacccgcgtaccacgccgagaactacagccctgaggacaacaggtttgatctgcgaccatttctgtacaacacaagctggccttggcagtttcggtgcatagaaaatcaggtgctacagctcgagagggcagagccacagtccctggacggcgtggactgaggccggttccttcctggaggcctcctgtcctcggggaccccagcacctcatcatcagcattgctggagccaagggtaggagccctacactaggagcccaggatgggacggcgcatcagccgagagggagggaacttttcagtcaaattcctcaaaaagaggctggaataaagcctgggcttaaaaagaggctggaatccaatgcacatgattttgacctcccgccagcgtgcgcttccccgcgaagtctggcattctccgaaggaagccgcctgggtaggagggttccaaccgccgccccgtgtggcatctttgctgcaggaacaagaacagtagctcccgggaagggaggggtgtcatgagcagaaaatgaaggagagaagaccttctctcccacccacacacaccttcctgtcctgggttccagaaggttctggggagatggtccctgcagagctttcttcc

SEQ ID NO: 19445 - DNA, 2304 bp, Homo sapiens
  source 1..2304: mol_type = unassigned DNA
atcattaaccgcgacagagctggaagggctttgaagagaaggattaagttcctgctgatgggaagtgtggtcctctccccgttcacgtcagagccacaggcacattggtggtcgtgttgattggcaggtgtgttggcaatcaatcacctgccccaggacccccgcaggttcccggccccacatcaagccaccaaatcggagtcctcgggggtctgtatatttagtgagcaccaggcagttgtttcgtgcattagaatccgggagccgttgccttacacgtctctagagttcctgatgttgcctgagagctccgtcgtaggctgtggccacaggcctgctgtattcagagtggccgcgctgtcctcaggctcgggccactgccctccaccaggtcctccgtggtgcacctgaaatggtcaacagaagtcttgtgacacgtggaatcatttcagagtcaccccttctgcctcctgctcaagcaacagacctgccgatcacccccgtcgggcccgcgtttctcagggtcttcctaatcccctgggctttccggcttgtcgtgtgcctggagtcaggccgccgtgcggcaggctgttaacctagcctcggggagagtgggatggagccaccttctcatggaacgatcctcgccttccctcatctccattgttttatggcttcacacggaccgtggctttctgcatggaagcttggtggccagggtgctgtcactttgggaagcagccagagaaccacaggatgcgtgaatcggtctccttgtcttcatgggcatctccggccaggaagtcctgacggccacgctggatctggaggacgtccggagctacagggcggagatttcatctcgaaacctggcggccagcagggcgagcccctaccccagagtgaaggtggactttgccctctcgtgccacgaggacttgctggcacccatctctgagcccatcgagtggaaataccacagccctgaggaggagataagccttggacctgcctgctggctctgggattttttaagacgaagtcaacaggcagggtttttgctgcccttgagtggcggggtggacagcgcagccaccgcctgcctcatctactccatgtgctgccaggtctgcgaggccgtgaggagtggaaatgaggaagtgctggctgatgtccgcaccatcgtgaaccagatcagctacaccccccaggatccccgagacctctgtggacgcatactgaccacctgctacatggccagcaagaactcctcccaggagacgtgcacccgggccagagagttggcccagcagattggaagccaccacatcagtctcaacatcgatccagccgtgaaggccgtcatgggcatcttcagcctggtgacggggaagagccctctgtttgcagctcatggaggaagcagcagggaaaacctggcgctgcaaaatgtgcaggctcgaatacggatggtcctcgcctatctgtttgctcagttgagcctctggtctcggggtgtccacggtgggctcctcgtgctgggatccgccaacgtggatgagagtctcctgggctacctgaccaagtacgactgctccagtgcggacatcaaccccataggcgggatcagcaagacggacctcagggccttcgtccagttctgcatccagcgcttccagcttcctgccctgcagagcatcctgttggcgccggccaccgcagagctggagcccttggctgatggacaggtgtcccagaccgacgaggaagatatggggatgacatatgcggagctctcggtctatgggaaactcaggaaggtggccaagatggggccctacagcatgttctgcaaactcctcggcatgtggagacacatctgcaccccgagacaggtcgctgacaaagtgaagcggtttttctccaagtactccatgaacagacacaagatgaccacgctcacacccgcgtaccacgccgagaactacagccctgaggacaacaggtttgatctgcgaccatttctgtacaacacaagctggccttggcagtttcggtgcatagaaaatcaggtgctacagctcgagagggcagagccacagtccctggacggcgtggactgaggccggttccttcctggaggcctcctgtcctcggggaccccagcacctcatcatcagcattgctggagccaagggtaggagccctacactaggagcccaggatgggacggcgcatcagccgagagggagggaacttttcagtcaaattcctcaaaaagaggctggaataaagcctgggctt

SEQ ID NO: 19446 - DNA, 1929 bp, Homo sapiens
  source 1..1929: mol_type = unassigned DNA
cgccgagctgggccaatcctcttggtggaggaagctcggctgattctcggctcacgcgggaggggagtaaagggtggcggtccgggcctggagttcagtgggtgcagcctgcttgcgagctgaggccagacaggggggcgcctacggacggaaaagaaaagttgattacaaacgggaccatattttgcttcgaaatggaaccagcagttagcgagccaatgagagaccaagtcgcacggactcatttgacagaggacactcccaaagtgaatgctgacatagaaaaggttaaccagaatcaggccaagagatgcacagtgatcggtggctctggattcctggggcagcacatggtggagcagttgctggcaagaggatatgctgtcaatgtatttgatatccagcaagggtttgataatccccaggtgcggttctttctgggtgacctctgcagccgacaggatctgtacccagctctgaaaggtgtaaacacagttttccactgtgcgtcacccccaccatccagtaacaacaaggagctcttttatagagtgaattacattggcaccaagaatgtcattgaaacttgcaaagaggctggggttcagaaactcattttaaccagcagtgccagtgtcatctttgagggcgtcgatatcaagaatggaactgaagaccttccctatgccatgaaacccattgactactacacagagactaagatcttacaggagagggcagttctgggcgccaacgatcctgagaagaatttcttaaccacagccatccgccctcatggcattttcggcccaagggacccgcagttggtacccatcctcatcgaggcagccaggaacggcaagatgaagttcgtgattggaaatgggaagaacttggtggacttcacctttgtggagaacgtggtccatggacacatcctggcggcagagcagctctcccgagactcgacactgggtgggaaggcatttcacatcaccaatgatgagcccatccctttctggacattcctgtctcgcatcctgacaggcctcaattatgaggcccccaagtaccacatcccctactgggtggcctactacctggccctcctgctatccctgctggtgatggtgatcagtcctgtcatccagctgcagcccaccttcacacccatgcgggtcgcactggctggcacattccactactacagctgcgagagagccaaaaaggccatgggctaccagccactagtgaccatggatgatgctatggagaggaccgtgcagagctttcgccacctgcggagggtcaagtgagggacactggaggctgggctctctcgacacgttgctcagccagtcactccttcccctgtggattgatgaaataacatcctttgaatgagtttgctctgagcctgtgactccttctgctaggcagagagcgcaccctactctttccgtgacgatgagggcggcaaaaacagacatttcttccttcatggaactggatttggatttcttgaagcaggcagcttcatattataccgatttgttctctgtctttttgtgtctctctgtttaccccctcccttgccccctcttctggtttatacatttcattccagtgtccttgtacataatcaaggaagctgtaggaagctacaacccatttgttagttctgatggagaaccatttccatgcagaccaatactagagtgaagcctctagactttgttcaagatactctatcttcaaaatatcccagaagaaaaacagaagctgttaacacacaggtgagactttacatatacatttcatactgacagtgagcttagagcaaaagctgaaagctgaaatgactgtaattcctccccagtctctgttgcttgttcaactccttacatgttccacattctctttcaggta

SEQ ID NO: 19447 - DNA, 994 bp, Homo sapiens
  source 1..994: mol_type = unassigned DNA
gaagctcggctgattctcggctcacgcgggaggggagtaaagggtggcggtccgggcctggagttcagtgggtgcagcctgcttgcgagctgaggccagacaggggggcgcctacggacggataaggaggagcattccaggccgagacgccctcatcagcagagtcacaggagttttggaagtgagagaaaagaaaagttgattacaaacgggaccatattttgcttcgaaatggaaccagcagttagcgagccaatgagagaccaagtcgcacggactcatttgacagaggacactcccaaagtgaatgctgacatagaaaaggttaaccagaatcaggccaagagatgcacagtgatcggtggctctggattcctggggcagcacatggtggagcagttgctggcaagaggatatgctgtcaatgtatttgatatccagcaagggtttgataatccccaggtgcggttctttctgggtgacctctgcagccgacaggatctgtacccagctctgaaaggtgtaaacacagttttccactgtgcgtcacccccaccatccagtaacaacaaggagctcttttatagagtgaattacattggcaccaagaatgtcattgaaacttgcaaagaggctggggttcagaaactcattttaaccagcagtgccagtgtcatctttgagggcgtcgatatcaagaatggaactgaagaccttccctatgccatgaaacccattgactactacacagagactaagatcttacaggagagggcagttctgggcgccaacgatcctgagaagaatttcttaaccacagccatccgccctcatggcattttcggcccaagggacccgcagttggtacccatcctcatcgaggcagccaggaacggcaagatgaagttcgtgattggaaatgggaagaacttggtggacttcacctttgtggagaacgtggtccatggacacatcctggcggcagagcagctct

SEQ ID NO: 19448 - DNA, 1630 bp, Homo sapiens
  source 1..1630: mol_type = unassigned DNA
cgccgagctgggccaatcctcttggtggaggaagctcggctgattctcggctcacgcgggaggggagtaaagggtggcggtccgggcctggagttcagtgggtgcagcctgcttgcgagctgaggccagacaggggggcgcctacggacggataaggaggagcattccaggccgagacgccctcatcagcagagtcacaggagttttggaagtgagagaaaagaaaagttgattacaaacgggaccatattttgcttcgaaatggaaccagcagttagcgagccaatgagagaccaagtcgcacggactcatttgacagaggacactcccaaagtgaatgctgacatagaaaaggttaaccagaatcaggccaagagatgcacagtgatcggtggctctggattcctggggcagcacatggtggagcagttgctggcaagaggatatgctgtcaatgtatttgatatccagcaagggtttgataatccccaggtgcggttctttctgggtgacctctgcagccgacaggatctgtacccagctctgaaaggtgtaaacacagttttccactgtgcgtcacccccaccatccagtaacaacaaggagctcttttatagagtgaattacattggcaccaagaatgtcattgaaacttgcaaagaggctggggttcagaaactcattttaaccagcagtgccagtgtcatctttgagggcgtcgatatcaagaatggaactgaagaccttccctatgccatgaaacccattgactactacacagagactaagatcttacaggagagggcagttctgggcgccaacgatcctgagaagaatttcttaaccacagccatccgccctcatggcattttcggcccaagggacccgcagttggtacccatcctcatcgaggcagccaggaacggcaagatgaagttcgtgattggaaatgggaagaacttggtggacttcacctttgtggagaacgtggtccatggacacatcctggcggcagagcagctctcccgagactcgacactgggtgggaaggcatttcacatcaccaatgatgagcccatccctttctggacattcctgtctcgcatcctgacaggcctcaattatgaggcccccaagtaccacatcccctactgggtggcctactacctggccctcctgctatccctgctggtgatggtgatcagtcctgtcatccagctgcagcccaccttcacacccatgcgggtcgcactggctggcacattccactactacagctgcgagagagccaaaaaggccatgggctaccagccactagtgaccatggatgatgctatggagaggaccgtgcagagctttcgccacctgcggagggtcaagtgagggacactggaggctgggctctctcgacacgttgctcagccagtcactccttcccctgtggattgatgaaataacatcctttgaatgagtttgctctgagcctgtgactccttctgctaggcagagagcgcaccctactctttccgtgacgatgagggcggcaaaaacagacatttcttccttcatggaactggatttggatttcttgaagcaggcagcttcatattataccgatttgttctctgtc

SEQ ID NO: 19449 - DNA, 2765 bp, Homo sapiens
  source 1..2765: mol_type = unassigned DNA
cacacacccctacaatcccctcccccagccccgagagacttttcttgacttccaccagttgctccggcgggtgagagtggagaggcccctccttcatcccccaggctccctcccttcctggagctgcagcctcagcatcctccgcccagcaccccaggattcaggcgttgggtcccgcccttgtaggctgtccacctcaaacgggccggacaggatatataagagagaatgcaccgtgcactacacacgcgactcccacaaggttgcagccggagccgcccagctcaccgagagcctagttccggccagggtcgccccggcaaccacgagcccagccaatcagcgccccggactgcaccagagccatggtcggcagaagagcactgatcgtactggctcactcagagaggacgtccttcaactatgccatgaaggaggctgctgcagcggctttgaagaagaaaggatgggaggtggtggagtcggacctctatgccatgaacttcaatcccatcatttccagaaaggacatcacaggtaaactgaaggaccctgcgaactttcagtatcctgccgagtctgttctggcttataaagaaggccatctgagcccagatattgtggctgaacaaaagaagctggaagccgcagaccttgtgatattccagttccccctgcagtggtttggagtccctgccattctgaaaggctggtttgagcgagtgttcataggagagtttgcttacacttacgctgccatgtatgacaaaggacccttccggagtaagaaggcagtgctttccatcaccactggtggcagtggctccatgtactctctgcaagggatccacggggacatgaatgtcattctctggccaattcagagtggcattctgcatttctgtggcttccaagtcttagaacctcaactgacatatagcattgggcacactccagcagacgcccgaattcaaatcctggaaggatggaagaaacgcctggagaatatttgggatgagacaccactgtattttgctccaagcagcctctttgacctaaacttccaggcaggattcttaatgaaaaaagaggtacaggatgaggagaaaaacaagaaatttggcctttctgtgggccatcacttgggcaagtccatcccaactgacaaccagatcaaagctagaaaatgagattccttagcctggatttccttctaacatgttatcaaatctgggtatctttccaggcttccctgacttgctttagtttttaagatttgtgtttttctttttccacaaggaataaatgagagggaatcgactgtattcgtgcatttttggatcatttttaactgattcttatgattactatcatggcatataaccaaaatccgactgggctcaagaggccacttagggaaagatgtagaaagatgctagaaaaatgttctttaaaggcatctacacaatttaattcctctttttagggctaaagttttagggtacagtttggctaggtatcattcaactctccaatgttctattaatcacctctctgtagtttatggcagaagggaattgctcagagaaggaaaagactgaatctacctgccctaagggacttaacttgtttggtagttagccatctaatgcttgtttatgatatttcttgctttcaattacaaagcagttactaatatgcctagcacaagtaccactcttggtcagcttttgttgtttatatacagtacacagataccttgaaaggaagagctaataaatctcttctttgctgcagtcatctactttttttttaattaaaaaaaatttttttttgaagcagtcttgctctgttacccaggctggagtgcagtggtgtgatctcggctcactgcaacctctgcctcccaggttccagcaattctcctgcctcagcctccctagtagctgggatgacaggcgcctgccatcatgcctgactaatttttgtatttttagtagagacggcgtttcaccatgttggccaggctggtctcaaactcctgacctcaggtgatccgcctacctcagcctcccaaagtgctgggattacaggcgtgatccaccacacctggcccttgcaatcttctactttaaggtttgcagagataaaccaataaatccacaccgtacatctgcaatatgaattcaagaaaggaaatagtaccttcaatacttaaaaatagtcttccacaaaaaatactttatttctgatctatacaaattttcagaaggttattttctttatcattgctaaactgatgacttactatgggatggggtccagtcccatgaccttggggtacaattgtaaacctagagttttatcaactttggtgaacagttttggcataatagtcaatttctacttctggaagtcatctcattccactgttggtattatataattcaaggagaatatgataaaacactgccctcttgtggtgcattgaaagaagagatgagaaatgatgaaaaggttgcctgaaaaatgggagacagcctcttacttgccaagaaaatgaagggattggaccgagctggaaaacctcctttaccagatgctgactggcactggtggtttttgctctcgacagtatccacaatagctgacggctgggtgtttcagtttgaaaatattttgttgccttcatcttcactgcaattttgtgtaaatttctcaaagatctgaattaaataaataaaattcatttctacagacccaca

SEQ ID NO: 19450 - DNA, 2474 bp, Homo sapiens
  source 1..2474: mol_type = unassigned DNA
ccgcccttgtaggctgtccacctcaaacgggccggacaggatatataagagagaatgcaccgtgcactacacacgcgactcccacaaggttgcagccggagccgcccagctcaccgagagcctagttccggccagggtcgccccggcaaccacgagcccagccaatcagcgccccggactgcaccagagccatggtcggcagaagagcactgatcgtactggctcactcagagaggacgtccttcaactatgccatgaaggaggctgctgcagcggctttgaagaagaaaggatgggaggtggtggagtcggacctctatgccatgaacttcaatcccatcatttccagaaaggacatcacaggtaaactgaaggaccctgcgaactttcagtatcctgccgagtctgttctggcttataaagaaggccatctgagcccagatattgtggctgaacaaaagaagctggaagccgcagaccttgtgatattccagagtaagaaggcagtgctttccatcaccactggtggcagtggctccatgtactctctgcaagggatccacggggacatgaatgtcattctctggccaattcagagtggcattctgcatttctgtggcttccaagtcttagaacctcaactgacatatagcattgggcacactccagcagacgcccgaattcaaatcctggaaggatggaagaaacgcctggagaatatttgggatgagacaccactgtattttgctccaagcagcctctttgacctaaacttccaggcaggattcttaatgaaaaaagaggtacaggatgaggagaaaaacaagaaatttggcctttctgtgggccatcacttgggcaagtccatcccaactgacaaccagatcaaagctagaaaatgagattccttagcctggatttccttctaacatgttatcaaatctgggtatctttccaggcttccctgacttgctttagtttttaagatttgtgtttttctttttccacaaggaataaatgagagggaatcgactgtattcgtgcatttttggatcatttttaactgattcttatgattactatcatggcatataaccaaaatccgactgggctcaagaggccacttagggaaagatgtagaaagatgctagaaaaatgttctttaaaggcatctacacaatttaattcctctttttagggctaaagttttagggtacagtttggctaggtatcattcaactctccaatgttctattaatcacctctctgtagtttatggcagaagggaattgctcagagaaggaaaagactgaatctacctgccctaagggacttaacttgtttggtagttagccatctaatgcttgtttatgatatttcttgctttcaattacaaagcagttactaatatgcctagcacaagtaccactcttggtcagcttttgttgtttatatacagtacacagataccttgaaaggaagagctaataaatctcttctttgctgcagtcatctactttttttttaattaaaaaaaatttttttttgaagcagtcttgctctgttacccaggctggagtgcagtggtgtgatctcggctcactgcaacctctgcctcccaggttccagcaattctcctgcctcagcctccctagtagctgggatgacaggcgcctgccatcatgcctgactaatttttgtatttttagtagagacggcgtttcaccatgttggccaggctggtctcaaactcctgacctcaggtgatccgcctacctcagcctcccaaagtgctgggattacaggcgtgatccaccacacctggcccttgcaatcttctactttaaggtttgcagagataaaccaataaatccacaccgtacatctgcaatatgaattcaagaaaggaaatagtaccttcaatacttaaaaatagtcttccacaaaaaatactttatttctgatctatacaaattttcagaaggttattttctttatcattgctaaactgatgacttactatgggatggggtccagtcccatgaccttggggtacaattgtaaacctagagttttatcaactttggtgaacagttttggcataatagtcaatttctacttctggaagtcatctcattccactgttggtattatataattcaaggagaatatgataaaacactgccctcttgtggtgcattgaaagaagagatgagaaatgatgaaaaggttgcctgaaaaatgggagacagcctcttacttgccaagaaaatgaagggattggaccgagctggaaaacctcctttaccagatgctgactggcactggtggtttttgctctcgacagtatccacaatagctgacggctgggtgtttcagtttgaaaatattttgttgccttcatcttcactgcaattttgtgtaaatttctcaaagatctgaattaaataaataaaattcatttctacagaccc

SEQ ID NO: 19451 - DNA, 2405 bp, Homo sapiens
  source 1..2405: mol_type = unassigned DNA
caaggttgcagccggagccgcccagctcaccgagagcctagttccggccagggtcgccccggcaaccacgagcccagccaatcagcgccccggactgcaccagagccatggtcggcagaagagcactgatcgtactggctcactcagagaggacgtccttcaactatgccatgaaggaggctgctgcagcggctttgaagaagaaaggatgggaggtggtggagtcggacctctatgccatgaacttcaatcccatcatttccagaaaggacatcacaggtaaactgaaggaccctgcgaactttcagtatcctgccgagtctgttctggcttataaagaaggccatctgagcccagatattgtggctgaacaaaagaagctggaagccgcagaccttgtgatattccagttccccctgcagtggtttggagtccctgccattctgaaaggctggtttgagcgagtgttcataggagagtttgcttacacttacgctgccatgtatgacaaaggacccttccggagtggcattctgcatttctgtggcttccaagtcttagaacctcaactgacatatagcattgggcacactccagcagacgcccgaattcaaatcctggaaggatggaagaaacgcctggagaatatttgggatgagacaccactgtattttgctccaagcagcctctttgacctaaacttccaggcaggattcttaatgaaaaaagaggtacaggatgaggagaaaaacaagaaatttggcctttctgtgggccatcacttgggcaagtccatcccaactgacaaccagatcaaagctagaaaatgagattccttagcctggatttccttctaacatgttatcaaatctgggtatctttccaggcttccctgacttgctttagtttttaagatttgtgtttttctttttccacaaggaataaatgagagggaatcgactgtattcgtgcatttttggatcatttttaactgattcttatgattactatcatggcatataaccaaaatccgactgggctcaagaggccacttagggaaagatgtagaaagatgctagaaaaatgttctttaaaggcatctacacaatttaattcctctttttagggctaaagttttagggtacagtttggctaggtatcattcaactctccaatgttctattaatcacctctctgtagtttatggcagaagggaattgctcagagaaggaaaagactgaatctacctgccctaagggacttaacttgtttggtagttagccatctaatgcttgtttatgatatttcttgctttcaattacaaagcagttactaatatgcctagcacaagtaccactcttggtcagcttttgttgtttatatacagtacacagataccttgaaaggaagagctaataaatctcttctttgctgcagtcatctactttttttttaattaaaaaaaatttttttttgaagcagtcttgctctgttacccaggctggagtgcagtggtgtgatctcggctcactgcaacctctgcctcccaggttccagcaattctcctgcctcagcctccctagtagctgggatgacaggcgcctgccatcatgcctgactaatttttgtatttttagtagagacggcgtttcaccatgttggccaggctggtctcaaactcctgacctcaggtgatccgcctacctcagcctcccaaagtgctgggattacaggcgtgatccaccacacctggcccttgcaatcttctactttaaggtttgcagagataaaccaataaatccacaccgtacatctgcaatatgaattcaagaaaggaaatagtaccttcaatacttaaaaatagtcttccacaaaaaatactttatttctgatctatacaaattttcagaaggttattttctttatcattgctaaactgatgacttactatgggatggggtccagtcccatgaccttggggtacaattgtaaacctagagttttatcaactttggtgaacagttttggcataatagtcaatttctacttctggaagtcatctcattccactgttggtattatataattcaaggagaatatgataaaacactgccctcttgtggtgcattgaaagaagagatgagaaatgatgaaaaggttgcctgaaaaatgggagacagcctcttacttgccaagaaaatgaagggattggaccgagctggaaaacctcctttaccagatgctgactggcactggtggtttttgctctcgacagtatccacaatagctgacggctgggtgtttcagtttgaaaatattttgttgccttcatcttcactgcaattttgtgtaaatttctcaaagatctgaattaaataaataaaattcatttctacagacccaca

SEQ ID NO: 19452 - DNA, 924 bp, Homo sapiens
  source 1..924: mol_type = unassigned DNA
acacgcgactcccacaaggttgcagccggagccgcccagctcaccgagagcctagttccggccagggtcgccccggcaaccacgagcccagccaatcagcgccccggactgcaccagagccatggtcggcagaagagcactgatcgtactggctcactcagagaggacgtccttcaactatgccatgaaggaggctgctgcagcggctttgaagaagaaaggatgggaggtggtggagtcggacctctatgccatgaacttcaatcccatcatttccagaaaggacatcacaggtaaactgaaggaccctgcgaactttcagtatcctgccgagtctgttctggcttataaagaaggccatctgagcccagatattgtggctgaacaaaagaagctggaagccgcagaccttgtgatattccagagtggcattctgcatttctgtggcttccaagtcttagaacctcaactgacatatagcattgggcacactccagcagacgcccgaattcaaatcctggaaggatggaagaaacgcctggagaatatttgggatgagacaccactgtattttgctccaagcagcctctttgacctaaacttccaggcaggattcttaatgaaaaaagaggtacaggatgaggagaaaaacaagaaatttggcctttctgtgggccatcacttgggcaagtccatcccaactgacaaccagatcaaagctagaaaatgagattccttagcctggatttccttctaacatgttatcaaatctgggtatctttccaggcttccctgacttgctttagtttttaagatttgtgtttttctttttccacaaggaataaatgagagggaatcgactgtattcgtgcatttttggatcatttttaactgattcttatgattactatcatggcatataac

SEQ ID NO: 19453 - DNA, 1515 bp, Homo sapiens
  source 1..1515: mol_type = unassigned DNA
agcgagtgcgcggtccagtgcggccggaacctggcgcaactcctagagcggtccttggggagacgcgggtcccagtcctgcggctcctactggggagtgcgctggtcggaagggggatggagacagaagtcacaaactcacatgccaccagccatatgatgtaaacatgtaaactgggccaaggaatacaaaagggagtggtgagctggggacactgaagaatggatgccctgtctagaggagtgaaaatgaagcatttcatacaaacaacatgatttcgggcaatcactttgggaatcaggataaggtgttcccccagtctgcagaaacactggcaacatttacaaagctttaggttcattcttgtaagtgttgctggtgtcagaataggaacctccctgcgctttgaagggatgaatgtgacctctcccacattctccggtgctgtgatgtaccttaaacacagcaagggcacctggcctgggtggagcccactcctcagcacccacctcacttcttgcagtattctgcagaccccagccctgtgcctgtgctcctggacagctggagataaggagtgggccctggaagatgctcattcaggccctgctcaagattccagtcctgattgctggactcgctgaagagagactacgcaggaaagccccagccacccatcaaatcagagagaaggaatccaccttcttacgctatggcaggtaagaaagtactcattgtctatgcacaccaggaacccaagtctttcaacggatccttgaagaatgtggctgtagatgaactgagcaggcagggctgcaccgtcacagtgtctgatttgtatgccatgaaccttgagccgagggccacagacaaagatatcactggtactctttctaatcctgaggttttcaattatggagtggaaacccacgaagcctacaagcaaaggtctctggctagcgacatcactgatgagcagaaaaaggttcgggaggctgacctagtgatatttcagttcccgctgtactggttcagcgtgccagccatcctgaagggctggatggatagggtgctgtgccagggctttgcctttgacatcccaggattctacgattccggtttgctccagggtaaactagcgctcctttccgtaaccacgggaggcacggccgagatgtacacgaagacaggagtcaatggagattctcgatacttcctgtggccactccagcatggcacattacacttctgtggatttaaagtccttgcccctcagatcagctttgctcctgaaattgcatccgaagaagaaagaaaggggatggtggctgcgtggtcccagaggctgcagaccatctggaaggaagagcccatcccctgcacagcccactggcacttcgggcaataactctgtggcacgtgggcatcacgtaagcagcacactaggaggcccaggcgcaggcaaagagaagatggtgctgtcatgaaataaaattacaacatagctacctgggg

SEQ ID NO: 19454 - DNA, 1098 bp, Homo sapiens
  source 1..1098: mol_type = unassigned DNA
cagggatttcagctggccggccatatggccctgtgggtcgtcgcgcccgggccagggaccattctgtacataggatcgtgcttggctctcacggaacgcgcccacacgcagggtcccggtgtcgaatcgtctggtggaatctgccctcaaccctatggagcgggtgctggtatcatagtcatattacaagtaggaatcagcgggcccaagattgctggactcgctgaagagagactacgcaggaaagccccagccacccatcaaatcagagagaaggaatccaccttcttacgctatggcaggtaagaaagtactcattgtctatgcacaccaggaacccaagtctttcaacggatccttgaagaatgtggctgtagatgaactgagcaggcagggctgcaccgtcacagtgtctgatttgtatgccatgaaccttgagccgagggccacagacaaagatatcactggtactctttctaatcctgaggttttcaattatggagtggaaacccacgaagcctacaagcaaaggtctctggctagcgacatcactgatgagcagaaaaaggttcgggaggctgacctagtgatatttcagttcccgctgtactggttcagcgtgccagccatcctgaagggctggatggatagggtgctgtgccagggctttgcctttgacatcccaggattctacgattccggtttgctccagggtaaactagcgctcctttccgtaaccacgggaggcacggccgagatgtacacgaagacaggagtcaatggagattctcgatacttcctgtggccactccagcatggcacattacacttctgtggatttaaagtccttgcccctcagatcagctttgctcctgaaattgcatccgaagaagaaagaaaggggatggtggctgcgtggtcccagaggctgcagaccatctggaaggaagagcccatcccctgcacagcccactggcacttcgggcaataactctgtggcacgtgggcatcacgtaagcagcacactaggaggcccaggcgcaggcaaagagaagatggtgctgtcatgaaataaaattacaacatagctacctgggg

SEQ ID NO: 19455 - DNA, 1021 bp, Homo sapiens
  source 1..1021: mol_type = unassigned DNA
cagtgcggccggaacctggcgcaactcctagagcggtccttggggagacgcgggtcccagtcctgcggctcctactggggagtgcgctggtcggaagggcacctggcctgggtggagcccactcctcagcacccacctcacttcttgcagtattctgcagaccccagccctgtgcctgtgctcctggacagctggagataaggagtgggccctggaagatgctcattcaggccctgctcaagattccagtcctgattgctggactcgctgaagagagactacgcaggaaagccccagccacccatcaaatcagagagaaggaatccaccttcttacgctatggcaggtaagaaagtactcattgtctatgcacaccaggaacccaagtctttcaacggatccttgaagaatgtggctgtagatgaactgagcaggcagggctgcaccgtcacagtgtctgatttgtatgccatgaaccttgagccgagggccacagacaaagatatcactggtactctttctaatcctgaggttttcaattatggagtggaaacccacgaagcctacaagcaaaggtctctggctagcgacatcactgatgagcagaaaaaggttcgggaggctgacctagtgatatttcagggtaaactagcgctcctttccgtaaccacgggaggcacggccgagatgtacacgaagacaggagtcaatggagattctcgatacttcctgtggccactccagcatggcacattacacttctgtggatttaaagtccttgcccctcagatcagctttgctcctgaaattgcatccgaagaagaaagaaaggggatggtggctgcgtggtcccagaggctgcagaccatctggaaggaagagcccatcccctgcacagcccactggcacttcgggcaataactctgtggcacgtgggcatcacgtaagcagcacactaggaggcccaggcgcaggcaaagagaagatggtgctgtcatgaaataaaattacaacatagcta

SEQ ID NO: 19456 - DNA, 851 bp, Homo sapiens
  source 1..851: mol_type = unassigned DNA
acctggcgcaactcctagagcggtccttggggagacgcgggtcccagtcctgcggctcctactggggagtgcgctggtcggaagattgctggactcgctgaagagagactacgcaggaaagccccagccacccatcaaatcagagagaaggaatccaccttcttacgctatggcaggtaagaaagtactcattgtctatgcacaccaggaacccaagtctttcaacggatccttgaagaatgtggctgtagatgaactgagcaggcagggctgcaccgtcacagtgtctgatttgtatgccatgaaccttgagccgagggccacagacaaagatatcactggtactctttctaatcctgaggttttcaattatggagtggaaacccacgaagcctacaagcaaaggtctctggctagcgacatcactgatgagcagaaaaaggttcgggaggctgacctagtgatatttcagggtaaactagcgctcctttccgtaaccacgggaggcacggccgagatgtacacgaagacaggagtcaatggagattctcgatacttcctgtggccactccagcatggcacattacacttctgtggatttaaagtccttgcccctcagatcagctttgctcctgaaattgcatccgaagaagaaagaaaggggatggtggctgcgtggtcccagaggctgcagaccatctggaaggaagagcccatcccctgcacagcccactggcacttcgggcaataactctgtggcacgtgggcatcacgtaagcagcacactaggaggcccaggcgcaggcaaagagaagatggtgctgtcatgaaataaaattacaacatagcta

SEQ ID NO: 19457 - DNA, 977 bp, Homo sapiens
  source 1..977: mol_type = unassigned DNA
ccggaacctggcgcaactcctagagcggtccttggggagacgcgggtcccagtcctgcggctcctactggggagtgcgctggtcggaagattgctggactcgctgaagagagactacgcaggaaagccccagccacccatcaaatcagagagaaggaatccaccttcttacgctatggcaggtaagaaagtactcattgtctatgcacaccaggaacccaagtctttcaacggatccttgaagaatgtggctgtagatgaactgagcaggcagggctgcaccgtcacagtgtctgatttgtatgccatgaaccttgagccgagggccacagacaaagatatcactggtactctttctaatcctgaggttttcaattatggagtggaaacccacgaagcctacaagcaaaggtctctggctagcgacatcactgatgagcagaaaaaggttcgggaggctgacctagtgatatttcagttcccgctgtactggttcagcgtgccagccatcctgaagggctggatggatagggtgctgtgccagggctttgcctttgacatcccaggattctacgattccggtttgctccagggtaaactagcgctcctttccgtaaccacgggaggcacggccgagatgtacacgaagacaggagtcaatggagattctcgatacttcctgtggccactccagcatggcacattacacttctgtggatttaaagtccttgcccctcagatcagctttgctcctgaaattgcatccgaagaagaaagaaaggggatggtggctgcgtggtcccagaggctgcagaccatctggaaggaagagcccatcccctgcacagcccactggcacttcgggcaataactctgtggcacgtgggcatcacgtaagcagcacactaggaggcccaggcgcaggcaaagagaagatggtgctgtcatgaaataaaattacaacatagctacctgggg

SEQ ID NO: 19458 - DNA, 689 bp, Homo sapiens
  source 1..689: mol_type = unassigned DNA
gtaggggaggcggggctggagggagatggcgccgcgctcccggatgaacagagaaagcgacaggataagggcctcgctctgttacccaggctggagtgctgtggtgtgtttgtgactcaccgtagccttgaactcctgggctcaagcaatcctcccacctaagcctctggagtagctgggactacagattgctggactcgctgaagagagactacgcaggaaagccccagccacccatcaaatcagagagaaggaatccaccttcttacgctatggcaggtaagaaagtactcattgtctatgcacaccaggaacccaagtctttcaacggatccttgaagaatgtggctgtagatgaactgagcaggcagggctgcaccgtcacagtgtctgatttgtatgccatgaaccttgagccgagggccacagacaaagatatcactggtactctttctaatcctgaggttttcaattatggagtggaaacccacgaagcctacaagcaaaggtctctggctagcgacatcactgatgagcagaaaaaggttcgggaggctgacctagtgatatttcagttcccgctgtactggttcagcgtgccagccatcctgaagggctggatggatagggtgctgtgccagggctttgcctttgacatcccaggattctacgattccggtttgctccag

SEQ ID NO: 19459 - DNA, 833 bp, Homo sapiens
  source 1..833: mol_type = unassigned DNA
gcagtcccgcggcgcggggcaggttccgggctgcttaggttggcaccggtccgtggtccccgggggcgcagtcgcagcgctcccgccctccaggcgtcagcgagtgcgcggtccagtgcggccggaacctggcgcaactcctagagcggtccttggggagacgcgggtcccagtcctgcggctcctactggggagtgcgctggtcggaagctttaggttcattcttgtaagtgttgctggtgtcagaataggaacctccctgcgctttgaagggatgaatgtgacctctcccacattctccggtgctgtgatgtaccttaaacacagcaagattgctggactcgctgaagagagactacgcaggaaagccccagccacccatcaaatcagagagaaggaatccaccttcttacgctatggcaggtaagaaagtactcattgtctatgcacaccaggaacccaagtctttcaacggatccttgaagaatgtggctgtagatgaactgagcaggcagggctgcaccgtcacagtgtctgatttgtatgccatgaaccttgagccgagggccacagacaaagatatcactggtactctttctaatcctgaggttttcaattatggagtggaaacccacgaagcctacaagcaaaggtctctggctagcgacatcactgatgagcagaaaaaggttcgggaggctgacctagtgatatttcagttcccgctgtactggttcagcgtgccagccatcctgaagggctggatggatagggtgctgtgccagggctttgcctttgacatcccaggattctacgattccggtttgctccag

SEQ ID NO: 19460 - DNA, 626 bp, Homo sapiens
  source 1..626: mol_type = unassigned DNA
caggggaatggctgtgacaataaataagattgggaaaacaagaagacgcccttgcatacattaagatatgtatatatggaaatgttaccgggagtcccggttatcccaaaaagggttgtttcctgttgcgtggtgaggccaatgcacgaaaccgaaagggagtgtgtcaagcagtgcaggctgtattcaatggctatggaattggaagatctgaaatcaacttagcttataagggcctcgctctgttacccaggctggagtgctgtggtgtgtttgtgactcaccgtagccttgaactcctgggctcaagcaatcctcccacctaagcctctggagtagctgggactacagattgctggactcgctgaagagagactacgcaggaaagccccagccacccatcaaatcagagagaaggaatccaccttcttacgctatggcaggtaagaaagtactcattgtctatgcacaccaggaacccaagtctttcaacggatccttgaagaatgtggctgtagatgaactgagcaggcagggctgcaccgtcacagtgtctgatttgtatgccatgaaccttgagccgagggccacagacaaagatatcactggtactctttctaatcctg

SEQ ID NO: 19461 - DNA, 975 bp, Homo sapiens
  source 1..975: mol_type = unassigned DNA
actcctgggctcaagcaatcctcccacctaagcctctggagtagctgggactacagattgctggactcgctgaagagagactacgcaggaaagccccagccacccatcaaatcagagagaaggaatccaccttcttacgctatggcaggtaagaaagtactcattgtctatgcacaccaggaacccaagtctttcaacggatccttgaagaatgtggctgtagatgaactgagcaggcagggctgcaccgtcacagtgtctgatttgtatgccatgaaccttgagccgagggccacagacaaagatatcactggtactctttctaatcctgaggttttcaattatggagtggaaacccacgaagcctacaagcaaaggtctctggctagcgacatcactgatgagcagaaaaaggttcgggaggctgacctagtgatatttcagatgctcagcaccgaactcagtctgacttccagatgctaacaacacaccccaggcaggcgaaggggcatgcttttccatactcttccttttgactggcttgatcacagactgctgctccaaagctggtgttacgcacagctcctcgtcccctccctgcctgcccagggccagcatcaggggctgtcatcactgggggatgcagagctacctgtaacagcaacaaggaccattgtcaactccgttcccgtctgacacccacactgcacctttcagagctgaccataagggttaccctcacctgcccagctgccagggaagaggagggctgtgggcttcattccgaatcaccagataaactaaactaggaaacctgaggcgagccgcagcctcagtttctctttggtgttgccgcccacagttcccgctgtactggttcagcgtgccagccatcctgaagggctggatggatagggtgctgtgccagggctttgcctttgacatcccaggattctacgattccggtttgctcca

SEQ ID NO: 19462 - DNA, 627 bp, Homo sapiens
  source 1..627: mol_type = unassigned DNA
gttggtcagaccggagcacttggcctgaagacctggaattggcgacttcgatattaacaaggatggcggcggccgcagcaagtcgaggagtcggggcaaagctgggcctgcgtgagattcgcatccacttatgtcagcgctcgcccggcagccagggcgtcagggacttcattgagaaacgctacgtggagctgaagaaggcgaatcccgacctacccatcctaatccgcgaatgctccgatgtgcagcccaagctctgggcccgctacgcctccagggtgcagaatagttaaagacacctccctctctctcttcagcatttggccaagagacgaatgtccctttgaacaacttcagtgctgatcaggtaaccagagccctggagaacgttctaagtggtaaagcctgaagcctccactgaggattaagagcaacagccccagagcctgggctctgctggacttagtataatgtgaaaaaaatgtgttctcctattcctcataaagcttgtgctgtaaaatactttctcagggtgttcttgtcctcatctaccctctaccccttactgtgcaaccactgaggcaaagtagcttaatataaaaataaaactttattctgtctcatcaa

SEQ ID NO: 19463 - DNA, 766 bp, Homo sapiens
  source 1..766: mol_type = unassigned DNA
tttctccgggctctgggtcgcaggccgggcgctttctgcgtccagcagcccctttccgcccaggctttttgaaaaggaaggtgcacacctgatccaccgcctttcctggagaaagctgctctgccattttagagtcctgagctccgaaacagccgtggctgcctgggttgcacttggcccctgcacgtcactccacgttgcgcgctccgccgggagtcgaagcaaaagacactgacggaagaggactgcgagagcccgagcgcccgtctctcttgtgccctagcagattccgtcgcttcttccggagccgtacgtggcaccgccccgctcgcgggcggccgcggggcttgctgggaagagaggcgaagccaggtcacctttcaaggacccagaagtagggttttggcctaggtaacggggcagagatgtggttcgagattctccccggactctccgtcatgggcgtgtgcttgttgattccaggactggctactgcgtacatccacaggttcactaacgggggcaaggaaaaaagggttgctcattttgggtatcactggagtctgatggaaagagataggcgcatctctggagttgatcgttactatgtgtcaaagggtttggagaacattgattaaggaagcattttcctgattgatgaaaaaaataactcagttatggccatctacccctgctagaaggttacagtgtattatgtagcatgcaatgtgttatgtagtgcttaataaaaataaaatgaaaaaaa

SEQ ID NO: 19464 - DNA, 4915 bp, Homo sapiens
  source 1..4915: mol_type = unassigned DNA
gcaccccggccgtgacgtcacggcagcgcgccggccgcgagagagggccccgtcgcgaccgcgtccccttgggtccttgatcctgagctgaccgggtagccatggccttgcggctcctgaagctggcagcgacgtccgcgtccgcccgggtcgtggcggcgggcgcccagcgcgtgagaggaattcatagcagtgtgcagtgcaaactgcgctatggaatgtggcatttcctacttggggataaagcaagcaaaagactgacagaacgcagcagagtgataactgtagatggcaatatatgtactggaaaaggcaaacttgcaaaagaaatagcagagaaactaggcttcaagcactttcctgaagcggggattcattatccagacagtaccacaggagatgggaagcccctcgccaccgactataatggcaactgtagtttggagaaattttacgatgatccgagaagcaatgatggcaacagttaccgcctgcagtcctggttgtacagcagtcgcctgctgcagtactcagatgccttggagcacttgctgaccacaggacaaggtgttgtgttggagcgctccatcttcagtgactttgtgttcctggaggcgatgtacaaccagggattcatccgaaagcagtgtgtggaccactacaacgaggtgaagagcgtcaccatctgcgattacctgcccccccacctggtgatttacatcgatgtgcccgttccagaggtccagaggcggattcagaagaaaggagatccacatgaaatgaagatcacctctgcctatctacaggacattgagaatgcctataagaaaacctttctccctgagatgagtgaaaaatgtgaggttttacaatattctgcaagggaagctcaagattcaaaaaaggtggtagaggacattgaatacctgaagttcgataaagggccgtggctcaagcaggacaatcgcactttataccacctgcgattactggttcaggataagtttgaggtgctgaattacacaagcattcctatctttctcccggaagtcaccattggagctcatcagactgaccgtgtcttacatcagttcagagagctgccgggccgcaagtacagccctgggtacaacaccgaggtgggagacaagtggatctggctgaagtgaacgggccgccttctgctccagctgcatcacagtgatggccaagctgcatcagccgcactctcctggacgccatatagctttaagatcgggggagggtaaataatgcaaaaattgcacagtggaagaaggggtctcacaaaaagcaatccatcctgtagtataggtaatggagttgggggaagcagcttccattctggatgtttggaaccctttagctttgttttggaatggcccaccattctcactggaaaacagtggtctgctgtgaaaggccagctctcggcagcccctgtggtttcagcgctgccgctctgtgtcattcaggttgtgcacattgtttttcttctgacttccagaaataaaagtgtttccatgggaatttccccatcgtacgtctatgtgcgtgcgggcacgtcgaaactgcacacgtgcacacacgctgctctgggccctgtttggtgtggtgtggtttaattgaggcttacattatgctgaagagtttttctaaaggcctactgtatttattttagtaatgtgctacattagagtagaaaaaataagaacgtgaagaagaaatagcaaaaggagaaaattaccacagatttacagaacaatatgttttaagagagacgttgagaaagattcacgtggccgtcctcagcgtctcaaactcctttgaagggagatttgagcttaggctgttgatgacataagatgcaaaagcaaaataatatactctctttattacccagaaaatcaagttgccagtcaaaactgagaaatgagaaagaaaatcagatttctttattcatctctgttgaagcctagaaaaccaaaacaagctggttgtggttcagcatcatggtttaggaatcaagctgtcagttgtgagtcctactgaactgtgggttttccactgtaaagctccactgtgtccattaggaatcaggctgccagttgtgagtcctactgaactgtgggttttccactgtaaagctccactgtgtccaatatggtagctcctagccacatgtgggtattgaaatttaaatgagctaaaatgtaatagagtttaaaattgggttccttggttgcactggccatagttcaggcactccacagccgcctgtgggcagtagttccagtgctggtgcagaggacgatgctctgctccccgcggaagctctaccaggcctcgctgctgcggagcatgcgaagaagatgcacactccttccctccttgcgtccgcctgcctttttccctctccccttccttccctccttctttcctcctccttccctcccttcctttcttccttccatctgtccttgttttcctcccttcccttcctccctgcctctttccttccctccttctcttccttccttccgtctgtccttgttttcctccctgcctctttccttccctccttctcttccttccttccttccgtctgtccttgttttcctcccttcccttcctccctgcctccttccttgttttaagaatttgaaaataaagtttcccaggagttttgaattggagtcgagatttaagtggctgaagttttgcatttcactaggaaaccaacagctttaatcatgaaatgaaagcacagctgggcattgggccagtcacagagtgtcttttgctctgagcacttcacaaacccattgtggaggggaggaaagaaaaagaaagccatctttaattatcttagctgttcctaatgtctttggctgcaaagagctagctgtttccttcaaccttggtggttgcacgggtagtgtcctcagcagtgagagggcaggtctgccctgtggtcaggattgcccttgtgaggggcagagctctccaaccatgcagggctccgtgtcggcatggtgtggactcgggtgctctgatcatcccctgtgtttgcgtctgaccctgtgtggttgcattcccttgatggagtgggaagtatgtaatttgtagtgctgaggacattcgtctgtttgattttctggtgttttcaatgacatgcatgttcagcagagaaagatgaataaacactgtccaattcttctctccacatagaagcctcaagaagaggtgaggagatgccccgatttccttatttcagagcagtacatgcgttcgtctcacgaaagctcttacaactaaaacaacagcaccaacaaaccaggatcaaaataatcgtgcattttccaggattccatgttggacttctcagtgctttggagatcaggaaataatcatgctgttgcagcagtatggttttgtgtctggattttattcatacaggcatgtgtttacaggcatgagaattctgtattgaaaagaaagtccttgtttttttctaacgtatctttctgttccatcaactgttaaaaccaaattgttaagaacattgagcttcttaggagagattacatgcagctacttaggaccacctcagcaaaatggagttgcctgggtagatagcagcagcagctcaccagccccacgctgccaggctgctggctgctgtccaccaggcagctgtggaacctccatgttctgcctaggtgttgtggcaagaacagcagggaaacaggcggccgcctccaggccacaggtggacccagggaccttcagttacgccgcttcaattgaattcgtggtggtttctctgctacagcagaagtggaagaagctcttgtcttgtttggcatttgtcccattttttggctaataattggctttgaatttctctgtgccctgcttaccaattatagctttctggattggctgttcttagcagtgcaaatgtcaatgcaaagaagcaagcaggcggctactttctgggaagaagcatagtccgtgctcacactggatataaatctgcaagatttgggggtttggcaaaataggggtggagggaaagctgccatggctgtcagaaattggggctttttgaagaaaagcttgtgtaggcatcagccactggctggccagaattccatgaatggaagcaggtgcccgagtgatctggggctttacatgtggatataaatagaagccgggagcctgaggctttgctttaggaaaatcatgagccagaaaacagaggaggtgattgtcagtagtcacctcacgccgctagtgttttctaatactctctcgaattgtcaaagcaaaggaccttataacagcaacacgtgtgtgactcgaagcagcgagcttcccttgggaaaaggagcctcttctcagcagagggtcccagcctttctgtccttccccatcggaatgccaggctctgtgagtttggatgttggacattgccacctgaattccaggaggccggggagctccagtgatggacttgtccccaaaagagtggtgctgttctcagagccataaatgttccactgaaagtgtctgtcccctggctcacgctggctgcgcttgcttgaaggaggctgatttaagggttctaataggaagacaaatgaaactgtcaaattttatctttaagcatgtgagtaagtttgctcattcgcttttactattgatgtatagttttaaaattcttaatttaaaaattattttaatagtaaatttttcacaagtgaacactttttatctttaaattaaaattctgaagctccctagttagttagatccaattgctggttacattttgggaagctctcattttagtgctatgtagtttcattgaataaacatgtttttaatgaga

SEQ ID NO: 19465 - DNA, 1489 bp, Homo sapiens
  source 1..1489: mol_type = unassigned DNA
accgcgtccccttgggtccttgatcctgagctgaccgggtagccatggccttgcggctcctgaagctggcagcgacgtccgcgtccgcccgggtcgtggcgcgggcgcccagcgcgtggagaggaattcatagcagtgtgcagtgcaaactgcgctatggaatgtggcatttcctacttggggataaagcaagcaaaagactgacagaacgcagcagagtgataactgtagatggcaatatatgtactggaaaaggcaaacttgcaaaagaaatagcagagaaactaggcttcaagcactttcctgaagcggggattcattatccagacagtaccacaggagatgggaagcccctcgccaccgactataatggcaactgtagtttggagaaattttacgatgatccgagaagcaatgatggcaacagttaccgcctgcagtcctggttgtacagcagtcgcctgctgcagtactcagatgccttggagcacttgctgaccacaggacaaggtgttgtgttggagcgctccatcttcagtgactttgtgttcctggaggcgatgtacaaccagggattcatccgaaagcagtgtgtggaccactacaacgaggtgaagagcgtcaccatctgcgattacctgcccccccacctggtgatttacatcgatgtgcccgttccagaggtccagaggcggattcagaagaaaggagatccacatgaaatgaagatcacctctgcctatctacaggacattgagaatgcctataagaaaacctttctccctgagatgagtgaaaaatgtgaggttttacaatattctgcaagggaagctcaagattcaaaaaaggtggtagaggacattgaatacctgaagttcgataaagggccgtggctcaagcaggacaatcgcactttataccacctgcgattactggttcaggataagtttgaggtgctgaattacacaagcattcctatctttctcccggaagtcaccattggagctcatcagactgaccgtgtcttacatcagttcagagagctgccgggccgcaagtacagccctgggtacaacaccgaggtgggagacaagtggatctggctgaagtgaacgggccgccttctgctccagctgcatcacagtgatggccaagctgcatcagccgcactctcctggacgccatatagctttaagatcgggggagggtaaataatgcaaaaattgcacagtggaagaaggggtctcacaaaaagcaatccatcctgtagtataggtaatggagttgggggaagcagcttccattctggatgtttggaaccctttagctttgttttggaatggcccaccattctcactggaaaacagtggtctgctgtgaaaggccagctctcggcagcccctgtggtttcagcgctgccgctctgtgtcattcaggttgtgcacattgtttttcttctgacttccagaaataaaagtgtttccatggg

SEQ ID NO: 19466 - DNA, 799 bp, Homo sapiens
  source 1..799: mol_type = unassigned DNA
acctaggactccctgagctgggactagcgaaatctgtctgcactgatcgcagtcgtcctcagtttcaccctctaggaatcggcctggggatgcacgtgctactctcttcctccaggccggtccccggcgcgtgcgcgcgatccatgtccatgtccgcgcctatcaataaagttgctcacttgttgccggcccgctagcccgaaaggttgcgcgcgcagcccgagaagtctcgcgatagccagccgcggctgcccttgcgcttcccgagctggcggggtccgtggtgcgggatcgagattgcgggctatggcgccgaaggtttttcgtcagtactgggatatccccgatggcaccgattgccaccgcaaagcctacagcaccaccagtattgccagcgtcgctggcctgaccgccgctgcctacagagtcacactcaatcctccgggcaccttccttgaaggagtggctaaggttggacaatacacgttcactgcagctgctgtcggggccgtgtttggcctcaccacctgcatcagcgcccatgtccgcgagaagcccgacgaccccctgaactacttcctcggtggctgcgccggaggcctgactctgggagcacgcacgcacaactacgggattggcgccgccgcctgcgtgtactttggcatagcggcctccctggtcaagatgggccggctggagggctgggaggtgtttgcaaaacccaaggtgtgagccctgtgcctgccgggacctccagcctgcagaatgcgtccagaaataaattctgtgtctgtgtgtg

SEQ ID NO: 19467 - DNA, 747 bp, Homo sapiens
  source 1..747: mol_type = unassigned DNA
ggctgcccttgcgcttcccgagctggcggggtccgtggtgcgggatcgagattgcgggctatggcgccgaaggtttttcgtcagtactgggatatccccgatggcaccgattgccaccgcaaagcctacagcaccaccagtattgccagcgtcgctggcctgaccgccgctgcctacagagtcacactcaatcctccgggcaccttccttgaaggagtggctaaggttggacaatacacgttcactgcagctgctgtcggggccgtgtttggcctcaccacctgcatcagcgcccatgtccgcgagaagcccgacgaccccctgaactacttcctcggtggctgcgccggaggcctgactctgggagcacgcaagacaggatctcactgtgttgtgcaggctggtctcaaactcctggcctcgagcagtcctcacacctcagcctcccagagtgctgggattataggcatgagccactgtgtacagagattctgggtcccttcttccagcgcctgcctcgaagtcctctctggagagagcacagatgtccacgcgtgttccagcacaaggggggcatgcaacagctcagggtcacgtccacttccggagctgggtgcccgggcctcgggctccctgagaaagggcggacacacccaccccgcacccagaggggcaggggccctgacacctgtccaagccctaatagagtcattgttaaacactctgggttcgaaccccagaacttga

SEQ ID NO: 19468 - DNA, 762 bp, Homo sapiens
  source 1..762: mol_type = unassigned DNA
atgcaagaaccaaggcgagtcacgccctgtctgggcaaaagaggagtaaagacccctcagctgcagcccggcagcgcattcctacccagggtccgccgccagagctttcccgcgcggtcggatagttacactactgtccgggacttcctagccgtgccgcggaccatctcaagtgcttccgccacactcatcatggcggtggcagtaagtcacttccgcccgggaccggaagtgtgggatactgcgagtatggcggcgtcaaaggtgaagcaggacatgcctccgccggggggctatgggcccatcgactacaaacggaacttgccgcgtcgaggactgtcgggctacagcatgctggccatagggattggaaccctgatctacgggcactggagcataatgaagtggaaccgtgagcgcaggcgcctacaaatcgaggacttcgaggctcgcatcgcgctgttgccactgttacaggcagaaaccgaccggaggaccttgcagatgcttcgggagaacctggaggaggaggccatcatcatgaaggacgtgcccgactggaaggtgggggagtctgtgttccacacaacccgctgggtgccccccttgatcggggagctgtacgggctgcgcaccacagaggaggctctccatgccagccacggcttcatgtggtacacgtaggccctgtgccctccggccacctggatccctgcccctccccactgggacggaataaatgctctgcagacctggcctgcc

SEQ ID NO: 19469 - DNA, 959 bp, Homo sapiens
  source 1..959: mol_type = unassigned DNA
gtccgacttcgagcagcagctgccccccaacatcatgtacccagcccgtgactacgtggagccctgggcttcgcgtagagtccctagacggggcgaaaacgggaaaaggggccttaactggggcacctggctcctttgagagctcggagtttctgactggcctgcgcaacaccccagaggcaaggtgaacgcgagggcctataatgcaagaaccaaggcgagtcacgccctgtctgggcaaaagaggagtaaagacccctcagctgcagcccggcagcgcattcctacccagggtccgccgccagagctttcccgcgcggtcggatagttacactactgtccgggacttcctagccgtgccgcggaccatctcaagtgcttccgccacactcatcatggcggtggcagtaagtcacttccgcccgggaccggaagtgtgggatactgcgagtatggcggcgtcaaaggtgaagcaggacatgcctccgccggggggctatgggcccatcgactacaaacggaacttgccgcgtcgaggactgtcgggctacagcatgctggccatagggattggaaccctgatctacgggcactggagcataatgaagtggaaccgtgagcgcaggcgcctacaaatcgaggacttcgaggctcgcatcgcgctgttgccactgttacaggcagaaaccgaccggaggaccttgcagatgcttcgggagaacctggaggaggaggccatcatcatgaaggacgtgcccgactggaaggtgggggagtctgtgttccacacaacccgctgggtgccccccttgatcggggagctgtacgggctgcgcaccacagaggaggctctccatgccagccacggcttcatgtggtacacgtaggccctgtgccctccggccacctggatccctgcccctccccactgggacggaataaatgctctgcagacctgg

SEQ ID NO: 19470 - DNA, 804 bp, Homo sapiens
  source 1..804: mol_type = unassigned DNA
gcttcctgtttttccctccgaccaaccccgagcgcaaagaaattgacctcgcagcggtcctacaatacttttatatcattggccaagctttaccccgcccctgcctcatgcagcctatgggctaggctttagggtccgcggttggtcagaccggagcacttggcctgaagacctggaattggcgacttcgatattaacaaggatggcggcggccgcagcaagtcgaggagtcggggcaaagctgggcctgcgtgagattcgcatccacttatgtcagcgctcgcccggcagccagggcgtcagggacttcattgagaaacgctacgtggagctgaagaaggcgaatcccgacctacccatcctaatccgcgaatgctccgatgtgcagcccaagctctgggcccgctacgcatttggccaagagacgaatgtccctttgaacaacttcagtgctgatcaggtaaccagagccctggagaacgttctaagtggtaaagcctgaagcctccactgaggattaagagcaacagccccagagcctgggctctgctggacttagtataatgtgaaaaaaatgtgttctcctattcctcataaagcttgtgctgtaaaatactttctcagggtgttcttgtcctcatctaccctctaccccttactgtgcaaccactgaggcaaagtagcttaatataaaaataaaactttattctgtctcatcaaaagctaccagctgctgaagcaaacatgaagggtggcgggggggcagggattctagggccccagagtaagtagaccacactgagt

SEQ ID NO: 19471 - DNA, 743 bp, Homo sapiens
  source 1..743: mol_type = unassigned DNA
gtcaccgagtcgttggcgctgtcatggcgggtgtgctgaagaagaccactggccttgtgggattggctgtgtgcaatactcctcacgaggtatgtacctttgttctttcttcgttcttgaattcccaaggaagactaaattcctgtcactttgcttattgcagggttaacgggatacagatgtttcaagcccttaattacaagccgcgtgagctcttgagacacgggcgctgtccacctacttcgttgatccgatgtcacatttttatttatttttgccatgacctctttattaagccagttttcttgttgactttttccttgacattttcatggcttcacttgtgcttgcttctgtcagcgccatctcaaatttatatctccgttttccatcttttctccttgccttaccgtttctgcttaggtgcgttggattacatatatttaggcttactaaaggtactgcccccttttccttctgttaggtcttttccatctgtattcacgaatgttttcatcaaaaaaacccacaaattttttattcttcttgtcccttctataatcacaccatttctttgcttcactttacagataactcaaaagagttatctctattttctccaatttctttcttattcacccttgaatgcactcagtcacccttggcgtttttcaagttcaccaattatctccatgctgccaaatccaatggtcagctcatatttctcaccttcattgacctaa

SEQ ID NO: 19472 - DNA, 1901 bp, Homo sapiens
  source 1..1901: mol_type = unassigned DNA
gtgcgaagaactaacttgctgttgagagatcaattcagaggatgctcaagctccgttatcactttcattttactaaactgagaaaggaaggttgaggaatgcatcaacggttaagcacagtgcaggttcctacagcgactggagttttttggtagttgggagtgtttccctcaatctttgggcaagccgtcagcagtggcaggaacaggaacagacagctgggaaaccctttctttccccaatcgtcttctagcttagctttaggcttgtatgcccatcgcgcatgcgtcaatttttctcttttaagatgggcggggcagagtctttgctcctttggcgatcctgaaggggtggagctaagctgtttccagggtgacagagtggcgacctcggtggtcgattgagcaggtctgagaattgttcccaaagggttgtgcgtcaccgagtcgttggcgctgtcatggcgggtgtgctgaagaagaccactggccttgtgggattggctgtgtgcaatactcctcacgagaggctaagaatattgtacacaaagattcttgatgttcttgaggaaatccctaaaaatgcagcatatagaaagtatacagaacagattacaaatgagaagctggctatggttaaagcggaaccagatgttaaaaaattagaagaccaacttcaaggcggtcaattagaagaggtgattcttcaggctgaacatgaactaaatctggcaagaaaaatgagggaatggaaactatgggagccattagtggaagagcctcctgccgatcagtggaaatggccaatataattattaagtgactttggtgtgttcatgggaaactgatgtaattaaatattctgttatattaagagcgtgttcttattactgacattttgtaatcaagaaaagtgatatagaaaatatgtaggagactgttaaaattggtgattatggtaatatggtcatgtgaatcaatttttgatttataaagtactcacacaagttgtttcaaagatgatatttctgtgaacagagaggccatgggaagatttgaaaattattaaagaaaaattcctacagattttcaatgcagagaccataatcaaaaagtaaactttctttagtagtatgttcaatacatcatttaattttttaagttatcctgaagaaggaaaggtccttaattattatagtctaaacaaatttatagattactgtttgaagtaaataatacgagtgaatattttcaaatgtgataaaatagcacaagtggctggtgataaaatttgaaattatggttaacctcagctgtgatcttatgtatgtaaagtgaaatttaaatagataattataggttgattacaaaatccatagtgtcattttattttagtcattattgaattataccatttactctgttttcttatagtcttaattttattatattttgttgttactgtattatatttgaaaaccttcaaattagaatacattgtacagttaaagaaattgacttggtacttaaaagaaagatttcccattgcatacaggttattggagaaattttccttttgttgcatttgtggaagttagttttctggcccgtggcctttaattttcttaatcaacctaattacatcaggatagaggtagagtttctgtaaaagaagagacattaagagttcctgaaatttatatctggcatacggataggcttatattcaaaacatcttagtcatacgaccataaattaaaagtggagtcactaaatagtttgcagtacgtttctaatataagtgtaggtgggtatcaaaacaagacaaatgctgttcagggaaagaagttggcaagcttaaggttaaacaaaaataaaattacatgtgttttcgccttccta

SEQ ID NO: 19473 - DNA, 5608 bp, Homo sapiens
  source 1..5608: mol_type = unassigned DNA
aagaaggtgagacgaatggaggtcactgttggaatttagactgtgggggtagactcagtccgatagccctacttcccgcgggtgttgacccctactgtcgcgggctcggcggtgcttttcggggactcgttctgcatgccttaccgggtagggcagaccactggccttgtgggattggctgtgtgcaatactcctcacgagaggctaagaatattgtacacaaagattcttgatgttcttgaggaaatccctaaaaatgcagcatatagaaagtatacagaacagattacaaatgagaagctggctatggttaaagcggaaccagatgttaaaaaattagaagaccaacttcaaggcggtcaattagaagaggtgattcttcaggctgaacatgaactaaatctggcaagaaaaatgagggaatggaaactatgggagccattagtggaagagcctcctgccgatcagtggaaatggccaatataattattaagtgactttggtgtgttcatgggaaactgatgtaattaaatattctgttatattaagagcgtgttcttattactgacattttgtaatcaagaaaagtgatatagaaaatatgtaggagactgttaaaattggtgattatggtaatatggtcatgtgaatcaatttttgatttataaagtactcacacaagttgtttcaaagatgatatttctgtgaacagagaggccatgggaagatttgaaaattattaaagaaaaattcctacagattttcaatgcagagaccataatcaaaaagtaaactttctttagtagtatgttcaatacatcatttaattttttaagttatcctgaagaaggaaaggtccttaattattatagtctaaacaaatttatagattactgtttgaagtaaataatacgagtgaatattttcaaatgtgataaaatagcacaagtggctggtgataaaatttgaaattatggttaacctcagctgtgatcttatgtatgtaaagtgaaatttaaatagataattataggttgattacaaaatccatagtgtcattttattttagtcattattgaattataccatttactctgttttcttatagtcttaattttattatattttgttgttactgtattatatttgaaaaccttcaaattagaatacattgtacagttaaagaaattgacttggtacttaaaagaaagatttcccattgcatacaggttattggagaaattttccttttgttgcatttgtggaagttagttttctggcccgtggcctttaattttcttaatcaacctaattacatcaggatagaggtagagtttctgtaaaagaagagacattaagagttcctgaaatttatatctggcatacggataggcttatattcaaaacatcttagtcatacgaccataaattaaaagtggagtcactaaatagtttgcagtacgtttctaatataagtgtaggtgggtatcaaaacaagacaaatgctgttcagggaaagaagttggcaagcttaaggttaaacaaaaataaaattacatgtgttttcgccttcctagctccctgtcattcctaaatacttggttaaatttaacgtggtatctctttccttcatagatagtactatactcttgtggggttttgtgtatacgtgtgtgtgtgtgtgtgtgtgtgtgtgtgtgtgtgtgtgtgtgtgcacgcgcatgcgcacatttgctcagaatgagaaaaaaatggtatttttccttctttccagtatatttctcccctcatagagctgtaacatgaatactaaataaatattaaataaggtggattcttagaggttagagtgcaagaaggctccttctggtggggaagtgttagagggggagttagaagcccagggtttctcattctcatggttctagtgttgttaactcaatgactacattgaggcaagtttggcctgtttctcagaatggcctatttctaatgctgcaaaagaaatagaatatgatttataacaacattttcagttctaaacatttcttgaatatataatatatttattaaaacatgatgctgaagtgtgtttgcatgggtactttcaaggtaattttctagccaaccattatttttcaggtcctttggacaacacagaaacaaagatggcttgctgtgtttttgtcatattttcagtcccgtatctgccatgattcttgggcatcttttatgtttcaccaacagtgttactgaacttttttgctaaaaggggaccttactggtgtttgcattagaaatgctagttgcagaataatagtcattgtaaaaataatattataacaataatagctaatgtttgttgagactttaatatgaatgtcaggcactatcataagtacctgactaatttcactcattaaacctgcactacaaccctaagagtgatactacaaattatcttcattttccagataagaaaccagaaccctacgtgagtagttttcccctgcaattatgcaacttggggccttggggacactgaaaccaagagatgatttaataacaaatccaaggtcacatagctagtaagatgtgaagctgaagtttgaacccaggcagtctggttctagaactgatgctcctgttatattattatttatgaatatgcttgggatgttgtgacttcttcctgtgctgtatgggctgtaccaaatgaaactagatcctgctctctttaccttttctgtcaaaattatctgtaaagaacaaatatgagcagaagtagtaaacgatttcattttctgcaaagagctgcatataggttataggcagattatgttaatgggataggtatctaaaaggtattgcaatttggtcattggttctttctcctgtctcaattgctcacagaactttacacctgatcgtttttactccttcagtcttttcccagttgcttcctataaacatccaggttaagtctcctgatcactttgcaaatgattcttttattcagagatcttcagtgttttgagtggctactaaactaattttaataattttcagaatggcctatttcagttctcccatgggtttcattctagttaatcatcatactgcagatacttcaaaagaaagagaagctaatcaatttgagctttgctaagaaagaagaaatggcaacaaagttgatgccccctttctcccacactgggacttagtgcagacgattccaatttcttggcattctttcctttgggatgaaaatggcttatatttaggataactataggataatttatcattccacttggaatgattttgagtgaaaataattacataaggataacagatgtacaccatgactgtcctgggcaaacaagatataggggggcaccctactggagtaaggctcaggtctcaaggttgccatctttcccacaccagtaggatcaactagtctgtcattggaatagaatgaattgatgccagcagtagtagtcatcatgtgcaatcaggcctcaagttttattgtatcctttcactctccctcattctcccctccccctccttttccctcagaattgggggatggaagaaaagagagcttatattttattgtcaattttctaatcacattcagaggagcgaagctaattaagccaataacaatgtttatgaatgtatcttttttaaaagggagatgacaatatataggaaaattcccacatgtaggctaatagcagctttttctttttcctcccatcctctatgattatgtaaacatacagaagtctaacaccctacacaagtgtattgtggggtatgggattaagtaccaaattgctgaacatatcactagtattttggatttgctgagtgcagtcttcccattaaaactaagtgttcagtagggaggcgtggtggctcacacctataatcccactactttgggaggccgaggtgggtggatcacttgaggtcaaaagttcgaggccagcctggccaatatggtgaaaccccgtctctactaaaaacaaaaacaaaaactaagtgttcagtgagattgtagcctatgctacaacaatagtaatgccaattgttttagagaaaagtaaatgagaggctaccagttgtgtttagaggaggtcgacgttttattttagacaaaattcacaggaaatcacagtgggaatgtgataaggggtttgaatgattgatggggacaggaagaattcatttgagagactagagatgagtcagtattctagatcgtgaagtaaaatagtgagtcatgtagtgacttagcatgggttatccttaaatcccagtgtcttaagtgtattttttattcatactgcatgtctaaggagggttggcaaggagtgctcatagacccacaaggaatccaggctgagtgtggcaccatcaacatatatttccatgaccatagtggtggtggggaattggaacatggtaaattacacataggaataaaaaaaaagaaacaaccaaggttaaatttttttttgactgtgccacaaaatttatgaattgaacttgccatgcatcactaataattttcaaattggtctttaggtttacattagcagctaattttttgtggtacacttaaatgtaatttatgattggcatctgtatataattaaatgaaaagcattgcaaagatttctattttggtatttctcatgatcttcaatttttttttaggtgaatctattaggttttctaaagataactatttttttttttttacaaaatattggcattttaatctctctataactggagggtgaattatttttcaccagagtaaaacaggtccaaagtcccttatctaaattcctaatttcaaaaatctctgaaaacaaagttttttcataactcatttggcaacaaaccccacctgaattacatgaggctatttgtggtatttatcgcacttcaatgtgaatatgaatatattttgccacagatgtatcaatatatttgattctaaactgcttcctcagaccctcttaatgtgttacataatgtaaagtatatgcccatatttcctttcaaaaatctgaaaaattgtgaatatcaaacacatctgtcttaaaaggtttcagaaaagggacaatagacctatatttccattctcttaacaagttcacaaagtggtattatgatccaaatttaatctaaataatttccaaaacaaaaattttcaggtccttagttttctaaattattttaatattaaaaatattcattattcattttaacctgtagtaacaacaggagatactttgaaatgcttgattttatcaagccactaggtggcatctttgtaaaaataaaagcacatcaaaagaaatgtttattacataaataaatgctgagatgaataaaggtagatgtttcatgagaaatacgaagtcgtttggtggaataaatcctgagaaaatgcatagatttatcatgaaaaggaaaatggaaaatggtattgtaaaattactctttcacttttggaattgagaagctttttcctattggttgttttcattaagtttgaatataaatttattatgtaaccaaa

SEQ ID NO: 19474 - DNA, 1256 bp, Homo sapiens
  source 1..1256: mol_type = unassigned DNA
ggcgtttctgtagatgagcatgcgcagcacccaccgttcgctcagccagagagaggcttcccagccaatccgagagcctcagagtcatcctcccgcccacccagcatacaggcggggcgttcctccttagccaatgggaaaagacattcgcccgcggtccgcacgcgctgcttgcaaaggggtggggttgtggagtggatgctttggcaagatggcggggagcggcgtccgccaagctacttctaccgccagcaccttcgtgaagcccattttcagtcgggacatgaacgaggccaagcggagggtgcgcgagctctaccgcgcctggtatcgggaggtgccgaacactgtgcaccaattccagctggacatcactgtgaaaatgggacgggataaagtccgagaaatgtttatgaagaatgcccatgtcacagaccccagggtggttgatcttctggtcattaagggaaagatcgaactggaagaaacaattaaagtatggaagcagcggacacatgttatgcggttcttccatgaaacagaagcgccaaggccaaaggatttcctatccaagttctatgttggccacgatccatgaagtcattcagtggaaagatgcacgttgatactattttagagcacaaataaactcactatacaatggtcactttgtgatagaattccattgatgaaccaattttctgcagcctctttttgcctgagcaagtgggaccttggtatacacatcacctgttctttcccttttcttgaaatgtggtgtttgctgtaaattggattgaattatttttctcagagccttgcatgtcagtaaacaggaaggaaggaggccatctgttcaaaaattgtgacattgggcatgaggctggacgacttgttaatgtagttgtttctatagcccctatgattagacacttcagtgtcagggcacagattatctaaaattagccagctcttcctgtcagggatcagggcagcactaacaggcgcaaaagtagagctgtcaagatgggctagttttccttgggttctgaagaaaatggatgtgcaaaggcttggctccgctacttgtaacaagctccagcccttaaaatgaaattaacttcctactcaggcaccctgcttaggtgcacagctgttcaatatacacagagaacagaaatattcctactgtctttggaaaccctggtgtacctctcagtggcagaataaacatcaacacaggttcaagaactgat

SEQ ID NO: 19475 - DNA, 535 bp, Homo sapiens
  source 1..535: mol_type = unassigned DNA
acgtcaccggctgcgcccttcagtatcgcggacggaagatggcgtccgccacccgtctcatccagcggctgcggaactgggcgtccgggcatgacctgcaggggaagctgcagctacgctaccaggagatctccaagcgaactcagcctcctcccaagctccctgtgggtcctagccacaagctctccaacaattactattgcactcgcgatggccgccgggaatctgtgcccccttccatcatcatgtcgtcgcagaaggcgctggtgtcaggcaagccagcagagagctctgctgtagctgccactgagaagaaggcggtgactccagctcctcccataaagaggtgggagctgtcctcggaccagccttacctgtgacactgcaccctcacggccacccgactactttgcctccttggatttcctccagggagaatgtgacctaatttatgacaaatacgtagagctcaggtatcacttctagttttactttaaaaaataaaaaaatagagacagagtctcaccatgtttcc

SEQ ID NO: 19476 - DNA, 844 bp, Homo sapiens
  source 1..844: mol_type = unassigned DNA
ggttgggcagggcaatacgcctgcgtgttgccggatgcgcatgcgcaggcgccgtgtggcactcggcggtcgaaaggggagttcaaggagacgggggcgacgcggctgagggcttctcgtcggggtcggggctgcagccgtcatgccggggatagtggagctgcccactctagaggagctgaaagtagatgaggtgaaaattagttctgctgtgcttaaagctgcggcccatcactatggagctcaatgtgataagcccaacaaggagtttatgctctgccgctgggaagagaaagatccgaggcggtgtttagaggaaggcaaactggtcaacaagtgtgctttggacttctttaggcagataaaacgtcactgtgcagagccttttacagaatattggacttgcattgattatactggccagcagttatttcgtcactgtcgcaaacagcaggcaaagtttgacgagtgtgtgctggacaaactgggctgggtgcggcctgacctgggagaactgtcaaaggtcaccaaagtgaaaacagatcgacctttaccggagaatccctatcactcaagaccaagaccggatcccagccctgagatcgagggagatctgcagcctgccacacatggcagccgcttttatttctggaccaagtaaagatgggtccgtggcccacactcggtcatgtgctcagacaacgactgatgaaaacgcccatgcggtttgcatcgactgatagtgtgttctttccgggatcacaaacattaacaaaaaagttaacttatgtgacttggcagttattctataccatttcctgtccattaaaatttttaaaggaaa

SEQ ID NO: 19477 - DNA, 1000 bp, Homo sapiens
  source 1..1000: mol_type = unassigned DNA
ggatgcgcatgcgcaggcgccgtgtggcactcggcggtcgaaaggggagttcaaggagacgggggcgacgcggctgagggcttctcgtcggggtcggggctgcagccgtcatgccggggatagtggagctgcccactctagaggagctgaaagtagatgaggtgaaaattagttctgctgtgcttaaagctgcggcccatcactatggagctcaatgtgataagcccaacaaggagtttatgctctgccgctgggaagagaaagatccgaggcggtgtttagaggaaggcaaactggtcaacaagtgtgctttggacttctttaggcagataaaacgtcactgtgcagagccttttacagaatattggacttgcattgattatactggccagcagttatttcgtcactgtcgcaaacagcaggcaaagtttgacgagtgtgtgctggacaaactgggctgggtgcggcctgacctgggagaactgtcaaaggggtgactttcccaaggactggagagagatggagaaatagacactgcagcatcatggtgaagaaactcaagccctggtggagctgggagaacaacgacacttctatttccagtctctccaagagcatgcgtgaagccaggcccatctgtctgtgggagaggtctgtgccatggtattgggcaaactcacaggtcaccgtagcccaggattgcaatgtcccaaaagcttgtcttgatctagactagaaaccacagcccagcccatgcgagcaggatgtacccttagggtcatctggcttatcctctaatctagggggctcagacacagcaagtgaccccttgccccagtccccctcccccaggtcacacagccagtcaggattggaacacaggcctcctgcctccagtccagggctctttctactgaggagggacctgggatttaggaggcgcccccacctccccagctccagcctgagatgaaggccagattcttgtcagcaagtggaa

SEQ ID NO: 19478 - DNA, 3334 bp, Homo sapiens
  source 1..3334: mol_type = unassigned DNA
gtgggggattgtgggaaaagatggcggctgccgcacaatcccgggttgtccgggtcctgtcaatgtcacgttctgccattactgcaatagccacatctgtgtgtcacggcccaccctgtcgccagcttcatcatgccctcatgcctcatgggaaaggtggacgttcctcagtcagtgggattgtggccactgtgtttggagcaacaggattcctggggcgatatgttgtcaaccaccttggacgcatggggtcacaggtaatcataccctatcggtgtgataaatatgacatcatgcaccttcgtcccatgggtgacctgggccagcttctgtttctggaatgggacgcgagagataaagattctatccgacgagtagtacaacacagcaatgtggtcatcaatcttattggacgagactgggaaaccaaaaactttgattttgaggatgtttttgtgaagattccccaagcaattgctcaactgtccaaggaagctggagttgaaaaattcattcatgtttcacatctgaatgcgaatattaaaagctcttctagatatttgagaaataaggctgttggagagaaagtagtgagagatgcatttccggaagccattatcgtaaagccgtcggacatctttggaagagaggatagattccttaattcttttgcaagtatgcatcggtttggtcctataccccttggttccttgggctggaagacagttaaacaaccagtatatgtcgtagatgtatccaaaggaattgttaatgcagttaaggatcctgatgccaatgggaaatcctttgctttcgttggtcccagtcggtacctccttttccacctggtgaagtacatctttgctgtggctcacagattgttcctcccattccccttgccgctttttgcctatcgatgggtagcaagagtctttgaaataagcccatttgagccctggataacaagggataaagtggagcggatgcacatcacagacatgaaattgcctcacctgcctggcttagaagaccttggtattcaggcaacaccactggaactcaaggccattgaggtgctgcggcgtcatcgcacttaccgctggctgtctgctgaaattgaggatgtgaagccggccaagaccgtcaacatttagtgcctcctgagcagctcttggttttggcgtcttttgggtcggcccatgtggtttgagcacccagccaggcggtctctttagaggatcctgtacacagttccactattaaaacatttcaggttgaattctgcagtattttcttccttgatttacaaaatgagaaatgtagtcacttagaacttgagcatgatttttgttaaacatatttaataatgatatatatactatttattctctgaaatgccagagagtttgaattttcctatgacaaaccacttctagcatacgttctagaagacaaggaccctttttaatgtcaaagtattgtaaagaccccaagtgatatgtgattgttttttaatttccattaaatgagagagcatacagtatcccctaacctgaatgtgtttacactgaaggtgtttttaaaatttattttaataatgtccatatgccttttaaaaatagtagtacatatatagaaaaacattgtccatagattctcaaaccccttgcagtaattccacagtcttcttggatctgagctatctgaggccagcccgatgcccttagtaccacatctggattatttcagacacataggtggagatagattctcttcacatgcaaaggagatgcttcagcttctatgccagcagtgccagcacttaggaattatgaccttctaatgaagttcttaaaattgcagccaagacccagatgaacatttggtttagtgttggcaaatcccaccagtacagtgtgatttaaaactcccacaatttgtggtgaagccaacataccaccatcctaggtgacccagggttggtcattgtgtttcactggacttcagcctcctgatctatatttgggacagggatgtcagtaaaaacgctgtttgatgagggaatgcccgtctccttacagagagaaaggtatatcagtgttgaaggtaagttctccacctgccctttctgcctgcatcagaatctttttatcccaaaacggtcaacagtgagctactccaagtgtggtccatagatcaccagcattgggatcatcttggggcttgttagaaatgcagaacccgggctgggcacagtggctcacacctgtaatcccaacgcttttgagttgctgtggtgggacggtcgcttgaggccaggagtttgagaccagcctaggcaatatggcaagaccttgtctctacagaaaaatttcaaaaagttagtagggcatggtggcacgcacctgtagtctcagttattcgggaggctaaggtatgatgattgcttgagcctgggagttcaaggttacagtgagctatgatagtgccactgcacttcagcttggactgaagatcctgtctcagaaaaaaaaaaaaaaaaaggcagaatcctaggttttgtcctgtcccaggcgtgttgaatcagaatctgcattttagcaaggtctccaggagatttgtatgcacattacagtatgagaagcactgccatacagaagagctgtatcagagttcagtgtgatccctgttattaatccaggttgctgaccccaccccagacctactgaatcagagtctcaggaaggagggcccaggaattttagttttattaaacattctagtttattctcctgtacactagtatgtcagaatcagcgtactagggaaaggaacacaaacccaacttcacgttttttcttcagatgctgtctgttattttggatgacacccctcctggccataagccagccattaggcacagagatgggtggatttaatttgaaaaggaactataattctataatgcacagtgtcctctcttagaatatctacactttctttcctttttttgattcttaaaaaaaaacttattgatacataatagatgtaaatattgtcagggtatatgtggtaatttgatatattcatataatcaatcagtgtaattgggatatccatcaccttaaacatttacctttatgctagtaacattcaaattactctcttctagctattttgaaatgtacagtagattagtattaactctagttaccctactgatctattgaacaccaggtcttacttcttctgtcttaactgtaattatcttcattttctagcaatgctatttctcatctctaacttgtatcatctcaggatgctgtatatttct

SEQ ID NO: 19479 - DNA, 1457 bp, Homo sapiens
  source 1..1457: mol_type = unassigned DNA
aagcggcggcaggccggcggttggtgtgtcccgggtgtggggaggcgacagagccctggcacttgagggttgagggggcctccccagcgcggcgaaccgtctagcctccggaggccaggccgtgagtgcgggaggtatacgccaaggcggaagaattttgccactcactacctgtgtgacctcgggtaaattagccttggaacgtcagtttcttcgtctctataattgaaataataatagtacctctctcaggattgttgtgagccgtcagtgaaacacttagagcagtttctggcacatggtagaattgggctatttgctgaagcttcttggtggcccttgctagcccaggaagaaacttacattttgatttttttgtaccatggctttggttcacaaattgctgcgtggtacttattttctcagaaaattctctaagccaacttctgccttgtatccatttttgggtattcgctttgcagagtattccagtagtcttcagaaaccagtggcttctcctggcaaagcctcctcacagaggaagactgaaggggatttgcaaggagatcaccagaaagaagttgctttggatataacttcttctgaggagaagcctgatgttagtttcgataaagcaattagagatgaagcaatataccattttaggcttttgaaggatgaaattgtggatcattggagaggaccggaaggccaccctctgcatgaggtcttgctggaacaagccaaggttgtctggcaattccgggggaaagaagatttggataagtggacagtgacttctgataagacgattggaggcagaagtgaagtgtttttgaaaatgggcaagaataaccaaagtgcactgctatatggaactctgagctctgaggcgcctcaggacggggagtctacccgaagtgggtactgtgcaatgatatccaggattccaaggggtgcttttgagaggaagatgtcttacgattggtcccagttcaatactctgtatctccgtgtacgtggggatggtcggccttggatggtgaatatcaaggaggacacagatttcttccagaggacgaatcagatgtatagttacttcatgttcacccgcgggggaccctactggcaggaggtcaagattcctttttccaaatttttcttctctaatcgaggaagaatccgggatgttcagcatgagcttccgcttgataagatctcttctataggattcaccttggctgataaagtggatggtccattcttcctggagatagattttattggcgtgtttactgatccagctcatacagaagaatttgcctatgaaaattctccagagcttaacccaaggctttttaaataaagatcatatggtagttttgttttactaatctaagggtactagcatctacaatgatatagacaaaataaaatatttctttaatggcatccaa

SEQ ID NO: 19480 - DNA, 837 bp, Homo sapiens
  source 1..837: mol_type = unassigned DNA
gcggcggcaggccggcggttggtgtgtcccgggtgtggggaggcgacagagccctggcacttgagggttgagggggcctccccagcgcggcgaaccgtctagcctccggaggccaggccgtgagtgcgggaggtatacgccaaggcggaagaattttgccactcactacctgtgtgacctcgggtagaattgggctatttgctgaagcttcttggtggcccttgctagcccaggaagaaacttacattttgatttttttgtaccatggctttggttcacaaattgctgcgtggtacttattttctcagaaaattctctaagccaacttctgccttgtatccatttttgggtattcgctttgcagagtattccagtagtcttcagaaaccagtggcttctcctggcaaagcctcctcacagaggaagactgaaggggatttgcaaggagatcaccagaaagaagttgctttggatataacttcttctgaggagaagcctgatgttagtttcgataaagcaattagagatgaagcaatataccattttaggcttttgaaggatgaaattgtggatcattggagaggaccggaaggccaccctctgcatgaggtcttgctggaacaagccaaggttgtctggcaattccgggggaaagaagatttggataagtggacagtgacttctgataagacgattggaggcagaagtgaagtgtttttgaaaatgggcaagaataaccaaagtgcactgctatatggaactctgagctctgaggcgcctcaggacggggagtctacccgaagtgggtactgtgcaatgatatccaggattccaagg

SEQ ID NO: 19481 - DNA, 781 bp, Homo sapiens
  source 1..781: mol_type = unassigned DNA
ggaagggaaaagcagatggacctatacgggtaaagtggcttctgggcggaaggtacactataggctcggggaggtagaattgggctatttgctgaagcttcttggtggcccttgctagcccaggaagaaacttacattttgatttttttgtaccatggctttggttcacaaattgctgcgtggtacttattttctcagaaaattctctaagccaacttctgccttgtatccatttttgggtattcgctttgcagagtattccagtagtcttcagaaaccagtggcttctcctggcaaagcctcctcacagaggaagactgaaggggatttgcaaggagatcaccagaaagaagttgctttggatataacttcttctgaggagaagcctgatgttagtttcgataaagcaattagagatgaagcaatataccattttaggcttttgaaggatgaaattgtggatcattggagaggaccggaaggccaccctctgcatgaggtcttgctggaacaagccaaggttgtctggcaattccgggggaaagaagatttggataagtggacagtgacttctgataagacgattggaggcagaagtgaagtgtttttgaaaatgggcaagaataaccaaagtgcactgctatatggaactctgagctctgaggcgcctcaggacggggagtctacccgaagtgggtactgtgcaatgatatccaggattccaaggggtgcttttgagaggaagatgtcttacgattggtcccagttcaatactctgtat

SEQ ID NO: 19482 - DNA, 708 bp, Homo sapiens
  source 1..708: mol_type = unassigned DNA
gttactagaagggctccaggatggaggccgacctgacttctccgcctcggtgggctgggtcggcggctggagcattacccctactgcgggtcccgctgctggcagcgctggaaactgggtggacggcatgggttggtctcaggatttgttccgcgccttgtggagatcgctgtcaagggaagtgaaggagcacgtgggcacggaccaattcgggaacaaatactactacatcccgcagtacaagaactggagaggacaaactattcgagagaaaagaattgtagaagcagcaaataaaaaagaagtagactatgaagcaggggatattccaacagaatgggaagcttggattagaagaacaagaaagactccacctactatggaggaaatactaaagaatgaaaaacacagagaagaaatcaaaataaaaagccaagatttttatgaaaaagaaaaactccttagtaaagagaccagtgaggaactcctgcctccaccagttcaaactcaaattaaaggccatgcctctgctccatactttggaaaggaagaaccctcagtggctcccagcagcactggtaaaacctttcagccaggatcctggatgccacgagatggcaagagccacaatcaatgaatgcattatggtcaaatcttttcatgtatatggatgtgactattttaacaaataaaagaagtgaaaagtta

SEQ ID NO: 19483 - DNA, 705 bp, Homo sapiens
  source 1..705: mol_type = unassigned DNA
ctccccagggttccagagatggccaccagcctcggctctcccacgtctacacccatcacctccagcctgagggcgcaactgagaggaactgagacccaagcagctcagtaaaggccccgcggcgagggcatcggctctcgccggcggatgacgagctgtatcagcggacgcgcatctctctgctgcaacgcgaggccgctcaggcaatgtacatcgacagctacaacagccgcggcttcatgataaacggaaaccgcgtgctcggcccctgcgctctgctcccgcactcggtggtgcagtggaacgtgggatcccaccaggacatcaccgaagacagcttttccctcttctggttgctggagccccggatagagatcgtggtggtggggactggagaccggaccgagaggctgcagtcccaggtgcttcaagccatgaggcagcggggcattgctgtggaagtgcaggacacgcccaatgcctgtgccaccttcaacttcctgtgtcatgaaggccgagtaactggagctgctctcatccctccaccaggagggacttcacttacatctttgggccaagctgctcaatgaaccgccaggaactgacctgctgactgcactctgccaggcttcccaatgctttcactcttatctaccctttggcacttatcttgcttatcaacataataatttatacacttctccc

SEQ ID NO: 19484 - DNA, 1989 bp, Homo sapiens
  source 1..1989: mol_type = unassigned DNA
cgcgcccgtggggccggagaggaagtaaacccgcgcgtccacctcggggacacccccgcgctcggtggcctttgtccggtgacgctgccagcgcccggagcaccaggggccgaaggggtccacagagcagccgcgggacccccggaaacccattgcgaccggccccaggagacccaccaccaggctcccactgtgccgagcttcccgctcgcccggccccgcgggtagcgaaagcgacaatgttcccctgaggccacgacagagccggcgtgccgagatgcccaaaccccgcgcgggggccagcgactctcgcgccagtaggcccttgacttggatcaagacgggggacgggggactcccaggacgcgagcagagtgaacgaggacaaggtgatgctccacgcgcttctacttcaagtctggtccggttcggcctggtctgggccagccgaacagccacccaaacactatcacagcttgcccttccgcttgctctggctgcctgcagacttggagccattttaaggagaaaccacctggccacgccccctagagaacccgagaagccaatccacgctcggccacgcccctctccgcgcgctgcggagaggccaacggtcgcgcgggtgacggttagggcggggcgtgcttccgcgtctagccggagaaacttgagccggctgccccgcccacggtgcccgaagccccaaaggctggaattaggggctagaagtctggcacccaccgcctggccaggtgttcgggacgcgaccaggtgggcggtcgccccgccccgggagcgcggcttaatagctgagagcccgggggccaggccgcggctgcggcccaggcaacgccctgagggtggccacgctgccaggtgttccactcccccgggactatgggcaagggcccggggcggggagggcggcaggtgctgacactggagctgcgccggaggtcggggaactcggcctcctaagactgaggacactcgcctgctgggccggtcgagctgtgcggtgccctccgggacgcagggggcgctgcagccacgctgggtcaggctccgcagggccctcccaacccggggactaacggcgccggtgacgacttcgccgcgcgttggtcagccatggccaccgctctcgcgctacgtagcttgtaccgagcgcgaccctcgctgcgctgtccgcccgttgagcttccctgggccccgcggcgagggcatcggctctcgccggcggatgacgagctgtatcagcggacgcgcatctctctgctgcaacgcgaggccgctcaggcaatgtacatcgacagctacaacagccgcggcttcatgataaacggaaaccgcgtgctcggcccctgcgctctgctcccgcactcggtggtgcagtggaacgtgggatcccaccaggacatcaccgaagacagcttttccctcttctggttgctggagccccggatagagatcgtggtggtggggactggagaccggaccgagaggctgcagtcccaggtgcttcaagccatgaggcagcggggcattgctgtggaagtgcaggacacgcccaatgcctgtgccaccttcaacttcctgtgtcatgaaggccgagtaactggagctgctctcatccctccaccaggagggacttcacttacatctttgggccaagctgctcaatgaaccgccaggaactgacctgctgactgcactctgccaggcttcccaatgctttcactcttatctaccctttggcacttatcttgcttatcaacataataatttatacacttctcccattttgtatcaggtgtgttgctggccaggagctgatggctcactgggctcttggaggggaatgtgaagaaaccaaggagtcactttttcatctagattacttaggattccttgacttttcagaagtcgggaagcagtatgtttgcctgttgtagacctacttgctcacatgcagatttgagagga

SEQ ID NO: 19485 - DNA, 808 bp, Homo sapiens
  source 1..808: mol_type = unassigned DNA
caccaccaggctcccactgtgccgagcttcccgctcgcccggccccgcgggtagcgaaagcgacaatgttcccctgaggccacgacagagccggcgtgccgagatgcccaaaccccgcgcgggggccagcgactctcgcgccagtaggcccttgacttggatcaagacgggggacgggggactcccaggacgcgagcagagtgaacgaggacaagggccccgcggcgagggcatcggctctcgccggcggatgacgagctgtatcagcggacgcgcatctctctgctgcaacgcgaggccgctcaggcaatgtacatcgacagctacaacagccgcggcttcatgataaacggaaaccgcgtgctcggcccctgcgctctgctcccgcactcggtggtgcagtggaacgtgggatcccaccaggacatcaccgaagacagcttttccctcttctggttgctggagccccggatagagatcgtggtggtggggactggagaccggaccgagaggctgcagtcccaggtgcttcaagccatgaggcagcggggcattgctgtggaagtgcaggacacgcccaatgcctgtgccaccttcaacttcctgtgtcatgaaggccgagtaactggagctgctctcatccctccaccaggagggacttcacttacatctttgggccaagctgctcaatgaaccgccaggaactgacctgctgactgcactctgccaggcttcccaatgctttcactcttatctaccctttggcacttatcttgcttatcaacataataatttatacacttctccc

SEQ ID NO: 19486 - DNA, 774 bp, Homo sapiens
  source 1..774: mol_type = unassigned DNA
gcgcgctgcggagaggccaacggtcgcgcgggtgacggttagggcggggcgtgcttccgcgtctagccggagaaacttgagccggctgccccgcccacggtgcccgaagccccaaaggctggaattaggggctagaagtctggcacccaccgcctggccaggtgttcgggacgcgaccagggccccgcggcgagggcatcggctctcgccggcggatgacgagctgtatcagcggacgcgcatctctctgctgcaacgcgaggccgctcaggcaatgtacatcgacagctacaacagccgcggcttcatgataaacggaaaccgcgtgctcggcccctgcgctctgctcccgcactcggtggtgcagtggaacgtgggatcccaccaggacatcaccgaagacagcttttccctcttctggttgctggagccccggatagagatcgtggtggtggggactggagaccggaccgagaggctgcagtcccaggtgcttcaagccatgaggcagcggggcattgctgtggaagtgcaggacacgcccaatgcctgtgccaccttcaacttcctgtgtcatgaaggccgagtaactggagctgctctcatccctccaccaggagggacttcacttacatctttgggccaagctgctcaatgaaccgccaggaactgacctgctgactgcactctgccaggcttcccaatgctttcactcttatctaccctttggcacttatcttgcttatcaacataataatttatacacttctccca

SEQ ID NO: 19487 - DNA, 2399 bp, Homo sapiens
  source 1..2399: mol_type = unassigned DNA
atgctccgggtgtcccggagttgtcctgcgccggtgttcccacgtgcggcctgaacctgagcgcataatgttatgaggagatgggagcactagtgattcgcggtatcaggaatttcaacctagagaaccgagcggaacgggaaatcagcaagatgaagccctctgtcgctcccagacacccctctaccaacagcctcctgcgagagcagattagtctctatccagaagttaaaggagagattgctcgtaaagatgaaaagctgctgtcgtttctaaaagatgtgtatgttgattccaaagatcctgtgtcttccttgcaggtaaaagctgctgaaacatgtcaagagccgaaggaattcagattgccgaaagaccatcattttgatatgataaatattaagagcattcccaaaggcaaaatttccattgtagaagcattgacacttctcaataatcataagcttttcccagaaacctggactgctgagaaaataatgcaggaataccagttagaacagaaagatgtgaattctcttcttaaatattttgttacttttgaagtcgaaatcttccctcctgaagacaagaaagcaatacgatcaaaatgaagaaaatcacagaaatttcctatgtgtactcctcatccctcctgctgtatattttctcattttttgcgtaataaattatgttaattaccaaatatttaatgctctcattgtgagggcatactcttaatatttattgagctccctgacttttcaagattgccatagaatatcttttgttttattttaatttggtttaggcatatttcataagtgcatgtcagcatgactgagcacatctgtacctttattatggtgaaagagttaatttgttattttaggcacatataccaacttttaaattggtcatattaccccttgggaaatgtcctgaatccctcaactgagttttactttccaagttaggtgtttagttcattcttctcatgcgatagtgaaagtaaaagctttcctgacccttaagactgacattttctcgttagggaaagagactcgatagcagggtagactaacagtagttcccaaataaaggcacacaggagaaaatgaatcaatagaatctaattaaaattactactccagggaataagaagtattgaggatttattttattttgaattggttttaagtatggaataattgtctttacagttataaaaagtaattagtggtgtttacaaaatgttgggaatttctgctttgacagataggtaagtcccatgggaatttctgctttgacaaatagttaagtcccatggccttcagagaggcaggaagcagaaactttcaaaaaagtaacatttctctggatttaatgtggaaatagagaaaaatttaaagaataattaaaaaaccatggtagatgaaatttggtgattacatatagtttcggatgttaatgctagttgagagaagagaaaaagatagcaagtagaagcagagaacaggatcattggaagggacctgagaaattgccatttcatccattttagcaaatttaattagcatagcatgtaccagtactaggatcttgagtgagtgtgtgagtttagctctgcctaatatattactacttgggggatctttgggagactatatcttcttggagattgagtttcttctataaaataagcataatgctaccctaaatgtaagggttatcatgaagataaataataaaggactacaaaggaccaagcaaataggaattattttttgcggtggagaaacaagtgcctggggagaatatatgaccgaagattctgtagtttatgacttaaacaggcccagaatttagtttttcaaatcctagtagtgtgttttttctgtcttgccaaaaagcagcacacctcaaagaagggaaaaggtgtgaattgtgggtatattagggttattagtgcttccgagggaagataggcatcactacttcccagagatgcccctggaaatgatatagaggatgttgaagaattcaatgtgatgacggaatgaggcatttgtagtaatgctgagaacagaaaaatggactaagtggaaaatttgtaagcatgactttgaatgtagatttgttatgtgaacaaactacctagtttatttttagttcaatacaataattgttttaagaaaacatgaaataactactcaatataaaatgcattttaaaactgtaaataagtcaaaactttattctttttatcataatggtcactagctgagtcacaaatactagtacactcttctgagccatcttctttattcatatctacattgtgtggttaggcatctgttatgtggtgtcacatgataaaataaagaacttcttcccataccatt

SEQ ID NO: 19488 - DNA, 695 bp, Homo sapiens
  source 1..695: mol_type = unassigned DNA
agccgccctcggcgtcctctgtagcgggcgacctaggccgcgggacccggacggaggtagaggccagggcagcgcgtccgggagcggagtccgcgcccgccgccgccatgccggacagctgggacaaggatgtgtaccctgagcccccgcgccgcacgccggtgcagcccaatcccatcgtctacatgatgaaagcgttcgacctcatcgtggaccgacccgtgaccctcgtgagagaatttatagagcggcagcacgcaaagaacaggtattactactaccaccggcagtaccgccgcgtgccagacatcactgagtgcaaggaggaggacatcatgtgcatgtatgaagccgaaatgcagtggaagagggactacaaagtcgaccaagaaattatcaacattatgcaggatcggctcaaagcctgtcagcagagggaaggacagaactaccagcagaactgtatcaaggaagtggagcagttcacccaggtggccaaggcctaccaggaccgctatcaggacctgggggcctacagttctgccaggaagtgcctggccaaacagaggcagaggatgctgcaagagagaaaagctgcaaaagaggccgccgctgccacctcctgaggcagctgtgggtgcccctgctgtgtggctctgtatgactgttgctgaaatataaagccctgcaacctg

SEQ ID NO: 19489 - DNA, 812 bp, Homo sapiens
  source 1..812: mol_type = unassigned DNA
gacccggacggaggtagaggccagggcagcgcgtccgggagcggagtccgcgcccgccgccgccatgccggacagctgggacaaggatgtgtaccctgagcccccgcgccgcacgccggtgcagcccaatcccatcgtctacatgatgaaagcgttcgacctcatcgtggaccgacccgtgaccctcgtgagagaatttatagagcggcagcacgcaaagaacaggtattactactaccaccggcagtaccgccgcgtgccagacatcactgagtgcaaggaggaggacatcatgtgcatgtatgaagccgaaatgcagtggaagagggactacaaagtcgaccaagaaattatcaacattatgcaggatcggctcaaagcctgtcagcagagggaaggacagaactaccagcagaactgtatcaaggaagtggagcagttcacccaggtggccaaggcctaccaggaccgctgtgcgtgccccacccacccccaaccccccaccatcctcctgaggcctgggggccagaaccattgcaaatcttccctcccctcccttgtgctcacttgactttgccccctttgcatgtagcagaggcctcggttcccagcttgtttccattgcttccccagatcaggacctgggggcctacagttctgccaggaagtgcctggccaaacagaggcagaggatgctgcaagagagaaaagctgcaaaagaggccgccgctgccacctcctgaggcagctgtgggtgcccctgctgtgtggctctgtatgactgttgctgaaatataaagccctgcaacctg

SEQ ID NO: 19490 - DNA, 948 bp, Homo sapiens
  source 1..948: mol_type = unassigned DNA
tttgaagatgaaagactagcggaagctctgcctctttccccagtgggcgagggaactcggggcgattggctgggaactgtatccacccaaatgtcaccgatttcttcctatgcaggaaatgagcagacccatcaataagaaatttctcagcctggccgaaaatggttggccccacgaagccacgacaactggaggcaaagagggttgctcaacgccccgcctcattggaaaaccaaatcagatctgggacctatatagcgtggcggaggcggggcgatgattgtcgcgctcgcacccactgcagctgcgcacagtcgcatttctttccccgcccctgagaccctgcagcaccatctgtcatggcggctgggctgtttggtttgagcgctcgccgtcttttggcggcagcggcgacgcgagggctcccggccgcccgcgtccgctgggaatctagcttctccaggactgtggtcgccccgtccgctgtggcgggaaagcggcccccagaaccgaccacaccgtggcaagaggacccagaacccgaggacgaaaacttgtatgagaagaacccagactcccatggttatgacaaggaccccgttttggacgtctggaacatgcgacttgtcttcttctttggcgtctccatcatcctggtccttggcagcacctttgtggcctatctgcctgactacaggtgcacagggtgtccaagagcgtgggatgggatgaaagagtggtcccgccgcgaagctgagaggcttgtgaaataccgagaggccaatggccttcccatcatggaatccaactgcttcgaccccagcaagatccagctgccagaggatgagtgaccagttgctaagtggggctcaagaagcaccgccttccccaccccctgcctgccattctgacctcttctcagagcacctaattaaaggggctgaaagt

SEQ ID NO: 19491 - DNA, 1388 bp, Homo sapiens
  source 1..1388: mol_type = unassigned DNA
gaccagcgtcgacgctcaccttctcggcccgggctgtcaaggaagggctcccagacatcacctctgcccgccgccacctcctccaactctcccagctcagccggagccggagcgcgcaacaaccaagtccgagactggaggcagatcggggggaggggagaagcgccaagcgcgctgccctcccagggaaactcactgccgcctactcccagccggccacagtcaccagctcaaaatggcgacgacgagaagggagtcggcgctccgaccaccatccacctactaaggaagcgcgctctggccggccccggcgattggtcaccgcccgctaggggacagccctggcctcctctgattggcaagcgctggccacctccccacaccccttgcgaacgctcccctagtggagaaaaggagtagctattagccaattcggcagggcccgctttttagaagcttgatttcctttgaagatgaaagactagcggaagctctgcctctttccccagtgggcgagggaactcggggcgattggctgggaactgtatccacccaaatgtcaccgatttcttcctatgcaggaaatgagcagacccatcaataagaaatttctcagcctggccgaaaatggttggccccacgaagccacgacaactggaggcaaagagggttgctcaacgccccgcctcattggaaaaccaaatcagatctgggacctatatagcgtggcggaggcggggcgatgattgtcgcgctcgcacccactgcagctgcgcacagtcgcatttctttccccgcccctgagaccctgcagcaccatctgtcatggcggctgggctgtttggtttgagcgctcgccgtcttttggcggcagcggcgacgcgagggctcccggccgcccgcgtccgctgggaatctagcttctccaggactgtggtcgccccgtccgctgtggcgggaaagcggcccccagaaccgaccacaccgtggcaagaggacccagaacccgaggacgaaaacttgtatgagaagaacccagactcccatggttatgacaaggaccccgttttggacgtctggaacatgcgacttgtcttcttctttggcgtctccatcatcctggtccttggcagcacctttgtggcctatctgcctgactacaggatgaaagagtggtcccgccgcgaagctgagaggcttgtgaaataccgagaggccaatggccttcccatcatggaatccaactgcttcgaccccagcaagatccagctgccagaggatgagtgaccagttgctaagtggggctcaagaagcaccgccttccccaccccctgcctgccattctgacctcttctcagagcacctaattaaaggggctgaaagtctga

SEQ ID NO: 19492 - DNA, 574 bp, Homo sapiens
  source 1..574: mol_type = unassigned DNA
gcagcaccatctgtcatggcggctgggctgtttggtttgagcgctcgccgtcttttggcggcacggcgacgagggctcccggccgcccgcgtccgctgggaatctagcttctccaggactgtggtcgccccgtccgctgtggcgggaaagcggcccccagaaccgaccacaccgtggcaagaggacccagaacccgaggacgaaaacttgtatgagaagaacccagactcccatggttatgacaaggaccccgttttggacgtctggaacatgcgacttgtcttcttctttggcgtctccatcatcctggtccttggcagcacctttgtggcctatctgcctgactacaggatgaaagagtggtcccgccgcgaagctgagaggcttgtgaaataccgagaggccaatggccttcccatcatggaatccaactgcttcgaccccagcaagatccagctgccagaggatgagtgaccagttgctaagtggggctcaagaagcaccgccttccccaccccctgcctgccattctgacctcttctcagagcacctaattaaaggggctgaaagtctg

SEQ ID NO: 19493 - DNA, 755 bp, Homo sapiens
  source 1..755: mol_type = unassigned DNA
agtatgccggcagccccgccctgtgtgcggtgtctaaggattccgtccccaagcaaggacaacatattatcttccccgcccttctcttttctacagtatctgttacctcagtcagattgaggatgcacatatactgggaaaataatcgacttccagcgtccctcatgtagtctctacctgattcaggaatctctaacccagtatcggaacgttaagcggcttctccgctttcctgccgtgagaaactcgaggtgacaacctccgtttccggttggctccggttgcagagttgagtgtcctgagaggtcagattgctgtcagacatggcccatgaacatggacatgagcatggacatcataaaatggaacttccagattatagacaatggaagatagaagggacaccattagaaactatccagaagaagctggctgcaaaagggctaagggatccatggggccgcaatgaagcttggagatacatgggtggctttgcaaagagtgtttccttttctgatgtattctttaaaggattcaaatggggatttgctgcatttgtggtagctgtaggagctgaatattacctggagtccctgaataaagataagaagcatcactgaagataatacctggaagcatcatagtggtttcttaactctccaaaataagatttcttctctgtagcctacttgtctggtttatcccttacagaatattagtaagatttaatcaattaaaatatatatatatgccaa

SEQ ID NO: 19494 - DNA, 503 bp, Homo sapiens
  source 1..503: mol_type = unassigned DNA
ggttggctccggttgcagagttgagtgtcctgagaggtcagattgctgtcaggcagaagaacagcatcactaaaaacatggcccatgaacatggacatgagcatggacatcataaaatggaacttccagattatagacaatggaagatagaagggacaccattagaaactatccagaagaagctggctgcaaaagggctaagggatccatggggccgcaatgaagcttggagatacatgggtggctttgcaaagagtgtttccttttctgatgtattctttaaaggattcaaatggggatttgctgcatttgtggtagctgtaggagctgaatattacctggagtccctgaataaagataagaagcatcactgaagataatacctggaagcatcatagtggtttcttaactctccaaaataagatttcttctctgtagcctacttgtctggtttatcccttacagaatattagtaagatttaatcaattaaaatatatatata

SEQ ID NO: 19495 - DNA, 462 bp, Homo sapiens
  source 1..462: mol_type = unassigned DNA
acgaccctcccaagatgctacctggtttacgagaggttccgggaccaccaacacaccggctaccgcctttccagaccaccctcgccagctcccgtctgtagtttccgcggccgaaggagaagaaaacccctcttcatctagcactttgcctcccccaaagacagcaccgccgcctacctgtcaccctgctgtctccggcttcctaccgccgccgcctcccgcagcagcctgccaactgcagcgcaacaaccaaccctctcattggacatggcccatgaacatggacatgagcatggacatcataaaatggaacttccagattatagacaatggaagatagaagggacaccattagaaactatccagaagaagctggctgcaaaagggctaagggatccatggggccgcaatgaagcttggagatacatgggtggctttgcaaagagtgtttccttttctgat

SEQ ID NO: 19496 - DNA, 547 bp, Homo sapiens
  source 1..547: mol_type = unassigned DNA
gagtgtcctgagaggtcagattgctgtcaggtgcttgttcccgcttctgccacacgcaaaattgtctttgtttgcctttggatcgcaaaggcagaagaacagcatcactaaaaacatggcccatgaacatggacatgagcatggacatcataaaatggaacttccagattatagacaatggaagatagaagggacaccattagaaactatccagaagaagctggctgcaaaagggctaagggatccatggggccgcaatgaagcttggagatacatgggtggctttgcaaagagtgtttccttttctgatgtattctttaaaggattcaaatggggatttgctgcatttgtggtagctgtaggagctgaatattacctggagtccctgaataaagataagaagcatcactgaagataatacctggaagcatcatagtggtttcttaactctccaaaataagatttcttctctgtagcctacttgtctggtttatcccttacagaatattagtaagatttaatcaattaaaatatatatatatgccaa

SEQ ID NO: 19497 - DNA, 541 bp, Homo sapiens
  source 1..541: mol_type = unassigned DNA
actgaggggtcagtggttccgggtaggagctaggtgaccctcggctgctgcagggatctgcagcgactgcagccatgggggcccacctggtccggcgctacctgggcgatgcctcggtggagcccgaccccctgcagatgccaaccttcccgccagactacggcttccccgaacgcaaggagcgcgagatggtggccacacagcaggagatgatggacgcgcagctgaggctccagctgcgggactactgcgcccaccacctcatccggctgctcaagtgcaagcgtgacagcttccccaacttcctggcctgcaagcaggagcggcacgactgggactactgcgagcaccgcgactatgtgatgcgcatgaaggagtttgagcgggagcggaggctgctccagcggaagaagcggcgggagaagaaggcggcagagttggccaaaggccagggacccggggaagtggaccccaaggtggccctgtagggggtgcaccccccaccctatggaccagtcaaataaaagccttcaggcccctc

SEQ ID NO: 19498 - DNA, 671 bp, Homo sapiens
  source 1..671: mol_type = unassigned DNA
gaagaaggtgaagatggcggtggccagggccggggtcttgggagtccagtggctgcaaagggcatcccggaacgtgatgccgctgggcgcacggacagcctcccacatgaccaaggacatgttcccggggccctatcctaggaccccagaagaacgggccgccgccgccaagaagtataatatgcgtgtggaagactacgaaccttacccggatgatggcatggggtatggcgactacccgaagctccctgaccgctcacagcatgagagagatccatggtatagctgggaccagccgggcctgaggttgaactggggtgaaccgatgcactggcacctagacatgtacaacaggaaccgtgtggatacatcccccacacctgtttcttggcatgtcatgtgtatgcagctcttcggtttcctggctttcatgatattcatgtgctgggtgggggacgtgtaccctgtctaccagcctgtgggaccaaagcagtatccttacaataatctgtacctggaacgaggcggtgatccctccaaagaaccagagcgggtggttcactatgagatctgaggaggcttcgtgggcttttgggtcctctaactaggactccctcattcctagaaatttaaccttaatgaaatccctaataaaactcagtgctgtgtta

SEQ ID NO: 19499 - DNA, 684 bp, Homo sapiens
  source 1..684: mol_type = unassigned DNA
gaagaaggtgaagatggcggtggccagggccggggtcttgggagtccagtggctgcaaagggcatcccggaacgtgatgccgctgggcgcacggacagcctcccacatgaccaaggacatgttcccggggccctatcctaggaccccagaagaacgggccgccgccgccaagaagtataatatgcgtgtggaagactacgaaccttacccggatgatggcatggggtatggcgactacccgaagctccctgaccgctcacagcatgagagagatccatggtatagctgggaccagccgggcctgaggttgaactggggtgaaccgatgcactggcacctagacatgtacaacaggaaccgtgtggatacatcccccacacctgtttcttggcatgtcatgtgtatgcagctcttcggtttcctggctttcatgatattcatgtgctgggtgggggacgtgtaccctgtctaccagcctgtgtgtaggcaccacttctcttacaatttaggctttctctctgccttgggctgagtgaggaagaggagtgctgttcctgccttcctagcccagctgggtctgaccagaggctactgtgtacccatttaccatgcgtgattgttaactcagagtggggtgtagccaggtattgactgaatgtatgttcttgctgacctgtgtttttt

SEQ ID NO: 19500 - DNA, 713 bp, Homo sapiens
  source 1..713: mol_type = unassigned DNA
ttggcttcccaactgcgtatttaaaccccgcccctgttgaacccttcggcttttcttcactcccggcttcctccgtcacgtttggcccggctcagccgccgtgacaggcctttgcgcatgtgcagaagggaaacgtgaagaagcctcccacatgaccaaggacatgttcccggggccctatcctaggaccccagaagaacgggccgccgccgccaagaagtataatatgcgtgtggaagactacgaaccttacccggatgatggcatggggtatggcgactacccgaagctccctgaccgctcacagcatgagagagatccatggtatagctgggaccagccgggcctgaggttgaactggggtgaaccgatgcactggcacctagacatgtacaacaggaaccgtgtggatacatcccccacacctgtttcttggcatgtcatgtgtatgcagctcttcggtttcctggctttcatgatattcatgtgctgggtgggggacgtgtaccctgtctaccagcctgtgggaccaaagcagtatccttacaataatctgtacctggaacgaggcggtgatccctccaaagaaccagagcgggtggttcactatgagatctgaggaggcttcgtgggcttttgggtcctctaactaggactccctcattcctagaaatttaaccttaatgaaatccctaataaaactcagtgctgtg

SEQ ID NO: 19501 - DNA, 1234 bp, Homo sapiens
  source 1..1234: mol_type = unassigned DNA
gtgcagaagggaaacgtgaagaaggtgaagatggcggtggccagggccggggtcttgggagtccagtggctgcaaagggcatcccggaacgtgatgccgctgggcgcacggacagcctcccacatgaccaaggacatgttcccggggccctatcctaggaccccagaagaacgggccgccgccgccaagaagtataatatgcgtgtggaagactacgaaccttacccggatgatggcatggggtatggcgactacccgaagctccctgaccgctcacagcatgagagagatccatggtatagctgggaccagccgggcctgaggttgaactggggtgaaccgatgcactggcacctagacatgtacaacaggaaccgtgtggatacatcccccacacctgtttcttggcatgtcatgtgtatgcagctcttcggtttcctggctttcatgatattcatgtgctgggtgggggacgtgtaccctgtctaccagcctgtgtgtaggcaccacttctcttacaatttaggctttctctctgccttgggctgagtgaggaagaggagtgctgttcctgccttcctagcccagctgggtctgaccagaggctactgtgtacccatttaccatgcgtgattgttaactcagagtggggtgtagccaggatagaccatgaagctgaaggaacttgagcggccagctgtccaggcatggagcccagccagccaataccctttgtatctggccacaggaacatctgcccaacagctagattcctccttcagcacaaatggcacattggaaatatttgaggttgatttcagggacccttctctggacttgaaacacagaggagtcctttctgccttgagcagggcaacctcctggcttcaggggccagcgattctgaaatcttcatttgggatctgaataacttgaatgtgccaatgaccctgggatccaagtcacagcagcctccagaggacatcaaggcactgtcttggaaccggcaagcccaacacattctgtcttctgctcaccccagtggcaaggcagttgtgtgggatctcaggaagaatgaacctatcatcaaagtcagtgatcacagcaacaggatgcactgctcaggcctggcctggcatcctgacatagccacccagttagtgctgtgctcagaggatgatcgacttcccgtgattcagctgtgggacttgcgctttgcctcctcgcccttgaa

SEQ ID NO: 19502 - DNA, 711 bp, Homo sapiens
  source 1..711: mol_type = unassigned DNA
ccttccggctggccccgctcagtcacccgcagcaggcgtgcagtttcccggctctccgcgcggccggggaaggtcagcgccgtaatggcgttcttggcgtcgggaccctacctgacccatcagcaaaaggtgttgcggctttataagcgggcgctacgccacctcgagtcgtggtgcgtccagagagacaaataccgatactttgcttgtttgatgagagcccggtttgaagaacataagaatgaaaaggatatggcgaaggccacccagctgctgaaggaggccgaggaagaattctggtaccgtcagcatccacagccatacatcttccctgactctcctgggggcacctcctatgagagatacgattgctacaaggtcccagaatggtgcttagatgactggcatccttctgagaaggcaatgtatcctgattactttgccaagagagaacagtggaagaaactgcggagggaaagctgggaacgagaggttaagcagctgcaggaggaaacgccacctggtggtcctttaactgaagctttgccccctgcccgaaaggaaggtgatttgcccccactgtggtggtatattgtgaccagaccccgggagcggcccatgtagaaagagagagacctcatctttcatgcttgcaagtgaaatatgttacagaacatgcacttgccctaataaaaaatcagtgaaatggtc

SEQ ID NO: 19503 - DNA, 717 bp, Homo sapiens
  source 1..717: mol_type = unassigned DNA
gcgcgccgccggaaaggaaccctggtccggaggcggcggcgcagtgcatcctgggttggcgtagccatggcgtctcgtgtcctttcagcctatgtcagccgcctgcccgcggcctttgcgccgctgccccgggtccggatgctggccgtggcccggcctctcagcaccgctctctgctccgcggggacccagacgaggctcgggactttgcagccggccttagtgctcgcgcaggttcctggtagagttacacagttgtgccgccagtatagcgacatgcctcctttgacgttagagggcatccaggaccgtgttctttacgtattgaaactctatgacaagattgacccagagaagctttcagtaaattctcattttatgaaagacctgggcttagacagtttggaccaagtggagattatcatggccatggaagacgaatttgggtttgaaattcctgatatagatgctgaaaagttaatgtgtccacaagaaattgtagattacattgcagataagaaggatgtatatgaataaagtatcagaccctttggctttgctgagagaggactcagatgatagtgacgaatgtctggcagtgaggacacattttggcattcttgctgactctgacagagtgattctgatggacttgtatttaaattgtatgtgttttactctttgaaaataaatctataaaaccaacattttccccca

SEQ ID NO: 19504 - DNA, 411 bp, Homo sapiens
  source 1..411: mol_type = unassigned DNA
gcaagatggcgccgtccgccttgctgcgtcccctttcccggctgctggcccccgccaggctcccgagcggcccttcagtgcgatcaaagttctacgtgcgagagccgccgaatgccaaacctgactggctgaaagttgggttcaccttgggcaccactgtcttcttgtggatctatctcatcaaacaacacaatgaagatattttagagtacaaaagaagaaatgggctggaataaacttttgaaacactaatgtagtatgctccgtatagtgattgtagctgttcctctggattcaccatctgttgagttgtaaatgtgagagaaaaagttatatgtgaatatatatcaagccagcatttgtattttgcatcattaaataaaaagaaataaaaatacttctgtattcttc

SEQ ID NO: 19505 - DNA, 598 bp, Homo sapiens
  source 1..598: mol_type = unassigned DNA
ccagaaacgagaacaacggaggcagaggagctgaagactccagtatgcaactgactacaaggagatgcagtttcacatacagctgggtactccaagtgtacagttcccatcagctctaatatgacagaaggctgaggccggggtgctagagaaccttgccgtgctggaattcacgttgacgcccccacggagctctgctgcagagccctcgagtcccgcacttccggccgccaggtggcgctggttctgttgccaactcggagagactgagctgggccacgcaagatggcgccgtccgccttgctgcgtcccctttcccggctgctggcccccgccaggctcccgagcggcccttcagtgcgatcaaagttctacgtgcgagagccgccgaatgccaaacctgactggctgaaagttgggttcaccttgggcaccactgtcttcttgtggatctatctcatcaaacaacacaatgaagatattttagagtacaaaagaagaaatgggctggaataaacttttgaaacactaatgtagtatgctccgtatagtgattgtagctgttcctctggattcaccatctgttgagttgtaaatg

SEQ ID NO: 19506 - DNA, 761 bp, Homo sapiens
  source 1..761: mol_type = unassigned DNA
cctcccgagaagagtgacggggtggggctgtttcccgctcggaaactaagaaataaatgcctcatccctactccagaaacgagaacaacggaggcagaggagctgaagactccagtatgcaactgactacaaggaggtttgtgaggcttcagtatgatcgtgagtgtaagtgacagaaggctgaggccggggtgctagagaaccttgccgtgctggaattcacgttgacgcccccacggagctctgctgcagagccctcgagtcccgcacttccggccgccaggtggcgctggttctgttgccaactcggagagactgagctgggccacgcaagatggcgccgtccgccttgctgcgtcccctttcccggctgctggcccccgccaggctcccgagcggcccttcagtgcgatcaaagttctacgtgcgagagccgccgaatgccaaacctgactggctgaaagttgggttcaccttgggcaccactgtcttcttgtggatctatctcatcaaacaacacaatgaagatattttagagtacaaaagaagaaatgggctggaataaacttttgaaacactaatgtagtatgctccgtatagtgattgtagctgttcctctggattcaccatctgttgagttgtaaatgtgagagaaaaagttatatgtgaatatatatcaagccagcatttgtattttgcatcattaaataaaaagaaataaaaatacttctgtattcttcagataaagcatattgtgacaa

SEQ ID NO: 19507 - DNA, 628 bp, Homo sapiens
  source 1..628: mol_type = unassigned DNA
gagctgggccacgcaagatggcgccgtccgccttgctgcgtcccctttcccggctgctggcccccgccaggctcccgagcggcccttcagtgcgatcaaagttctacgtgcgagagccgccgaatgccaaacctgactggctgaaagttgggttcaccttgggcaccactgtcttcttgtggatctatctcatcaaacaacacaatgaagatattttagagtacaaaagaagaaatgggctggaataaacttttgaaacactaatgtacatctctgcgccggatgtcatctaacagattccctggatcatctggatcaaatatgatttattatctggttgtaggcgtcacagtcagtgctggtggatattatgcttacaagacagtcacatcagaccaagccaaacacacagaacataaaacaaatttgaaagaaaaaacaaaagcagagatacatccatttcaaggtgaaaaggagaatgttgcggaaactgagaaagcaagttcagaagccccagaagaacttatagtggaagctgaggtggtagatgctgaagaaagtcccagtgctacagttgtggtcataaaagaggcatctgcctgtccaggtcacgtggaggctgctccgg

SEQ ID NO: 19508 - DNA, 809 bp, Homo sapiens
  source 1..809: mol_type = unassigned DNA
ctcgcacactgtgtgatcatcgtttgagcccaaagtgctaaaatacaggtgtaggtgtttgagaagcgctgtagttgattatggacgaaatgcctaatttaaggagcagaggcggagtggaaaatgaaaaaagcttcaccgcagtggagacttgttaacagccctggggagaaaggggcttaacagagtctggaaatcgtgaaagagcttgaccgatgaaatgggcctggctgtcgtatcgacagaaggctgaggccggggtgctagagaaccttgccgtgctggaattcacgttgacgcccccacggagctctgctgcagagccctcgagtcccgcacttccggccgccaggtggcgctggttctgttgccaactcggagagactgagctgggccacgcaagatggcgccgtccgccttgctgcgtcccctttcccggctgctggcccccgccaggctcccgagcggcccttcagtgcgatcaaagttctacgtgcgagagccgccgaatgccaaacctgactggctgaaagttgggttcaccttgggcaccactgtcttcttgtggatctatctcatcaaacaacacaatgaagatattttagagtacaaaagaagaaatgggctggaataaacttttgaaacactaatgtagtatgctccgtatagtgattgtagctgttcctctggattcaccatctgttgagttgtaaatgtgagagaaaaagttatatgtgaatatatatcaagccagcatttgtattttgcatcattaaataaaaagaaataaaaatacttctgtattcttc

SEQ ID NO: 19509 - DNA, 1198 bp, Homo sapiens
  source 1..1198: mol_type = unassigned DNA
aagagtctcgcacactgtgtgatcatcgtttgagcccaaagtgctaaaatacaggtgtaggtgtttgagaagcgctgtagttgattatggacgaaatgcctaatttaaggagcagaggcggagtggaaaatgaaaaaagcttcaccgcagtggagacttgttaacagccctggggagaaaggggcttaacagagtctggaaatcgtgaaagagcttgaccgatgaaatgggcctggctgtcgtatcggtaatttggtgaatgttgcttaagatcagcctggaaaggtagttagtcagatccgaagtgacatatttgcactgccaaaggaggctctggaggttaaagtatgtgttttaatttcgttgttgaggccatataatgcagagttgacggaccgaccttatgagtcaccttggagcggagtagtggagacttaaagacagactaccctggagctggcttcaaactagttcttaatattgtgactcgaactccccatccccagaaattctcagatcttagaagccaaagactggcaaggatactagagggaactactcgagtaggcgaggtcagactacataccgaataggagtccttccaaaaatacagaaggctgaggccggggtgctagagaaccttgccgtgctggaattcacgttgacgcccccacggagctctgctgcagagccctcgagtcccgcacttccggccgccaggtggcgctggttctgttgccaactcggagagactgagctgggccacgcaagatggcgccgtccgccttgctgcgtcccctttcccggctgctggcccccgccaggctcccgagcggcccttcagtgcgatcaaagttctacgtgcgagagccgccgaatgccaaacctgactggctgaaagttgggttcaccttgggcaccactgtcttcttgtggatctatctcatcaaacaacacaatgaagatattttagagtacaaaagaagaaatgggctggaataaacttttgaaacactaatgtagtatgctccgtatagtgattgtagctgttcctctggattcaccatctgttgagttgtaaatgtgagagaaaaagttatatgtgaatatatatcaagccagcatttgtattttgcatcattaaataaaaagaaataaaaatacttctgtattcttcagataaagcatattgtgacaa

SEQ ID NO: 19510 - DNA, 725 bp, Homo sapiens
  source 1..725: mol_type = unassigned DNA
cctcccgagaagagtgacggggtggggctgtttcccgctcggaaactaagaaataaatgcctcatccctactccagaaacgagaacaacggaggcagaggagctgaagactccagtatgcaactgactacaaggagacagaaggctgaggccggggtgctagagaaccttgccgtgctggaattcacgttgacgcccccacggagctctgctgcagagccctcgagtcccgcacttccggccgccaggtggcgctggttctgttgccaactcggagagactgagctgggccacgcaagatggcgccgtccgccttgctgcgtcccctttcccggctgctggcccccgccaggctcccgagcggcccttcagtgcgatcaaagttctacgtgcgagagccgccgaatgccaaacctgactggctgaaagttgggttcaccttgggcaccactgtcttcttgtggatctatctcatcaaacaacacaatgaagatattttagagtacaaaagaagaaatgggctggaataaacttttgaaacactaatgtagtatgctccgtatagtgattgtagctgttcctctggattcaccatctgttgagttgtaaatgtgagagaaaaagttatatgtgaatatatatcaagccagcatttgtattttgcatcattaaataaaaagaaataaaaatacttctgtattcttcagataaagcatattgtgacaa

SEQ ID NO: 19511 - DNA, 1257 bp, Homo sapiens
  source 1..1257: mol_type = unassigned DNA
aagagtctcgcacactgtgtgatcatcgtttgagcccaaagtgctaaaatacaggtgtaggtgtttgagaagcgctgtagttgattatggacgaaatgcctaatttaaggagcagaggcggagtggaaaatgaaaaaagcttcaccgcagtggagacttgttaacagccctggggagaaaggggcttaacagagtctggaaatcgtgaaagagcttgaccgatgaaatgggcctggctgtcgtatcggtaatttggtgaatgttgcttaagatcagcctggaaaggtagttagtcagatccgaagtgacatatttgcactgccaaaggaggctctggaggttaaagtatgtgttttaatttcgttgttgaggccatataatgcagagttgacggaccgaccttatgagtcaccttggagcggagtagtggagacttaaagacagactaccctggagctggcttcaaactagttcttaatattgtgactcgaactccccatccccagaaattctcagatcttagaagccaaagactggcaaggatactagagggaactactcgagtaggcgaggtcagactacataccgaataggagtccttccaaaaatatgcagtttcacatacagctgggtactccaagtgtacagttcccatcagctctaatatgacagaaggctgaggccggggtgctagagaaccttgccgtgctggaattcacgttgacgcccccacggagctctgctgcagagccctcgagtcccgcacttccggccgccaggtggcgctggttctgttgccaactcggagagactgagctgggccacgcaagatggcgccgtccgccttgctgcgtcccctttcccggctgctggcccccgccaggctcccgagcggcccttcagtgcgatcaaagttctacgtgcgagagccgccgaatgccaaacctgactggctgaaagttgggttcaccttgggcaccactgtcttcttgtggatctatctcatcaaacaacacaatgaagatattttagagtacaaaagaagaaatgggctggaataaacttttgaaacactaatgtagtatgctccgtatagtgattgtagctgttcctctggattcaccatctgttgagttgtaaatgtgagagaaaaagttatatgtgaatatatatcaagccagcatttgtattttgcatcattaaataaaaagaaataaaaatacttctgtattcttcagataaagcatattgtgacaa

SEQ ID NO: 19512 - DNA, 5211 bp, Homo sapiens
  source 1..5211: mol_type = unassigned DNA
cacttccggcggaactgcgggtccaagttgtccttcccgcctccgggctgggccgacctcagctccgccctctggtcggctgacggaaattgccgacaaacttgtcgaatgcaaggattctagtccctccgggctttccgttctccaggcccggctgacagagttagccgaggccgccatattgaataagcgacccggcctcctagggggtcgtcgtggtccagacagtttagcagaacagcctccgcggctccggggagaagcaatatgttaaggatacctgtaagaaaggccttagtaggcctttctaagtctcctaaaggatgtgttcgaacaactgccacagcagcaagcaacttgattgaagtatttgttgatggtcagtctgtcatggtggaaccgggaacgaccgtcctccaagcttgtgagaaggttggcatgcagatccctcgattctgttatcatgaaaggttgtctgttgctggaaactgcaggatgtgccttgttgaaattgagaaagcccctaaggttgtagctgcttgtgccatgccagtaatgaagggttggaatatcctaacaaactcagaaaaatccaaaaaagccagggaaggtgtgatggagttcttattagcaaatcacccattggactgtcctatttgtgaccagggaggtgaatgtgatctgcaggaccagtccatgatgtttggaaatgataggagccgatttttagaggggaagcgtgctgtggaagacaagaacattgggccattggtaaagaccatcatgacaagatgtatacagtgtactcgctgcatcaggtttgcaagtgagattgcaggagtagatgatttgggaacaacaggcagaggaaatgatatgcaagttggcacatacattgaaaagatgttcatgtctgaactgtctgggaatatcattgatatctgccctgtaggtgccctaacctctaagccctatgcctttactgcccggccttgggaaacaagaaagacagaatccattgatgtaatggatgcggttggaagtaatattgtggttagcacaagaactggagaagtgatgaggattttgccacgtatgcatgaggacatcaatgaagagtggatctctgataaaaccagatttgcctatgatgggctaaaacgtcaaagacttaccgagccaatggtcagaaatgaaaaagggcttttaacctatacttcttgggaggatgcgctctctcgcgtagctggaatgttgcagagttttcaaggcaaagatgtggcagcaattgcaggtggcttggtggatgctgaagccctggtagctctcaaagatttgcttaatagagtggactctgacaccttatgcactgaagaggtcttccccactgcaggagctggcacagatttgcgttccaattatcttcttaatactacaattgctggtgtggaagaggcagatgttgttcttctggttggtacaaacccacgttttgaggcaccactgtttaatgctagaattcgaaagagctggctgcataatgacttaaaagtggcccttataggcagtccagtggacctcacttacacatatgaccacctgggagactcccccaaaattcttcaagacattgcttcgggaagccatccatttagccaggtcctaaaggaagctaaaaaaccaatggtggttttaggcagttctgcactccaaagaaatgatggagcagcaattcttgcagctgtttctagcattgcacaaaagattcggatgactagtggtgttactggtgattggaaagttatgaatatccttcataggattgcaagtcaagtagctgctttggaccttggctataagcctggggtggaagcaattcggaagaaccctcccaaggtgctgtttctcctgggagcagatggaggttgtatcacacgacaggatttgccaaaggattgtttcattatttatcaaggacatcatggtgatgttggggctcccatagctgatgttattctcccaggagctgcttacacagagaagtctgctacatatgtcaacactgagggtagagctcagcagactaaggtagcagtgacacctcctggcttggcaagagaagactggaaaattataagagcactctctgagattgctggaatgactcttccatatgatactctggatcaagtaaggaacagattggaagaagtctctcctaatcttgttcgatatgatgatattgaaggggctaattacttccagcaagcaaatgagctctcaaagctagtgaaccagcagcttcttgctgacccacttgttccacctcagctaactataaaagacttctacatgacagattcaattagcagagcctcacagacaatggccaaatgtgtcaaagctgtcacagagggtgcccaggcagtagaggaaccatccatatgctgaagcttctactaggatcccagttttgccgcagataattaatggacaactgtagtgcagtgatcctttacaggtttatttctttgtaaaaaaaaataataataatttgaatcatgtaatatttaaggttatactatgcctatttgaaaatgatattagttatcaactttgcagtttgaaaaacatgtattgtgtgtaaaggttaaataacaaaactatgcagatgctcttaaaagcattgataacctttgtgacgaacataaagagatccttaaattatgagttgttggcttatcttcataaataatttgtctgtaaaatggatgaaatgaaaagaggttcaattaaaacctacttttttctagtgctaaagaaaagatttaagcaccttgtcaagctgggtaaataggaaaaatacataatcatgctcagatatgtatctaggataattataattaataataatcatagtaacaatggctaatgataatttagctttattatatgtgctaagcactctggttttacatgcattatcttcttttgttcttgctacaaccctgtgagatagtagtattatctcattttactgatgaagactgaagcctaggtatattaaatagcttgcccaaggccacacagcaaaagtcaccaactcaaacctacttcttatttactccaaagcctgttgttcttaactgcaacatattatttcgtctcattaatgttgattctataggttgttacttctaaaaattagtattgagtttaatggtgaacacatttttctattttctcttgaatctgcttctataatgtcatggtgatttatgtggcttttttttttttataagttatacatgtatgcatgtatacttatgagacctcccttggaatgagggaggtctcaagagatataatttagattctcattgatgttctgtattcattatcctaacaccatctgtagtgttaaatcaactaaattatttcagcaataggagacaaaacaaccagctttcataatttttaattgtcaaaaccaaaaggaatcagaataaggatcactgagaatttaaaaaaataaaaaaggaagtaaaaattttacaattaggagataattaaaaatagataatttttttttttaatctaaggttgggtgtggtggcttacacctgtaatcccaacacttggggggccaaggtgggtggatcgcttgagcccaggcagttggagaccagtctgggcaacatggtgaaaccccatctctacaaaaaatacaaaaattagctgggtgtggtggtgtacacctatagtcccagctactcggaaggctgaggtgggaggatcacctgacccaggaggttgaggctgcagtgagccgtgattgcgccactgcattccagcctgggcaacagagcaagactttgtttcaaacaaacaaacaaaactatgttcacaatttatttgttttgtaatccttattcttttctgctttcactaaagactcagcccaagtataggatgccctttttccctttgttttttttttttttttgagatggagtcttactctgtcacccaaggctggaatgcagtggcatgatcttggctcactgcaatcaccacctccctgattcaagcgattctcctgcctcagcctccccggtagctgggattacaagcgcacgccaccacacctggctaatttttgtatttttagtagagacagggtttcaccaatttggccaggctggtcttgaactcctaacctcaggtgatctacctgccttggcctcccaaagtgctgggattacaggcgtgagccaccgcgcccagtctaggatgtcgtttttctgatacaacaaaggataaggttttagaataatagtatgttacaatatctttaaaaacagcaggtgcagtggctcacacctgtaagcccagcattttgggggttcaaggcaggaagatcagttgaggccaggagttcaagaccagcctggactgcatagcaagatcctatttgtacaaaaaaatgtaaaacttaaaattgcacaaaatttgtcacctgtaccagcttttagaactgtttatcttatcctcctcagtgatacatcatgaagttgtgtgctttgcctaaaatgcccagttacctgaaattgtataaattcttgccaaaagtgtttgaacttaatacaaacttcccatctcttacctcttagcactgtgctcatcttgaggggacatagtcccaattttgtattttatataatactgttaatgaatatgtgtagacttcatatggttgtgggtaagagaatactgcattcagatagaaaagatgctatatagctaagttgatccaggatccttgggctacctgctaggcagcttgtggtgaacaatcataatctctaaaaaataccttgtctggaccgggcgcggtggctcacacctgtaatcccagcactttggcaggctgaggcgggcagatcattgaggtcaggagtttgagaccagcctggccaacgtggtgaaaccctgtctctactaaaaatacaaaaattagccaggcatggtggcacatggctgtaatcccagctactggggaggctgaagcaggaaaatcgcttgaactgagagtcaaggcggaggtcgcggtaagccgagatcacaccattgcactgcagcctgggtgaagaaacaagcctccctctcaaaaaataaataaataaataaataatacctcctctgggataa

SEQ ID NO: 19513 - DNA, 2631 bp, Homo sapiens
  source 1..2631: mol_type = unassigned DNA
gacaaacttgtcgaatgcaaggattctagtccctccgggctttccgttctccaggcccggctgacagagttagccgaggccgccatattgaataagcgacccggcctcctagggggtcgtcgtggtccagacagtttagcagaacagcctccgcggctccggggagaagcaatatgttaaggatacctgtaagaaaggccttagtaggcctttctaagtctcctaaaggatgtggcttgtgagaaggttggcatgcagatccctcgattctgttatcatgaaaggttgtctgttgctggaaactgcaggatgtgccttgttgaaattgagaaagcccctaaggttgtagctgcttgtgccatgccagtaatgaagggttggaatatcctaacaaactcagaaaaatccaaaaaagccagggaaggtgtgatggagttcttattagcaaatcacccattggactgtcctatttgtgaccagggaggtgaatgtgatctgcaggaccagtccatgatgtttggaaatgataggagccgatttttagaggggaagcgtgctgtggaagacaagaacattgggccattggtaaagaccatcatgacaagatgtatacagtgtactcgctgcatcaggtttgcaagtgagattgcaggagtagatgatttgggaacaacaggcagaggaaatgatatgcaagttggcacatacattgaaaagatgttcatgtctgaactgtctgggaatatcattgatatctgccctgtaggtgccctaacctctaagccctatgcctttactgcccggccttgggaaacaagaaagacagaatccattgatgtaatggatgcggttggaagtaatattgtggttagcacaagaactggagaagtgatgaggattttgccacgtatgcatgaggacatcaatgaagagtggatctctgataaaaccagatttgcctatgatgggctaaaacgtcaaagacttaccgagccaatggtcagaaatgaaaaagggcttttaacctatacttcttgggaggatgcgctctctcgcgtagctggaatgttgcagagttttcaaggcaaagatgtggcagcaattgcaggtggcttggtggatgctgaagccctggtagctctcaaagatttgcttaatagagtggactctgacaccttatgcactgaagaggtcttccccactgcaggagctggcacagatttgcgttccaattatcttcttaatactacaattgctggtgtggaagaggcagatgttgttcttctggttggtacaaacccacgttttgaggcaccactgtttaatgctagaattcgaaagagctggctgcataatgacttaaaagtggcccttataggcagtccagtggacctcacttacacatatgaccacctgggagactcccccaaaattcttcaagacattgcttcgggaagccatccatttagccaggtcctaaaggaagctaaaaaaccaatggtggttttaggcagttctgcactccaaagaaatgatggagcagcaattcttgcagctgtttctagcattgcacaaaagattcggatgactagtggtgttactggtgattggaaagttatgaatatccttcataggattgcaagtcaagtagctgctttggaccttggctataagcctggggtggaagcaattcggaagaaccctcccaaggtgctgtttctcctgggagcagatggaggttgtatcacacgacaggatttgccaaaggattgtttcattatttatcaaggacatcatggtgatgttggggctcccatagctgatgttattctcccaggagctgcttacacagagaagtctgctacatatgtcaacactgagggtagagctcagcagactaaggtagcagtgacacctcctggcttggcaagagaagactggaaaattataagagcactctctgagattgctggaatgactcttccatatgatactctggatcaagtaaggaacagattggaagaagtctctcctaatcttgttcgatatgatgatattgaaggggctaattacttccagcaagcaaatgagctctcaaagctagtgaaccagcagcttcttgctgacccacttgttccacctcagctaactataaaagacttctacatgacagattcaattagcagagcctcacagacaatggccaaatgtgtcaaagctgtcacagagggtgcccaggcagtagaggaaccatccatatgctgaagcttctactaggatcccagttttgccgcagataattaatggacaactgtagtgcagtgatcctttacaggtttatttctttgtaaaaaaaaataataataatttgaatcatgtaatatttaaggttatactatgcctatttgaaaatgatattagttatcaactttgcagtttgaaaaacatgtattgtgtgtaaaggttaaataacaaaactatgcagatgctcttaaaagcattgataacctttgtgacgaacataaagagatccttaaattatgagttgttggcttatcttcataaataatttgtctgtaaaatggatgaaatgaaaagaggttcaattaaaacctacttttttctagtgct

SEQ ID NO: 19514 - DNA, 2080 bp, Homo sapiens
  source 1..2080: mol_type = unassigned DNA
atattgaataagcgacccggcctcctagggggtcgtcgtggtccagacagtttagcagaacagcctccgcggctccggggagaagcaatatgttaaggatacctgtaagaaaggccttagtaggcctttctaagtctcctaaaggatgtgggaaggtgtgatggagttcttattagcaaatcacccattggactgtcctatttgtgaccagggaggtgaatgtgatctgcaggaccagtccatgatgtttggaaatgataggagccgatttttagaggggaagcgtgctgtggaagacaagaacattgggccattggtaaagaccatcatgacaagatgtatacagtgtactcgctgcatcaggtttgcaagtgagattgcaggagtagatgatttgggaacaacaggcagaggaaatgatatgcaagttggcacatacattgaaaagatgttcatgtctgaactgtctgggaatatcattgatatctgccctgtaggtgccctaacctctaagccctatgcctttactgcccggccttgggaaacaagaaagacagaatccattgatgtaatggatgcggttggaagtaatattgtggttagcacaagaactggagaagtgatgaggattttgccacgtatgcatgaggacatcaatgaagagtggatctctgataaaaccagatttgcctatgatgggctaaaacgtcaaagacttaccgagccaatggtcagaaatgaaaaagggcttttaacctatacttcttgggaggatgcgctctctcgcgtagctggaatgttgcagagttttcaaggcaaagatgtggcagcaattgcaggtggcttggtggatgctgaagccctggtagctctcaaagatttgcttaatagagtggactctgacaccttatgcactgaagaggtcttccccactgcaggagctggcacagatttgcgttccaattatcttcttaatactacaattgctggtgtggaagaggcagatgttgttcttctggttggtacaaacccacgttttgaggcaccactgtttaatgctagaattcgaaagagctggctgcataatgacttaaaagtggcccttataggcagtccagtggacctcacttacacatatgaccacctgggagactcccccaaaattcttcaagacattgcttcgggaagccatccatttagccaggtcctaaaggaagctaaaaaaccaatggtggttttaggcagttctgcactccaaagaaatgatggagcagcaattcttgcagctgtttctagcattgcacaaaagattcggatgactagtggtgttactggtgattggaaagttatgaatatccttcataggattgcaagtcaagtagctgctttggaccttggctataagcctggggtggaagcaattcggaagaaccctcccaaggtgctgtttctcctgggagcagatggaggttgtatcacacgacaggatttgccaaaggattgtttcattatttatcaaggacatcatggtgatgttggggctcccatagctgatgttattctcccaggagctgcttacacagagaagtctgctacatatgtcaacactgagggtagagctcagcagactaaggtagcagtgacacctcctggcttggcaagagaagactggaaaattataagagcactctctgagattgctggaatgactcttccatatgatactctggatcaagtaaggaacagattggaagaagtctctcctaatcttgttcgatatgatgatattgaaggggctaattacttccagcaagcaaatgagctctcaaagctagtgaaccagcagcttcttgctgacccacttgttccacctcagctaactataaaagacttctacatgacagattcaattagcagagcctcacagacaatggccaaatgtgtcaaagctgtcacagagggtgcccaggcagtagaggaaccatccatatgctgaagcttctactaggatcccagttttgccgcagataattaatggacaactgtagtgcagtgatcctttacaggtttatttctttgt

SEQ ID NO: 19515 - DNA, 2394 bp, Homo sapiens
  source 1..2394: mol_type = unassigned DNA
atattgaataagcgacccggcctcctagggggtcgtcgtggtccagacagtttagcagaacagcctccgcggctccggggagaagcaatatgttaaggatacctgtaagaaaggccttagtaggcctttctaagtctcctaaaggatgtgttcgaacaactgccacagcagcaagcaacttgattgaagtatttgttgatggtcagtctgtcatggtggaaccgggaacgaccgtcctccaagttgtagctgcttgtgccatgccagtaatgaagggttggaatatcctaacaaactcagaaaaatccaaaaaagccagggaaggtgtgatggagttcttattagcaaatcacccattggactgtcctatttgtgaccagggaggtgaatgtgatctgcaggaccagtccatgatgtttggaaatgataggagccgatttttagaggggaagcgtgctgtggaagacaagaacattgggccattggtaaagaccatcatgacaagatgtatacagtgtactcgctgcatcaggtttgcaagtgagattgcaggagtagatgatttgggaacaacaggcagaggaaatgatatgcaagttggcacatacattgaaaagatgttcatgtctgaactgtctgggaatatcattgatatctgccctgtaggtgccctaacctctaagccctatgcctttactgcccggccttgggaaacaagaaagacagaatccattgatgtaatggatgcggttggaagtaatattgtggttagcacaagaactggagaagtgatgaggattttgccacgtatgcatgaggacatcaatgaagagtggatctctgataaaaccagatttgcctatgatgggctaaaacgtcaaagacttaccgagccaatggtcagaaatgaaaaagggcttttaacctatacttcttgggaggatgcgctctctcgcgtagctggaatgttgcagagttttcaaggcaaagatgtggcagcaattgcaggtggcttggtggatgctgaagccctggtagctctcaaagatttgcttaatagagtggactctgacaccttatgcactgaagaggtcttccccactgcaggagctggcacagatttgcgttccaattatcttcttaatactacaattgctggtgtggaagaggcagatgttgttcttctggttggtacaaacccacgttttgaggcaccactgtttaatgctagaattcgaaagagctggctgcataatgacttaaaagtggcccttataggcagtccagtggacctcacttacacatatgaccacctgggagactcccccaaaattcttcaagacattgcttcgggaagccatccatttagccaggtcctaaaggaagctaaaaaaccaatggtggttttaggcagttctgcactccaaagaaatgatggagcagcaattcttgcagctgtttctagcattgcacaaaagattcggatgactagtggtgttactggtgattggaaagttatgaatatccttcataggattgcaagtcaagtagctgctttggaccttggctataagcctggggtggaagcaattcggaagaaccctcccaaggtgctgtttctcctgggagcagatggaggttgtatcacacgacaggatttgccaaaggattgtttcattatttatcaaggacatcatggtgatgttggggctcccatagctgatgttattctcccaggagctgcttacacagagaagtctgctacatatgtcaacactgagggtagagctcagcagactaaggtagcagtgacacctcctggcttggcaagagaagactggaaaattataagagcactctctgagattgctggaatgactcttccatatgatactctggatcaagtaaggaacagattggaagaagtctctcctaatcttgttcgatatgatgatattgaaggggctaattacttccagcaagcaaatgagctctcaaagctagtgaaccagcagcttcttgctgacccacttgttccacctcagctaactataaaagacttctacatgacagattcaattagcagagcctcacagacaatggccaaatgtgtcaaagctgtcacagagggtgcccaggcagtagaggaaccatccatatgctgaagcttctactaggatcccagttttgccgcagataattaatggacaactgtagtgcagtgatcctttacaggtttatttctttgtaaaaaaaaataataataatttgaatcatgtaatatttaaggttatactatgcctatttgaaaatgatattagttatcaactttgcagtttgaaaaacatgtattgtgtgtaaaggttaaataacaaaactatgcagatgctctta

SEQ ID NO: 19516 - DNA, 2371 bp, Homo sapiens
  source 1..2371: mol_type = unassigned DNA
gagagccggcagatggggggcttttagccacggtctctggtctgatgaagcagaaaagaagatgaggatcagggggtcctcgggaacgctgtcacgaatcaatatgttaaggatacctgtaagaaaggccttagtaggcctttctaagtctcctaaaggatgtgttcgaacaactgccacagcagcaagcaacttgattgaagtatttgttgatggtcagtctgtcatggtggaaccgggaacgaccgtcctccaagcttgtgagaaggttggcatgcagatccctcgattctgttatcatgaaaggttgtctgttgctggaaactgcaggatgtgccttgttgaaattgagaaagcccctaaggttgtagctgcttgtgccatgccagtaatgaagggttggaatatcctaacaaactcagaaaaatccaaaaaagccagggaaggtgtgatggagttcttattagcaaatcacccattggactgtcctatttgtgaccagggaggtgaatgtgatctgcaggaccagtccatgatgtttggaaatgataggagccgatttttagaggggaagcgtgctgtggaagacaagaacattgggccattggtaaagaccatcatgacaagatgtatacagtgtactcgctgcatcaggtttgcaagtgagattgcaggagtagatgatttgggaacaacaggcagaggaaatgatatgcaagttggcacatacattgaaaagatgttcatgtctgaactgtctgggaatatcattgatatctgccctgtaggtgccctaacctctaagccctatgcctttactgcccggccttgggaaacaagaaagacagaatccattgatgtaatggatgcggttggaagtaatattgtggttagcacaagaactggagaagtgatgaggattttgccacgtatgcatgaggacatcaatgaagagtggatctctgataaaaccagatttgcctatgatgggctaaaacgtcaaagacttaccgagccaatggtcagaaatgaaaaagggcttttaacctatacttcttgggaggatgcgctctctcgcgtagctggaatgttgcagagttttcaaggcaaagatgtggcagcaattgcaggtggcttggtggatgctgaagccctggtagctctcaaagatttgcttaatagagtggactctgacaccttatgcactgaagaggtcttccccactgcaggagctggcacagatttgcgttccaattatcttcttaatactacaattgctggtgtggaagaggcagatgttgttcttctggttggtacaaacccacgttttgaggcaccactgtttaatgctagaattcgaaagagctggctgcataatgacttaaaagtggcccttataggcagtccagtggacctcacttacacatatgaccacctgggagactcccccaaaattcttcaagacattgcttcgggaagccatccatttagccaggtcctaaaggaagctaaaaaaccaatggtggttttaggcagttctgcactccaaagaaatgatggagcagcaattcttgcagctgtttctagcattgcacaaaagattcggatgactagtggtgttactggtgattggaaagttatgaatatccttcataggattgcaagtcaagtagctgctttggaccttggctataagcctggggtggaagcaattcggaagaaccctcccaaggtgctgtttctcctgggagcagatggaggttgtatcacacgacaggatttgccaaaggattgtttcattatttatcaaggacatcatggtgatgttggggctcccatagctgatgttattctcccaggagctgcttacacagagaagtctgctacatatgtcaacactgagggtagagctcagcagactaaggtagcagtgacacctcctggcttggcaagagaagactggaaaattataagagcactctctgagattgctggaatgactcttccatatgatactctggatcaagtaaggaacagattggaagaagtctctcctaatcttgttcgatatgatgatattgaaggggctaattacttccagcaagcaaatgagctctcaaagctagtgaaccagcagcttcttgctgacccacttgttccacctcagctaactataaaagacttctacatgacagattcaattagcagagcctcacagacaatggccaaatgtgtcaaagctgtcacagagggtgcccaggcagtagaggaaccatccatatgctgaagcttctactaggatcccagttttgccgcagataattaatggacaactgtagtgcagtgatcctttacaggtttatttctttgt

SEQ ID NO: 19517 - DNA, 569 bp, Homo sapiens
  source 1..569: mol_type = unassigned DNA
gacgtagtcttctgttgtccttgactgggcgccgcctcccgccccgccgcctcggaagcccctgagagccggcagatggggggcttttagccacggtctctggtctgatgaagcagaaaagaagatgaggatcagggggtcctcgggaacgctgtcacgaatgtaggcttgcagcaatatgttaaggatacctgtaagaaaggccttagtaggcctttctaagtctcctaaaggatgtgttcgaacaactgccacagcagcaagcaacttgattgaagtatttgttgatggtcagtctgtcatggtggaaccgggaacgaccgtcctccaagcttgtgagaaggttggcatgcagatccctcgattctgttatcatgaaaggttgtctgttgctggaaactgcaggatgtgccttgttgaaattgagaaagcccctaaggttgtagctgcttgtgccatgccagtaatgaagggttggaatatcctaacaaactcagaaaaatccaaaaaagccagggaaggtgtgatggagttcttattagcaaatcacccattggactgtcctattt

SEQ ID NO: 19518 - DNA, 2373 bp, Homo sapiens
  source 1..2373: mol_type = unassigned DNA
gagagccggcagatggggggcttttagccacggtctctggtctgatgaagcagaaaagaagatgaggatcagggggtcctcgggaacgctgtcacgaatcaatatgttaaggatacctgtaagaaaggccttagtaggcctttctaagtctcctaaaggatgtgttcgaacaactgccacagcagcaagcaacttgattgaagtatttgttgatggtcagtctgtcatggtggaaccgggaacgaccgtcctccaagcttgtgagaaggttggcatgcagatccctcgattctgttatcatgaaaggttgtctgttgctggaaactgcaggatgtgccttgttgaaattgagaaagcccctaaggttgtagctgcttgtgccatgccagtaatgaagggttggaatatcctaacaaactcagaaaaatccaaaaaagccagggaaggtgtgatggagttcttattagcaaatcacccattggactgtcctatttgtgaccagggaggtgaatgtgatctgcaggaccagtccatgatgtttggaaatgataggagccgatttttagaggggaagcgtgctgtggaagacaagaacattgggccattggtaaagaccatcatgacaagatgtatacagtgtactcgctgcatcaggtttgcaagtgagattgcaggagtagatgatttgggaacaacaggcagaggaaatgatatgcaagttggcacatacattgaaaagatgttcatgtctgaactgtctgggaatatcattgatatctgccctgtaggtgccctaacctctaagccctatgcctttactgcccggccttgggaaacaagaaagacagaatccattgatgtaatggatgcggttggaagtaatattgtggttagcacaagaactggagaagtgatgaggattttgccacgtatgcatgaggacatcaatgaagagtggatctctgataaaaccagatttgcctatgatgggctaaaacgtcaaagacttaccgagccaatggtcagaaatgaaaaagggcttttaacctatacttcttgggaggatgcgctctctcgcgtagctggaatgttgcagagttttcaaggcaaagatgtggcagcaattgcaggtggcttggtggatgctgaagccctggtagctctcaaagatttgcttaatagagtggactctgacaccttatgcactgaagaggtcttccccactgcaggagctggcacagatttgcgttccaattatcttcttaatactacaattgctggtgtggaagaggcagatgttgttcttctggttggtacaaacccacgttttgaggcaccactgtttaatgctagaattcgaaagagctggctgcataatgacttaaaagtggcccttataggcagtccagtggacctcacttacacatatgaccacctgggagactcccccaaaattcttcaagacattgcttcgggaagccatccatttagccaggtcctaaaggaagctaaaaaaccaatggtggttttaggcagttctgcactccaaagaaatgatggagcagcaattcttgcagctgtttctagcattgcacaaaagattcggatgactagtggtgttactggtgattggaaagttatgaatatccttcataggattgcaagtcaagtagctgctttggaccttggctataagcctggggtggaagcaattcggaagaaccctcccaaggtgctgtttctcctgggagcagatggaggttgtatcacacgacaggatttgccaaaggattgtttcattatttatcaaggacatcatggtgatgttggggctcccatagctgatgttattctcccaggagctgcttacacagagaagtctgctacatatgtcaacactgagggtagagctcagcagactaaggtagcagtgacacctcctggcttggcaagagaagactggaaaattataagagcactctctgagattgctggaatgactcttccatatgatactctggatcaagtaaggaacagattggaagaagtctctcctaatcttgttcgatatgatgatattgaaggggctaattacttccagcaagcaaatgagctctcaaagctagtgaaccagcagcttcttgctgacccacttgttccacctcagctaactataaaagacttctacatgacagattcaattagcagagcctcacagacaatggccaaatgtgtcaaagctgtcacagagggtgcccaggcagtagaggaaccatccatatgctgaagcttctactaggatcccagttttgccgcagataattaatggacaactgtagtgcagtgatcctttacaggtttatttctttgtaa

SEQ ID NO: 19519 - DNA, 2171 bp, Homo sapiens
  source 1..2171: mol_type = unassigned DNA
atattgaataagcgacccggcctcctagggggtcgtcgtggtccagacagtttagcagaacagcctccgcggctccggggagaagggaaggtgtgatggagttcttattagcaaatcacccattggactgtcctatttgtgaccagggaggtgaatgtgatctgcaggaccagtccatgatgtttggaaatgataggagccgatttttagaggggaagcgtgctgtggaagacaagaacattgggccattggtaaagaccatcatgacaagatgtatacagtgtactcgctgcatcaggtttgcaagtgagattgcaggagtagatgatttgggaacaacaggcagaggaaatgatatgcaagttggcacatacattgaaaagatgttcatgtctgaactgtctgggaatatcattgatatctgccctgtaggtgccctaacctctaagccctatgcctttactgcccggccttgggaaacaagaaagacagaatccattgatgtaatggatgcggttggaagtaatattgtggttagcacaagaactggagaagtgatgaggattttgccacgtatgcatgaggacatcaatgaagagtggatctctgataaaaccagatttgcctatgatgggctaaaacgtcaaagacttaccgagccaatggtcagaaatgaaaaagggcttttaacctatacttcttgggaggatgcgctctctcgcgtagctggaatgttgcagagttttcaaggcaaagatgtggcagcaattgcaggtggcttggtggatgctgaagccctggtagctctcaaagatttgcttaatagagtggactctgacaccttatgcactgaagaggtcttccccactgcaggagctggcacagatttgcgttccaattatcttcttaatactacaattgctggtgtggaagaggcagatgttgttcttctggttggtacaaacccacgttttgaggcaccactgtttaatgctagaattcgaaagagctggctgcataatgacttaaaagtggcccttataggcagtccagtggacctcacttacacatatgaccacctgggagactcccccaaaattcttcaagacattgcttcgggaagccatccatttagccaggtcctaaaggaagctaaaaaaccaatggtggttttaggcagttctgcactccaaagaaatgatggagcagcaattcttgcagctgtttctagcattgcacaaaagattcggatgactagtggtgttactggtgattggaaagttatgaatatccttcataggattgcaagtcaagtagctgctttggaccttggctataagcctggggtggaagcaattcggaagaaccctcccaaggtgctgtttctcctgggagcagatggaggttgtatcacacgacaggatttgccaaaggattgtttcattatttatcaaggacatcatggtgatgttggggctcccatagctgatgttattctcccaggagctgcttacacagagaagtctgctacatatgtcaacactgagggtagagctcagcagactaaggtagcagtgacacctcctggcttggcaagagaagactggaaaattataagagcactctctgagattgctggaatgactcttccatatgatactctggatcaagtaaggaacagattggaagaagtctctcctaatcttgttcgatatgatgatattgaaggggctaattacttccagcaagcaaatgagctctcaaagctagtgaaccagcagcttcttgctgacccacttgttccacctcagctaactataaaagacttctacatgacagattcaattagcagagcctcacagacaatggccaaatgtgtcaaagctgtcacagagggtgcccaggcagtagaggaaccatccatatgctgaagcttctactaggatcccagttttgccgcagataattaatggacaactgtagtgcagtgatcctttacaggtttatttctttgtaaaaaaaaataataataatttgaatcatgtaatatttaaggttatactatgcctatttgaaaatgatattagttatcaactttgcagtttgaaaaacatgtattgtgtgtaaaggttaaataacaaaactatgcagatgctcttaaaagcattgat

SEQ ID NO: 19520 - DNA, 2042 bp, Homo sapiens
  source 1..2042: mol_type = unassigned DNA
gccccaggagaggcagagagtgagggaaagggcctggccggcatgcacagataggatcacggtcctgggagaattcctgctcttatagtctaacctaccatggcttctcttttctcaaggctccctcatgctgccctttggccctagtggctggtttccagggctgaggggactgagtgagctgcctgagaaaagagggtagggaacagaaaagccagccaggagctgtgggaggaaacgccctcagtaaagatgaccgcggtcactgttatctaaacgcaagtgaagccgagtcacaggacccggatgttgtcagttcgacggtaaacgaccctgccagcttccaagagggcggcttcactgtgcgaataggtgagaagccaagaaggaggcgcgctggagttacttccgcccggttctccttcccgcagtctgcagccggagtaagatggcggcgctgagggctttgtgcggcttccggggcgtcgcggcccaggtgctgcggcctggggctggagtccgattgccgattcagcccagcagaggtgttcggcagtggcagccagatgtggaatgggcacagcagtttgggggagctgttatgtacccaagcaaagaaacagcccactggaagcctccaccttggaatgatgtggaccctccaaaggacacaattgtgaagaacattaccctgaactttgggccccaacacccagcagcgcatggtgtcctgcgactagtgatggaattgagtggggagatggtgcggaagtgtgatcctcacatcgggctcctgcaccgaggcactgagaagctcattgaatacaagacctatcttcaggcccttccatactttgaccggctagactatgtgtccatgatgtgtaacgaacaggcctattctctagctgtggagaagttgctaaacatccggcctcctcctcgggcacagtggatccgagtgctgtttggagaaatcacacgtttgttgaaccacatcatggctgtgaccacacatgccctggaccttggggccatgacccctttcttctggctgtttgaagaaagggagaagatgtttgagttctacgagcgagtgtctggagcccgaatgcatgctgcttatatccggccaggaggagtgcaccaggacctaccccttgggcttatggatgacatttatcagttttctaagaacttctctcttcggcttgatgagttggaggagttgctgaccaacaataggatctggcgaaatcggacaattgacattggggttgtaacagcagaagaagcacttaactatggttttagtggagtgatgcttcggggctcaggcatccagtgggacctgcggaagacccagccctatgatgtttacgaccaggttgagtttgatgttcctgttggttctcgaggggactgctatgataggtacctgtgccgggtggaggagatgcgccagtccctgagaattatcgcacagtgtctaaacaagatgcctcctggggagatcaaggttgatgatgccaaagtgtctccacctaagcgagcagagatgaagacttccatggagtcactgattcatcactttaagttgtatactgagggctaccaagttcctccaggagccacatatactgccattgaggctcccaagggagagtttggggtgtacctggtgtctgatggcagcagccgcccttatcgatgcaagatcaaggctcctggttttgcccatctggctggtttggacaagatgtctaagggacacatgttggcagatgtcgttgccatcataggtacccaagatattgtatttggagaagtagatcggtgagcaggggagcagcgtttgatcccccctgcctatcagcttcttctgtggagcctgttcctcactggaaattggcctctgtgtgtgtgtgtgtgtgtgtgtgtgtgtgtatgttcatgtacacttggctgtcaggctttctgtgcatgtactaaaaaaggagaaattataataaattagccgtcttgcggcccctaggcctaaa

SEQ ID NO: 19521 - DNA, 2064 bp, Homo sapiens
  source 1..2064: mol_type = unassigned DNA
aaaagccagccaggagctgtgggaggaaacgccctcagtaaagatgaccgcggtcactgttatctaaacgcaagtgaagccgagtcacaggacccggatgttgtcagttcgacggtaaacgaccctgccagcttccaagagggcggcttcactgtgcgaataggtgagaagccaagaaggaggcgcgctggagttacttccgcccggttctccttcccgcagtctgcagccggagtaagatggcggcgctgagggctttgtgcggcttccggggcgtcgcggcccaggtgctgcggcctggggctggagtccgattgccgattcagcccagcagaggtgttcggcagtggcagccagatgtggaatgggcacagcagtttgggggagctgttatgtacccaagcaaagaaacagcccactggaagcctccaccttggaatgatgtggaccctccaaaggacacaattgtgaagaacattaccctgaactttgggccccaacacccagcagcgcatggtgtcctgcgactagtgatggaattgagtggggagatggtgcggaagtgtgatcctcacatcgggctcctgcaccgaggcactgagaagctcattgaatacaagacctatcttcaggcccttccatactttgaccggctagactatgtgtccatgatgtgtaacgaacaggcctattctctagctgtggagaagttgctaaacatccggcctcctcctcgggcacagtggatccgagtgctgtttggagaaatcacacgtttgttgaaccacatcatggctgtgaccacacatgccctggaccttggggccatgacccctttcttctggctgtttgaagaaagggagaagatgtttgagttctacgagcgagtgtctggagcccgaatgcatgctgcttatatccggccaggaggagtgcaccaggacctaccccttgggcttatggatgacatttatcagttttctaagaacttctctcttcggcttgatgagttggaggagttgctgaccaacaataggatctggcgaaatcggacaattgacattggggttgtaacagcagaagaagcacttaactatggttttagtggagtgatgcttcggggctcaggcatccagtgggacctgcggaagacccagccctatgatgtttacgaccaggttgagtttgatgttcctgttggttctcgaggggactgctatgataggtacctgtgccgggtggaggagatgcgccagtccctgagaattatcgcacagtgtctaaacaagatgcctcctggggagatcaaggttgatgatgccaaagtgtctccacctaagcgagcagagatgaagacttccatggagtcactgattcatcactttaagttgtatactgagggctaccaagttcctccaggagccacatatactgccattgaggctcccaagggagagtttggggtgtacctggtgtctgatggcagcagccgcccttatcgatgcaagatcaaggctcctggttttgcccatctggctggtttggacaagatgtctaagggacacatgttggcagatgtcgttgccatcataggtacgaggcctattgtgtagtagaggtatcctagacaaaggagttcgggacgcccactggggacagaaggagaacacttcctgttcaccataggccatggcatggactcgggtcctcaatcttttgagcacagtaatgggttctggatcttgggtaacaccactttttttgtttgttttgcctcacaacaggaagataagtaacatcacttttttcctccatcctctcacctaggtacccaagatattgtatttggagaagtagatcggtgagcaggggagcagcgtttgatcccccctgcctatcagcttcttctgtggagcctgttcctcactggaaattggcctctgtgtgtgtgtgtgtgtgtgtgtgtgtgtgtatgttcatgtacacttggctgtcaggctttctgtgcatgtactaaaaaaggagaaattataataaattagccgtcttgcggcccctaggcct

SEQ ID NO: 19522 - DNA, 1232 bp, Homo sapiens
  source 1..1232: mol_type = unassigned DNA
gcagccggagtaagatggcggcgctgagggctttgtgcggcttccggggcgtcgcggcccaggtgctgcggcctggggctggagtccgattgccgattcagcccagcagatgtggaccctccaaaggacacaattgtgaagaacattaccctgaactttgggccccaacacccagcagcgcatggtgtcctgcgactagtgatggaattgagtggggagatggtgcggaagtgtgatcctcacatcgggctcctgcaccgaggcactgagaagctcattgaatacaagacctatcttcaggcccttccatactttgaccggctagactatgtgtccatgatgtgtaacgaacaggcctattctctagctgtggagaagttgctaaacatccggcctcctcctcgggcacagtggatccgagtgctgtttggagaaatcacacgtttgttgaaccacatcatggctgtgaccacacatgccctggaccttggggccatgacccctttcttctggctgtttgaagaaagggagaagatgtttgagttctacgagcgagtgtctggagcccgaatgcatgctgcttatatccggccaggaggagtgcaccaggacctaccccttgggcttatggatgacatttatcagttttctaagaacttctctcttcggcttgatgagttggaggagttgctgaccaacaataggatctggcgaaatcggacaattgacattggggttgtaacagcagaagaagcacttaactatggttttagtggagtgatgcttcggggctcaggcatccagtgggacctgcggaagacccagccctatgatgtttacgaccaggttgagtttgatgttcctgttggttctcgaggggactgctatgataggtaaggccccaatcctttcttggctgatattccagctagtttcccctgcctcactcttctctttgccacttccttctttaccctacttctcagtgtctgtgggagctcttgtgtgtgttagacgaggttgctctcaaaacactttcacatatatggaatcttacttatttttttcttttttgagacggagttttgctcttgttgcccaggttggaatgcaatggtgcaatctcggctcactgcaacctccgcctcctgggttcaagtgattctcctgcctcagcctcctgagtagctgggattacaggcatgagccaccacgctcagctaatttatgta

SEQ ID NO: 19523 - DNA, 875 bp, Homo sapiens
  source 1..875: mol_type = unassigned DNA
aagatggcggcgctgagggctttgtgcggcttccggggcgtcgcggcccaggtgctgcggcctggggctggagtccgattgccgattcagcccagcagaggtgttcggcagtggcagccagatgtggaatgggcacagcagtttgggggagctgttatgtacccaagcaaagaaacagcccactggaagcctccaccttggaatgatgtggaccctccaaaggacacaattgtgaagaacattaccctgaactttgggccccaacacccagcagcgcatggtgtcctgcgactagtgatggaattgagtggggagatggtgcggaagtgtgatcctcacatcgggctcctgcaccgaggcactgagaagctcattgaatacaagacctatcttcagtgctgtttggagaaatcacacgtttgttgaaccacatcatggctgtgaccacacatgccctggaccttggggccatgacccctttcttctggctgtttgaagaaagggagaagatgtttgagttctacgagcgagtgtctggagcccgaatgcatgctgcttatatccggccaggaggagtgcaccaggacctaccccttgggcttatggatgacatttatcagttttctaagaacttctctcttcggcttgatgagttggaggaggtaagctaggagtcaatgggaaaaatctctcccccacaagaagggctagagaaatacagagatatttgaagagtgtgaggaagagtattaacacaccagttttcttgatcaatagttgctgaccaacaataggatctggcgaaatcggacaattgacattggggttgtaacagcagaagaagcacttaactatggttttaggtgaggggaata

SEQ ID NO: 19524 - DNA, 958 bp, Homo sapiens
  source 1..958: mol_type = unassigned DNA
acacttccgtttccggtccgtgcccttggggctccgtgtcctgctgtctttccgtccgctgcctagtctgcatctgagtaacatggcggcggcggcggtagccaggctgtggtggcgcgggatcttgggggcctcggcgctgaccagggggactgggcgaccctccgttctgttgctgccggtgaggcgggagagcgccggggccgacacgcgccccactgtcagaccacggaatgatgtggcccacaagcagctctcagcttttggagagtatgtggctgaaatcttgcccaagtatgtccaacaagttcaggtgtcctgcttcaatgagttagaggtctgtatccatcctgatggcgtcatcccagtgctgactttcctcagggatcacaccaatgcacagttcaaatctctggttgacttgacagcagtggacgtcccaactcggcaaaaccgttttgagattgtctacaacctgttgtctctgcgcttcaactcacggatccgtgtgaagacctacacagatgagctgacgcccattgagtctgctgtctctgtgttcaaggcagccaactggtatgaaagggagatctgggacatgtttggagtcttctttgctaaccaccctgatctaagaaggatcctgacagattatggcttcgagggacatcctttccggaaagactttcctctatctggctatgttgagttacgttatgatgatgaagtgaagcgggtggtggcagagccggtggagttggcccaagagttccgcaaatttgacctgaacagcccctgggaggctttcccagtctatcgccaacccccggagagtctcaagcttgaagccggagacaagaagcctgatgccaagtagctccagggaacgcatgtggatcctagacagcgccttatctatgattgagtgtccgtgtaaataaattcctacttagactta

SEQ ID NO: 19525 - DNA, 673 bp, Homo sapiens
  source 1..673: mol_type = unassigned DNA
tttcatcctggcgtttgcctgcagcaagatggcggcggtgtcaatgtcagtggtactgaggcagacgttgtggcggagaagggcagtggctgtagctgccctttccgtttccagggttccgaccaggtcgttgaggacttccacatggagattggcacaggaccagactcaagacacacaactcataacagttgatgaaaaattggatatcactactttaactggagttccagaagagcatataaaaactagaaaagtcaggatctttgttcctgctcgcaataacatgcagtctggagtaaacaacacaaagaaatggaagatggagtttgataccagagagcgatgggaaaatcctttgatgggttgggcatcaacggctgatcccttatccaacatggttctaaccttcagtactaaagaagatgcagtttcctttgcagaaaaaaatggatggagctatgacattgaagagaggaaggttccaaaacccaagtccaagtcttatggtgcaaacttttcttggaacaaaagaacaagagtatccacaaaataggttggcactgactatatctctgcttgactgtgaataaagtcagctgtgcagtatttatagtccatgtataataaatacatctcttaatctcctaataaattggacctttaaactaca

SEQ ID NO: 19526 - DNA, 544 bp, Homo sapiens
  source 1..544: mol_type = unassigned DNA
atcctttacggcaggcgtccgcgtcgctagctagtcgttctgaagcggcggccagagaagagtcaagggcacgagcatcggccatgcctttcttggacatccagaaaaggttcggccttaacatagatcgatggttgacaatccagagtggtgaacagccctacaagatggctggtcgatgccatgcttttgaaaaagaatggatagaatgtgcacatggaatcggttatactcgggcagagaaagagtgcaagatagaatatgatgatttcgtagagtgtttgcttcggcagaaaacgatgagacgtgcaggtaccatcaggaagcagcgggataagctgataaaggaaggaaagtacacccctccacctcaccacattggcaagggggagcctcggccctgaacagagcagctgctgatgtctggaggctgattttcctgttctctgttctccactggaaaggttgtttacgacaaacctccttgtcaaagtgtgtaaaaataaaggattgctccatcctatttgttctattttctcttgga

SEQ ID NO: 19527 - DNA, 548 bp, Homo sapiens
  source 1..548: mol_type = unassigned DNA
atcctttacggcaggcgtccgcgtcgctagctagtcgttctgaagcggcggccagagaagagtcaagggcacgagcatcgggtagccatgcctttcttggacatccagaaaaggttcggccttaacatagatcgatggttgacaatccagagtggtgaacagccctacaagatggctggtcgatgccatgcttttgaaaaagaatggatagaatgtgcacatggaatcggttatactcgggcagagaaagagtgcaagatagaatatgatgatttcgtagagtgtttgcttcggcagaaaacgatgagacgtgcaggtaccatcaggaagcagcgggataagctgataaaggaaggaaagtacacccctccacctcaccacattggcaagggggagcctcggccctgaacagagcagctgctgatgtctggaggctgattttcctgttctctgttctccactggaaaggttgtttacgacaaacctccttgtcaaagtgtgtaaaaataaaggattgctccatcctatttgttctattttctcttgga

SEQ ID NO: 19528 - DNA, 1082 bp, Homo sapiens
  source 1..1082: mol_type = unassigned DNA
aaaggccagcggcgcaaaatggcggcggcgatgaccttctgccggctgctgaaccggtgtggcgaggcggcgcggagcctgcccctgggcgccaggtgtttcggggtgcgggtctcgccgaccggggagaaggtcacgcacactggccaggtttatgatgataaagactacaggagaattcggtttgtaggtcgtcagaaagaggtgaatgaaaactttgccattgatttgatagcagagcagcccgtgagcgaggtggagactcgggtgatagcgtgcgatggcggcgggggagctcttggccacccaaaagtgtatataaacttggacaaagaaacaaaaaccggcacatgcggttactgtgggctccagttcagacagcaccaccactagagcgtgtggcacgccgggggtcccgcagcatcctgtgagcatttccgcggggaagctgagcacgtgaagctcgctggttctgtgcgaagggtattcctggtgctgaataaagggtgttgctgtcaaggctgacaatttgtaagtttgtttctttcatagtctgggctttggaagtgaacatccacgtggacatgggtagacatgcgagtggaagcagtgcccgctccagtgagcctgagctgcctcctgccggccgctgcctgccttaccggctgcttctgtgtgtctcctcttatccttggggccacgtgggctgcaggaatgggcggggggcagggaaggagaaggagaagtgcctcttgttttgcagatgcaactgtgcttcagagagccaaggtgggtcttgaggtgcatagtgaaggagggtgcccaggcctcaactggtcctatgggaaggtcagcctctctcctgttgctggcttgcagagctggtctatccgtccgtcctagtccctatgttgaaatgtcagatcttaaaacccaagaatttaagcactggtttgaaggcatcgaaagtcacatactggccacattaaggacagtctatgtttttaaaagagtaaggattataatgtagtgtaacataaaaataaaagtagattttgagggaagagaaaggagtcttgcta

SEQ ID NO: 19529 - DNA, 1034 bp, Homo sapiens
  source 1..1034: mol_type = unassigned DNA
gggacgcgtggtgacttttgccctcctggaataacaagaaaatgagtgtcgcctctgtttttgtcggtccgccgcagacccgcggcccccacgtgcgcactccgatgacctttccgcctcgggtgatctgggggtgcacggcgcaacacgaccacggaggccgaaagcgcagcggaacctcccggctccaggttccggtttccgcatgcgctccgagccgctttgggcggcggccccgggaacccggagcgctaaggagaacggacctcagaggttgtctgaaggccgaggccaagatggcggtgctgtcagctcctggcctgcgcggcttccggatccttggtctgcgctccagcgtgggcccggctgtgcaggcacgaggtgtccatcagagcgtggccaccgatggcccaagcagcacccagcctgccctgccaaaggccagagccgtggctcccaaacccagcagccggggcgagtatgtggtggccaagctggatgacctcgtcaactgggcccgccggagttctctgtggcccatgaccttcggcctggcctgctgcgccgtggagatgatgcacatggcagcaccccgctacgacatggaccgctttggcgtggtcttccgcgccagcccgcgccagtccgacgtcatgatcgtggccggcacactcaccaacaagatggccccagcgcttcgcaaggtctacgaccagatgccggagccgcgctacgtggtctccatggggagctgcgccaacggaggaggctactaccactattcctactcggtggtgaggggctgcgaccgcatcgtgcccgtggacatctacatcccaggctgcccacctacggccgaggccctgctctacggcatcctgcagctgcagaggaagatcaagcgggagcggaggctgcagatctggtaccgcaggtagcgccgccgccgccgccgccggagcctgtcgccgtcctgtccccagcctgcttgtgtcccgtgaggttgtcaataaacctgccctcgggctgccgcc

SEQ ID NO: 19530 - DNA, 2818 bp, Homo sapiens
  source 1..2818: mol_type = unassigned DNA
gttgtctgaaggccgaggccaagatggcggtgctgtcagctcctggcctgcgcggcttccggatccttggtctgcgctccagcgtgggcccggctgtgcaggcacgaggtgtccatcagagcgtggccaccgatggcccaagcagcacccagcctgccctgccaaaggccagagccgtggctcccaaacccagcagccggggcgagtatgtggtggccaagctggatgacctcgtcaactgggcccgccggagttctctgtggcccatgaccttcggcctggcctgctgcgccgtggagatgatgcacatggcagcaccccgctacgacatggaccgctttggcgtggtcttccgcgccagcccgcgccagtccgacgtcatgatcgtggccggcacactcaccaacaagatggccccagcgcttcgcaaggtctacgaccagatgccggagccgcgctacgtggtctccatggggagctgcgccaacggaggaggctactaccactattcctactcggtggtgaggggctgcgaccgcatcgtgcccgtggacatctacatcccaggtagggccgggaccgcaccgcccacgagggagctggagacagggccagcgccacacggagcccggcggcccctgtgagggagtcccacacccccagcagacggcgggctcccccatcctatggatgggccgactcggagcgctgcctcttagtggagcctgtcccctgtgagaagtcggcgatgtattcaggcatcagagggatcagagggagcaggggaagctgagtggaattcctgacacacgcctggtttacagcagtttcatatggtcctacctggcacaaaccaaagacctgcagttagaaataccaagcgagaaggttcctgggggccaaggacactgtcccgcgccctcagccttacagaagggcacgcaggactccctgggacccggggtggccggatttggcaaatgaaaacgtgggaggcttagtttgactgtgaggttagggtgaatttgaccatcaggaaaactgttagtagtaattgtttagtacgagtatatcccaacaatatttgggctatactgacactaaaaagagcattggctgcatacctgaaattcacatcgcaccgggaacattctttatatctggtgatcccgtgggactcttgcacctcacgtggtcccacgagggccatccccccgggcgttcaccttgacagtggtccacggtaggcaggcttggaggtggcgctcatgtgggacaggggacagagtcctgttcttggccaccctgtgctgcgtgcggcattagctcatgcgcagagagcccagccctgagtcccgagtctgggggtttgggcaagcgagaggcacatcctggtgcctctcaaaagtggaggaacaggctctgactttggattccgcttccctggaaagggcgttgatttgttcagcgttctgcacggttcaggtcaccccgggggcagtggagagggcagcctgggcctccctgtgacttgacagcacagagaggtccatcctggggtcaggagctctgcccatgcccctggcgtcttcccctgcagtgcagaccaatggggcaagttgcgagtgtggactgtactcctccctccttgcagactgagctcctccctccctggggaccgcgctcctccctccctgcggactgtgctccctgtctggggactgcgctcctccctccttggggaccgtgctcctccctccctccctgcggaccgcgctcctccctccctggggaccgcgctcctccctccctgcggaccgcgctcggccctccctggggaccgcgcccctccctcccagcggaccgcgctcctccctccctggggacctcgctcctccctccctccctgcggactgtgctgctccctccctgcggactgtgcttctccctcccttggagcagcctggacttgccagagctctgccaggtggggcctggccgccctttcccaggccctgcagtggccttgtcctttctcacctgtttccactcctgctgtccccgttgggccctgggcttcgtcctcttgctcaagccctttgttctgaacctgcgtggcagccgggactgggggatccccagcaaagagctctggcttggggctcagaaagagggtcatcgggtcctcgtgggatgcccgggctctgggccacctcccctccctccgcccagcctccctgcctccatctccgtccagggcagccccgggccctgctccccactgctaagtgtgtctgctgagcgctggcccccattgagtcctgagggctggggccgggggccgggttagtgaggtcagcgtcttgtccgagaggtccctgtgacagcccgggatgagccacgggtggagggcagtggggccttgcccaggggaggaccccactcttcctgcagggacctcccctgcgccggctcccagtccctggcactgcgcccacccagggctgtcagcctccaccttcagaggccggcccgggaaacccttccaaagccgagccggctgcgctgtgcacgcggtcacgcgggctccggctgcgggaagcgagactgaggcaaggtccctgcaggctgcccacctacggccgaggccctgctctacggcatcctgcagctgcagaggaagatcaagcgggagcggaggctgcagatctggtaccgcaggtagcgccgccgccgccgccgccggagcctgtcgccgtcctgtccccagcctgcttgtgtcccgtgaggttgtcaataaacctgccctcgggctgcc

SEQ ID NO: 19531 - DNA, 3871 bp, Homo sapiens
  source 1..3871: mol_type = unassigned DNA
gttgtctgaaggccgaggccaagatggcggtgctgtcagctcctggcctgcgcggcttccggatccttggtctgcgctccagcgtgggcccggctgtgcaggcacgaggtgtccatcagagcgtggccaccgatggcccaagcagcacccagcctgccctgccaaaggccagagccgtggctcccaaacccagcagccggggcgagtatgtggtggccaagctggatgacctcgtcaactgggcccgccgggtgagtactatgagctgtaggccctcctcgagcgccagggcctctctgcacactcacaggcacacacatacacacaccaacgtgcagacacgtacacacacaacacatgcatgcacactcacatgcgcacatgtgcatgcaagctcacatgtatggacagatgtgtacacggaccacacgcacactcacgcacacaatgcacatatgcacactcgcacacatgcacacttgcacacacatgcacacacaagcacatgtgcacacacgcttgcacacatacacacatgcacacttgcactcatgcacactcatgcgcacatatacacatgcacacgcacactcgcacacacgtgcacatatatgcacagtcatgcacacacatgcacactcacacacatgcacacacgtccttgtgtggacacatgcatgtgtgcctgttggcatgcatgcacacaggcacactcactgatgcacacacacccctgcggccgtggagcagggcggaccctcccggaggcccctgtgctggcctggtggcctgtggttccatctgaggattcggaccctgctggagatgacccctccgtttccgtcattctctttctggcgtccgtgtgttcctcttgtttctcttttaaggtgaaagcagtgttttaagttaaaaggagcgcgtgtgaaggcagtagatccttctcggtacccgtttaaagcctcccctgcctgtggcgccagcccccacgcagcccctgccatccccctgcagcgtgagcacgtgcagctccctccagctcctgcggcacttgctgcgacagcccgggttcaacaatcccccattgatggacgttcactgtttccttttgttttttgtttcctaaacaatgccacggcgaacgtcctgccagggccgcagtggtcgagacaaggatagtttttaatgcaggatagttcttttctttttcttttcttttcttttttttttttttgagacggaggctcgctctgtcgcccaggctggagtgcagtggtgcgatctcggctcactgcatgctccgcttgccgggttctcctgcctcagcctcctaagtagctgggactacaggtgcccgccaccacgcccggctaattttttgtatttttatttttagtagagatggggtttcaccgtgttggccaggatggtctcgatctcctgacctcgtgatccgcccacctcggcctcccaaagtgctgggattacaggcgtgagccaccacgcccggctaatgcaggatagtttctaatggagggaacctgagacatggccagcggccgtcccaacacaggcttctggcgggcaggtggacctggccatttctgcccgggcagccctgcctcactctgtagcctgaccctgtcacccgccaacacatgcagcagggcccctgccaggtctcagagccgcgtgcagggagagcgggaacggtgggggaaatgagaagccacagggatggaggagaggggagggagtggccaaggagatctgagagggcttcctggaggcgtcgcacttggtatgtggacccagatctagttaacgcagagagttcccggttagacctgcgctactactcgcctgtagcccacgcgctcagagagtggctggagccccctgttgaaatggtgggacttaggatacactgggttcgaggaactatgtgatgaggacagatctcacccgtttctctctattttatgtatttgaatgtggctggtggggcgcgctttacaactcttggggcccggaggccacctgcaggagccgctgtgcctctcacctctgccggctgccgccccgggacatgagtcgggggttctgggtgctccacgtggagtctcacgctgggccacgcggggctccgggggtggcgtctgacccgagcccggcctccgcagagttctctgtggcccatgaccttcggcctggcctgctgcgccgtggagatgatgcacatggcagcaccccgctacgacatggaccgctttggcgtggtcttccgcgccagcccgcgccagtccgacgtcatgatcgtggccggcacactcaccaacaagatggccccagcgcttcgcaaggtctacgaccagatgccggagccgcgctacgtggtctccatggggagctgcgccaacggaggaggctactaccactattcctactcggtggtgaggggctgcgaccgcatcgtgcccgtggacatctacatcccaggtagggccgggaccgcaccgcccacgagggagctggagacagggccagcgccacacggagcccggcggcccctgtgagggagtcccacacccccagcagacggcgggctcccccatcctatggatgggccgactcggagcgctgcctcttagtggagcctgtcccctgtgagaagtcggcgatgtattcaggcatcagagggatcagagggagcaggggaagctgagtggaattcctgacacacgcctggtttacagcagtttcatatggtcctacctggcacaaaccaaagacctgcagttagaaataccaagcgagaaggttcctgggggccaaggacactgtcccgcgccctcagccttacagaagggcacgcaggactccctggggaccgcgcccctccctcccagcggaccgcgctcctccctccctggggacctcgctcctccctccctccctgcggactgtgctgctccctccctgcggactgtgcttctccctcccttggagcagcctggacttgccagagctctgccaggtggggcctggccgccctttcccaggccctgcagtggccttgtcctttctcacctgtttccactcctgctgtccccgttgggccctgggcttcgtcctcttgctcaagccctttgttctgaacctgcgtggcagccgggactgggggatccccagcaaagagctctggcttggggctcagaaagagggtcatcgggtcctcgtgggatgcccgggctctgggccacctcccctccctccgcccagcctccctgcctccatctccgtccagggcagccccgggccctgctccccactgctaagtgtgtctgctgagcgctggcccccattgagtcctgagggctggggccgggggccgggttagtgaggtcagcgtcttgtccgagaggtccctgtgacagcccgggatgagccacgggtggagggcagtggggccttgcccaggggaggaccccactcttcctgcagggacctcccctgcgccggctcccagtccctggcactgcgcccacccagggctgtcagcctccaccttcagaggccggcccgggaaacccttccaaagccgagccggctgcgctgtgcacgcggtcacgcgggctccggctgcgggaagcgagactgaggcaaggtccctgcaggctgcccacctacggccgaggccctgctctacggcatcctgcagctgcagaggaagatcaagcgggagcggaggctgcagatctggtaccgcaggtagcgccgccgccgccgccgccggagcctgtcgccgtcctgtccccagcctgcttgtgtcccgtgaggttgtcaataaacctgccctcgggctgccgcc

SEQ ID NO: 19532 - DNA, 754 bp, Homo sapiens
  source 1..754: mol_type = unassigned DNA
gaggccaagatggcggtgctgtcagctcctggcctgcgcggcttccggatccttggtctgcgctccagcgtgggcccggctgtgcaggcacgaggtgtccatcagagcgtggccaccgatggcccaagcagcacccagcctgccctgccaaaggccagagccgtggctcccaaacccagcagccggggcgagtatgtggtggccaagctggatgacctcgtcaactgggcccgccggagttctctgtggcccatgaccttcggcctggcctgctgcgccgtggagatgatgcacatggcagcaccccgctacgacatggaccgctttggcgtggtcttccgcgccagcccgcgccagtccgacgtcatgatcgtggccggcacactcaccaacaagatggccccagcgcttcgcaagtcttccctacgaccagatgccggagccgcgctacgtggtctccatggggagctgcgccaacggaggaggctactaccactattcctactcggtggtgaggggctgcgaccgcatcgtgcccgtggacatctacatcccaggctgcccaccacggccgaggccctgctctacggcatcctgcagctgcagaggaagatcaagcgggagcggaggctgcagatctggtaccgcaggtagcgccgccgccgccgccgccggagcctgtcgccgtcctgtccccagcctgcttgtgtcccgtgaggttgtcaataaacctgccctcgggctgccgcctccc

SEQ ID NO: 19533 - DNA, 1060 bp, Homo sapiens
  source 1..1060: mol_type = unassigned DNA
tttgtaaggtctcccagggcgccggagcgcagtgtcgtctctgtggcgcaatcggttagcgcgttcggctgttaaccgaaagacccgcggcccccacgtgcgcactccgatgacctttccgcctcgggtgatctgggggtgcacggcgcaacacgaccacggaggccgaaagcgcagcggaacctcccggctccaggttccggtttccgcatgcgctccgagccgctttgggcggcggccccgggaacccggagcgctaaggagaacggacctcagaggttgtctgaaggccgaggccaagatggcggtgctgtcagctcctggcctgcgcggcttccggatccttggtctgcgctccagcgtgggcccggctgtgcaggcacgaggtgtccatcagagcgtggccaccgatggcccaagcagcacccagcctgccctgccaaaggccagagccgtggctcccaaacccagcagccggggcgagtatgtggtggccaagctggatgacctcgtcaactgggcccgccggagttctctgtggcccatgaccttcggcctggcctgctgcgccgtggagatgatgcacatggcagcaccccgctacgacatggaccgctttggcgtggtcttccgcgccagcccgcgccagtccgacgtcatgatcgtggccggcacactcaccaacaagatggccccagcgcttcgcaaggtctacgaccagatgccggagccgcgctacgtggtctccatggggagctgcgccaacggaggaggctactaccactattcctactcggtggtgaggggctgcgaccgcatcgtgcccgtggacatctacatcccaggtagggccgggaccgcaccgcccacgagggagctggagacagggccagcgccacacggagcccggcggcccctgtgagggagtcccacacccccagcagacggcgggctcccccatcctatggatgggccgactcggagcgctgcctcttagtggagcctgtcccctgtgagaagtcggcgatgtattcaggcatcagagggatcagagggagca

SEQ ID NO: 19534 - DNA, 791 bp, Homo sapiens
  source 1..791: mol_type = unassigned DNA
acagaaaagggggaacccgctggcccaatggcagcgtcctacagtgtagcctccgcctcccgattgactggcctgcttggcaaggcaagtagcggcggcgcttcaagatgcgctgcctgaccacgcctatgctgctgcgggccctggcccaggctgcacgtgcaggacctcctggtggccggagcctccacagcagtgcagtggcagccacctacaagtatgtgaacatgcaggatcccgagatggacatgaagtcagtgactgaccgggcagcccgcaccctgctgtggactgagctcttccgaggcctgggcatgaccctgagctacctgttccgggaaccggccaccatcaactacccgttcgagaagggcccgctgagccctcgcttccgtggggagcatgcgctgcgccggtacccatccggggaggagcgttgcattgcctgcaagctctgcgaggccatctgccccgcccaggccatcaccatcgaggctgagccaagagctgatggcagccgccggaccacccgctatgacatcgacatgaccaagtgcatctactgcggcttctgccaggaggcctgtcccgtggatgccatcgtcgagggccccaactttgagttctccacggagacccatgaggagctgctgtacaacaaggagaagttgctcaacaacggggacaagtgggaggccgagatcgccgccaacatccaggctgactacttgtatcggtgacgccccaccggcccgcagcccctgctgcccaataaaaccactccgacccca

SEQ ID NO: 19535 - DNA, 620 bp, Homo sapiens
  source 1..620: mol_type = unassigned DNA
ctacagtgtagcctccgcctcccgattgactggcctgcttggcaaggcaagtagcggcggcgcttcaagggacggggttccaccatgttagccaggctggtctcaaactcctgacctcaggtgatccacctgcctcagcctcccaaagtgctgggattacaggcgtgagccaccacacccagccctagcgagtcactcaacaaactgagtcccagcgccttatttgtgcctccctcgtggagtccttatgcgctgcctgaccacgcctatgctgctgcgggccctggcccaggctgcacgtgcaggacctcctggtggccggagcctccacagcagtgcagtggcagccacctacaagtatgtgaacatgcaggatcccgagatggacatgaagtcagtgactgaccgggcagcccgcaccctgctgtggactgagctcttccgaggcctgggcatgaccctgagctacctgttccgggaaccggccaccatcaactacccgttcgagaagggcccgctgagccctcgcttccgtggggagcatgcgctgcgccggtacccatccggggaggagcgttgcattgcctgcaagctctgcgaggccatctgccccgcccagg

SEQ ID NO: 19536 - DNA, 515 bp, Homo sapiens
  source 1..515: mol_type = unassigned DNA
ggaaggtgctgggttgggtccctggaactgcagtcagtgatccaaaggagtgggcctgttagggggttcacaggtcgtgggatgagctcttatgagcgccggctaagtgccgggctctggggtgcccttggcatgtacgggctcccctaattcccaagaccaaccgcccccaacccacttcatagatgcgctgcctgaccacgcctatgctgctgcgggccctggcccaggctgcacgtgcaggacctcctggtggccggagcctccacagcagtgcagtggcagccacctacaagtatgtgaacatgcaggatcccgagatggacatgaagtcagtgactgaccgggcagcccgcaccctgctgtggactgagctcttccgaggcctgggcatgaccctgagctacctgttccgggaaccggccaccatcaactacccgttcgagaagggcccgctgagccctcgcttccgtggggagcatgcgctgcgccggtacccatccggggaggagcgt

SEQ ID NO: 19537 - DNA, 689 bp, Homo sapiens
  source 1..689: mol_type = unassigned DNA
cacgttttggccgtgaaagtcgggcttgggcagcgtggcgtcgggggcgagtgtggtgtccccgttggcgccgccagctctgcgcctgggcttcccctcggctcactcaggatccgcggcctccgtgtccttcagatgcgctgcctgaccacgcctatgctgctgcgggccctggcccaggctgcacgtgcaggacctcctggtggccggagcctccacagcagtgcagtggcagccacctacaagtatgtgaacatgcaggatcccgagatggacatgaagtcagtgactgaccgggcagcccgcaccctgctgtggactgagctcttccgaggcctgggcatgaccctgagctacctgttccgggaaccggccaccatcaactacccgttcgagaagggcccgctgagccctcgcttccgtggggagcatgcgctgcgccggtacccatccggggaggagcgttgcattgcctgcaagctctgcgaggccatctgccccgcccaggccatcaccatcgaggctgagccaagagctgatggcagccgccggaccacccgctatgacatcgacatgaccaagtgcatctactgcggcttctgccaggaggcctgtcccgtggatgccatcgtcgagggccccaactttgagttctccacggagacccatgaggagctgctgtacaacaa

SEQ ID NO: 19538 - DNA, 353 bp, Homo sapiens
  source 1..353: mol_type = unassigned DNA
gattgactggcctgcttggcaaggcaagtagcggcggcgcttcaaggccatcaccatcgaggctgagccaagagctgatggcagccgccggaccacccgctatgacatcgacatgaccaagtgcatctactgcggcttctgccaggaggcctgtcccgtggatgccatcgtcgagggccccaactttgagttctccacggagacccatgaggagctgctgtacaacaaggagaagttgctcaacaacggggacaagtgggaggccgagatcgccgccaacatccaggctgactacttgtatcggtgacgccccaccggcccgcagcccctgctgcccaataaaaccactccga

SEQ ID NO: 19539 - DNA, 1596 bp, Homo sapiens
  source 1..1596: mol_type = unassigned DNA
gaagttgaaggggcgcagcgataccggtgcgcggcgctggcgtcgggcgcgtgacgtctttcctgcgcgccacctagcgtctctatcgcgccagttcctcagcctcagtgctatgaaggtgacagcgtgaggtgacccatctggcccgccgcgatgctggcaacacggcggctgctcggctggtcgcttcccgcgcgggtatctgtgcgtttcagcggcgacacgacagcacccaagaaaacctcatttggctcgctgaaggatgaagaccggattttcaccaacctgtacggccgccatgactggaggctgaaaggttccctgagtcgaggtgactggtacaagacaaaggagatcctgctgaaggggcccgactggatcctgggcgagatcaagacatcgggtttgaggggccgtggaggcgctggcttccccactggcctcaagtggagcttcatgaataagccctcagatggcaggcccaagtatctggtggtgaacgcagacgagggggagccgggcacctgcaaggaccgggagatcttacgccatgatcctcacaagctgctggaaggctgcctggtggggggccgggccatgggcgcccgcgctgcctatatctacatccgaggggaattctacaatgaggcctccaatctgcaggtggccatccgagaggcctatgaggcaggtctgattggcaagaatgcttgtggctctggctatgattttgacgtgtttgtggtgcgcggggctggggcctacatctgtggagaggagacagcgctcatcgagtccattgagggcaagcagggcaagccccgcctgaagccccccttccccgcagacgtgggagtgtttggctgccccacaactgtggccaacgtggagacagtggcagtgtcccccacaatctgccgccgtggaggtacctggtttgctggctttggcagagaacgcaactcaggcaccaaactattcaacatctctggccatgtcaaccacccttgcactgtggaggaggagatgtctgtgcccttgaaagaactgattgagaagcatgctgggggtgtcacgggcggctgggacaacctccttgctgtgatccctggcggctcgtctaccccactgatccccaagtctgtgtgtgagacggtgctgatggacttcgatgcgctggtgcaggcacagacaggcctgggcacagctgcggtgatcgtcatggaccgctcgacggacatcgtgaaagccatcgcccgcctcattgagttctataagcacgagagctgtggccagtgtaccccatgccgtgagggtgtggactggatgaacaaggtgatggcacgtttcgtgaggggggatgcccggccggccgagatcgactccctgtgggagatcagcaagcagatagaaggccatacgatttgtgctctgggtgacggggccgcctggcctgtgcagggtctgatccgccactttcggccggagctcgaggagcggatgcagcggtttgcccagcagcatcaggcccggcaggctgcctcttagcccaccaccctggcctgctgtcctgcgtctatccatgtggaatgctgg

SEQ ID NO: 19540 - DNA, 1512 bp, Homo sapiens
  source 1..1512: mol_type = unassigned DNA
agttcctcagcctcagtgctatgaaggtgacagcgtgaggtgacccatctggcccgccgcgatgctggcaacacggcggctgctcggctggtcgcttcccgcgcgggtatctacagcacccaagaaaacctcatttggctcgctgaaggatgaagaccggattttcaccaacctgtacggccgccatgactggaggctgaaaggttccctgagtcgaggtgactggtacaagacaaaggagatcctgctgaaggggcccgactggatcctgggcgagatcaagacatcgggtttgaggggccgtggaggcgctggcttccccactggcctcaagtggagcttcatgaataagccctcagatggcaggcccaagtatctggtggtgaacgcagacgagggggagccgggcacctgcaaggaccgggagatcttacgccatgatcctcacaagctgctggaaggctgcctggtggggggccgggccatgggcgcccgcgctgcctatatctacatccgaggggaattctacaatgaggcctccaatctgcaggtggccatccgagaggcctatgaggcaggtctgattggcaagaatgcttgtggctctggctatgattttgacgtgtttgtggtgcgcggggctggggcctacatctgtggagaggagacagcgctcatcgagtccattgagggcaagcagggcaagccccgcctgaagccccccttccccgcagacgtgggagtgtttggctgccccacaactgtggccaacgtggagacagtggcagtgtcccccacaatctgccgccgtggaggtacctggtttgctggctttggcagagaacgcaactcaggcaccaaactattcaacatctctggccatgtcaaccacccttgcactgtggaggaggagatgtctgtgcccttgaaagaactgattgagaagcatgctgggggtgtcacgggcggctgggacaacctccttgctgtgatccctggcggctcgtctaccccactgatccccaagtctgtgtgtgagacggtgctgatggacttcgatgcgctggtgcaggcacagacaggcctgggcacagctgcggtgatcgtcatggaccgctcgacggacatcgtgaaagccatcgcccgcctcattgagttctataagcacgagagctgtggccagtgtaccccatgccgtgagggtgtggactggatgaacaaggtgatggcacgtttcgtgaggggggatgcccggccggccgagatcgactccctgtgggagatcagcaagcagatagaaggccatacgatttgtgctctgggtgacggggccgcctggcctgtgcagggtctgatccgccactttcggccggagctcgaggagcggatgcagcggtttgcccagcagcatcaggcccggcaggctgcctcttagcccaccaccctggcctgctgtcctgcgtctatccatgtggaatgctggacaataaagcgagtgctgcccaccctcca

SEQ ID NO: 19541 - DNA, 1131 bp, Homo sapiens
  source 1..1131: mol_type = unassigned DNA
agtgctatgaaggtgacagcgtgaggtgacccatctggcccgccgcgatgctggcaacacggcggctgctcggctggtcgcttcccgcgcgggtatctgtgcgtttcagcggcgacacgacagcacccaagaaaacctcatttggctcgctgaaggatgaagaccggattttcaccaacctgtacggccgccatgactggaggctgaaaggttccctgagtcgaggtgactggtacaagacaaaggagatcctgctgaaggggcccgactggatcctgggcgagatcaagacatcgggtttgaggggccgtggaggcgctggcttccccactggcctcaagtggagcttcatgaataagccctcagatggcagccccacaactgtggccaacgtggagacagtggcagtgtcccccacaatctgccgccgtggaggtacctggtttgctggctttggcagagaacgcaactcaggcaccaaactattcaacatctctggccatgtcaaccacccttgcactgtggaggaggagatgtctgtgcccttgaaagaactgattgagaagcatgctgggggtgtcacgggcggctgggacaacctccttgctgtgatccctggcggctcgtctaccccactgatccccaagtctgtgtgtgagacggtgctgatggacttcgatgcgctggtgcaggcacagacaggcctgggcacagctgcggtgatcgtcatggaccgctcgacggacatcgtgaaagccatcgcccgcctcattgagttctataagcacgagagctgtggccagtgtaccccatgccgtgagggtgtggactggatgaacaaggtgatggcacgtttcgtgaggggggatgcccggccggccgagatcgactccctgtgggagatcagcaagcagatagaaggccatacgatttgtgctctgggtgacggggccgcctggcctgtgcagggtctgatccgccactttcggccggagctcgaggagcggatgcagcggtttgcccagcagcatcaggcccggcaggctgcctcttagcccaccaccctggcctgctgtcctgcgtctatccatgtggaatgctggacaataaagcgagtgctgcccaccctcc

SEQ ID NO: 19542 - DNA, 1503 bp, Homo sapiens
  source 1..1503: mol_type = unassigned DNA
cgccagttcctcagcctcagtgctatgaaggtgacagcgtgaggtgacccatctggcccgccgcgatgctggcaacacggcggctgctcggctggtcgcttcccgcgcggacagcacccaagaaaacctcatttggctcgctgaaggatgaagaccggattttcaccaacctgtacggccgccatgactggaggctgaaaggttccctgagtcgaggtgactggtacaagacaaaggagatcctgctgaaggggcccgactggatcctgggcgagatcaagacatcgggtttgaggggccgtggaggcgctggcttccccactggcctcaagtggagcttcatgaataagccctcagatggcaggcccaagtatctggtggtgaacgcagacgagggggagccgggcacctgcaaggaccgggagatcttacgccatgatcctcacaagctgctggaaggctgcctggtggggggccgggccatgggcgcccgcgctgcctatatctacatccgaggggaattctacaatgaggcctccaatctgcaggtggccatccgagaggcctatgaggcaggtctgattggcaagaatgcttgtggctctggctatgattttgacgtgtttgtggtgcgcggggctggggcctacatctgtggagaggagacagcgctcatcgagtccattgagggcaagcagggcaagccccgcctgaagccccccttccccgcagacgtgggagtgtttggctgccccacaactgtggccaacgtggagacagtggcagtgtcccccacaatctgccgccgtggaggtacctggtttgctggctttggcagagaacgcaactcaggcaccaaactattcaacatctctggccatgtcaaccacccttgcactgtggaggaggagatgtctgtgcccttgaaagaactgattgagaagcatgctgggggtgtcacgggcggctgggacaacctccttgctgtgatccctggcggctcgtctaccccactgatccccaagtctgtgtgtgagacggtgctgatggacttcgatgcgctggtgcaggcacagacaggcctgggcacagctgcggtgatcgtcatggaccgctcgacggacatcgtgaaagccatcgcccgcctcattgagttctataagcacgagagctgtggccagtgtaccccatgccgtgagggtgtggactggatgaacaaggtgatggcacgtttcgtgaggggggatgcccggccggccgagatcgactccctgtgggagatcagcaagcagatagaaggccatacgatttgtgctctgggtgacggggccgcctggcctgtgcagggtctgatccgccactttcggccggagctcgaggagcggatgcagcggtttgcccagcagcatcaggcccggcaggctgcctcttagcccaccaccctggcctgctgtcctgcgtctatccatgtggaatgctggacaataaagcgagtgctgccca

SEQ ID NO: 19543 - DNA, 1493 bp, Homo sapiens
  source 1..1493: mol_type = unassigned DNA
gcgtgacgtctttcctgcgcgccacctagcgtctctatcgcgccagttcctcagcctcagtgctatgaaggtgacagcgtgaggtgacccatctggcccgccgcgatgctggcaacacggcggctgctcggctggtcgcttcccgcgcgggtatctgtgcgtttcagcggcgacacggctgaaaggttccctgagtcgaggtgactggtacaagacaaaggagatcctgctgaaggggcccgactggatcctgggcgagatcaagacatcgggtttgaggggccgtggaggcgctggcttccccactggcctcaagtggagcttcatgaataagccctcagatggcaggcccaagtatctggtggtgaacgcagacgagggggagccgggcacctgcaaggaccgggagatcttacgccatgatcctcacaagctgctggaaggctgcctggtggggggccgggccatgggcgcccgcgctgcctatatctacatccgaggggaattctacaatgaggcctccaatctgcaggtggccatccgagaggcctatgaggcaggtctgattggcaagaatgcttgtggctctggctatgattttgacgtgtttgtggtgcgcggggctggggcctacatctgtggagaggagacagcgctcatcgagtccattgagggcaagcagggcaagccccgcctgaagccccccttccccgcagacgtgggagtgtttggctgccccacaactgtggccaacgtggagacagtggcagtgtcccccacaatctgccgccgtggaggtacctggtttgctggctttggcagagaacgcaactcaggcaccaaactattcaacatctctggccatgtcaaccacccttgcactgtggaggaggagatgtctgtgcccttgaaagaactgattgagaagcatgctgggggtgtcacgggcggctgggacaacctccttgctgtgatccctggcggctcgtctaccccactgatccccaagtctgtgtgtgagacggtgctgatggacttcgatgcgctggtgcaggcacagacaggcctgggcacagctgcggtgatcgtcatggaccgctcgacggacatcgtgaaagccatcgcccgcctcattgagttctataagcacgagagctgtggccagtgtaccccatgccgtgagggtgtggactggatgaacaaggtgatggcacgtttcgtgaggggggatgcccggccggccgagatcgactccctgtgggagatcagcaagcagatagaaggccatacgatttgtgctctgggtgacggggccgcctggcctgtgcagggtctgatccgccactttcggccggagctcgaggagcggatgcagcggtttgcccagcagcatcaggcccggcaggctgcctcttagcccaccaccctggcctgctgtcctgcgtctatccatgtggaatgctggacaataaagcgagtgctgcccaccctcc

SEQ ID NO: 19544 - DNA, 930 bp, Homo sapiens
  source 1..930: mol_type = unassigned DNA
gcgtgccgtccgggtcgcctaggcctggggtcgggagcgcgcacgctgtgcgccctgggcgcgctcgggattctcgcctggcgcggctggggaaggtgaacagtgtggcccgccatgttcttctccgcggcgctccgggcccgggcggctggcctcaccgcccactggggaagacatgtaaggaatttgcataagacagttatgcaaaatggagctggaggagctttatttgtgcacagagatactcctgagaataaccctgatactccatttgatttcacaccagaaaactataagaggatagaggcaattgtaaaaaactatccagaaggccataaagcagcagctgttcttccagtcctggatttagcccaaaggcagaatgggtggttgcccatctctgctatgaacaaggttgcagaagttttacaagtacctccaatgagagtatatgaagtagcaactttttatacaatgtataatcgaaagccagttggaaagtatcacattcaggtctgcactactacaccctgcatgcttcgaaactctgacagcatactggaggccattcagaaaaagcttggaataaaggttggggagactacacctgacaaacttttcactcttatagaagtggaatgtttaggggcctgtgtgaacgcaccaatggttcaaataaatgacaattactatgaggatttgacagctaaggatattgaagaaattattgatgagctcaaggctggcaaaatcccaaaaccagggccaaggagtggacgcttctcttgtgagccagctggaggtcttacctctttgactgaaccacccaagggacctggatttggtgtacaagcaggcctttaatttatattgaactgtaaatatgtcactagagaaataaaatatggacttccaatctacgtaaactta

SEQ ID NO: 19545 - DNA, 1045 bp, Homo sapiens
  source 1..1045: mol_type = unassigned DNA
ggctgttcaggcgcgggtgcgcgcgcagctgctgtggccctgcttggtgcgcccgctgtcaccgccatggctgccccgtgtttgctgcggcaaggacgagccggggcgctgaagactatgctccaggaagcccaggtgtttcgaggacttgcttctacggtttctttgtctgcggaatcagggaagagtgaaaagggtcagccacagaattccaagaagcaaagtccaccaaaaaagccagccccagtgcctgctgagccgtttgacaacactacctacaagaacctgcagcatcatgactacagcacgtacaccttcttagacctcaacctcgaactctcaaaattcaggatgcctcagccctcctcaggccgggagtcacctcgacactgagggccctcggtgtgaagatgaaccttccaccgtcttcactgcatcctggagtgcaaaaataaaatccactcaagagtcacaaggcccgctgtgcataatcggtttcacttttacctttttttttttttttttttttttgagacagggtctcactctgtcacccaggctggagtgcagtggcacattctcggctcactgcaacttccgcctcctgggttcaagtgattctcccacctcagcctcccaagtaggtgggattacaggtactcaccaccaggtccagctaacttttgtatttttagtagagacagggtttcaccatgttggccaggctggtctcgaactcctgacctcagatggtctgcccacctccgcctcccaaagtgctgggattacaggcgtgagccactgcgcccggccactttcacactttttacagtgagtggtgaattagcaacagtaacactgattatccaacatatattttggaatatctactatgtgcaaggaatttttcttaaactctaaggttatgaatcactgggcaaatccatataattagagaattttaagtgctttagagcggtgtgattctactgtgctcagcctagtcaatttcgcattaaactgattatcagctgagtatcaataa

SEQ ID NO: 19546 - DNA, 1575 bp, Homo sapiens
  source 1..1575: mol_type = unassigned DNA
ggcggctgttcaggcgcgggtgcgcgcgcagctgctgtggccctgcttggtgcgcccgctgtcaccgccatggctgccccgtgtttgctgcggcaaggacgagccggggcgctgaagactatgctccaggaagcccaggtgtttcgaggacttgcttctacggtttctttgtctgcggaatcagggaagagtgaaaagggtcagccacagaattccaagaagcaaagtccaccaaaaaatgtagtggaaccaaaggagaggggcaagctcctagccacccagacagcagctgaattgtctaaaaacttatcttcacccagttcttacccgccagctgtgaataagggcaggaaggtagctagtcccagtcccagtggcagcgtgctattcacagatgaaggggttccgaaatttttgtcaagaaagactttggtagagtttccacagaaagttctgtctccattcagaaaacagggctctgattcagaagctcgtcaggtgggtcggaaagtgacgtcgccttcgtcttcatcctcttccagctcctctgattctgaatctgatgatgaggctgacgtttcagaggtcactcctcgagtggtgagcaaaggcagaggggggcttcgaaaaccagaggcctctcattcctttgaaaacagagccccccgagttacagtatcagcaaaagagaaaaccttgctgcagaagccgcatgtggacattactgatccagagaagccccaccagccaaagaagaaagggtcccctgctaagccatcagaaggcagggaaaatgcgagaccaaaaaccacaatgcccagatctcaagtagatgaagagtttttgaagcaaagtttaaaggaaaaacaattgcagaaaacatttagattaaatgaaatagataaagaaagccaaaagccatttgaagttaaaggacccttacctgtccacacaaaatcagggttgtctgcgccaccgaagggcagcccagcgcctgctgtgttggcagaagaggccagagcagaggggcagctgcaagccagtcctcctggggcggcagaggggcatctggaaaaacccgtgccagagccccagcgcaaggcggcccctcccctgcccagaaaggaaacctcagggacgcagggaatagaaggccacctgaagggtggacaggcaatcgtggaagatcagataccaccaagcaatttggagacagttcctgttgagaataaccacggtttccatgaaaagacagcagcgctgaagcttgaggccgagggcgaggccatggaagatgcagccgcgccaggggacgaccgaggcggcacacaggagccagccccagtgcctgctgagccgtttgacaacactacctacaagaacctgcagcatcatgactacagcacgtacaccttcttagacctcaacctcgaactctcaaaattcaggatgcctcagccctcctcaggccgggagtcacctcgacactgagggccctcggtgtgaagatgaaccttccaccgtcttcactgcatcctggagtgcaaaaataaaatccactcaagagtcacaagg

SEQ ID NO: 19547 - DNA, 985 bp, Homo sapiens
  source 1..985: mol_type = unassigned DNA
agactatgctccaggaagcccaggtgtttcgaggacttgcttctacggtttctttgtctgcggaatcagggaagagtgaaaagggtcagccacagaattccaagaagcaaagtccaccaaaaagtgtccctacaccacaccgaagatactcaccttgtggagattggaaggatgccagctctttaaagccagccccagtgcctgctgagccgtttgacaacactacctacaagaacctgcagcatcatgactacagcacgtacaccttcttagacctcaacctcgaactctcaaaattcaggatgcctcagccctcctcaggccgggagtcacctcgacactgagggccctcggtgtgaagatgaaccttccaccgtcttcactgcatcctggagtgcaaaaataaaatccactcaagagtcacaaggcccgctgtgcataatcggtttcacttttacctttttttttttttttttttttttgagacagggtctcactctgtcacccaggctggagtgcagtggcacattctcggctcactgcaacttccgcctcctgggttcaagtgattctcccacctcagcctcccaagtaggtgggattacaggtactcaccaccaggtccagctaacttttgtatttttagtagagacagggtttcaccatgttggccaggctggtctcgaactcctgacctcagatggtctgcccacctccgcctcccaaagtgctgggattacaggcgtgagccactgcgcccggccactttcacactttttacagtgagtggtgaattagcaacagtaacactgattatccaacatatattttggaatatctactatgtgcaaggaatttttcttaaactctaaggttatgaatcactgggcaaatccatataattagagaattttaagtgctttagagcggtgtgattctactgtgctcagcctagtcaatttcgcattaaactgattatcagctg

SEQ ID NO: 19548 - DNA, 1734 bp, Homo sapiens
  source 1..1734: mol_type = unassigned DNA
ggacctctccagaatccggattgctgaatcttccctgttgcctagaagggctccaaaccacctcttgacaatgggaaactgggtggttaaccactggttttcagttttgtttctggttgtttggttagggctgaatgttttcctgtttgtggatgccttcctgaaatatgagaaggccgacaaatactactacacaagaaaaatccttgggtcaacattggcctgtgcccgagcgtctgctctctgcttgaattttaacagcacgctgatcctgcttcctgtgtgtcgcaatctgctgtccttcctgaggggcacctgctcattttgcagccgcacactgagaaagcaattggatcacaacctcaccttccacaagctggtggcctatatgatctgcctacatacagctattcacatcattgcacacctgtttaactttgactgctatagcagaagccgacaggccacagatggctcccttgcctccattctctccagcctatctcatgatgagaaaaaggggggttcttggctaaatcccatccagtcccgaaacacgacagtggagtatgtgacattcaccagcattgctggtctcactggagtgatcatgacaatagccttgattctcatggtaacttcagctactgagttcatccggaggagttattttgaagtcttctggtatactcaccacctttttatcttctatatccttggcttagggattcacggcattggtggaattgtccggggtcaaacagaggagagcatgaatgagagtcatcctcgcaagtgtgcagagtcttttgagatgtgggatgatcgtgactcccactgtaggcgccctaagtttgaagggcatccccctgagtcttggaagtggatccttgcaccggtcattctttatatctgtgaaaggatcctccggttttaccgctcccagcagaaggttgtgattaccaaggttgttatgcacccatccaaagttttggaattgcagatgaacaagcgtggcttcagcatggaagtggggcagtatatctttgttaattgcccctcaatctctctcctggaatggcatccttttactttgacctctgctccagaggaagatttcttctccattcatatccgagcagcaggggactggacagaaaatctcataagggctttcgaacaacaatattcaccaattcccaggattgaagtggatggtccctttggcacagccagtgaggatgttttccagtatgaagtggctgtgctggttggagcaggaattggggtcaccccctttgcttctatcttgaaatccatctggtacaaattccagtgtgcagaccacaacctcaaaacaaaaaaggttggtcatgcagcattaaactttgacaaggccactgacatcgtgacaggtctgaaacagaaaacctcctttgggagaccaatgtgggacaatgagttttctacaatagctacctcccaccccaagtctgtagtgggagttttcttatgtggccctcggactttggcaaagagcctgcgcaaatgctgtcaccgatattccagtctggatcctagaaaggttcaattctacttcaacaaagaaaatttttgagttataggaataaggacggtaatctgcattttgtctctttgtatcttcagtaatttacttggtctcgtcaggtttgagcagtcactttaggataagaatgtgcctctcaagccttg

SEQ ID NO: 19549 - DNA, 1679 bp, Homo sapiens
  source 1..1679: mol_type = unassigned DNA
gctgatagcacagttctgtccagagaaggaaggcagaataaacttattcattcccaggaactcttggggtaggtgtgtgtttttcacatcttaaaggctcacagaccctgcgctggacaaatgttccattcctgaaggacctctccagaatccggattgctgaatcttccctgttgcctagaagggctccaaaccacctcttgacaatgggaaactgggtggttaaccactggttttcagttttgtttctggttgtttggttagggctgaatgttttcctgtttgtggatgccttcctgaaatatgagaaggccgacaaatactactacacaagaaaaatccttgggtcaacattggcctgtgcccgagcgtctgctctctgcttgaattttaacagcacgctgatcctgcttcctgtgtgtcgcaatctgctgtccttcctgaggggcacctgctcattttgcagccgcacactgagaaagcaattggatcacaacctcaccttccacaagctggtggcctatatgatctgcctacatacagctattcacatcattgcacacctgtttaactttgactgctatagcagaagccgacaggccacagatggctcccttgcctccattctctccagcctatctcatgatgagaaaaaggggggttcttggctaaatcccatccagtcccgaaacacgacagtggagtatgtgacattcaccagcattgctggtctcactggagtgatcatgacaatagccttgattctcatggtaacttcagctactgagttcatccggaggagttattttgaagtcttctggtatactcaccacctttttatcttctatatccttggcttagggattcacggcattggtggaattgtccggggtcaaacagaggagagcatgaatgagagtcatcctcgcaagtgtgcagagtcttttgagatgtgggatgatcgtgactcccactgtaggcgccctaagtttgaagggcatccccctgagtcttggaagtggatccttgcaccggtcattctttatatctgtgaaaggatcctccggttttaccgctcccagcagaaggttgtgattaccaaggttgttatgcacccatccaaagttttggaattgcagatgaacaagcgtggcttcagcatggaagtggggcagtatatctttgttaattgcccctcaatctctctcctggaatggcatccttttactttgacctctgctccagaggaagatttcttctccattcatatccgagcagcaggggactggacagaaaatctcataagggctttcgaacaacaatattcaccaattcccaggattgaagtggatggtccctttggcacagccagtgaggatgttttccagtatgaagtggctgtgctggttggagcaggaattggggtcaccccctttgcttctatcttgaaatccatctggtacaaattccagtgtgcagaccacaacctcaaaacaaaaaagatctatttctactggatctgcagggagacaggtgccttttcctggttcaacaacctgttgacttccctggaacaggagatggaggaattaggcaaaagcctgcgcaaatgctgtcaccgatattccagtctggatcctagaaaggttcaattctacttcaacaaagaaaatttttga

SEQ ID NO: 19550 - DNA, 1584 bp, Homo sapiens
  source 1..1584: mol_type = unassigned DNA
atgggaaactgggtggttaaccactggttttcagttttgtttctggttgtttggttagggctgaatgttttcctgtttgtggatgccttcctgaaatatgagaaggccgacaaatactactacacaagaaaaatccttgggttttgcagccgcacactgagaaagcaattggatcacaacctcaccttccacaagctggtggcctatatgatctgcctacatacagctattcacatcattgcacacctgtttaactttgactgctatagcagaagccgacaggccacagatggctcccttgcctccattctctccagcctatctcatgatgagaaaaaggggggttcttggctaaatcccatccagtcccgaaacacgacagtggagtatgtgacattcaccagcattgctggtctcactggagtgatcatgacaatagccttgattctcatggtaacttcagctactgagttcatccggaggagttattttgaagtcttctggtatactcaccacctttttatcttctatatccttggcttagggattcacggcattggtggaattgtccggggtcaaacagaggagagcatgaatgagagtcatcctcgcaagtgtgcagagtcttttgagatgtgggatgatcgtgactcccactgtaggcgccctaagtttgaagggcatccccctgagtcttggaagtggatccttgcaccggtcattctttatatctgtgaaaggatcctccggttttaccgctcccagcagaaggttgtgattaccaaggttgttatgcacccatccaaagttttggaattgcagatgaacaagcgtggcttcagcatggaagtggggcagtatatctttgttaattgcccctcaatctctctcctggaatggcatccttttactttgacctctgctccagaggaagatttcttctccattcatatccgagcagcaggggactggacagaaaatctcataagggctttcgaacaacaatattcaccaattcccaggattgaagtggatggtccctttggcacagccagtgaggatgttttccagtatgaagtggctgtgctggttggagcaggaattggggtcaccccctttgcttctatcttgaaatccatctggtacaaattccagtgtgcagaccacaacctcaaaacaaaaaagatctatttctactggatctgcagggagacaggtgccttttcctggttcaacaacctgttgacttccctggaacaggagatggaggaattaggcaaagtgggttttctaaactaccgtctcttcctcaccggatgggacagcaatattgttggtcatgcagcattaaactttgacaaggccactgacatcgtgacaggtctgaaacagaaaacctcctttgggagaccaatgtgggacaatgagttttctacaatagctacctcccaccccaagtctgtagtgggagttttcttatgtggccctcggactttggcaaagagcctgcgcaaatgctgtcaccgatattccagtctggatcctagaaaggttcaattctacttcaacaaagaaaatttttga

SEQ ID NO: 19551 - DNA, 785 bp, Homo sapiens
  source 1..785: mol_type = unassigned DNA
gctgatagcacagttctgtccagagaaggaaggcagaataaacttattcattcccaggaactcttggggtaggtgtgtgtttttcacatcttaaaggctcacagaccctgcgctggacaaatgttccattcctgaaggacctctccagaatccggattgctgaatcttccctgttgcctagaagggctccaaaccacctcttgacaatgggaaactgggtggttaaccactggttttcagttttgtttctggttgtttggttagggctgaatgttttcctgtttgtggatgccttcctgaaatatgagaaggccgacaaatactactacacaagaaaaatccttgggtcaacattggcctgtgcccgagcgtctgctctctgcttgaattttaacagcacgctgatcctgcttcctgtgtgtcgcaatctgctgtccttcctgaggggcacctgctcattttgcagccgcacactgagaaagcaattggatcacaacctcaccttccacaagctggtggcctatatgatctgcctacatacagctattcacatcattgcacacctgtttaactttgactgctatagcagaagccgacaggccacagatggctcccttgcctccattctctccagcctatctcatgatgagaaaaaggggggttcttggctaaatcccatccatccccatataacaccaacagtgtacatgtttactgtcacttttgatatggtcttatccagtgtgaacagcaatttattcttatttttgctcatcaaaaaataa

SEQ ID NO: 19552 - DNA, 661 bp, Homo sapiens
  source 1..661: mol_type = unassigned DNA
ggacctctccagaatccggattgctgaatcttccctgttgcctagaagggctccaaaccacctcttgacaatgggaaactgggtggttaaccactggttttcagttttgtttctggttgtttggttagggctgaatgttttcctgtttgtggatgccttcctgaaatatgagaaggccgacaaatactactacacaagaaaaatccttgggtcaacattggcctgtgcccgagcgtctgctctctgcttgaattttaacagcacgctgatcctgcttcctgtgtgtcgcaatctgctgtccttcctgaggggcacctgctcattttgcagccgcacactgagaaagcaattggatcacaacctcaccttccacaagctggtggcctatatgatctgcctacatacagctattcacatcattgcacacctgtttaactttgactgctatagcagaagccgacaggccacagatggctcccttgcctccattctctccagcctatctcatgatgagaaaaaggggggttcttggctaaatcccatccatccccatataacaccaacagtgtacatgtttactgtcacttttgatatggtcttatccagtgtgaacagcaatttattcttatttttgctcatcaaaaaataaaggattttcttc

SEQ ID NO: 19553 - DNA, 2529 bp, Homo sapiens
  source 1..2529: mol_type = unassigned DNA
gctgatagcacagttctgtccagagaaggaaggcagaataaacttattcattcccaggaactcttggggtaggtgtgtgtttttcacatcttaaaggctcacagaccctgcgctggacaaatgttccattcctgaaggacctctccagaatccggattgctgaatcttccctgttgcctagaagggctccaaaccacctcttgacaatgggaaactgggtggttaaccactggttttcagttttgtttctggttgtttggttagggctgaatgttttcctgtttgtggatgccttcctgaaatatgagaaggccgacaaatactactacacaagaaaaatccttgggtcaacattggcctgtgcccgagcgtctgctctctgcttgaattttaacagcacgctgatcctgcttcctgtgtgtcgcaatctgctgtccttcctgaggggcacctgctcattttgcagccgcacactgagaaagcaattggatcacaacctcaccttccacaagctggtggcctatatgatctgcctacatacagctattcacatcattgcacacctgtttaactttgactgctatagcagaagccgacaggccacagatggctcccttgcctccattctctccagcctatctcatgatgagaaaaaggggggttcttggctaaatcccatccagtcccgaaacacgacagtggagtatgtgacattcaccagcattgctggtctcactggagtgatcatgacaatagccttgattctcatggtaacttcagctactgagttcatccggaggagttattttgaagtcttctggtatactcaccacctttttatcttctatatccttggcttagggattcacggcattggtggaattgtccggggtcaaacagaggagagcatgaatgagagtcatcctcgcaagtgtgcagagtcttttgagatgtgggatgatcgtgactcccactgtaggcgccctaagtttgaagggcatccccctgagtcttggaagtggatccttgcaccggtcattctttatatctgtgaaaggatcctccggttttaccgctcccagcagaaggttgtgattaccaaggttgttatgcacccatccaaagttttggaattgcagatgaacaagcgtggcttcagcatggaagtggggcagtatatctttgttaattgcccctcaatctctctcctggaatggcatccttttactttgacctctgctccagaggaagatttcttctccattcatatccgagcagcaggggactggacagaaaatctcataagggctttcgaacaacaatattcaccaattcccaggattgaagtggatggtccctttggcacagccagtgaggatgttttccagtatgaagtggctgtgctggttggagcaggaattggggtcaccccctttgcttctatcttgaaatccatctggtacaaattccagtgtgcagaccacaacctcaaaacaaaaaagatctatttctactggatctgcagggagacaggtgccttttcctggttcaacaacctgttgacttccctggaacaggagatggaggaattaggcaaagtgggttttctaaactaccgtctcttcctcaccggatgggacagcaatattgttggtcatgcagcattaaactttgacaaggccactgacatcgtgacaggtctgaaacagaaaacctcctttgggagaccaatgtgggacaatgagttttctacaatagctacctcccaccccaagtctgtagtgggagttttcttatgtggccctcggactttggcaaagagcctgcgcaaatgctgtcaccgatattccagtctggatcctagaaaggttcaattctacttcaacaaagaaaatttttgagttataggaataaggacggtaatctgcattttgtctctttgtatcttcagtaatttacttggtctcgtcaggtttgagcagtcactttaggataagaatgtgcctctcaagccttgactccctggtattctttttttgattgcattcaacttcgttacttgagcttcagcaacttaagaacttctgaagttcttaaagttctgaagttcttaaagcccatggatcctttctcagaaaaataactgtaaatctttctggacagccatgactgtagcaaggcttgatagcagaggtttggtggttcagagttatacaactaatcccaggtgattttatcaattccagtgttaccatctcctgagttttggtttgtaatcttttgtccctcccacccccacagaagatttctaagtagggtgactttttaaataaaaatttattgaataattaatgataaaacataataataaacataaataataaacaaaattaccgagaaccccatccccatataacaccaacagtgtacatgtttactgtcacttttgatatggtcttatccagtgtgaacagcaatttattcttatttttgctcatcaaaaaataaaggattttcttcttcacttga

SEQ ID NO: 19554 - DNA, 695 bp, Homo sapiens
  source 1..695: mol_type = unassigned DNA
cttcagcatggaagtggggcagtatatctttgttaattgcccctcaatctctctcctggaatggcatccttttactttgacctctgctccagaggaagatttcttctccattcatatccgagcagcaggggactggacagaaaatctcataagggctttcgaacaacaatattcaccaattcccaggattgaagtggatggtccctttggcacagccagtgaggatgttttccagtatgaagtggctgtgctggttggagcaggaattggggtcaccccctttgcttctatcttgaaatccatctggtacaaattccagtgtgcagaccacaacctcaaaacaaaaaagatctatttctactggatctgcagggagacaggtgccttttcctggttcaacaacctgttgacttccctggaacaggagatggaggaattaggcaaaagcctgcgcaaatgctgtcaccgatattccagtctggatcctagaaaggttcaattctacttcaacaaagaaaatttttgagttataggaataaggacggtaatctgcattttgtctctttgtatcttcagtaatttacttggtctcgtcaggtttgagcagtcactttaggataagaatgtgcctctcaagccttgactccctggtattctttttttgattgcattcaacttcgttacttgagcttcag

SEQ ID NO: 19555 - DNA, 2042 bp, Homo sapiens
  source 1..2042: mol_type = unassigned DNA
caaagacaaaataatttactagggaagcccttactaacgacccaacatccagacacaggtgagggagaagaaatttcctgacagccgaagagcaacaagtatcatgatggggtgctggattttgaatgagggtctctccaccatattagtactctcatggctgggaataaatttttatctgtttattgacacgttctactggtatgaagaggaggagtctttccattacacacgagttattttgggttcaacactggcttgggcacgagcatccgcactgtgcctgaattttaactgcatgctaattctaatacctgtcagtcgaaaccttatttcattcataagaggaacaagtatttgctgcagaggaccgtggaggaggcaattagacaaaaacctcagatttcacaaactggtcgcctatgggatagctgttaatgcaaccatccacatcgtggcgcatttcttcaacctggaacgctaccactggagccagtccgaggaggcccagggacttctggccgcactttccaagctgggcaacacccctaacgagagctacctcaaccctgtccggaccttccccacaaacacaaccactgaattgctaaggacaatagcaggcgtcaccggtctggtgatctctctggctttagtcttgatcatgacctcgtcaactgagttcatcagacaggcctcctatgagttgttctggtacacacaccatgttttcatcgtcttctttctcagcctggccatccatgggacgggtcggattgttcgaggccaaacccaagacagtctctctctgcacaacatcaccttctgtagagaccgctatgcagaatggcagacagtggcccaatgccccgtgcctcaattttctggcaaggaaccctcggcttggaaatggattttaggccctgtggtcttgtatgcatgtgaaagaataattaggttctggcgatttcaacaagaagttgtcattaccaaggtggtaagccacccctctggagtcctggaacttcacatgaaaaagcgtggctttaaaatggcgccagggcagtacatcttggtgcagtgcccagccatatcttcgctggagtggcaccccttcacccttacctctgccccccaggaggactttttcagcgtgcacatccgggcagcaggagactggacagcagcgctactggaggcctttggggcagagggacaggccctccaggagccctggagcctgccaaggctggcagtggacgggccctttggaactgccctgacagatgtatttcactacccagtgtgtgtgtgcgttgccgcggggatcggagtcactcccttcgctgctcttctgaaatctatatggtacaaatgcagtgaggcacagaccccactgaagctgagcaaggtgtatttctactggatttgccgggatgcaagagcttttgagtggtttgctgatctcttactctccctggaaacacggatgagtgagcaggggaaaactcactttctgagttatcatatatttcttaccggctgggatgaaaatcaggctcttcacatagctttacactgggacgaaaatactgacgtgattacaggcttaaagcagaagaccttctatgggaggcccaactggaacaatgagttcaagcagattgcctacaatcaccccagcagcagtattggcgtgttcttctgtggacctaaagctctctcgaggacacttcaaaagatgtgccacttgtattcatcagctgaccccagaggtgttcatttctattacaacaaggagagcttctagactttggaggtcaagtccaggcattgtgttttcaatcaagttattgattccaaagaactccaccaggaattcctgtgacggcctgttgatatgagctcccagttgggaactggtgaataataattaactattgtgaacagtacactataccatacttccttagcttataaataacatgtcatatacaacagaacaaaaacatttactgaaattaaaatatattatgtttctc

SEQ ID NO: 19556 - DNA, 2388 bp, Homo sapiens
  source 1..2388: mol_type = unassigned DNA
tgagtgggcagagctgacccggtgcgggtgggagtcagggcgcccggaaaacccggctctgggtagcagaccccgcccgggctggctcggcgccgggccttcgggcttccactcagtctttgaccctcggtcctcgctcagcggcccggcaggccgcacaactgtaaccgctgccccggccgccgcccgctccttctcggtccggcgggcacagagcgcagcgcggcggggccggcggcatggctgtgtcctggaggagctggctcgccaacgaaggggttaaacacctctgcctgttcatctggctctccatgaatgtcctgcttttctggaaaaccttcttgctgtataaccaagggccagagtatcactacctccaccagatgttggggctaggattgtgtctaagcagagcctcagcatctgttcttaacctcaactgcagccttatccttttacccatgtgccgaacactcttggcttacctccgaggatcacagaaggttccaagcaggagaaccaggagattgttggataaaagcagaacattccatattacctgtggtgttactatctgtattttctcaggcgtgcatgtggctgcccatctggtgaatgccctcaacttctcagtgaattacagtgaagactttgttgaactgaatgcagcaagataccgagatgaggatcctagaaaacttctcttcacaactgttcctggcctgacaggggtctgcatggtggtggtgctattcctcatgatcacagcctctacatatgcaataagagtttctaactatgatatcttctggtatactcataacctcttctttgtcttctacatgctgctgacgttgcatgtttcaggagggctgctgaagtatcaaactaatttagatacccaccctcccggctgcatcagtcttaaccgaaccagctctcagaatatttccttaccagagtatttctcagaacattttcatgaacctttccctgaaggattttcaaaaccggcagagtttacccagcacaaatttgtgaagatttgtatggaagagcccagattccaagctaattttccacagacttggctttggatttctggacctttgtgcctgtactgtgccgaaagactttacaggtatatccggagcaataagccagtcaccatcatttcggtcatgagtcatccctcagatgtcatggaaatccgaatggtcaaagaaaattttaaagcaagacctggtcagtatattactctacattgtcccagtgtatctgcattagaaaatcatccatttaccctcacaatgtgtccaactgaaaccaaagcaacatttggggttcatcttaaaatagtaggagactggacagaacgatttcgagatttactactgcctccatctagtcaagactccgaaattctgcccttcattcaatctagaaattatcccaagctgtatattgatggtccttttggaagtccatttgaggaatcactgaactatgaggtcagcctctgcgtggctggaggcattggagtaactccatttgcatcaatactcaacaccctgttggatgactggaaaccatacaagcttagaagactatactttatttgggtatgcagagatatccagtccttccgttggtttgcagatttactctgtatgttgcataacaagttttggcaagagaacagacctgactatgtcaacatccagctgtacctcagtcaaacagatgggatacagaagataattggagaaaaatatcatgcactgaattcaagactgtttataggacgtcctcggtggaaacttttgtttgatgaaatagcaaaatataacagaggaaaaacagttggtgttttctgttgtggacccaattcactatccaagactcttcataaactgagtaaccagaacaactcatatgggacaagatttgaatacaataaagagtctttcagctgaaaacttttgccatgaagcaggactctaaagaaggaatgagtgcaatttctaagactttgaaactcagcggaatcaatcagctgtgttatgccaaagaatagtaaggttttcttatttatgattatttaaaatggaaatgtgagaatgtggcaagatgaccgtcacattacatgtttaatctggaaaccaaagagaccctgaagaatatttgatgtgatgattcacttttcagttctcaaattaaaagaaaactgttagatgcacactgttgattttcatggtggattcaagaactccctagtgaggagctgaacttgctcaatctaaggctgattgtcgtgttcctctttaaattgtttttggttgaacaaatgcaagattgaacaaaattaaaaattcattgaagctgaaa

SEQ ID NO: 19557 - DNA, 3347 bp, Homo sapiens
  source 1..3347: mol_type = unassigned DNA
attctctgagcgtgcacgggtgggaagctggaagtggaagttttgtcttaattcgaacattctcaacttacaaaactttatgctggagataacaatgaacactccccctcccaccccctcgcctgtcccccaaatgcatgagaatttttctgcacattgatgggagagatgtggaggaagagggaagaggtcattttccgtgaatacagcttttctttttaccctttaaacatttttgctccctttgttcttttcccagattacttctgtttgcttgggttcatctggctctccatgaatgtcctgcttttctggaaaaccttcttgctgtataaccaagggccagagtatcactacctccaccagatgttggggctaggattgtgtctaagcagagcctcagcatctgttcttaacctcaactgcagccttatccttttacccatgtgccgaacactcttggcttacctccgaggatcacagaaggttccaagcaggagaaccaggagattgttggataaaagcagaacattccatattacctgtggtgttactatctgtattttctcaggcgtgcatgtggctgcccatctggtgaatgccctcaacttctcagtgaattacagtgaagactttgttgaactgaatgcagcaagataccgagatgaggatcctagaaaacttctcttcacaactgttcctggcctgacaggggtctgcatggtggtggtgctattcctcatgatcacagcctctacatatgcaataagagtttctaactatgatatcttctggtatactcataacctcttctttgtcttctacatgctgctgacgttgcatgtttcaggagggctgctgaagtatcaaactaatttagatacccaccctcccggctgcatcagtcttaaccgaaccagctctcagaatatttccttaccagagtatttctcagaacattttcatgaacctttccctgaaggattttcaaaaccggcagagtttacccagcacaaatttgtgaagatttgtatggaagagcccagattccaagctaattttccacagacttggctttggatttctggacctttgtgcctgtactgtgccgaaagactttacaggtatatccggagcaataagccagtcaccatcatttcggtcatgagtcatccctcagatgtcatggaaatccgaatggtcaaagaaaattttaaagcaagacctggtcagtatattactctacattgtcccagtgtatctgcattagaaaatcatccatttaccctcacaatgtgtccaactgaaaccaaagcaacatttggggttcatcttaaaatagtaggagactggacagaacgatttcgagatttactactgcctccatctagtcaagactccgaaattctgcccttcattcaatctagaaattatcccaagctgtatattgatggtccttttggaagtccatttgaggaatcactgaactatgaggtcagcctctgcgtggctggaggcattggagtaactccatttgcatcaatactcaacaccctgttggatgactggaaaccatacaagcttagaagactatactttatttgggtatgcagagatatccagtccttccgttggtttgcagatttactctgtatgttgcataacaagttttggcaagagaacagacctgactatgtcaacatccagctgtacctcagtcaaacagatgggatacagaagataattggagaaaaatatcatgcactgaattcaagactgtttataggacgtcctcggtggaaacttttgtttgatgaaatagcaaaatataacagaggaaaaacagttggtgttttctgttgtggacccaattcactatccaagactcttcataaactgagtaaccagaacaactcatatgggacaagatttgaatacaataaagagtctttcagctgaaaacttttgccatgaagcaggactctaaagaaggaatgagtgcaatttctaagactttgaaactcagcggaatcaatcagctgtgttatgccaaagaatagtaaggttttcttatttatgattatttaaaatggaaatgtgagaatgtggcaagatgaccgtcacattacatgtttaatctggaaaccaaagagaccctgaagaatatttgatgtgatgattcacttttcagttctcaaattaaaagaaaactgttagatgcacactgttgattttcatggtggattcaagaactccctagtgaggagctgaacttgctcaatctaaggctgattgtcgtgttcctctttaaattgtttttggttgaacaaatgcaagattgaacaaaattaaaaattcattgaagctgaaattccattttctgtgttgtgtataaacagagtagctttaatttgcaagcactccaggcaaatatattagatgtttgaaaacacagcacaagactctgtattgatacgggtactttgtgtcaatatctaatcgtctccactacttatgctaatacctctatttgatatctgaagactatatgctaactgaaccttcctcaaatgttgttatagtatctatttttatatatttttttctttttattcctctctctagggaaatatgccttcccttagcatgcattagacataatgatttaataggtccctttcatcttcatttaaatctatcactattgcatggtaatgaaaatattcctactataaattataaagggatatatatatatggatatatatatgtatatacacatatatatatacacacacacacacatatatatatatatatatatatatacacatatactaataacttttcccttttttcagcatttttgtctctattattattattgtttttttcccaggtagggtttgtcttaggctgtagcctctaaggatagttagttaatttgcactttgagaccaaaggacatcatgtgtgtcagtagggactgaatataagatttatctcctttgccacacattggtttatgatggagacattgaaagtctagtcatattcctgaacagtaaaacctgtattttaccttttaagtaagaggaaatatgatattcttattcaaacttaagtttagaatccagaatattactgtcgcactttttggtatcctgagtttccatagggaactattgggtttaaagtcaccgttggaactacactgtgtgatcttataaacttatgttccctggctatcatattcttggctcagaacaatatttcccattactatcttaagaattaaggcattcatggctcacgcctgtaatcccggcactttgggaggccaaggc

SEQ ID NO: 19558 - DNA, 816 bp, Homo sapiens
  source 1..816: mol_type = unassigned DNA
atggctgtgtcctggaggagctggctcgccaacgaaggggttaaacacctctgcctgttcatctggctctccatgaatgtcctgcttttctggaaaaccttcttgctgtataaccaagggccagagtatcactacctccaccagatgttggggtgtccaactgaaaccaaagcaacatttggggttcatcttaaaatagtaggagactggacagaacgatttcgagatttactactgcctccatctagtcaagactccgaaattctgcccttcattcaatctagaaattatcccaagctgtatattgatggtccttttggaagtccatttgaggaatcactgaactatgaggtcagcctctgcgtggctggaggcattggagtaactccatttgcatcaatactcaacaccctgttggatgactggaaaccatacaagcttagaagactatactttatttgggtatgcagagatatccagtccttccgttggtttgcagatttactctgtatgttgcataacaagttttggcaagagaacagacctgactatgtcaacatccagctgtacctcagtcaaacagatgggatacagaagataattggagaaaaatatcatgcactgaattcaagactgtttataggacgtcctcggtggaaacttttgtttgatgaaatagcaaaatataacagaggaaaaacagttggtgttttctgttgtggacccaattcactatccaagactcttcataaactgagtaaccagaacaactcatatgggacaagatttgaatacaataaagagtctttcagctga

SEQ ID NO: 19559 - DNA, 560 bp, Homo sapiens
  source 1..560: mol_type = unassigned DNA
cctagacaaaggggccggcgcggcggagcagactggtgcagcctgggccgcgcgctcagagcgctgggcgtctgggcagctgagtgggcagagctgacccggtgcgggtgggagtcagggcgcccggaaaacccggctctgggtagcagaccccgcccgggctggctcggcgccgggccttcgggcttccactcagtctttgaccctcggtcctcgctcagcggcccggcaggccgcacaactgtaaccgctgccccggccgccgcccgctccttctcggtccggcgggcacagagcgcagcgcggcggggccggcggcatggctgtgtcctggaggagctggctcgccaacgaaggggttaaacacctctgcctgttcatctggctctccatgaatgtcctgcttttctggaaaaccttcttgctgtataaccaagggccagagtatcactacctccaccagatgttgggggaactgtcttgaaacctatacatttcagatgggcacccagagagtaagacctcacctcgcccctcaagttgcttacaatataatggaa

SEQ ID NO: 19560 - DNA, 1825 bp, Homo sapiens
  source 1..1825: mol_type = unassigned DNA
acattgatgggagagatgtggaggaagagggaagaggtcattttccgtgaatacagcttttctttttaccctttaaacatttttgctccctttgttcttttcccagattacttctgtttgcttgggttcatctggctctccatgaatgtcctgcttttctggaaaaccttcttgctgtataaccaagggccagagtatcactacctccaccagatgttggggctaggattgtgtctaagcagagcctcagcatctgttcttaacctcaactgcagccttatccttttacccatgtgccgaacactcttggcttacctccgaggatcacagaaggttccaagcaggagaaccaggagattgttggataaaagcagaacattccatattacctgtggtgttactatctgtattttctcaggcgtgcatgtggctgcccatctggtgaatgccctcaacttctcagtgaattacagtgaagactttgttgaactgaatgcagcaagataccgagatgaggatcctagaaaacttctcttcacaactgttcctggcctgacaggggtctgcatggtggtggtgctattcctcatgatcacagcctctacatatgcaataagagtttctaactatgatatcttctggtatactcataacctcttctttgtcttctacatgctgctgacgttgcatgtttcaggagggctgctgaagtatcaaactaatttagatacccaccctcccggctgcatcagtcttaaccgaaccagctctcagaatatttccttaccagagtatttctcagaacattttcatgaacctttccctgaaggattttcaaaaccggcagagtttacccagcacaaatttgtgaagatttgtatggaagagcccagattccaagctaattttccacagacttggctttggatttctggacctttgtgcctgtactgtgccgaaagactttacaggtatatccggagcaataagccagtcaccatcatttcggtcatgagtcatccctcagatgtcatggaaatccgaatggtcaaagaaaattttaaagcaagacctggtcagtatattactctacattgtcccagtgtatctgcattagaaaatcatccatttaccctcacaatgtgtccaactgaaaccaaagcaacatttggggttcatcttaaaatagtaggagactggacagaacgatttcgagatttactactgcctccatctagtcaagactccgaaattctgcccttcattcaatctagaaattatcccaagctgtatattgatggtccttttggaagtccatttgaggaatcactgaactatgaggtcagcctctgcgtggctggaggcattggagtaactccatttgcatcaatactcaacaccctgttggatgactggaaaccatacaagcttagaagactatactttatttgggtatgcagagatatccagtccttccgttggtttgcagatttactctgtatgttgcataacaagttttggcaagagaacagacctgactatgtcaacatccagctgtacctcagtcaaacagatgggatacagaagataattggagaaaaatatcatgcactgaattcaagactgtttataggacgtcctcggtggaaacttttgtttgatgaaatagcaaaatataacagaggaaaaacagttggtgttttctgttgtggacccaattcactatccaagactcttcataaactgagtaaccagaacaactcatatgggacaagatttgaatacaataaagagtctttcagctgaaaacttttgccatgaagca

SEQ ID NO: 19561 - DNA, 4184 bp, Homo sapiens
  source 1..4184: mol_type = unassigned DNA
tgcagtgtcgaataggtacctgggtcaactccacacacttctcactcttcactggacctctggtacaagattgagaggattcctattacttacaaacagactagttcatctggctctccatgaatgtcctgcttttctggaaaaccttcttgctgtataaccaagggccagagtatcactacctccaccagatgttggggctaggattgtgtctaagcagagcctcagcatctgttcttaacctcaactgcagccttatccttttacccatgtgccgaacactcttggcttacctccgaggatcacagaaggttccaagcaggagaaccaggagattgttggataaaagcagaacattccatattacctgtggtgttactatctgtattttctcaggcgtgcatgtggctgcccatctggtgaatgccctcaacttctcagtgaattacagtgaagactttgttgaactgaatgcagcaagataccgagatgaggatcctagaaaacttctcttcacaactgttcctggcctgacaggggtctgcatggtggtggtgctattcctcatgatcacagcctctacatatgcaataagagtttctaactatgatatcttctggtatactcataacctcttctttgtcttctacatgctgctgacgttgcatgtttcaggagggctgctgaagtatcaaactaatttagatacccaccctcccggctgcatcagtcttaaccgaaccagctctcagaatatttccttaccagagtatttctcagaacattttcatgaacctttccctgaaggattttcaaaaccggcagagtttacccagcacaaatttgtgaagatttgtatggaagagcccagattccaagctaattttccacagacttggctttggatttctggacctttgtgcctgtactgtgccgaaagactttacaggtatatccggagcaataagccagtcaccatcatttcggtcatgagtcatccctcagatgtcatggaaatccgaatggtcaaagaaaattttaaagcaagacctggtcagtatattactctacattgtcccagtgtatctgcattagaaaatcatccatttaccctcacaatgtgtccaactgaaaccaaagcaacatttggggttcatcttaaaatagtaggagactggacagaacgatttcgagatttactactgcctccatctagtcaagactccgaaattctgcccttcattcaatctagaaattatcccaagctgtatattgatggtccttttggaagtccatttgaggaatcactgaactatgaggtcagcctctgcgtggctggaggcattggagtaactccatttgcatcaatactcaacaccctgttggatgactggaaaccatacaagcttagaagactatactttatttgggtatgcagagatatccagtccttccgttggtttgcagatttactctgtatgttgcataacaagttttggcaagagaacagacctgactatgtcaacatccagctgtacctcagtcaaacagatgggatacagaagataattggagaaaaatatcatgcactgaattcaagactgtttataggacgtcctcggtggaaacttttgtttgatgaaatagcaaaatataacagaggaaaaacagttggtgttttctgttgtggacccaattcactatccaagactcttcataaactgagtaaccagaacaactcatatgggacaagatttgaatacaataaagagtctttcagctgaaaacttttgccatgaagcaggactctaaagaaggaatgagtgcaatttctaagactttgaaactcagcggaatcaatcagctgtgttatgccaaagaatagtaaggttttcttatttatgattatttaaaatggaaatgtgagaatgtggcaagatgaccgtcacattacatgtttaatctggaaaccaaagagaccctgaagaatatttgatgtgatgattcacttttcagttctcaaattaaaagaaaactgttagatgcacactgttgattttcatggtggattcaagaactccctagtgaggagctgaacttgctcaatctaaggctgattgtcgtgttcctctttaaattgtttttggttgaacaaatgcaagattgaacaaaattaaaaattcattgaagctgaaattccattttctgtgttgtgtataaacagagtagctttaatttgcaagcactccaggcaaatatattagatgtttgaaaacacagcacaagactctgtattgatacgggtactttgtgtcaatatctaatcgtctccactacttatgctaatacctctatttgatatctgaagactatatgctaactgaaccttcctcaaatgttgttatagtatctatttttatatatttttttctttttattcctctctctagggaaatatgccttcccttagcatgcattagacataatgatttaataggtccctttcatcttcatttaaatctatcactattgcatggtaatgaaaatattcctactataaattataaagggatatatatatatggatatatatatgtatatacacatatatatatacacacacacacacatatatatatatatatatatatatacacatatactaataacttttcccttttttcagcatttttgtctctattattattattgtttttttcccaggtagggtttgtcttaggctgtagcctctaaggatagttagttaatttgcactttgagaccaaaggacatcatgtgtgtcagtagggactgaatataagatttatctcctttgccacacattggtttatgatggagacattgaaagtctagtcatattcctgaacagtaaaacctgtattttaccttttaagtaagaggaaatatgatattcttattcaaacttaagtttagaatccagaatattactgtcgcactttttggtatcctgagtttccatagggaactattgggtttaaagtcaccgttggaactacactgtgtgatcttataaacttatgttccctggctatcatattcttggctcagaacaatatttcccattactatcttaagaattaaggcattcatggctcacgcctgtaatcccggcactttgggaggccaaggcaggtggatcacgaggtcagagttcaagaccagcctgaccaagttggtgaaaccccatcgctactaaaaatacaaatattaggcgggtgtggtggcgggtgcctataatcccaactactcgggagactgaggcaaagaatcgcttgaacccggtgggcggaggttgcagtgagccaagattgcaccactgcactccagcctgggtgacagagcaagattccatctcaaaaaaaaaaaaaaaaaaaaaaaaaaagaattaaagcattcatacagtttagtgattttgtttagtagtcggctatcaattgctatcaaatataacactgctgaaatcagcagtgtgacttaccttgccattgttaaaatgttacataaaacataacatgatagatgctaaggcctttttttgctataattcaccaatagcaatcaagcatgctaacccatactgaatgatatttacttgtagatatttcttcctttccttgaaattctcctttctatggaaagaagatgaacccaaaaaagtgataggaaatgtggaatgctcatgcagatttagctctgaaggcatatttaataactagtatgtcttgacaacagtctttagattaaaaagaattttcatggaaacatttaacagaaagaactagtaaaaagacactttgagttagtccaggcttaatgtgcaatactgactctatactgatcataatttatttatgcgatcatattaatagacctaatttcattaaaacaggtagaagatttttcaaaagaaagatgatgtttcaaagctggtctgccattctagatgagcctccttgcttatttaagttccagtaggtgttcaaatgttaaatgttaaacataggtcatctttgcttctgcagggcttcatcttgcatgtttaagagaactttgttttattttgagggattatttctctggggatcattcttataatacaagccttaaatcactaattttagtagcaataaatgttaaaattg

SEQ ID NO: 19562 - DNA, 2379 bp, Homo sapiens
  source 1..2379: mol_type = unassigned DNA
tacttctagtctagttggagaaacaacctagaaaatgcaccaacaaatggggcacaataactactctgagagagagtggcacacagtggacgcaaagaagaggttcctgatgcagctgggaagagtctacatgggcctctagcaggagaagatactggtcttgagtttggagactaagtaagcatctccagtgtcgaataggtacctgggtcaactccacacacttctcactcttcactggacctctggtacaagattgagaggattcctattacttacaaacagactagttcatctggctctccatgaatgtcctgcttttctggaaaaccttcttgctgtataaccaagggccagagtatcactacctccaccagatgttggggctaggattgtgtctaagcagagcctcagcatctgttcttaacctcaactgcagccttatccttttacccatgtgccgaacactcttggcttacctccgaggatcacagaaggttccaagcaggagaaccaggagattgttggataaaagcagaacattccatattacctgtggtgttactatctgtattttctcaggcgtgcatgtggctgcccatctggtgaatgccctcaacttctcagtgaattacagtgaagactttgttgaactgaatgcagcaagataccgagatgaggatcctagaaaacttctcttcacaactgttcctggcctgacaggggtctgcatggtggtggtgctattcctcatgatcacagcctctacatatgcaataagagtttctaactatgatatcttctggtatactcataacctcttctttgtcttctacatgctgctgacgttgcatgtttcaggagggctgctgaagtatcaaactaatttagatacccaccctcccggctgcatcagtcttaaccgaaccagctctcagaatatttccttaccagagtatttctcagaacattttcatgaacctttccctgaaggattttcaaaaccggcagagtttacccagcacaaatttgtgaagatttgtatggaagagcccagattccaagctaattttccacagacttggctttggatttctggacctttgtgcctgtactgtgccgaaagactttacaggtatatccggagcaataagccagtcaccatcatttcggtcatgagtcatccctcagatgtcatggaaatccgaatggtcaaagaaaattttaaagcaagacctggtcagtatattactctacattgtcccagtgtatctgcattagaaaatcatccatttaccctcacaatgtgtccaactgaaaccaaagcaacatttggggttcatcttaaaatagtaggagactggacagaacgatttcgagatttactactgcctccatctagtcaagactccgaaattctgcccttcattcaatctagaaattatcccaagctgtatattgatggtccttttggaagtccatttgaggaatcactgaactatgaggtcagcctctgcgtggctggaggcattggagtaactccatttgcatcaatactcaacaccctgttggatgactggaaaccatacaagcttagaagactatactttatttgggtatgcagagatatccagtccttccgttggtttgcagatttactctgtatgttgcataacaagttttggcaagagaacagacctgactatgtcaacatccagctgtacctcagtcaaacagatgggatacagaagataattggagaaaaatatcatgcactgaattcaagactgtttataggacgtcctcggtggaaacttttgtttgatgaaatagcaaaatataacagaggaaaaacagttggtgttttctgttgtggacccaattcactatccaagactcttcataaactgagtaaccagaacaactcatatgggacaagatttgaatacaataaagagtctttcagctgaaaacttttgccatgaagcaggactctaaagaaggaatgagtgcaatttctaagactttgaaactcagcggaatcaatcagctgtgttatgccaaagaatagtaaggttttcttatttatgattatttaaaatggaaatgtgagaatgtggcaagatgaccgtcacattacatgtttaatctggaaaccaaagagaccctgaagaatatttgatgtgatgattcacttttcagttctcaaattaaaagaaaactgttagatgcacactgttgattttcatggtggattcaagaactccctagtgaggagctgaacttgctcaatctaaggctgattgtcgtgttcctctttaaattgtttttggttgaacaaatgcaagattgaacaaaattaaaaattcattgaagctg

SEQ ID NO: 19563 - DNA, 696 bp, Homo sapiens
  source 1..696: mol_type = unassigned DNA
atggctgtgtcctggaggagctggctcgccaacgaaggggttaaacacctctgcctgttcatctggctctccatgaatgtcctgcttttctggaaaaccttcttgctgtataaccaagggccagagtatcactacctccaccagatgttggggtgtccaactgaaaccaaagcaacatttggggttcatcttaaaatagtaggagactggacagaacgatttcgagatttactactgcctccatctagtcaagactccgaaattctgcccttcattcaatctagaaattatcccaaggatgactggaaaccatacaagcttagaagactatactttatttgggtatgcagagatatccagtccttccgttggtttgcagatttactctgtatgttgcataacaagttttggcaagagaacagacctgactatgtcaacatccagctgtacctcagtcaaacagatgggatacagaagataattggagaaaaatatcatgcactgaattcaagactgtttataggacgtcctcggtggaaacttttgtttgatgaaatagcaaaatataacagaggaaaaacagttggtgttttctgttgtggacccaattcactatccaagactcttcataaactgagtaaccagaacaactcatatgggacaagatttgaatacaataaagagtctttcagctga

SEQ ID NO: 19564 - DNA, 2156 bp, Homo sapiens
  source 1..2156: mol_type = unassigned DNA
acaactgtaaccgctgccccggccgccgcccgctccttctcggtccggcgggcacagagcgcagcgcggcggggccggcggcatggctgtgtcctggaggagctggctcgccaacgaaggggttaaacacctctgcctgttcatctggctctccatgaatgtcctgcttttctggaaaaccttcttgctgtataaccaagggccagagtatcactacctccaccagatgttggggctaggattgtgtctaagcagagcctcagcatctgttcttaacctcaactgcagccttatccttttacccatgtgccgaacactcttggcttacctccgaggatcacagaaggttccaagcaggagaaccaggagattgttggataaaagcagaacattccatattacctgtggtgttactatctgtattttctcaggcgtgcatgtggctgcccatctggtgaatgccctcaacttctcagtgaattacagtgaagactttgttgaactgaatgcagcaagataccgagatgaggatcctagaaaacttctcttcacaactgttcctggcctgacaggggtctgcatggtggtggtgctattcctcatgatcacagcctctacatatgcaataagagtttctaactatgatatcttctggtatactcataacctcttctttgtcttctacatgctgctgacgttgcatgtttcaggagggctgctgaagtatcaaactaatttagatacccaccctcccggctgcatcagtcttaaccgaaccagctctcagaatatttccttaccagagtatttctcagaacattttcatgaacctttccctgaaggattttcaaaaccggcagagtttacccagcacaaatttgtgaagatttgtatggaagagcccagattccaagctaattttccacagacttggctttggatttctggacctttgtgcctgtactgtgccgaaagactttacaggtatatccggagcaataagccagtcaccatcatttcggtcatgagtcatccctcagatgtcatggaaatccgaatggtcaaagaaaattttaaagcaagacctggtcagtatattactctacattgtcccagtgtatctgcattagaaaatcatccatttaccctcacaatgtgtccaactgaaaccaaagcaacatttggggttcatcttaaaatagtaggagactggacagaacgatttcgagatttactactgcctccatctagtcaagactccgaaattctgcccttcattcaatctagaaattatcccaaggatgactggaaaccatacaagcttagaagactatactttatttgggtatgcagagatatccagtccttccgttggtttgcagatttactctgtatgttgcataacaagttttggcaagagaacagacctgactatgtcaacatccagctgtacctcagtcaaacagatgggatacagaagataattggagaaaaatatcatgcactgaattcaagactgtttataggacgtcctcggtggaaacttttgtttgatgaaatagcaaaatataacagaggaaaaacagttggtgttttctgttgtggacccaattcactatccaagactcttcataaactgagtaaccagaacaactcatatgggacaagatttgaatacaataaagagtctttcagctgaaaacttttgccatgaagcaggactctaaagaaggaatgagtgcaatttctaagactttgaaactcagcggaatcaatcagctgtgttatgccaaagaatagtaaggttttcttatttatgattatttaaaatggaaatgtgagaatgtggcaagatgaccgtcacattacatgtttaatctggaaaccaaagagaccctgaagaatatttgatgtgatgattcacttttcagttctcaaattaaaagaaaactgttagatgcacactgttgattttcatggtggattcaagaactccctagtgaggagctgaacttgctcaatctaaggctgattgtcgtgttcctctttaaattgtttttggttgaacaaatgcaagattgaacaaaattaaaaattcattgaagctgaaattccattttctgtgttgtgtataaacagagtagctttaatttgca

SEQ ID NO: 19565 - DNA, 4376 bp, Homo sapiens
  source 1..4376: mol_type = unassigned DNA
tgagtgggcagagctgacccggtgcgggtgggagtcagggcgcccggaaaacccggctctgggtagcagaccccgcccgggctggctcggcgccgggccttcgggcttccactcagtctttgaccctcggtcctcgctcagcggcccggcaggccgcacaactgtaaccgctgccccggccgccgcccgctccttctcggtccggcgggcacagagcgcagcgcggcggggccggcggcatggctgtgtcctggaggagctggctcgccaacgaaggggttaaacacctctgcctgttcatctggctctccatgaatgtcctgcttttctggaaaaccttcttgctgtataaccaagggccagagtatcactacctccaccagatgttggggctaggattgtgtctaagcagagcctcagcatctgttcttaacctcaactgcagccttatccttttacccatgtgccgaacactcttggcttacctccgaggatcacagaaggttccaagcaggagaaccaggagattgttggataaaagcagaacattccatattacctgtggtgttactatctgtattttctcaggcgtgcatgtggctgcccatctggtgaatgccctcaacttctcagtgaattacagtgaagactttgttgaactgaatgcagcaagataccgagatgaggatcctagaaaacttctcttcacaactgttcctggcctgacaggggtctgcatggtggtggtgctattcctcatgatcacagcctctacatatgcaataagagtttctaactatgatatcttctggtatactcataacctcttctttgtcttctacatgctgctgacgttgcatgtttcaggagggctgctgaagtatcaaactaatttagatacccaccctcccggctgcatcagtcttaaccgaaccagctctcagaatatttccttaccagagtatttctcagaacattttcatgaacctttccctgaaggattttcaaaaccggcagagtttacccagcacaaatttgtgaagatttgtatggaagagcccagattccaagctaattttccacagacttggctttggatttctggacctttgtgcctgtactgtgccgaaagactttacaggtatatccggagcaataagccagtcaccatcatttcggtcatgagtcatccctcagatgtcatggaaatccgaatggtcaaagaaaattttaaagcaagacctggtcagtatattactctacattgtcccagtgtatctgcattagaaaatcatccatttaccctcacaatgtgtccaactgaaaccaaagcaacatttggggttcatcttaaaatagtaggagactggacagaacgatttcgagatttactactgcctccatctagtcaagactccgaaattctgcccttcattcaatctagaaattatcccaagctgtatattgatggtccttttggaagtccatttgaggaatcactgaactatgaggtcagcctctgcgtggctggaggcattggagtaactccatttgcatcaatactcaacaccctgttggatgactggaaaccatacaagcttagaagactatactttatttgggtatgcagagatatccagtccttccgttggtttgcagatttactctgtatgttgcataacaagttttggcaagagaacagacctgactatgtcaacatccagctgtacctcagtcaaacagatgggatacagaagataattggagaaaaatatcatgcactgaattcaagactgtttataggacgtcctcggtggaaacttttgtttgatgaaatagcaaaatataacagaggaaaaacagttggtgttttctgttgtggacccaattcactatccaagactcttcataaactgagtaaccagaacaactcatatgggacaagatttgaatacaataaagagtctttcagctgaaaacttttgccatgaagcaggactctaaagaaggaatgagtgcaatttctaagactttgaaactcagcggaatcaatcagctgtgttatgccaaagaatagtaaggttttcttatttatgattatttaaaatggaaatgtgagaatgtggcaagatgaccgtcacattacatgtttaatctggaaaccaaagagaccctgaagaatatttgatgtgatgattcacttttcagttctcaaattaaaagaaaactgttagatgcacactgttgattttcatggtggattcaagaactccctagtgaggagctgaacttgctcaatctaaggctgattgtcgtgttcctctttaaattgtttttggttgaacaaatgcaagattgaacaaaattaaaaattcattgaagctgaaattccattttctgtgttgtgtataaacagagtagctttaatttgcaagcactccaggcaaatatattagatgtttgaaaacacagcacaagactctgtattgatacgggtactttgtgtcaatatctaatcgtctccactacttatgctaatacctctatttgatatctgaagactatatgctaactgaaccttcctcaaatgttgttatagtatctatttttatatatttttttctttttattcctctctctagggaaatatgccttcccttagcatgcattagacataatgatttaataggtccctttcatcttcatttaaatctatcactattgcatggtaatgaaaatattcctactataaattataaagggatatatatatatggatatatatatgtatatacacatatatatatacacacacacacacatatatatatatatatatatatatacacatatactaataacttttcccttttttcagcatttttgtctctattattattattgtttttttcccaggtagggtttgtcttaggctgtagcctctaaggatagttagttaatttgcactttgagaccaaaggacatcatgtgtgtcagtagggactgaatataagatttatctcctttgccacacattggtttatgatggagacattgaaagtctagtcatattcctgaacagtaaaacctgtattttaccttttaagtaagaggaaatatgatattcttattcaaacttaagtttagaatccagaatattactgtcgcactttttggtatcctgagtttccatagggaactattgggtttaaagtcaccgttggaactacactgtgtgatcttataaacttatgttccctggctatcatattcttggctcagaacaatatttcccattactatcttaagaattaaggcattcatggctcacgcctgtaatcccggcactttgggaggccaaggcaggtggatcacgaggtcagagttcaagaccagcctgaccaagttggtgaaaccccatcgctactaaaaatacaaatattaggcgggtgtggtggcgggtgcctataatcccaactactcgggagactgaggcaaagaatcgcttgaacccggtgggcggaggttgcagtgagccaagattgcaccactgcactccagcctgggtgacagagcaagattccatctcaaaaaaaaaaaaaaaaaaaaaaaaaaagaattaaagcattcatacagtttagtgattttgtttagtagtcggctatcaattgctatcaaatataacactgctgaaatcagcagtgtgacttaccttgccattgttaaaatgttacataaaacataacatgatagatgctaaggcctttttttgctataattcaccaatagcaatcaagcatgctaacccatactgaatgatatttacttgtagatatttcttcctttccttgaaattctcctttctatggaaagaagatgaacccaaaaaagtgataggaaatgtggaatgctcatgcagatttagctctgaaggcatatttaataactagtatgtcttgacaacagtctttagattaaaaagaattttcatggaaacatttaacagaaagaactagtaaaaagacactttgagttagtccaggcttaatgtgcaatactgactctatactgatcataatttatttatgcgatcatattaatagacctaatttcattaaaacaggtagaagatttttcaaaagaaagatgatgtttcaaagctggtctgccattctagatgagcctccttgcttatttaagttccagtaggtgttcaaatgttaaatgttaaacataggtcatctttgcttctgcagggcttcatcttgcatgtttaagagaactttgttttattttgagggattatttctctggggatcattcttataatacaagccttaaatcactaattttagtagcaataaatgttaaaattg

SEQ ID NO: 19566 - DNA, 2610 bp, Homo sapiens
  source 1..2610: mol_type = unassigned DNA
acacttcactcaaatggctggctgcagctggtgctagttatggtctgggatctcagatgaggctgctaagccgaatgtgttgttactcctttacatcgtctctccacatggcttgaacttctcacagcatgcctgctggattcgaagagatggcattcaagtgcttaaaaatcaagaagaccctcaccaggtgccagcgtctagacattggattttccagcctccagaacttacttctagtctagttggagaaacaacctagaaaatgcaccaacaaatggggcacaataactactctgagagagagtggcacacagtggacgcaaagaagaggttcctgatgcagctgggaagagtctacatgggcctctagcaggagaagatactggtcttgagtttggagactaagtaagcatctccagtgtcgaataggtacctgggtcaactccacacacttctcactcttcactggacctctggtacaagattgagaggattcctattacttacaaacagactagttcatctggctctccatgaatgtcctgcttttctggaaaaccttcttgctgtataaccaagggccagagtatcactacctccaccagatgttggggctaggattgtgtctaagcagagcctcagcatctgttcttaacctcaactgcagccttatccttttacccatgtgccgaacactcttggcttacctccgaggatcacagaaggttccaagcaggagaaccaggagattgttggataaaagcagaacattccatattacctgtggtgttactatctgtattttctcaggcgtgcatgtggctgcccatctggtgaatgccctcaacttctcagtgaattacagtgaagactttgttgaactgaatgcagcaagataccgagatgaggatcctagaaaacttctcttcacaactgttcctggcctgacaggggtctgcatggtggtggtgctattcctcatgatcacagcctctacatatgcaataagagtttctaactatgatatcttctggtatactcataacctcttctttgtcttctacatgctgctgacgttgcatgtttcaggagggctgctgaagtatcaaactaatttagatacccaccctcccggctgcatcagtcttaaccgaaccagctctcagaatatttccttaccagagtatttctcagaacattttcatgaacctttccctgaaggattttcaaaaccggcagagtttacccagcacaaatttgtgaagatttgtatggaagagcccagattccaagctaattttccacagacttggctttggatttctggacctttgtgcctgtactgtgccgaaagactttacaggtatatccggagcaataagccagtcaccatcatttcggtcatgagtcatccctcagatgtcatggaaatccgaatggtcaaagaaaattttaaagcaagacctggtcagtatattactctacattgtcccagtgtatctgcattagaaaatcatccatttaccctcacaatgtgtccaactgaaaccaaagcaacatttggggttcatcttaaaatagtaggagactggacagaacgatttcgagatttactactgcctccatctagtcaagactccgaaattctgcccttcattcaatctagaaattatcccaagctgtatattgatggtccttttggaagtccatttgaggaatcactgaactatgaggtcagcctctgcgtggctggaggcattggagtaactccatttgcatcaatactcaacaccctgttggatgactggaaaccatacaagcttagaagactatactttatttgggtatgcagagatatccagtccttccgttggtttgcagatttactctgtatgttgcataacaagttttggcaagagaacagacctgactatgtcaacatccagctgtacctcagtcaaacagatgggatacagaagataattggagaaaaatatcatgcactgaattcaagactgtttataggacgtcctcggtggaaacttttgtttgatgaaatagcaaaatataacagaggaaaaacagttggtgttttctgttgtggacccaattcactatccaagactcttcataaactgagtaaccagaacaactcatatgggacaagatttgaatacaataaagagtctttcagctgaaaacttttgccatgaagcaggactctaaagaaggaatgagtgcaatttctaagactttgaaactcagcggaatcaatcagctgtgttatgccaaagaatagtaaggttttcttatttatgattatttaaaatggaaatgtgagaatgtggcaagatgaccgtcacattacatgtttaatctggaaaccaaagagaccctgaagaatatttgatgtgatgattcacttttcagttctcaaattaaaagaaaactgttagatgcacactgttgattttcatggtggattcaagaactccctagtgaggagctgaacttgctcaatctaaggctgattgtcgtgttcctctttaaattgtttttggttgaacaaatgcaagattgaacaaaattaaaaattcattgaagctg

SEQ ID NO: 19567 - DNA, 2277 bp, Homo sapiens
  source 1..2277: mol_type = unassigned DNA
gagtgctacggacgacgcctatgaagcccttagtccttctagttgcgcttttgctatggccttcgtctgtgccggcttatccgacaccatgagtgccgaggaggatgccaggtggctccggtgggtgactcagcagtttaagaccattgcaggagaagatggggagatcagcctgcaagaattcaaagcagctctgcatgtgaaagagtccttctttgcagagcgattctttgccctatttgactccgatagaagtggcaccatcaccctccaggagctgcaggaggcactgaccctgctcatccatggcagccccatggacaaactcaaattcctcttccaggtgtatgacatcgatggcagtggctccattgacccggatgagctgcgcactgtgctgcagtcgtgtctgcgcgagagcgccatctcgctgcctgacgagaagctggaccagctgacgctggcgctcttcgaatcggccgacgcggacggcaacggggccatcaccttcgaggagctccgggacgagctgcagcgcttccccggagtcatggagaacctgaccatcagcgctgcccactggctgacggcccccgccccccgcccacgcccgcgccggccgcgccagctgacccgcgcctactggcacaaccaccgcagccagctgttctgcctggccacctatgcaggcctccacgtgctgctcttcgggctggcggccagcgcgcaccgggacctcggcgccagcgtcatggtggccaagggctgcggccagtgcctcaacttcgactgcagcttcatcgcggtgctgatgctcagacgctgcctcacctggctgcgggccacgtggctggctcaagtcctaccactggaccagaacatccagttccaccagcttatgggctacgtggtagtggggctgtccctcgtgcacaccgtggctcacactgtgaactttgtactccaggctcaggcggaggccagccctttccagttctgggagctgctgctcaccacgaggcctggcattggctgggtacacggttcggcctccccgacaggtgtcgctctgctgctgctgctcctcctcatgttcatctgctccagttcctgcatccgcaggagtggccactttgaggtgttctattggactcacctgtcctacctcctcgtgtggcttctgctcatctttcatgggcccaacttctggaagtggctgctggtgcctggaatcttgtttttcctggagaaggccatcggactggcagtgtcccgcatggcagccgtgtgcatcatggaagtcaacctcctcccctccaaggtcactcatctcctcatcaagcggccccctttttttcactatagacctggtgactacttgtatctgaacatccccaccattgctcgctatgagtggcaccccttcaccatcagcagtgctcctgagcagaaagacactatctggctgcacattcggtcccaaggccagtggacaaacaggctgtatgagtccttcaaggcatcagacccactgggccgtggttctaagaggctgtcgaggagtgtgacaatgagaaagagtcaaaggtcgtccaagggctctgagatacttttggagaaacacaaattctgtaacatcaagtgctacatcgatgggccttatgggacccccacccgcaggatctttgcctctgagcatgccgtgctcatcggggcaggcatcggcatcaccccctttgcttccattctgcagagtatcatgtacaggcaccagaaaagaaagcatacttgccccagctgccagcactcctggatcgaaggtgtccaagacaacatgaagctccataaggtggactttatctggatcaacagagaccagcggtctttcgagtggtttgtgagcctgctgactaaactggagatggaccaggccgaggaggctcaatacggccgcttcctggagctgcatatgtacatgacatctgcactgggcaagaatgacatgaaggccattggcctgcagatggcccttgacctcctggccaacaaggagaagaaagactccatcacggggctgcagacgcgcacccagcctgggcggcctgactggagcaaggtgttccagaaagtggctgctgagaagaagggcaaggtgcaggtcttcttctgtggctccccagctctggccaaggtgctgaagggccattgtgagaagttcggcttcagatttttccaagagaatttctagcctcacctctccaagctctgccccaagtc

SEQ ID NO: 19568 - DNA, 2804 bp, Homo sapiens
  source 1..2804: mol_type = unassigned DNA
agcagtctttctgggacctgtgatctagaagacaggagaagatgaacacatctggagacccagcccagacgggccctgaaggctgtagaggcaccatgagtgccgaggaggatgccaggtggctccggtgggtgactcagcagtttaagaccattgcaggagaagatggggagatcagcctgcaagaattcaaagcagctctgcatgtgaaagagtccttctttgcagagcgattctttgccctatttgactccgatagaagtggcaccatcaccctccaggagctgcaggaggcactgaccctgctcatccatggcagccccatggacaaactcaaattcctcttccaggtgtatgacatcgatgtgtgtgcacggcagggggcgtctgcaggtacagagtggggtgctggggcaggcccgcactgggcttcatccccactcgggacaggcagtggctccattgacccggatgagctgcgcactgtgctgcagtcgtgtctgcgcgagagcgccatctcgctgcctgacgagaagctggaccagctgacgctggcgctcttcgaatcggccgacgcggacggcaacggggccatcaccttcgaggagctccgggacgagctgcagcgcttccccggagtcatggagaacctgaccatcagcgctgcccactggctgacggcccccgccccccgcccacgcccgcgccggccgcgccagctgacccgcgcctactggcacaaccaccgcagccagctgttctgcctggccacctatgcaggcctccacgtgctgctcttcgggctggcggccagcgcgcaccgggacctcggcgccagcgtcatggtggccaagggctgcggccagtgcctcaacttcgactgcagcttcatcgcggtgctgatgctcagacgctgcctcacctggctgcgggccacgtggctggctcaagtcctaccactggaccagaacatccagttccaccagcttatgggctacgtggtagtggggctgtccctcgtgcacaccgtggctcacactgtgaactttgtactccaggctcaggcggaggccagccctttccagttctgggagctgctgctcaccacgaggcctggcattggctgggtacacggttcggcctccccgacaggtgtcgctctgctgctgctgctcctcctcatgttcatctgctccagttcctgcatccgcaggagtggccactttgaggtgttctattggactcacctgtcctacctcctcgtgtggcttctgctcatctttcatgggcccaacttctggaagtggctgctggtgcctggaatcttgtttttcctggagaaggccatcggactggcagtgtcccgcatggcagccgtgtgcatcatggaagtcaacctcctcccctccaaggtcactcatctcctcatcaagcggccccctttttttcactatagacctggtgactacttgtatctgaacatccccaccattgctcgctatgagtggcaccccttcaccatcagcagtgctcctgagcagaaagacactatctggctgcacattcggtcccaaggccagtggacaaacaggctgtatgagtccttcaaggcatcagacccactgggccgtggttctaagaggctgtcgaggagtgtgacaatgagaaagagtcaaaggtcgtccaagggctctgagatacttttggagaaacacaaattctgtaacatcaagtgctacatcgatgggccttatgggacccccacccgcaggatctttgcctctgagcatgccgtgctcatcggggcaggcatcggcatcaccccctttgcttccattctgcagagtatcatgtacaggcaccagaaaagaaagcatacttgccccagctgccagcactcctggatcgaaggtgtccaagacaacatgaagctccataaggtggactttatctggatcaacagagaccagcggtctttcgagtggtttgtgagcctgctgactaaactggagatggaccaggccgaggaggctcaatacggccgcttcctggagctgcatatgtacatgacatctgcactgggcaagaatgacatgaaggccattggcctgcagatggcccttgacctcctggccaacaaggagaagaaagactccatcacggggctgcagacgcgcacccagcctgggcggcctgactggagcaaggtgttccagaaagtggctgctgagaagaagggcaaggtgcaggtcttcttctgtggctccccagctctggccaaggtgctgaagggccattgtgagaagttcggcttcagatttttccaagagaatttctagcctcacctctccaagctctgccccaagtccacaccatgggtctgcttcattgcattagtataaatgcccccacagggaccagcctcagatgacccacccaataagacaaagcctagggaccccctaatcctgctcaacagagagaacaggagaccccaaggggcagatgaacttcctctagaacccaggggaagggacagtgccttgttcagtctgctgtagattctggggtttctgtgaaagtgagggaaccagaggctggtcacgggagcttgggggtggggttcgagggggcagagggcaaccactcctccaaacattttccgacggagccttcccccacatccatggtcccaaacctgcccaatcatcacagtcatttggaagcttatttctccggcatcttataaaattgttcaaacctacaaaaagtgagaagaatcatacagtgaacagtgttaccta

SEQ ID NO: 19569 - DNA, 2289 bp, Homo sapiens
  source 1..2289: mol_type = unassigned DNA
agtctttctgggacctgtgatctagaagacaggagaagatgaacacatctggagacccagcccagacgggccctgaaggctgtagaggcaccatgagtgccgaggaggatgccaggtggctccggtgggtgactcagcagtttaagaccattgcaggagaagatggggagatcagcctgcaagaattcaaagcagctctgcatgtgaaagagtccttctttgcagagcgattctttgccctatttgactccgatagaagtggcaccatcaccctccaggagctgcaggaggcactgaccctgctcatccatggcagccccatggacaaactcaaattcctcttccaggtgtatgacatcgatggcagtggctccattgacccggatgagctgcgcactgtgctgcagtcgtgtctgcgcgagagcgccatctcgctgcctgacgagaagctggaccagctgacgctggcgctcttcgaatcggccgacgcggacggcaacggggccatcaccttcgaggagctccgggacgagctgcagcgcttccccggagtcatggagaacctgaccatcagcgctgcccactggctgacggcccccgccccccgcccacgcccgcgccggccgcgccagctgacccgcgcctactggcacaaccaccgcagccagctgttctgcctggccacctatgcaggcctccacgtgctgctcttcgggctggcggccagcgcgcaccgggacctcggcgccagcgtcatggtggccaagggctgcggccagtgcctcaacttcgactgcagcttcatcgcggtgctgatgctcagacgctgcctcacctggctgcgggccacgtggctggctcaagtcctaccactggaccagaacatccagttccaccagcttatgggctacgtggtagtggggctgtccctcgtgcacaccgtggctcacactgtgaactttgtactccaggctcaggcggaggccagccctttccagttctgggagctgctgctcaccacgaggcctggcattggctgggtacacggttcggcctccccgacaggtgtcgctctgctgctgctgctcctcctcatgttcatctgctccagttcctgcatccgcaggagtggccactttgaggtgttctattggactcacctgtcctacctcctcgtgtggcttctgctcatctttcatgggcccaacttctggaagtggctgctggtgcctggaatcttgtttttcctggagaaggccatcggactggcagtgtcccgcatggcagccgtgtgcatcatggaagtcaacctcctcccctccaaggtcactcatctcctcatcaagcggccccctttttttcactatagacctggtgactacttgtatctgaacatccccaccattgctcgctatgagtggcaccccttcaccatcagcagtgctcctgagcagaaagacactatctggctgcacattcggtcccaaggccagtggacaaacaggctgtatgagtccttcaaggcatcagacccactgggccgtggttctaagaggctgtcgaggagtgtgacaatgagaaagagtcaaaggtcgtccaagggctctgagatacttttggagaaacacaaattctgtaacatcaagtgctacatcgatgggccttatgggacccccacccgcaggatctttgcctctgagcatgccgtgctcatcggggcaggcatcggcatcaccccctttgcttccattctgcagagtatcatgtacaggcaccagaaaagaaagcatacttgccccagctgccagcactcctggatcgaaggtgtccaagacaacatgaagctccataaggtggactttatctggatcaacagagaccagcggtctttcgagtggtttgtgagcctgctgactaaactggagatggaccaggccgaggaggctcaatacggccgcttcctggagctgcatatgtacatgacatctgcactgggcaagaatgacatgaaggccattggcctgcagatggcccttgacctcctggccaacaaggagaagaaagactccatcacggggctgcagacgcgcacccagcctgggcggcctgactggagcaaggtgttccagaaagtggctgctgagaagaagggcaaggtgcaggtcttcttctgtggctccccagctctggccaaggtgctgaagggccattgtgagaagttcggcttcagatttttccaagagaatttctagcctcacctctccaagctctgccccaagtccacaccat

SEQ ID NO: 19570 - DNA, 7946 bp, Homo sapiens
  source 1..7946: mol_type = unassigned DNA
atggacaacgccctgttttgtcttgcagccgtctccaacctggacatagagagtaagctgagtgtgtactaccgcgccccgtggcaccagcagcgcaacatcttcctcccagccacaaggccaccctgcgtggaggagctgcaccgccacgcccggcagagcctgcaagccctgcgcagagaacaccggagccggagcgatcgccgagagcaaagagcagctgcccccctttccattgcagctcctccactgccagcctaccctccagctcacagccagaggaggcgtgagtttaaggaccgtcactttttaacgtttaacagcacccgttcgccctcccccactgaatgttgccacatgaccccgtggagtagaaagtcccatcccccagaggatgaagatacagatgtcatgttagggcagaggccgaaaaacccaatacacaatatcccttccacactggacaagcagaccaactggagcaaagcactacctctcccgacgccagaggagaagatgaaacaagatgcccaagtgatttcttcttgcattattcccatcaatgttactggagttggctttgacagagaggctagtatacgctgctctctggttcattcacaatcggtactacagcggagacgaaaattgaggaggaggaaaaccatctcgggtatccccagaagagttcaacaagaaatagattctgatgaatcaccagtggccagggaaaggaatgtgattgtgcacacaaacccagacccctccaacactgtcaataggatatccggaaccagggactctgagtgccaaaccgaggatattctgattgctgccccatccagaaggagaatcagagctcaaaggggtcaaagcattgcagcttccctttctcattctgctggcaacatttctgccctagcagacaaaggtgacaccatgtttactcctgcagtgagcagccgcacaagatctcggagccttccccgggaaggtaatagaggtggggatgctgagcccaaagttggcgctaaaccctcagcatatgaagagggagagtcttttgtgggtgaccatgaaagaacccctaatgatttcagtgaggctccaagcagcccgagtgcccaggaccaccagcctactttgggcctggcctgctctcaacatcttcacagcccccagcacaaattaagtgagaggggaaggtcacgtctgtcccgaatggctgctgactctggcagctgtgacatctcctccaactcagacacgtttgggagccccatccactgcatctccacggctggcgtcctccttagcagccacatggaccagaaagatgaccaccagtcatccagtggcaactggagtgggagcagctccacgtgcccctcgcagacctcagaaaccatccctcctgcagcttctcctccactcactggctcttcacactgtgactcggagttgtcactaaacacagcccctcatgccaatgaggatgccagtgttttcgtgacagagcaatacaatgaccacttggataaagtgagaggccatcgggcaaactcctttacctccactgttgcagacctgctggatgatcccaacaacagcaacacaagtgacagtgagtggaattacctacaccaccaccatgatgcctcctgccgccaggattttagtcctgagcgtcccaaggcagacagcctgggctgcccaagcttcacaagcatggccacttatgacagctttctggaaaagtctccatcagacaaagcggacactagctctcacttttcagtagacacggaaggatactatacctccatgcactttgactgtggtctcaaaggtaataagagctatgtctgtcactatgcagccctgggcccagagaatggccagggtgtaggggcttcccctggtcttccagattgtgcctggcaggactacttagaccacaagaggcagggaagaccaagcatctctttcaggaaaccaaaggcaaagccgaccccacctaaacgtagctcatcattgaggaagtctgatggaaacgcagatatttctgagaagaaagaaccaaagataagcagtggtcagcacctgcctcacagttccagggaaatgaagctgcctcttgatttcgccaacacgccttctcgaatggaaaacgccaatcttcccaccaagcaggaaccttcttggataaaccagagtgaacaaggcattaaggaacctcagttagatgcttcggatattccaccattcaaagatgaagttgccgaatccacacactatgcagacctctggctcctaaatgacttgaaaacaaatgatccttatagatctctatctaattcaagcaccgctacgggtaccacagtcattgaatgcatcaaatctccagagagctctgaatcccaaacatcacaatcagaatcaagagccaccaccccatctcttccttctgttgacaatgagtttaaactggcttcaccagaaaagctggctggcttggcatctccatcaagtggctattcaagccagtctgaaacgccaacatcctctttccctacagctttcttttcaggtccattgtctcccggaggtagcaaaagaaaacctaaagtcccagaaagaaaatcctcactacagcaaccctctttaaaagatggaactatatcactgagtaaagaccttgaacttccaattatacctcctacccatcttgatctaagtgctcttcataatgtcttgaacaaaccattccaccaccgtcatccactgcatgtttttactcataataagcagaacacagtaggagaaacactgaggtcgaatcctccaccgtcccttgcaattacaccaacgatcctgaaatctgttaaccttaggtccatcaacaagtctgaagaagttaagcaaaaagaagaaaacaatacagatctcccttatttagaggaaagcacactcacaacggctgccttgtctccaagtaagattaggccgcatacagcaaataaatcagtatctcgtcaatactccactgaagacaccatactgtcctttttagactcttctgcagttgagatgggaccagataaactacatttagaaaaaaactctacttttgatgtgaagaatcgctgcgatccagaaaccataacatcagctggtagcagtcttctagattcaaatgtcacaaaagaccaagtgcgtacagagactgagcctattccagaaaacacgccaaccaaaaactgtgcttttcccacagaaggatttcagagggtctctgctgcccgcccaaatgatttggatggtaaaataatacaatatggacctggtccagacgaaactctagaacaggtacagaaggcaccctctgcaggtctggaggaagttgcacaacctgaatctgtggatgtaatcacatctcagtcagactcaccaactagagcaacagatgtaagcaatcaatttaagcatcaatttgttatgagccgccaccatgacaaagtgcctggtactatcagctatgaatcggagataacatctgtaaattcattccctgaaaaatgttccaagcaggaaaatattgcttcaggtatttcagccaaaagtgcctctgataacagcaaagcagaggagacccaaggaaatgtggatgaggcttcattgaaagaatcatcaccgagtgatgactccatcatttcaccacttagtgaagactcccaagctgaagcagagggtgtgttcgtgtctccaaacaaacctcgaacaactgaggatttatttgcagtcattcacagatccaagaggaaagtacttggaagaaaagattccggggacatgtctgttcgaagcaaatcgagagctcccctcagcagtagcagcagcagcgccagttccatcacttcacccagcagtaatgtgacaacccccaacagccagaggtctcctggtctcatataccgaaatgccaaaaagtccaacacatccaatgaagagtttaagctgttactgctcaagaaaggcagtcgctcagattctagttaccgcatgtctgccactgagatcctgaagagccccatactgcccaaacctcctggggagctcacagcagagtcccctcagagcaccgatgatgcccatcaggggtcacaaggggctgaggcattgtccccactctctccatgctccccacgagttaatgcagaaggcttttcctcgaagagctttgccacctcagcatcagcaagggttggacgttctcgggcccctcctgcagccagcagcagccgctacagtgtccgctgccggctgtacaatacgcccatgcaggcaatctccgagggagagacggaaaattctgacgggagcccacatgacgaccgttcctcccagagttcaacatagactgcctgtaccaggctgcctggcaaaggccaaaacccttactcacatgaggatggaggaacagaacagaggacttgggaaaagtctcaacttgatggggtagcatcactgctaagcaatgaatgaatttctaaatacagtatgtgctgggtaaacagaaagtggtttagacattcttgattagtttccatattttaagtagctgcagtctttcatgtttttctttagcatagtttgatttacgcaatctccttccttgtgaaaatagaggatacaaaattgtctaattttcatgacacctagaaaacgttttcccagagctgcctattcagaaactaaagccctcactgtcattattctttaagaagatgaaattactctggatgtttggtatttttttacattaaaacaaactaaagcaaaatttagaagaaagaactacacatatgtaaataccatatttttgataaaaatgtgtaaatagatttatcaatgatgagtggacatgtggtcaattatctactgcacaccaactgtttatagaatacacaaaaataaaatgtaataactgtattctgtgaataccattttcatatcaaatgccatatttaaatgtccaccaatatgatttctgagtggtaaacctcaaatatgaattttaaactggtgaactaaaggaaatcttgaggtcatatactgaaatatgaataaattaaaataatgaattcagatctaatcatttttatgacaaattgcagcaccaaacaaactaatagcaacccatggctgtgatttgttgtgtggtaatttggacagaatgaaaagcatgcttttgattttttttttaatcagtgagagaagtcatcattctcaacacaaagccctgaacaacagcatttgacagtgtcctttagattttaattttttcaatggattgctttaaagagaatgagtagggaaaatagtagttaattttaggttatgttttatattaggctactggggacataaacggtcataactaatgactgtaatcattaaactccttaaacagtttagaaattagctccaggttcttaaactaacaaaaataaaacctaagcatgccacagagctattgattaatcagtaagtacctgtaatgagttttcagtgaagctttctctctgtgctgatgagattcatgctacctaaaaattaacagaaatgacactgtgaacaatgtagttggaaaataggtatgtgtatatgcattatttatactcattgttaaactgggaatggggaacagctctggttcacaatactacatacaactgagtttttgtctggttttactatagtgtctgcttgatggcaaaaggggagggtggagggtgggagaggaaatgtcagggcatgtgctctgataaaataaaggcagggaaacaagctgaattacttgaaattacttgaattttcttgtcttaaaactgaaaaaaaaatgtagttacacgttaaaatctgcaaatggtttttacacctctgattttaacatgaacttatactaatgtttggaatcttatgtcagaaatataagcagctatgtacttagaataggttttgaatgggagaggtagaacagagagagaattaagaagggatctgacttataaaagactagaatgtgattagagtgatagaacataccaatgttaccaagaaattgacaagctgctggctttaagcttatgcaagtggtagttgggaaagtaggaggtgtggaagagggtttgcattttggattaattcatgcaaaatgaaggaggaagcctggtctaagaagatactgtctttcaatagaaatgatttctaaactgctacagattaagaatagataatctgattgctgttgttttgtttgtttggaaagaaaaaaaatgtctggcttcttctactatttgttttcactaccaaactgtgttactaaatttcttgtcatccttgtatgtaaaatgggtgctgggggtggaggggtataagaggagggagagtcagagagagtgtgtatgggtgtgtgtgagtgtgagtgtgtgtgtacgcacacacactggggatagataagctacctggtaaagggtttgaacatttacaaaatgtcacactttttcttaaaagaaaaatattttggggtttgaataaaatggaccaccatttctcattggaacccattaattaagaaaaccagcatggtttgacaccacatgggaacatgaataaatctgtctcatgatttgaaaagtacaccttgcaaagttttaaaaataaagtttttaggcaaatgcgataagaaaccgtcatttccagtcacagtaggcgatctttcgtaatttcataaaagcagttcgtttgcagtatggcttttgtgtagttaggggttttttaagtgtgaagaaaggtatgtgggctttaaaagtgattctaaatcttgaatagaaaacacatgaattggctttaataaaaatgtcacctttttattattgacattaagtaatggtaccatatattttttaaaatacatattgacttgaattgtgaggcaataagataccttctatatgtaatgatcacagaactaacccttataatatagttttacttattttgtttactctaaaaatctatagcagagtttctctattttatatttcatagatttaaaaaacccaaataaagatggatttaaaattcactgtggaaaagagtattgagttacaaactgagaagaaaaagcaggaagttccctaataatctggaatattctacatggcttgattacatagcaaacaagaccaagatttagggctgtcttaaacatcactgccgtcttgaagcagggtacacacgttaggtattgtgaagaacatcaatccgaacttttcttctgttgtttgcactgatgcgattttttgttcttttatgtttatacaacgtatctatgttgtgtaggggaaattttttcattttttaaaaattctactttggttttgttgttgttttgatttgtttttggctaagtagaggacatggactagttgtagcaaacagaacatgctgtttgctcttgccaaaggtcagtgagtgagtgcatttgctgcagtggtggcacgtagagaactagatggtaataaagatttaaaactatgaagaaggttacagtgtaactattttggtactagaaccagttcatgctggccgaaacgacaatggtttatggacttgcatccattttgtatttttgtaatatttgtaaatatgaactttttaaattgctgcaaagatggtttcttttgtaagatgttttcaacgtttacattcaatccaagcctttgtatattttagagctgtgcaacactttaagtcttgtatttatttttagtaaaaatggtgacagtttcattgtgaacccctctcaaaaaaaatgtatcagaaaagtttgattacctagaaagtgtgtatagaaactgcaaataaacgtgactgcaatt

SEQ ID NO: 19571 - DNA, 8761 bp, Homo sapiens
  source 1..8761: mol_type = unassigned DNA
ggtggcgacggcgagcacagaaacgatggagttgagccagtcgaccctggttggaagcaagtgagaagagaccaggcgcacccctaaatttctgtgcggagcgcttgtcatcctccccagggaacggtgcacccaaaggaggactggctggactgatttgctagggagagggcggggaagaggaggcaaggtgagcagagaagccccctgcgtatccggactgccagatcgcgcttttgccggactcctgccccctccctgctcaggtgggcgcgcccggtctccagctcacaggggcgcttggaggagaccagaaagtcgccgcctggctgcgcgggatgcctttcgccaagcggatcgtggagccgcaatggctgtgcaggcagcggcgccctgcgcccggcccagcagtggacgcgagcggaggcagcgctgagccgccgccgcccttgcagccgccgggccggagggacctggacgaggtcgaggcgccagggccagaggagccagcccgcgccgtccctgcaccttcagggctgccaccgccgccgccgccactgcccgcgccggccgaccagactcagccgccgcacggagaggcgtccgtggctggcgaggagagcacggcggggatcccggaggcggcgcccgcagccggcgaggcgtcctcggcggcggcggcggcggccgtgctgctcatgctggacctatgcgcggtcagcaacgccgctctggcccgtgtcctccggcagctctcggacgtggcccggcacgcttgcagcctcttccaggagctcgagagcgacatccagctcacccaccgccgcgtctgggcgctgcagggcaagctcggcggcgtgcagcgcgtcctcagcacgcttgaccctaagcaggaggcagtgcccgtctccaacctggacatagagagtaagctgagtgtgtactaccgcgccccgtggcaccagcagcgcaacatcttcctcccagccacaaggccaccctgcgtggaggagctgcaccgccacgcccggcagagcctgcaagccctgcgcagagaacaccggagccggagcgatcgccgagagcaaagagcagctgcccccctttccattgcagctcctccactgccagcctaccctccagctcacagccagaggaggcgtgagtttaaggaccgtcactttttaacgtcccatcccccagaggatgaagatacagatgtcatgttagggcagaggccgaaaaacccaatacacaatatcccttccacactggacaagcagaccaactggagcaaagcactacctctcccgacgccagaggagaagatgaaacaagatgcccaagtgatttcttcttgcattattcccatcaatgttactggagttggctttgacagagaggctagtatacgctgctctctggttcattcacaatcggtactacagcggagacgaaaattgaggaggaggaaaaccatctcgggtatccccagaagagttcaacaagaaatagattctgatgaatcaccagtggccagggaaaggaatgtgattgtgcacacaaacccagacccctccaacactgtcaataggatatccggaaccagggactctgagtgccaaaccgaggatattctgattgctgccccatccagaaggagaatcagagctcaaaggggtcaaagcattgcagcttccctttctcattctgctggcaacatttctgccctagcagacaaaggtgacaccatgtttactcctgcagtgagcagccgcacaagatctcggagccttccccgggaaggtaatagaggtggggatgctgagcccaaagttggcgctaaaccctcagcatatgaagagggagagtcttttgtgggtgaccatgaaagaacccctaatgatttcagtgaggctccaagcagcccgagtgcccaggaccaccagcctactttgggcctggcctgctctcaacatcttcacagcccccagcacaaattaagtgagaggggaaggtcacgtctgtcccgaatggctgctgactctggcagctgtgacatctcctccaactcagacacgtttgggagccccatccactgcatctccacggctggcgtcctccttagcagccacatggaccagaaagatgaccaccagtcatccagtggcaactggagtgggagcagctccacgtgcccctcgcagacctcagaaaccatccctcctgcagcttctcctccactcactggctcttcacactgtgactcggagttgtcactaaacacagcccctcatgccaatgaggatgccagtgttttcgtgacagagcaatacaatgaccacttggataaagtgagaggccatcgggcaaactcctttacctccactgttgcagacctgctggatgatcccaacaacagcaacacaagtgacagtgagtggaattacctacaccaccaccatgatgcctcctgccgccaggattttagtcctgagcgtcccaaggcagacagcctgggctgcccaagcttcacaagcatggccacttatgacagctttctggaaaagtctccatcagacaaagcggacactagctctcacttttcagtagacacggaaggatactatacctccatgcactttgactgtggtctcaaaggtaataagagctatgtctgtcactatgcagccctgggcccagagaatggccagggtgtaggggcttcccctggtcttccagattgtgcctggcaggactacttagaccacaagaggcagggaagaccaagcatctctttcaggaaaccaaaggcaaagccgaccccacctaaacgtagctcatcattgaggaagtctgatggaaacgcagatatttctgagaagaaagaaccaaagataagcagtggtcagcacctgcctcacagttccagggaaatgaagctgcctcttgatttcgccaacacgccttctcgaatggaaaacgccaatcttcccaccaagcaggaaccttcttggataaaccagagtgaacaaggcattaaggaacctcagttagatgcttcggatattccaccattcaaagatgaagttgccgaatccacacactatgcagacctctggctcctaaatgacttgaaaacaaatgatccttatagatctctatctaattcaagcaccgctacgggtaccacagtcattgaatgcatcaaatctccagagagctctgaatcccaaacatcacaatcagaatcaagagccaccaccccatctcttccttctgttgacaatgagtttaaactggcttcaccagaaaagctggctggcttggcatctccatcaagtggctattcaagccagtctgaaacgccaacatcctctttccctacagctttcttttcaggtccattgtctcccggaggtagcaaaagaaaacctaaagtcccagaaagaaaatcctcactacagcaaccctctttaaaagatggaactatatcactgagtaaagaccttgaacttccaattatacctcctacccatcttgatctaagtgctcttcataatgtcttgaacaaaccattccaccaccgtcatccactgcatgtttttactcataataagcagaacacagtaggagaaacactgaggtcgaatcctccaccgtcccttgcaattacaccaacgatcctgaaatctgttaaccttaggtccatcaacaagtctgaagaagttaagcaaaaagaagaaaacaatacagatctcccttatttagaggaaagcacactcacaacggctgccttgtctccaagtaagattaggccgcatacagcaaataaatcagtatctcgtcaatactccactgaagacaccatactgtcctttttagactcttctgcagttgagatgggaccagataaactacatttagaaaaaaactctacttttgatgtgaagaatcgctgcgatccagaaaccataacatcagctggtagcagtcttctagattcaaatgtcacaaaagaccaagtgcgtacagagactgagcctattccagaaaacacgccaaccaaaaactgtgcttttcccacagaaggatttcagagggtctctgctgcccgcccaaatgatttggatggtaaaataatacaatatggacctggtccagacgaaactctagaacaggtacagaaggcaccctctgcaggtctggaggaagttgcacaacctgaatctgtggatgtaatcacatctcagtcagactcaccaactagagcaacagatgtaagcaatcaatttaagcatcaatttgttatgagccgccaccatgacaaagtgcctggtactatcagctatgaatcggagataacatctgtaaattcattccctgaaaaatgttccaagcaggaaaatattgcttcaggtatttcagccaaaagtgcctctgataacagcaaagcagaggagacccaaggaaatgtggatgaggcttcattgaaagaatcatcaccgagtgatgactccatcatttcaccacttagtgaagactcccaagctgaagcagagggtgtgttcgtgtctccaaacaaacctcgaacaactgaggatttatttgcagtcattcacagatccaagaggaaagtacttggaagaaaagattccggggacatgtctgttcgaagcaaatcgagagctcccctcagcagtagcagcagcagcgccagttccatcacttcacccagcagtaatgtgacaacccccaacagccagaggtctcctggtctcatataccgaaatgccaaaaagtccaacacatccaatgaagagtttaagctgttactgctcaagaaaggcagtcgctcagattctagttaccgcatgtctgccactgagatcctgaagagccccatactgcccaaacctcctggggagctcacagcagagtcccctcagagcaccgatgatgcccatcaggggtcacaaggggctgaggcattgtccccactctctccatgctccccacgagttaatgcagaaggcttttcctcgaagagctttgccacctcagcatcagcaagggttggacgttctcgggcccctcctgcagccagcagcagccgctacagtgtccgctgccggctgtacaatacgcccatgcaggcaatctccgagggagagacggaaaattctgacgggagcccacatgacgaccgttcctcccagagttcaacatagactgcctgtaccaggctgcctggcaaaggccaaaacccttactcacatgaggatggaggaacagaacagaggacttgggaaaagtctcaacttgatggggtagcatcactgctaagcaatgaatgaatttctaaatacagtatgtgctgggtaaacagaaagtggtttagacattcttgattagtttccatattttaagtagctgcagtctttcatgtttttctttagcatagtttgatttacgcaatctccttccttgtgaaaatagaggatacaaaattgtctaattttcatgacacctagaaaacgttttcccagagctgcctattcagaaactaaagccctcactgtcattattctttaagaagatgaaattactctggatgtttggtatttttttacattaaaacaaactaaagcaaaatttagaagaaagaactacacatatgtaaataccatatttttgataaaaatgtgtaaatagatttatcaatgatgagtggacatgtggtcaattatctactgcacaccaactgtttatagaatacacaaaaataaaatgtaataactgtattctgtgaataccattttcatatcaaatgccatatttaaatgtccaccaatatgatttctgagtggtaaacctcaaatatgaattttaaactggtgaactaaaggaaatcttgaggtcatatactgaaatatgaataaattaaaataatgaattcagatctaatcatttttatgacaaattgcagcaccaaacaaactaatagcaacccatggctgtgatttgttgtgtggtaatttggacagaatgaaaagcatgcttttgattttttttttaatcagtgagagaagtcatcattctcaacacaaagccctgaacaacagcatttgacagtgtcctttagattttaattttttcaatggattgctttaaagagaatgagtagggaaaatagtagttaattttaggttatgttttatattaggctactggggacataaacggtcataactaatgactgtaatcattaaactccttaaacagtttagaaattagctccaggttcttaaactaacaaaaataaaacctaagcatgccacagagctattgattaatcagtaagtacctgtaatgagttttcagtgaagctttctctctgtgctgatgagattcatgctacctaaaaattaacagaaatgacactgtgaacaatgtagttggaaaataggtatgtgtatatgcattatttatactcattgttaaactgggaatggggaacagctctggttcacaatactacatacaactgagtttttgtctggttttactatagtgtctgcttgatggcaaaaggggagggtggagggtgggagaggaaatgtcagggcatgtgctctgataaaataaaggcagggaaacaagctgaattacttgaaattacttgaattttcttgtcttaaaactgaaaaaaaaatgtagttacacgttaaaatctgcaaatggtttttacacctctgattttaacatgaacttatactaatgtttggaatcttatgtcagaaatataagcagctatgtacttagaataggttttgaatgggagaggtagaacagagagagaattaagaagggatctgacttataaaagactagaatgtgattagagtgatagaacataccaatgttaccaagaaattgacaagctgctggctttaagcttatgcaagtggtagttgggaaagtaggaggtgtggaagagggtttgcattttggattaattcatgcaaaatgaaggaggaagcctggtctaagaagatactgtctttcaatagaaatgatttctaaactgctacagattaagaatagataatctgattgctgttgttttgtttgtttggaaagaaaaaaaatgtctggcttcttctactatttgttttcactaccaaactgtgttactaaatttcttgtcatccttgtatgtaaaatgggtgctgggggtggaggggtataagaggagggagagtcagagagagtgtgtatgggtgtgtgtgagtgtgagtgtgtgtgtacgcacacacactggggatagataagctacctggtaaagggtttgaacatttacaaaatgtcacactttttcttaaaagaaaaatattttggggtttgaataaaatggaccaccatttctcattggaacccattaattaagaaaaccagcatggtttgacaccacatgggaacatgaataaatctgtctcatgatttgaaaagtacaccttgcaaagttttaaaaataaagtttttaggcaaatgcgataagaaaccgtcatttccagtcacagtaggcgatctttcgtaatttcataaaagcagttcgtttgcagtatggcttttgtgtagttaggggttttttaagtgtgaagaaaggtatgtgggctttaaaagtgattctaaatcttgaatagaaaacacatgaattggctttaataaaaatgtcacctttttattattgacattaagtaatggtaccatatattttttaaaatacatattgacttgaattgtgaggcaataagataccttctatatgtaatgatcacagaactaacccttataatatagttttacttattttgtttactctaaaaatctatagcagagtttctctattttatatttcatagatttaaaaaacccaaataaagatggatttaaaattcactgtggaaaagagtattgagttacaaactgagaagaaaaagcaggaagttccctaataatctggaatattctacatggcttgattacatagcaaacaagaccaagatttagggctgtcttaaacatcactgccgtcttgaagcagggtacacacgttaggtattgtgaagaacatcaatccgaacttttcttctgttgtttgcactgatgcgattttttgttcttttatgtttatacaacgtatctatgttgtgtaggggaaattttttcattttttaaaaattctactttggttttgttgttgttttgatttgtttttggctaagtagaggacatggactagttgtagcaaacagaacatgctgtttgctcttgccaaaggtcagtgagtgagtgcatttgctgcagtggtggcacgtagagaactagatggtaataaagatttaaaactatgaagaaggttacagtgtaactattttggtactagaaccagttcatgctggccgaaacgacaatggtttatggacttgcatccattttgtatttttgtaatatttgtaaatatgaactttttaaattgctgcaaagatggtttcttttgtaagatgttttcaacgtttacattcaatccaagcctttgtatattttagagctgtgcaacactttaagtcttgtatttatttttagtaaaaatggtgacagtttcattgtgaacccctctcaaaaaaaatgtatcagaaaagtttgattacctagaaagtgtgtatagaaactgcaaataaacgtgactgcaattaaa

SEQ ID NO: 19572 - DNA, 8213 bp, Homo sapiens
  source 1..8213: mol_type = unassigned DNA
ctgatttgccattcaagtgaaccctggagggattagcagccagcctagcacttgggtgagaccatctccccctccaggggggagtcctagatgcagcacagaggttctgtgaaaatctgccatcctccttgcagaaggttgccctctctcgccctccatcccccccgccgtgcttgctgacttaagcagatcagctttcagctctctggcattcagagacgtctttgcataaaagaaaaggcccttccttaaggagcagagcgggaatccaagcatggctctggcctgctgcatgcccaagaatgcagccgtctccaacctggacatagagagtaagctgagtgtgtactaccgcgccccgtggcaccagcagcgcaacatcttcctcccagccacaaggccaccctgcgtggaggagctgcaccgccacgcccggcagagcctgcaagccctgcgcagagaacaccggagccggagcgatcgccgagagcaaagagcagctgcccccctttccattgcagctcctccactgccagcctaccctccagctcacagccagaggaggcgtgagtttaaggaccgtcactttttaacgtttaacagcacccgttcgccctcccccactgaatgttgccacatgaccccgtggagtagaaagtcccatcccccagaggatgaagatacagatgtcatgttagggcagaggccgaaaaacccaatacacaatatcccttccacactggacaagcagaccaactggagcaaagcactacctctcccgacgccagaggagaagatgaaacaagatgcccaagtgatttcttcttgcattattcccatcaatgttactggagttggctttgacagagaggctagtatacgctgctctctggttcattcacaatcggtactacagcggagacgaaaattgaggaggaggaaaaccatctcgggtatccccagaagagttcaacaagaaatagattctgatgaatcaccagtggccagggaaaggaatgtgattgtgcacacaaacccagacccctccaacactgtcaataggatatccggaaccagggactctgagtgccaaaccgaggatattctgattgctgccccatccagaaggagaatcagagctcaaaggggtcaaagcattgcagcttccctttctcattctgctggcaacatttctgccctagcagacaaaggtgacaccatgtttactcctgcagtgagcagccgcacaagatctcggagccttccccgggaaggtaatagaggtggggatgctgagcccaaagttggcgctaaaccctcagcatatgaagagggagagtcttttgtgggtgaccatgaaagaacccctaatgatttcagtgaggctccaagcagcccgagtgcccaggaccaccagcctactttgggcctggcctgctctcaacatcttcacagcccccagcacaaattaagtgagaggggaaggtcacgtctgtcccgaatggctgctgactctggcagctgtgacatctcctccaactcagacacgtttgggagccccatccactgcatctccacggctggcgtcctccttagcagccacatggaccagaaagatgaccaccagtcatccagtggcaactggagtgggagcagctccacgtgcccctcgcagacctcagaaaccatccctcctgcagcttctcctccactcactggctcttcacactgtgactcggagttgtcactaaacacagcccctcatgccaatgaggatgccagtgttttcgtgacagagcaatacaatgaccacttggataaagtgagaggccatcgggcaaactcctttacctccactgttgcagacctgctggatgatcccaacaacagcaacacaagtgacagtgagtggaattacctacaccaccaccatgatgcctcctgccgccaggattttagtcctgagcgtcccaaggcagacagcctgggctgcccaagcttcacaagcatggccacttatgacagctttctggaaaagtctccatcagacaaagcggacactagctctcacttttcagtagacacggaaggatactatacctccatgcactttgactgtggtctcaaaggtaataagagctatgtctgtcactatgcagccctgggcccagagaatggccagggtgtaggggcttcccctggtcttccagattgtgcctggcaggactacttagaccacaagaggcagggaagaccaagcatctctttcaggaaaccaaaggcaaagccgaccccacctaaacgtagctcatcattgaggaagtctgatggaaacgcagatatttctgagaagaaagaaccaaagataagcagtggtcagcacctgcctcacagttccagggaaatgaagctgcctcttgatttcgccaacacgccttctcgaatggaaaacgccaatcttcccaccaagcaggaaccttcttggataaaccagagtgaacaaggcattaaggaacctcagttagatgcttcggatattccaccattcaaagatgaagttgccgaatccacacactatgcagacctctggctcctaaatgacttgaaaacaaatgatccttatagatctctatctaattcaagcaccgctacgggtaccacagtcattgaatgcatcaaatctccagagagctctgaatcccaaacatcacaatcagaatcaagagccaccaccccatctcttccttctgttgacaatgagtttaaactggcttcaccagaaaagctggctggcttggcatctccatcaagtggctattcaagccagtctgaaacgccaacatcctctttccctacagctttcttttcaggtccattgtctcccggaggtagcaaaagaaaacctaaagtcccagaaagaaaatcctcactacagcaaccctctttaaaagatggaactatatcactgagtaaagaccttgaacttccaattatacctcctacccatcttgatctaagtgctcttcataatgtcttgaacaaaccattccaccaccgtcatccactgcatgtttttactcataataagcagaacacagtaggagaaacactgaggtcgaatcctccaccgtcccttgcaattacaccaacgatcctgaaatctgttaaccttaggtccatcaacaagtctgaagaagttaagcaaaaagaagaaaacaatacagatctcccttatttagaggaaagcacactcacaacggctgccttgtctccaagtaagattaggccgcatacagcaaataaatcagtatctcgtcaatactccactgaagacaccatactgtcctttttagactcttctgcagttgagatgggaccagataaactacatttagaaaaaaactctacttttgatgtgaagaatcgctgcgatccagaaaccataacatcagctggtagcagtcttctagattcaaatgtcacaaaagaccaagtgcgtacagagactgagcctattccagaaaacacgccaaccaaaaactgtgcttttcccacagaaggatttcagagggtctctgctgcccgcccaaatgatttggatggtaaaataatacaatatggacctggtccagacgaaactctagaacaggtacagaaggcaccctctgcaggtctggaggaagttgcacaacctgaatctgtggatgtaatcacatctcagtcagactcaccaactagagcaacagatgtaagcaatcaatttaagcatcaatttgttatgagccgccaccatgacaaagtgcctggtactatcagctatgaatcggagataacatctgtaaattcattccctgaaaaatgttccaagcaggaaaatattgcttcaggtatttcagccaaaagtgcctctgataacagcaaagcagaggagacccaaggaaatgtggatgaggcttcattgaaagaatcatcaccgagtgatgactccatcatttcaccacttagtgaagactcccaagctgaagcagagggtgtgttcgtgtctccaaacaaacctcgaacaactgaggatttatttgcagtcattcacagatccaagaggaaagtacttggaagaaaagattccggggacatgtctgttcgaagcaaatcgagagctcccctcagcagtagcagcagcagcgccagttccatcacttcacccagcagtaatgtgacaacccccaacagccagaggtctcctggtctcatataccgaaatgccaaaaagtccaacacatccaatgaagagtttaagctgttactgctcaagaaaggcagtcgctcagattctagttaccgcatgtctgccactgagatcctgaagagccccatactgcccaaacctcctggggagctcacagcagagtcccctcagagcaccgatgatgcccatcaggggtcacaaggggctgaggcattgtccccactctctccatgctccccacgagttaatgcagaaggcttttcctcgaagagctttgccacctcagcatcagcaagggttggacgttctcgggcccctcctgcagccagcagcagccgctacagtgtccgctgccggctgtacaatacgcccatgcaggcaatctccgagggagagacggaaaattctgacgggagcccacatgacgaccgttcctcccagagttcaacatagactgcctgtaccaggctgcctggcaaaggccaaaacccttactcacatgaggatggaggaacagaacagaggacttgggaaaagtctcaacttgatggggtagcatcactgctaagcaatgaatgaatttctaaatacagtatgtgctgggtaaacagaaagtggtttagacattcttgattagtttccatattttaagtagctgcagtctttcatgtttttctttagcatagtttgatttacgcaatctccttccttgtgaaaatagaggatacaaaattgtctaattttcatgacacctagaaaacgttttcccagagctgcctattcagaaactaaagccctcactgtcattattctttaagaagatgaaattactctggatgtttggtatttttttacattaaaacaaactaaagcaaaatttagaagaaagaactacacatatgtaaataccatatttttgataaaaatgtgtaaatagatttatcaatgatgagtggacatgtggtcaattatctactgcacaccaactgtttatagaatacacaaaaataaaatgtaataactgtattctgtgaataccattttcatatcaaatgccatatttaaatgtccaccaatatgatttctgagtggtaaacctcaaatatgaattttaaactggtgaactaaaggaaatcttgaggtcatatactgaaatatgaataaattaaaataatgaattcagatctaatcatttttatgacaaattgcagcaccaaacaaactaatagcaacccatggctgtgatttgttgtgtggtaatttggacagaatgaaaagcatgcttttgattttttttttaatcagtgagagaagtcatcattctcaacacaaagccctgaacaacagcatttgacagtgtcctttagattttaattttttcaatggattgctttaaagagaatgagtagggaaaatagtagttaattttaggttatgttttatattaggctactggggacataaacggtcataactaatgactgtaatcattaaactccttaaacagtttagaaattagctccaggttcttaaactaacaaaaataaaacctaagcatgccacagagctattgattaatcagtaagtacctgtaatgagttttcagtgaagctttctctctgtgctgatgagattcatgctacctaaaaattaacagaaatgacactgtgaacaatgtagttggaaaataggtatgtgtatatgcattatttatactcattgttaaactgggaatggggaacagctctggttcacaatactacatacaactgagtttttgtctggttttactatagtgtctgcttgatggcaaaaggggagggtggagggtgggagaggaaatgtcagggcatgtgctctgataaaataaaggcagggaaacaagctgaattacttgaaattacttgaattttcttgtcttaaaactgaaaaaaaaatgtagttacacgttaaaatctgcaaatggtttttacacctctgattttaacatgaacttatactaatgtttggaatcttatgtcagaaatataagcagctatgtacttagaataggttttgaatgggagaggtagaacagagagagaattaagaagggatctgacttataaaagactagaatgtgattagagtgatagaacataccaatgttaccaagaaattgacaagctgctggctttaagcttatgcaagtggtagttgggaaagtaggaggtgtggaagagggtttgcattttggattaattcatgcaaaatgaaggaggaagcctggtctaagaagatactgtctttcaatagaaatgatttctaaactgctacagattaagaatagataatctgattgctgttgttttgtttgtttggaaagaaaaaaaatgtctggcttcttctactatttgttttcactaccaaactgtgttactaaatttcttgtcatccttgtatgtaaaatgggtgctgggggtggaggggtataagaggagggagagtcagagagagtgtgtatgggtgtgtgtgagtgtgagtgtgtgtgtacgcacacacactggggatagataagctacctggtaaagggtttgaacatttacaaaatgtcacactttttcttaaaagaaaaatattttggggtttgaataaaatggaccaccatttctcattggaacccattaattaagaaaaccagcatggtttgacaccacatgggaacatgaataaatctgtctcatgatttgaaaagtacaccttgcaaagttttaaaaataaagtttttaggcaaatgcgataagaaaccgtcatttccagtcacagtaggcgatctttcgtaatttcataaaagcagttcgtttgcagtatggcttttgtgtagttaggggttttttaagtgtgaagaaaggtatgtgggctttaaaagtgattctaaatcttgaatagaaaacacatgaattggctttaataaaaatgtcacctttttattattgacattaagtaatggtaccatatattttttaaaatacatattgacttgaattgtgaggcaataagataccttctatatgtaatgatcacagaactaacccttataatatagttttacttattttgtttactctaaaaatctatagcagagtttctctattttatatttcatagatttaaaaaacccaaataaagatggatttaaaattcactgtggaaaagagtattgagttacaaactgagaagaaaaagcaggaagttccctaataatctggaatattctacatggcttgattacatagcaaacaagaccaagatttagggctgtcttaaacatcactgccgtcttgaagcagggtacacacgttaggtattgtgaagaacatcaatccgaacttttcttctgttgtttgcactgatgcgattttttgttcttttatgtttatacaacgtatctatgttgtgtaggggaaattttttcattttttaaaaattctactttggttttgttgttgttttgatttgtttttggctaagtagaggacatggactagttgtagcaaacagaacatgctgtttgctcttgccaaaggtcagtgagtgagtgcatttgctgcagtggtggcacgtagagaactagatggtaataaagatttaaaactatgaagaaggttacagtgtaactattttggtactagaaccagttcatgctggccgaaacgacaatggtttatggacttgcatccattttgtatttttgtaatatttgtaaatatgaactttttaaattgctgcaaagatggtttcttttgtaagatgttttcaacgtttacattcaatccaagcctttgtatattttagagctgtgcaacactttaagtcttgtatttatttttagtaaaaatggtgacagtttcattgtgaacccctctcaaaaaaaatgtatcagaaaagtttgattacctagaaagtgtgtatagaaactgcaaataaa

SEQ ID NO: 19573 - DNA, 1108 bp, Homo sapiens
  source 1..1108: mol_type = unassigned DNA
cccgagctgcaggtgtgcgtgttctgccggaacaacaaggaggcgatggcgctctacaccacccatatcctcaagggccccgacgggcgagtgctgtgtcccgtgctgcgccgctacacgtgtcccctgtgcggcgccagcggcgacaacgcgcacaccatcaagtactgcccgctctccaaagtgccgccgccgcccgcccgcccgccgccccgcagcgccagggacggcccgcctggcaagaagctgcgctgaaggcccgggctcccggccgcccagggtcgccgccgcccctcgcaccgctaggtctgcgcaccatctcgcccccgccgtggggaggcgtgcggctcagcggtcggctcgacatgggacgtcgtcctggtggtttttgaaaagcagccgaccgtgtggagtacttccgtgctgaacgattgggactagacgctgaaatccccatttgtcttcagtttctagtttgcacatccagaacggcgaaggctgggtgtgtattccactaactgaaatatggcaacttagaggcgctgtttatttactgtatacgtcgacctattttagatgcgcatcagtatgaaattgtctcaatcttggatgtttcattttatgaatggaggcactttactaggtctagaatatttttttaaaagcctctgaactgagcttaaaactggcgattttatgaaatgtcggcaaaatgactattttattgtttgaagcgagttaatattctcagttgtctttaaaaatcagttactctaattccaggtgaagcaagccgctggtagcatcacccttatgagaagtgaaggttttgtaaactttccagtattaatttgggcgggtattccccgcttgtggcttgtttctgtcctagctggaggtgtaaaatgcacaatgtgtagcaggtagaatacagctccttatcgttctatgtaccaggtattttattactgaactagcaactagccttttccacctttaaaagttgtgccaagtcataatcatattgtgtataacttggaaatggtgctgtttaaaaaaattgtgtatttatacagtaacagtatgaattcattaatctcacctgtaa

SEQ ID NO: 19574 - DNA, 4627 bp, Homo sapiens
  source 1..4627: mol_type = unassigned DNA
ggcaggccggcgggcaggctcggcgtgtcccttccgtccggcccgcgccggcggcggggaggcggcgcgcggcccgcagcccgcccatggaggctttcccctgggcgccccgctcgccccgccgcggccgcgcccccccgcccatggcgctcgtgcccagcgcccgctacgtgagcgccccgggcccggcgcacccgcagcccttcagctcctggaacgactacctggggctcgccacgctcatcaccaaagcggtggacggcgagccgcgcttcggctgcgcccgcggtgggaacggcggcggcggctccccgccctcctcctcctcgtcgtcctgctgctccccccacacgggggccgggcctggggcgctggggccggcgctggggccgcccgactacgacgaggacgacgacgacgacagcgacgagccggggtcccggggccgctacctggggagcgcgctggaattgcgcgcgctggagctgtgcgcgggccccgccgaggccgggctgctggaggagcgcttcgccgagctgagcccgttcgcgggtcgtgccgccgccgtgctgctgggctgcgcgcccgccgccgccgccgccgccaccaccaccagcgaggcgacgccgcgcgaggagcgggccccggcgtgggcggccgagccccggctgcacgcggcctccggggcggcggccgcccggctgctgaagcccgagctgcaggtgtgcgtgttctgccggaacaacaaggaggcgatggcgctctacaccacccatatcctcaagggccccgacgggcgagtgctgtgtcccgtgctgcgccgctacacgtgtcccctgtgcggcgccagcggcgacaacgcgcacaccatcaagtactgcccgctctccaaagtgccgccgccgcccgcccgcccgccgccccgcagcgccagggacggcccgcctggcaagaagctgcgctgaaggcccgggctcccggccgcccagggtcgccgccgcccctcgcaccgctaggtctgcgcaccatctcgcccccgccgtggggaggcgtgcggctcagcggtcggctcgacatgggacgtcgtcctggtggtttttgaaaagcagccgaccgtgtggagtacttccgtgctgaacgattgggactagacgctgaaatccccatttgtcttcagtttctagtttgcacatccagaacggcgaaggctgggtgtgtattccactaactgaaatatggcaacttagaggcgctgtttatttactgtatacgtcgacctattttagatgcgcatcagtatgaaattgtctcaatcttggatgtttcattttatgaatggaggcactttactaggtctagaatatttttttaaaagcctctgaactgagcttaaaactggcgattttatgaaatgtcggcaaaatgactattttattgtttgaagcgagttaatattctcagttgtctttaaaaatcagttactctaattccaggtgaagcaagccgctggtagcatcacccttatgagaagtgaaggttttgtaaactttccagtattaatttgggcgggtattccccgcttgtggcttgtttctgtcctagctggaggtgtaaaatgcacaatgtgtagcaggtagaatacagctccttatcgttctatgtaccaggtattttattactgaactagcaactagccttttccacctttaaaagttgtgccaagtcataatcatattgtgtataacttggaaatggtgctgtttaaaaaaattgtgtatttatacagtaacagtatgaattcattaatctcacctgtaactttcctacttggcattttctctacacactcaccctcttccagttctttaaaaacgtttatgatattaagatcaaagggaggaagggaagacagcagtattaattcaccctagattactcaatttcagggttcctagtggaggaaagcccattccagctgttgcctgtcaaacaaatagaagatggatctctagctctgagctattcgtgtattaactcgtattcaagaaggttccaccgtgggctgcgtctgactttaatacaggcagtgctcaaactagaataagcactaattaaaggaattgttgggggtccttcatgtgttcccactcctactggaagacccatgtcggtttccggaaccccaccagtttacccataagcaagactaaacctgatccttgggcaaaagttcctaacccctactttaccctcccaccctcacttttaaatccaccatactgaatgccacactatggaatgcagctacctgccaagcaaggcaatagaaggcaaaaaatggaagtgaattaagatgaactcatctgaaatacacaaatgcattactatctgaagataccagcaagagtttagtctacgtgtataaggctcccagtaggatttagctaggctactagaagttagactgctttcgcattaaacagctaacttcatccacagcaaattgactcaatcaggaaccttcatttgaaggtgtgttagaggatggggtaaatacccgatagctgtctttttggtgaaagaaaaggtgcatttcaagaacttggggggcaggaggaaagcacaatgtttcttagccaggaaagacaaataatccaacgctgctagtcttaaccccagaccagagagaactgcagatctgactgggcctaaattaagtagcttaatgaaaccatgtaattacttgttctcctttcttttgctatagaaaatctaccagtttaaatgagcttcaccttctgggtgaagtttctaaggtcaacatgaatcctcttacctctctcactgctcgtgttctgccttttcaaaaggaccactatgaacagatcagcgcattctctaggccaaaagggctagccaggtggcaagatcaatttagctactttgtattttcagagtcaaattacagacggtttccaaaggtcttgagcatggggctttggcatagcctcaatatatgggagtcactgtgatgagatgtgcctaatgttaatttgatattctgacattgctattttaccagaactaagaacatattgagctggagcttcttgagggcaggagagtattggaaaaggaatccagaagaccctctccactactcaggcagccactattcatctatttttaaagtaccccattttcaggccgggtgtggtggctcatgcctgtaatcccagcactttgggaggcgaggcgggggtggatcacaaggtcaggagaccagcctggccaacatggcgaagccccgtctctactaaaaatacaaaaattagccgggtggtgtggtgggcgcctgtaatcccagctcctcaggaggctgaggcaggagaattgcttgaaaccaggaggcggaggttgcagtgagcccagatcacgccactgcactccagcctgagcaacagagcgactctgtctccaaaaaagaaaaaaagtaccccatgttcagcccctgtgccaaatttgcctaggttttccagctgacaatgaatactgggagttaaaacgcagagtattactatagttaattttctagggttctcttatgaaaagtatatgtaaacacattcatttaaaaatccttggaactcaatgtggaactttaaacattttgcaaaattacatttagagaaacccaatttttcaaagtttaagaaatatacaaagtatgacaaaattatcttcataagaacatgctgcatacttgcctagtagcaaaacaatacagggaagagtcaaaagggcttctccaactgtagaggtacagattgtcttaacctgttcttttctgtacagacttaaaatttctagtggcttttatttttctttgtattttaattttcctacaaagtcctttttggaagttgcagaattattagctttgatgagaacaacttttgtcatagatttgatttattaaaccaaaattatacatattaaaattatatcacaaatatatatgcttccagacaaagaaaagtttgttagtcctgattttctaatcgtagccactcaaggaacagtcctttcatagtaccccaagtatttcaattagacttataaaagtataagtcaatctatggtcagtgtctttggttaaaaaaaaaaaaaaacacaggcagttctttacataaaaacgtcccacacgttatagatgccagccacctcctggtagtcactatggacaactaatgagatgcaaagtcttttggaccgatgatgtctctactactggatctatctgtattaacagcaatgttactctcaatgaaactgcagaagccaccatgaacatggaagaccacctagcagatcggtgagtaggctgcttgttcagctttcctttaacacctgttggtaaatactaatgggagtagacagagttgtatggcctggacagtggaaaccaagagcaggatcgcaaagtaacagcatcagactcttctgccctcctcttgcacttgggttctgactcccagaacaaagaacttgggagaacagtacgggagactgagcagaaaggatgggtttgctgactcgccttgaaatctaactctaacgtaggcag

SEQ ID NO: 19575 - DNA, 3691 bp, Homo sapiens
  source 1..3691: mol_type = unassigned DNA
agtagcgtcatcggcggccgggagggcggagggacgagggaagtcggcgagagggagactgggttgggggaggggttcaggcctgttccccgcggctgcggcagcaccagggccggccgccaccgcctctagaacgcggaggaggtgggtcctgggaagcgggatgtccatcgctccagcttggtggtgaatgctgaggagagtcactgttgctgcagtctgtgccacccggaggaagttgtgtgaggccgggcgggagctcgcggcgctctggggaatcgaaacgcggggtcggtgcgaagactctgctgctgccagaccctttcctattctggccatgcctggaaggaacaaggcgaagtctacctgcagctgccctgacctgcagcccaatggacaggatctgggcgagaacagccgggttgcccgtctaggagcggatgaatctgaggaagagggacggagggggtctctcagtaatgctggggaccctgagatcgtcaagtctcccagcgaccccaagcaataccgatacatcaaattacagaatggcttgcaggcacttctgatttcagacctaagtaatatggaaggtaaaacaggaaatacaacagatgatgaagaagaagaggaggtggaggaagaagaagaagatgatgatgaagattctggagctgaaatagaagatgacgatgaagagggttttgatgatgaagatgagtttgatgatgaacatgatgatgatcttgatactgaggataatgaattggaagaattagaagagagagcagaagctagaaaaaaaactactgaaaaacagtctgcagcggctctttgtgttggagttgggagtttcgctgatccagatgacctgccggggctggcacactttttggagcacatggtattcatgggtagtttgaaatatccagatgagaatggatttgatgccttcctgaagaagcatgggggtagtgataatgcctcaactgattgtgaacgcactgtctttcagtttgatgtccagaggaagtacttcaaggaagctcttgatagatgggcgcagttcttcatccacccactaatgatcagagatgcaattgaccgtgaagttgaagctgttgatagtgaatatcaacttgcaaggccttctgatgcaaacagaaaggaaatgttgtttggaagccttgctagacctggacatcctatgggaaaatttttttggggaaatgctgagacgctcaagcatgagccaagaaagaataatattgatacacatgctagattgagagaattctggatgcgttactactcttctcattacatgactttagtggttcaatccaaagaaacactggatactttggaaaagtgggtgactgaaatcttctctcagataccaaacaatgggttacccagaccaaactttggccatttaacggatccatttgacacaccagcatttaacaaactttatagagttgttccaatcagaaaaattcatgctctgaccatcacatgggcacttcctcctcaacagcaacattacagggtgaagccacttcattatatatcctggctggttggacatgaaggcaaaggcagcattctttctttccttaggaaaaaatgctgggctcttgcactgtttggtggaaatggtgagacaggatttgagcaaaattctacttattcagtgttcagcatttctattacattgactgatgagggttatgaacatttttatgaggttgcttacactgtctttcagtatttaaaaatgctgcagaagctaggcccagaaaaaagaatttttgaagagattcggaaaattgaggataatgaatttcattaccaagaacagacagatccagttgagtatgtggaaaacatgtgtgagaacatgcagctgtacccattgcaggacattctcactggagatcagcttctttttgaatacaagccagaagtcattggtgaagccttgaatcagctagttcctcaaaaagcaaatcttgttttactgtctggtgctaatgagggaaaatgtgacctcaaggagaaatggtttggaactcaatatagtatagaagatattgaaaactcttgggctgaactgtggaatagtaatttcgaattaaatccagatcttcatcttccagctgaaaacaagtacatagccacggactttacgttgaaggctttcgattgcccggaaacagaatacccagttaaaattgtgaatactccacaaggttgcctgtggtataagaaagacaacaaattcaaaatccccaaagcatatatacgtttccatctaatttcaccgttgatacagaaatctgcagcaaatgtggtcctctttgatatctttgtcaatatccttacgcataaccttgcggaaccagcttatgaagcagatgtggcacagctggagtataaactggtagctggagaacatggtttaattattcgagtgaaaggatttaaccacaaactacctctactgtttcagctcattattgactacttagctgagttcaattccacaccagctgtctttacaatgataactgagcagttgaagaagacctactttaacatcctcatcaagcccgagactttggccaaagatgtacggcttttaatcttggaatatgcccgttggtctatgattgacaagtaccaggctttgatggacggcctttcccttgagtctctgctgagcttcgtcaaagaattcaaatcccagctctttgtggagggcctggtacaagggaatgtcacaagcacagaatctatggatttcctgaaatatgttgttgacaaactaaacttcaagcctctggagcaggagatgcctgtgcagttccaggtggtagagctgcccagtggccaccatctatgcaaagtgaaagctctgaacaagggtgatgccaactctgaagtcactgtgtactaccagtcaggtaccaggagtctaagagaatatacgcttatggagctgcttgtgatgcacatggaagaaccttgttttgacttccttcgaaccaagcagacccttgggtaccatgtctaccctacctgtaggaacacatccgggattctaggattttctgtcactgtggggactcaggcaaccaaatacaattctgaagttgttgataagaagatagaagagtttctttctagctttgaggagaagattgagaacctcactgaagaggcattcaacacccaggtcacagctctcatcaagctgaaggagtgtgaggatacccaccttggggaggaggtggataggaactggaatgaagtggttacacagcagtacctctttgaccgccttgcccacgagattgaagcactgaagtcattctcaaaatcagacctggtcaactggttcaaggcccatagagggccaggaagtaaaatgctcagcgttcatgttgttggatatgggaagtatgaactggaagaggatggtaccccttctagtgaggattcaaattcttcttgtgaagtgatgcagctgacctacctgccaacctctcctctgctggcagattgtatcatccccattactgatatcagggctttcacaacaacactcaaccttctcccctaccataaaatagtcaaataaataaactgcagtcacgttggcctgaagcaatgtgtattttaaaat

SEQ ID NO: 19576 - DNA, 3895 bp, Homo sapiens
  source 1..3895: mol_type = unassigned DNA
agtagcgtcatcggcggccgggagggcggagggacgagggaagtcggcgagagggagactgggttgggggaggggttcaggcctgttccccgcggctgcggcagcaccagggccggccgccaccgcctctagaacgcggaggaggtgggtcctgggaagcgggatgtccatcgctccagcttggtggtgaatgctgaggagagtcactgttgctgcagtctgtgccacccggaggaagttgtgtgaggccgggcgggagctcgcggcgctctggggaatcgaaacgcggggtcggtgcgaagactctgctgctgccagaccctttcctattctggccatgcctggaaggaacaaggcgaagtctacctgcagctgccctgacctgcagcccaatggacaggatctgggcgagaacagccgggttgcccgtctaggagcggatgaatctgaggaagagggacggagggggtctctcagtaatgctggggaccctgagatcgtcaagtctcccagcgaccccaagcaataccgatacatcaaattacagaatggcttgcaggcacttctgatttcagacctaagtaatatggaaggtaaaacaggaaatacaacagatgatgaagaagaagaggaggtggaggaagaagaagaagatgatgatgaagattctggagctgaaatagaagatgacgatgaagagggttttgatgatgaagatgagtttgatgatgaacatgatgatgatcttgatactgaggataatgaattggaagaattagaagagagagcagaagctagaaaaaaaactactgaaaaacagcaattgcagagcctgtttttgctgtggtcaaagctgactgatagactgtggtttaagtcaacttattcaaaaatgtcttcaaccctgctggtcgagacaagaaatctttatggggtagttggagctgaaagcaggtctgcacctgttcagcatttggcaggatggcaagcggaggagcagcagggtgaaactgacacagttctgtctgcagcggctctttgtgttggagttgggagtttcgctgatccagatgacctgccggggctggcacactttttggagcacatggtattcatgggtagtttgaaatatccagatgagaatggatttgatgccttcctgaagaagcatgggggtagtgataatgcctcaactgattgtgaacgcactgtctttcagtttgatgtccagaggaagtacttcaaggaagctcttgatagatgggcgcagttcttcatccacccactaatgatcagagatgcaattgaccgtgaagttgaagctgttgatagtgaatatcaacttgcaaggccttctgatgcaaacagaaaggaaatgttgtttggaagccttgctagacctggacatcctatgggaaaatttttttggggaaatgctgagacgctcaagcatgagccaagaaagaataatattgatacacatgctagattgagagaattctggatgcgttactactcttctcattacatgactttagtggttcaatccaaagaaacactggatactttggaaaagtgggtgactgaaatcttctctcagataccaaacaatgggttacccagaccaaactttggccatttaacggatccatttgacacaccagcatttaacaaactttatagagttgttccaatcagaaaaattcatgctctgaccatcacatgggcacttcctcctcaacagcaacattacagggtgaagccacttcattatatatcctggctggttggacatgaaggcaaaggcagcattctttctttccttaggaaaaaatgctgggctcttgcactgtttggtggaaatggtgagacaggatttgagcaaaattctacttattcagtgttcagcatttctattacattgactgatgagggttatgaacatttttatgaggttgcttacactgtctttcagtatttaaaaatgctgcagaagctaggcccagaaaaaagaatttttgaagagattcggaaaattgaggataatgaatttcattaccaagaacagacagatccagttgagtatgtggaaaacatgtgtgagaacatgcagctgtacccattgcaggacattctcactggagatcagcttctttttgaatacaagccagaagtcattggtgaagccttgaatcagctagttcctcaaaaagcaaatcttgttttactgtctggtgctaatgagggaaaatgtgacctcaaggagaaatggtttggaactcaatatagtatagaagatattgaaaactcttgggctgaactgtggaatagtaatttcgaattaaatccagatcttcatcttccagctgaaaacaagtacatagccacggactttacgttgaaggctttcgattgcccggaaacagaatacccagttaaaattgtgaatactccacaaggttgcctgtggtataagaaagacaacaaattcaaaatccccaaagcatatatacgtttccatctaatttcaccgttgatacagaaatctgcagcaaatgtggtcctctttgatatctttgtcaatatccttacgcataaccttgcggaaccagcttatgaagcagatgtggcacagctggagtataaactggtagctggagaacatggtttaattattcgagtgaaaggatttaaccacaaactacctctactgtttcagctcattattgactacttagctgagttcaattccacaccagctgtctttacaatgataactgagcagttgaagaagacctactttaacatcctcatcaagcccgagactttggccaaagatgtacggcttttaatcttggaatatgcccgttggtctatgattgacaagtaccaggctttgatggacggcctttcccttgagtctctgctgagcttcgtcaaagaattcaaatcccagctctttgtggagggcctggtacaagggaatgtcacaagcacagaatctatggatttcctgaaatatgttgttgacaaactaaacttcaagcctctggagcaggagatgcctgtgcagttccaggtggtagagctgcccagtggccaccatctatgcaaagtgaaagctctgaacaagggtgatgccaactctgaagtcactgtgtactaccagtcaggtaccaggagtctaagagaatatacgcttatggagctgcttgtgatgcacatggaagaaccttgttttgacttccttcgaaccaagcagacccttgggtaccatgtctaccctacctgtaggaacacatccgggattctaggattttctgtcactgtggggactcaggcaaccaaatacaattctgaagttgttgataagaagatagaagagtttctttctagctttgaggagaagattgagaacctcactgaagaggcattcaacacccaggtcacagctctcatcaagctgaaggagtgtgaggatacccaccttggggaggaggtggataggaactggaatgaagtggttacacagcagtacctctttgaccgccttgcccacgagattgaagcactgaagtcattctcaaaatcagacctggtcaactggttcaaggcccatagagggccaggaagtaaaatgctcagcgttcatgttgttggatatgggaagtatgaactggaagaggatggtaccccttctagtgaggattcaaattcttcttgtgaagtgatgcagctgacctacctgccaacctctcctctgctggcagattgtatcatccccattactgatatcagggctttcacaacaacactcaaccttctcccctaccataaaatagtcaaataaataaactgcagtcacgttggcctgaagcaatgtgtattttaaaat

SEQ ID NO: 19577 - DNA, 3375 bp, Homo sapiens
  source 1..3375: mol_type = unassigned DNA
gcggctgcggcagcaccagggccggccgccaccgcctctagaacgcggaggaggtgggtcctgggaagcgggatgtccatcgctccagcttggtggtgaatgctgaggagagtcactgttgctgcagtctgtgccacccggaggaagttgtgtgaggccgggcgggagctcgcggcgctctggggaatcgaaacgcggggtcggtgcgaagactctgctgctgccagaccctttcctattctggccatgcctggaaggaacaaggcgaagtctacctgcagctgccctgacctgcagcccaatggacaggatctgggcgagaacagccgggttgcccgtctaggagcggatgaatctgaggaagagggacggagggggtctctcagtaatgctggggaccctgagatcgtcaagtctcccagcgaccccaagcaataccgatacatcaaattacagaatggcttgcaggcacttctgatttcagacctaagtaatatggaaggtaaaacaggaaatacaacagatgatgaagaagaagaggaggtggaggaagaagaagaagatgatgatgaagattctggagctgaaatagaagatgacgatgaagagggttttgatgatgaagatgagtttgatgatgaacatgatgatgatcttgatactgaggataatgaattggaagaattagaagagagagcagaagctagaaaaaaaactactgaaaaacagtctgcagcggctctttgtgttggagttgggagtttcgctgatccagatgacctgccggggctggcacactttttggagcacatggtattcatgggtagtttgaaatatccagatgagaatggatttgatgccttcctgaagaagcatgggggtagtgataatgcctcaactgattgtgaacgcactgtctttcagtttgatgtccagaggaagtacttcaaggaagctcttgatagatgggcgcagttcttcatccacccactaatgatcagagatgcaattgaccgtgaagttgaagctgttgatagtgaatatcaacttgcaaggccttctgatgcaaacagaaaggaaatgttgtttggaagccttgctagacctggacatcctatgggaaaatttttttggggaaatgctgagacgctcaagcatgagccaagaaagaataatattgatacacatgctagattgagagaattctggatgcgttactactcttctcattacatgactttagtggttcaatccaaagaaacactggatactttggaaaagtgggtgactgaaatcttctctcagataccaaacaatgggttacccagaccaaactttggccatttaacggatccatttgacacaccagcatttaacaaactttatagagttgttccaatcagaaaaattcatgctctgaccatcacatgggcacttcctcctcaacagcaacattacagggtgaagccacttcattatatatcctggctggttggacatgaaggcaaaggcagcattctttctttccttaggaaaaaatgctgggctcttgcactgtttggtggaaatggtgagacaggatttgagcaaaattctacttattcagtgttcagcatttctattacattgactgatgagggttatgaacatttttatgaggttgcttacactgtctttcagtatttaaaaatgctgcagaagctaggcccagaaaaaagaatttttgaagagattcggaaaattgaggataatgaatttcattaccaagaacagacagatccagttgagtatgtggaaaacatgtgtgagaacatgcagctgtacccattgcaggacattctcactggagatcagcttctttttgaatacaagccagaagtcattggtgaagccttgaatcagctagttcctcaaaaagcaaatcttgttttactgtctggtgctaatgagggaaaatgtgacctcaaggagaaatggtttggaactcaatatagtatagaagatattgaaaactcttgggctgaactgtggaatagtaatttcgaattaaatccagatcttcatcttccagctgaaaacaagtacatagcatatatacgtttccatctaatttcaccgttgatacagaaatctgcagcaaatgtggtcctctttgatatctttgtcaatatccttacgcataaccttgcggaaccagcttatgaagcagatgtggcacagctggagtataaactggtagctggagaacatggtttaattattcgagtgaaaggatttaaccacaaactacctctactgtttcagctcattattgactacttagctgagttcaattccacaccagctgtctttacaatgataactgagcagttgaagaagacctactttaacatcctcatcaagcccgagactttggccaaagatgtacggcttttaatcttggaatatgcccgttggtctatgattgacaagtaccaggctttgatggacggcctttcccttgagtctctgctgagcttcgtcaaagaattcaaatcccagctctttgtggagggcctggtacaagggaatgtcacaagcacagaatctatggatttcctgaaatatgttgttgacaaactaaacttcaagcctctggagcaggagatgcctgtgcagttccaggtggtagagctgcccagtggccaccatctatgcaaagtgaaagctctgaacaagggtgatgccaactctgaagtcactgtgtactaccagtcaggtaccaggagtctaagagaatatacgcttatggagctgcttgtgatgcacatggaagaaccttgttttgacttccttcgaaccaagcagacccttggttctgaagttgttgataagaagatagaagagtttctttctagctttgaggagaagattgagaacctcactgaagaggcattcaacacccaggtcacagctctcatcaagctgaaggagtgtgaggatacccaccttggggaggaggtggataggaactggaatgaagtggttacacagcagtacctctttgaccgccttgcccacgagattgaagcactgaagtcattctcaaaatcagacctggtcaactggttcaaggcccatagagggccaggaagtaaaatgctcagcgttcatgttgttggatatgggaagtatgaactggaagaggatggtaccccttctagtgaggattcaaattcttcttgtgaagtgatgcagctgacctacctgccaacctctcctctgctggcagattgtatcatccccattactgatatcagggctttcacaacaacactcaaccttctcccctaccataaaatagtcaaataaataaactgcagtcacgttggcctg

SEQ ID NO: 19578 - DNA, 1660 bp, Homo sapiens
  source 1..1660: mol_type = unassigned DNA
gaaaattgaggataatgaatttcattaccaagaacagacagatccagttgagtatgtggaaaacatgtgtgagaacatgcagctgtacccattgcaggacattctcactggagatcagcttctttttgaatacaagccagaagtcattggtgaagccttgaatcagctagttcctcaaaaagcaaatcttgttttactgtctggtgctaatgagggaaaatgtgacctcaaggagaaatggtttggaactcaatatagtatagaagatattgaaaactcttgggctgaactgtggaatagtaatttcgaattaaatccagatcttcatcttccagctgaaaacaagtacatagcatatatacgtttccatctaatttcaccgttgatacagaaatctgcagcaaatgtggtcctctttgatatctttgtcaatatccttacgcataaccttgcggaaccagcttatgaagcagatgtggcacagctggagtataaactggtagctggagaacatggtttaattattcgagtgaaaggatttaaccacaaactacctctactgtttcagctcattattgactacttagctgagttcaattccacaccagctgtctttacaatgataactgagcagttgaagaagacctactttaacatcctcatcaagcccgagactttggccaaagatgtacggcttttaatcttggaatatgcccgttggtctatgattgacaagtaccaggctttgatggacggcctttcccttgagtctctgctgagcttcgtcaaagaattcaaatcccagctctttgtggagggcctggtacaagggaatgtcacaagcacagaatctatggatttcctgaaatatgttgttgacaaactaaacttcaagcctctggagcaggagatgcctgtgcagttccaggtggtagagctgcccagtggccaccatctatgcaaagtgaaagctctgaacaagggtgatgccaactctgaagtcactgtgtactaccagtcaggtaccaggagtctaagagaatatacgcttatggagctgcttgtgatgcacatggaagaaccttgttttgacttccttcgaaccaagcagacccttggttctgaagttgttgataagaagatagaagagtttctttctagctttgaggagaagattgagaacctcactgaagaggcattcaacacccaggtcacagctctcatcaagctgaaggagtgtgaggatacccaccttggggaggaggtggataggaactggaatgaagtggttacacagcagtacctctttgaccgccttgcccacgagattgaagcactgaagtcattctcaaaatcagacctggtcaactggttcaaggcccatagagggccaggaagtaaaatgctcagcgttcatgttgttggatatgggaagtatgaactggaagaggatggtaccccttctagtgaggattcaaattcttcttgtgaagtgatgcagctgacctacctgccaacctctcctctgctggcagattgtatcatccccattactgatatcagggctttcacaacaacactcaaccttctcccctaccataaaatagtcaaataaataaactgcagtcacgttggcctgaagcaatgtgtattttaaaat

SEQ ID NO: 19579 - DNA, 3380 bp, Homo sapiens
  source 1..3380: mol_type = unassigned DNA
aagaatgaaggtttctttgaggaacgcagcctgaatgatacatcaaattacagaatggcttgcaggcacttctgatttcagacctaagtaatatggaaggtaaaacaggaaatacaacagatgatgaagaagaagaggaggtggaggaagaagaagaagatgatgatgaagattctggagctgaaatagaagatgacgatgaagagggttttgatgatgaagatgagtttgatgatgaacatgatgatgatcttgatactgaggataatgaattggaagaattagaagagagagcagaagctagaaaaaaaactactgaaaaacagcaattgcagagcctgtttttgctgtggtcaaagctgactgatagactgtggtttaagtcaacttattcaaaaatgtcttcaaccctgctggtcgagacaagaaatctttatggggtagttggagctgaaagcaggtctgcacctgttcagcatttggcaggatggcaagcggaggagcagcagggtgaaactgacacagttctgtctgcagcggctctttgtgttggagttgggagtttcgctgatccagatgacctgccggggctggcacactttttggagcacatggtattcatgggtagtttgaaatatccagatgagaatggatttgatgccttcctgaagaagcatgggggtagtgataatgcctcaactgattgtgaacgcactgtctttcagtttgatgtccagaggaagtacttcaaggaagctcttgatagatgggcgcagttcttcatccacccactaatgatcagagatgcaattgaccgtgaagttgaagctgttgatagtgaatatcaacttgcaaggccttctgatgcaaacagaaaggaaatgttgtttggaagccttgctagacctggacatcctatgggaaaatttttttggggaaatgctgagacgctcaagcatgagccaagaaagaataatattgatacacatgctagattgagagaattctggatgcgttactactcttctcattacatgactttagtggttcaatccaaagaaacactggatactttggaaaagtgggtgactgaaatcttctctcagataccaaacaatgggttacccagaccaaactttggccatttaacggatccatttgacacaccagcatttaacaaactttatagagttgttccaatcagaaaaattcatgctctgaccatcacatgggcacttcctcctcaacagcaacattacagggtgaagccacttcattatatatcctggctggttggacatgaaggcaaaggcagcattctttctttccttaggaaaaaatgctgggctcttgcactgtttggtggaaatggtgagacaggatttgagcaaaattctacttattcagtgttcagcatttctattacattgactgatgagggttatgaacatttttatgaggttgcttacactgtctttcagtatttaaaaatgctgcagaagctaggcccagaaaaaagaatttttgaagagattcggaaaattgaggataatgaatttcattaccaagaacagacagatccagttgagtatgtggaaaacatgtgtgagaacatgcagctgtacccattgcaggacattctcactggagatcagcttctttttgaatacaagccagaagtcattggtgaagccttgaatcagctagttcctcaaaaagcaaatcttgttttactgtctggtgctaatgagggaaaatgtgacctcaaggagaaatggtttggaactcaatatagtatagaagatattgaaaactcttgggctgaactgtggaatagtaatttcgaattaaatccagatcttcatcttccagctgaaaacaagtacatagccacggactttacgttgaaggctttcgattgcccggaaacagaatacccagttaaaattgtgaatactccacaaggttgcctgtggtataagaaagacaacaaattcaaaatccccaaagcatatatacgtttccatctaatttcaccgttgatacagaaatctgcagcaaatgtggtcctctttgatatctttgtcaatatccttacgcataaccttgcggaaccagcttatgaagcagatgtggcacagctggagtataaactggtagctggagaacatggtttaattattcgagtgaaaggatttaaccacaaactacctctactgtttcagctcattattgactacttagctgagttcaattccacaccagctgtctttacaatgataactgagcagttgaagaagacctactttaacatcctcatcaagcccgagactttggccaaagatgtacggcttttaatcttggaatatgcccgttggtctatgattgacaagtaccaggctttgatggacggcctttcccttgagtctctgctgagcttcgtcaaagaattcaaatcccagctctttgtggagggcctggtacaagggaatgtcacaagcacagaatctatggatttcctgaaatatgttgttgacaaactaaacttcaagcctctggagcaggagatgcctgtgcagttccaggtggtagagctgcccagtggccaccatctatgcaaagtgaaagctctgaacaagggtgatgccaactctgaagtcactgtgtactaccagtcaggtaccaggagtctaagagaatatacgcttatggagctgcttgtgatgcacatggaagaaccttgttttgacttccttcgaaccaagcagacccttgggtaccatgtctaccctacctgtaggaacacatccgggattctaggattttctgtcactgtggggactcaggcaaccaaatacaattctgaagttgttgataagaagatagaagagtttctttctagctttgaggagaagattgagaacctcactgaagaggcattcaacacccaggtcacagctctcatcaagctgaaggagtgtgaggatacccaccttggggaggaggtggataggaactggaatgaagtggttacacagcagtacctctttgaccgccttgcccacgagattgaagcactgaagtcattctcaaaatcagacctggtcaactggttcaaggcccatagagggccaggaagtaaaatgctcagcgttcatgttgttggatatgggaagtatgaactggaagaggatggtaccccttctagtgaggattcaaattcttcttgtgaagtgatgcagctgacctacctgccaacctctcctctgctggcagattgtatcatccccattactgatatcagggctttcacaacaacactcaaccttctcccctaccataaaatagtcaaataaataaactgcagtcacgttggcctg

SEQ ID NO: 19580 - DNA, 2557 bp, Homo sapiens
  source 1..2557: mol_type = unassigned DNA
actgggttgggggaggggttcaggcctgttccccgcggctgcggcagcaccagggccggccgccaccgcctctagaacgcggaggagatacatcaaattacagaatggcttgcaggcacttctgatttcagacctaagtaatatggaaggtaaaacaggaaatacaacagatgatgaagaagaagaggaggtggaggaagaagaagaagatgatgatgaagattctggagctgaaatagaagatgacgatgaagagggttttgatgatgaagatgagtttgatgatgaacatgatgatgatcttgatactgaggataatgaattggaagaattagaagagagagcagaagctagaaaaaaaactactgaaaaacagtctgcagcggctctttgtgttggagttgggagtttcgctgatccagatgacctgccggggctggcacactttttggagcacatggtattcatgggtagtttgaaatatccagatgagaatggatttgatgccttcctgaagaagcatgggggtagtgataatgcctcaactgattgtgaacgcactgtctttcagtttgatgtccagaggaagtacttcaaggaagctcttgatagatgggcgcagttcttcatccacccactaatgatcagagatgcaattgaccgtgaagttgaagctgttgatagtgaatatcaacttgcaaggccttctgatgcaaacagaaaggaaatgttgtttggaagccttgctagacctggacatcctatgggaaaatttttttggggaaatgctgagacgctcaagcatgagccaagaaagaataatattgatacacatgctagattgagagaattctggatgcgttactactcttctcattacatgactttagtggttcaatccaaagaaacactggatactttggaaaagtgggtgactgaaatcttctctcagataccaaacaatgggttacccagaccaaactttggccatttaacggatccatttgacacaccagcatttaacaaactttatagagttgttccaatcagaaaaattcatgctctgaccatcacatgggcacttcctcctcaacagcaacattacagggtgaagccacttcattatatatcctggctggttggacatgaaggcaaaggcagcattctttctttccttaggaaaaaatgctgggctcttgcactgtttggtggaaatggtgagacaggatttgagcaaaattctacttattcagtgttcagcatttctattacattgactgatgagggttatgaacatttttatgaggttgcttacactgtctttcagtatttaaaaatgctgcagaagctaggcccagaaaaaagaatttttgaagagattcggaaaattgaggataatgaatttcattaccaagaacagacagatccagttgagtatgtggaaaacatgtgtgagaacatgcagctgtacccattgcaggacattctcactggagatcagcttctttttgaatacaagccagaagtcattggtgaagccttgaatcagctagttcctcaaaaagcaaatcttgttttactgtctggtgctaatgagggaaaatgtgacctcaaggagaaatggtttggaactcaatatagtatagaagatattgaaaactcttgggctgaactgtggaatagtaatttcgaattaaatccagatcttcatcttccagctgaaaacaagtacatagccacggactttacgttgaaggctttcgattgcccggaaacagaatacccagttaaaattgtgaatactccacaaggttgcctgtggtataagaaagacaacaaattcaaaatccccaaagcatatatacgtttccatctaatttcaccgttgatacagaaatctgcagcaaatgtggtcctctttgatatctttgtcaatatccttacgcataaccttgcggaaccagcttatgaagcagatgtggcacagctggagtataaactggtagctggagaacatggtttaattattcgagtgaaaggatttaaccacaaactacctctactgtttcagctcattattgactacttagctgagttcaattccacaccagctgtctttacaatgataactgagcagttgaagaagacctactttaacatcctcatcaagcccgagactttggccaaagatgtacggcttttaatcttggaatatgcccgttggtctatgattgacaagtaccaggctttgatggacggcctttcccttgagtctctgctgagcttcgtcaaagaattcaaatcccagctctttgtggagggcctggtacaagggaatgtcacaagcacagttctatgtcaatgggcccaggattctgaaacatagtccatgttgtcataaaggccacagcctagttgggtaaaccaacactgaacaattaagtttgatccagttgggaaactgtattatgggtaaacagattgccaagagagccagaacagaatctatggatttcctgaaatatgttgttgacaaactaaacttcaagcctctgga

SEQ ID NO: 19581 - DNA, 3574 bp, Homo sapiens
  source 1..3574: mol_type = unassigned DNA
ctgcggcagcaccagggccggccgccaccgcctctagaacgcggaggaggtgggtcctgggaagcgggatgtccatcgctccagcttggtggtgaatgctgaggagagtcactgttgctgcagtctgtgccacccggaggaagttgtgtgaggccgggcgggagctcgcggcgctctggggaatcgaaacgcggggtcggtgcgaagactctgctgctgccagaccctttcctattctggccatgcctggaaggaacaaggcgaagtctacctgcagctgccctgacctgcagcccaatggacaggatctgggcgagaacagccgggttgcccgtctaggagcggatgaatctgaggaagagggacggagggggtctctcagtaatgctggggaccctgagatcgtcaagtctcccagcgaccccaagcaataccgatacatcaaattacagaatggcttgcaggcacttctgatttcagacctaagtaatatggaaggtaaaacaggaaatacaacagatgatgaagaagaagaggaggtggaggaagaagaagaagatgatgatgaagattctggagctgaaatagaagatgacgatgaagagggttttgatgatgaagatgagtttgatgatgaacatgatgatgatcttgatactgaggataatgaattggaagaattagaagagagagcagaagctagaaaaaaaactactgaaaaacagtctgcagcggctctttgtgttggagttgggagtttcgctgatccagatgacctgccggggctggcacactttttggagcacatggtattcatgggtagtttgaaatatccagatgagaatggatttgatgccttcctgaagaagcatgggggtagtgataatgcctcaactgattgtgaacgcactgtctttcagtttgatgtccagaggaagtacttcaaggaagctcttgatagatgggcgcagttcttcatccacccactaatgatcagagatgcaattgaccgtgaagttgaagctgttgatagtgaatatcaacttgcaaggccttctgatgcaaacagaaaggaaatgttgtttggaagccttgctagacctggacatcctatgggaaaatttttttggggaaatgctgagacgctcaagcatgagccaagaaagaataatattgatacacatgctagattgagagaattctggatgcgttactactcttctcattacatgactttagtggttcaatccaaagaaacactggatactttggaaaagtgggtgactgaaatcttctctcagataccaaacaatgggttacccagaccaaactttggccatttaacggatccatttgacacaccagcatttaacaaactttatagagttgttccaatcagaaaaattcatgctctgaccatcacatgggcacttcctcctcaacagcaacattacagggtgaagccacttcattatatatcctggctggttggacatgaaggcaaaggcagcattctttctttccttaggaaaaaatgctgggctcttgcactgtttggtggaaatggtgagacaggatttgagcaaaattctacttattcagtgttcagcatttctattacattgactgatgagggttatgaacatttttatgaggttgcttacactgtctttcagtatttaaaaatgctgcagaagctaggcccagaaaaaagaatttttgaagagattcggaaaattgaggataatgaatttcattaccaagaacagacagatccagttgagtatgtggaaaacatgtgtgagaacatgcagctgtacccattgcaggacattctcactggagatcagcttctttttgaatacaagccagaagtcattggtgaagccttgaatcagctagttcctcaaaaagcaaatcttgttttactgtctggtgctaatgagggaaaatgtgacctcaaggagaaatggtttggaactcaatatagtatagaagatattgaaaactcttgggctgaactgtggaatagtaatttcgaattaaatccagatcttcatcttccagctgaaaacaagtacatagccacggactttacgttgaaggctttcgattgcccggaaacagaatacccagttaaaattgtgaatactccacaaggttgcctgtggtataagaaagacaacaaattcaaaatccccaaagcatatatacgtttccatctaatttcaccgttgatacagaaatctgcagcaaatgtggtcctctttgatatctttgtcaatatccttacgcataaccttgcggaaccagcttatgaagcagatgtggcacagctggagtataaactggtagctggagaacatggtttaattattcgagtgaaaggatttaaccacaaactacctctactgtttcagctcattattgactacttagctgagttcaattccacaccagctgtctttacaatgataactgagcagttgaagaagacctactttaacatcctcatcaagcccgagactttggccaaagatgtacggcttttaatcttggaatatgcccgttggtctatgattgacaagtaccaggctttgatggacggcctttcccttgagtctctgctgagcttcgtcaaagaattcaaatcccagctctttgtggagggcctggtacaagggaatgtcacaagcacagaatctatggatttcctgaaatatgttgttgacaaactaaacttcaagcctctggagcaggagatgcctgtgcagttccaggtggtagagctgcccagtggccaccatctatgcaaagtgaaagctctgaacaagggtgatgccaactctgaagtcactgtgtactaccagtcaggtaccaggagtctaagagaatatacgcttatggagctgcttgtgatgcacatggaagaaccttgttttgacttccttcgaaccaagcagacccttgggtaccatgtctaccctacctgtaggaacacatccgggattctaggattttctgtcactgtggggactcaggcaaccaaatacaattctgaagttgttgataagaagatagaagagtttctttctagctttgaggagaagattgagaacctcactgaagaggcattcaacacccaggtcacagctctcatcaagctgaaggagtgtgaggatacccaccttggggaggaggtggataggaactggaatgaagtggttacacagcagtacctctttgaccgccttgcccacgagattgaagcactgaagtcattctcaaaatcagacctggtcaactggttcaaggcccatagagggccaggaagtaaaatgctcagcgttcatgttgttggatatgggaagtatgaactggaagaggatggtaccccttctagtgaggattcaaattcttcttgtgaagtgatgcagctgacctacctgccaacctctcctctgctggcaattgtatcatccccattactgatatcagggctttcacaacaacactcaaccttctcccctaccataaaatagtcaaataaataaactgcagtcacgttggcctg

SEQ ID NO: 19582 - DNA, 3640 bp, Homo sapiens
  source 1..3640: mol_type = unassigned DNA
ggttcgggcagcgctctcccgggagcggcggcacgcgcggagcgccgggtgcggccatgcggggaccgggcccgaccccgagcccgaccccgagcccaagcccgagccggagcccgagcgagaccccgagcccgagcccgagcgcgacccccggtgcggcgcggctaccccggcggaggcggcgggcgcggggcgcgctctgaggcccgggggatgcgccgccgcctcgaccatgggcgccgccgcctccaggaggagggcgctgaggagcgaggccatgtcctcggtggcggccaaagtgcgagcagcccgagcgtttggagagtacctgtcccagagtcaccctgagaaccgcaacggcgcagatcacctgctggctgatgcctactctggccacgacgggtcccccgagatgcagccggccccccagaacaagcgccgcctgtccctcgtctccaacggctgctacgagggcagcctctcagaggagcccagcattaggaagcccgcaggcgagggccctcagcctcgagtgtacaccatctctggggagcctgccctgctgcccagccctgaggcggaggccattgagctggcggtggtgaaggggcggcggcagcggcaccctcaccatcacagccagcccctgcgcgccagccctggtggcagccgggaggacgtcagcaggccctgccagagctgggcgggcagccgccagggctccaaggagtgccccggatgtgcccagctggctcctggccccacccctcgggcctttgggctggaccagccacctctgcctgagacctccggtcgccgcaagaagctggagaggatgtacagcgttgaccgtgtgtctgacgacatccctattcgtacctggttccccaaggaaaatcttttcagcttccagacagcaaccacaactatgcaagcggtgttcaggggctacgcggagaggaagcgccggaaacgggagaatgattccgcgtctgtaatccagaggaacttccgcaaacacctgcgcatggtcggcagccggagggtgaaggcccagacgttcgctgagcggcgcgagcggagcttcagccggtcctggagcgaccccacccccatgaaagccgacacttcccacgactcccgagacagcagtgacctgcagagctcccactgcacgctggacgaggccttcgaggacctggactgggacactgagaagggcctggaggctgtggcctgcgacaccgaaggcttcgtgccaccaaaggtcatgctcatttcctccaaggtgcccaaggctgagtacatccccactatcatccgccgggatgacccctccatcatccccatcctctacgaccatgagcacgcaaccttcgaggacatccttgaggagatagagaggaagctgaacgtctaccacaagggagccaagatctggaaaatgctgattttctgccagggaggtcctggacacctctatctcctcaagaacaaggtggccacctttgccaaagtggagaaggaagaggacatgattcacttctggaagcggctgagccgcctgatgagcaaagtgaacccagagccgaacgtcatccacatcatgggctgctacattctggggaaccccaatggagagaagctgttccagaacctcaggaccctcatgactccttatagggtcaccttcgagtcacccctggagctctcagcccaagggaagcagatgatcgagacgtactttgacttccggttgtatcgcctgtggaagagccgccagcactcgaagctgctggactttgacgacgtcctgtgaggggcagaggcctccgcccagtcaccatcaggccactccctctgcaccgggacctggggctgggccgcctcgtgctccccgggactgtgtggctccggtctcgcctggagccacttcagggcacctcagacgttgctcaggttccccctgtgggttccggtcctcgctgcacccgtggccgcagaggctgcagtccctgggggccgggaggatcccgccctgtggcccgtggatgctcagcggccaggcactgacctgccatgcctcgcctggaggctcagctgtgggcatccctccatggggttcatagaaataagtgcaatttctacacccccgaaacaattcaaagggaagcagcatttcttgttaactagttaagcactatgctgctagttacagtgtaggcaccccggcccagcagcccagcagcccacatgtgttcaggaccctccctgcccaccccctccctgccgtatcgatcaccagcaccagggtggcccgtgtgcgtggggccagcgtcgccgggctgcccagcctggctctgtctacactggccgagtctctgggtctgtctacactggccgagtctccgactgtctgtgctttcacttacactcctcttgccaccccccatccctgcttacttagacctcagccggcgccggacccggtaggggcagtctgggcagcaggaaggaagggcgcagcgtcccctccttcagaggaggctctgggtggggcctgctccccatccccccaagcccacccagcactctcattgctgctgttgagttcagcttttaccagcctcagtgtggaggctccatcccagcacacaggcctggggcttggcaggggcccagctggggctgggccctgggttttgagaaactcgctggcaccacagtgggcccctggacccggccgcgcagctggtggactgtaggggctcctgactgggcacaggagctcccagcttttgtccacggccagcaggatgggctgtcgtgtatatagctggggcgagggggcaggccccccttgtgcagagccaggggtctgagggcacctggctgtgttcccagctgagggagggctggggcgggggccgggcttggaacgatgtacgataccctcatagtgaccattaaacctgatcctccaccgcggccgccgcgtgggtctgtcctctcagtgctttccaggggccttcctgtgcccagcttctgggcccactcctgtgaggtcactgctgcagggccttcctgcctggacagagttggagctaggccactagaccaccccacagggcatagccagggggaccagcacaggaggggacggagaggagctgcaggagggctggggggaggctgcagtctcggaggggggcctcgccgggtctggaggggacagcagagacagcccgttccccctgccgcctgagggcaccagggagagggctgtatgtccctcacgccacactgtgtgtgcagtcagcagtgtggccacagatgggggccactctctcaacctcaggtgtcctcagggcccagaccgctgctgggcacagccaggctggctgccagctggttccctgccccgtggctgggggacagagcagcacgtatcagctgggctagggtcagggggccactggtgcgcagcctggcacagcctggcaggcttgaggcccagtgtgctgggggtggtcacacagccgtcagccacctccagctcttccagggcattctagatggggtcccgggagggggcaggttttggtgccaatttgagtgtataaagttttaggtaaatacc

SEQ ID NO: 19583 - DNA, 2914 bp, Homo sapiens
  source 1..2914: mol_type = unassigned DNA
gtgccccggatgtgcccagctggctcctggccccacccctcgggcctttgggctggaccagccacctctgcctgagacctccggtcgccgcaagaagctggagaggatgtacagcgttgaccgtgtgtctgacgacatccctattcgtacctggttccccaaggaaaatcttttcagcttccagacagcaaccacaactatgcaagcggtgttcaggggctacgcggagaggaagcgccggaaacgggagaatgattccgcgtctgtaatccagaggaacttccgcaaacacctgcgcatggtcggcagccggagggtgaaggcccagacgttcgctgagcggcgcgagcggagcttcagccggtcctggagcgaccccacccccatgaaagccgacacttcccacgactcccgagacagcagtgacctgcagagctcccactgcacgctggacgaggccttcgaggacctggactgggacactgagaagggcctggaggctgtggcctgcgacaccgaaggcttcgtgccaccaaaggtcatgctcatttcctccaaggtgcccaaggctgagtacatccccactatcatccgccgggatgacccctccatcatccccatcctctacgaccatgagcacgcaaccttcgaggacatccttgaggagatagagaggaagctgaacgtctaccacaagggagccaagatctggaaaatgctgattttctgccagggaggtcctggacacctctatctcctcaagaacaaggtggccacctttgccaaagtggagaaggaagaggacatgattcacttctggaagcggctgagccgcctgatgagcaaagtgaacccagagccgaacgtcatccacatcatgggctgctacattctggggaaccccaatggagagaagctgttccagaacctcaggaccctcatgactccttatagggtcaccttcgagtcacccctggagctctcagcccaagggaagcagatgatcgagacgtactttgacttccggttgtatcgcctgtggaagagccgccagcactcgaagctgctggactttgacgacgtcctgtgaggggcagaggcctccgcccagtcaccatcaggccactccctctgcaccgggacctggggctgggccgcctcgtgctccccgggactgtgtggctccggtctcgcctggagccacttcagggcacctcagacgttgctcaggttccccctgtgggttccggtcctcgctgcacccgtggccgcagaggctgcagtccctgggggccgggaggatcccgccctgtggcccgtggatgctcagcggccaggcactgacctgccatgcctcgcctggaggctcagctgtgggcatccctccatggggttcatagaaataagtgcaatttctacacccccgaaacaattcaaagggaagcagcatttcttgttaactagttaagcactatgctgctagttacagtgtaggcaccccggcccagcagcccagcagcccacatgtgttcaggaccctccctgcccaccccctccctgccgtatcgatcaccagcaccagggtggcccgtgtgcgtggggccagcgtcgccgggctgcccagcctggctctgtctacactggccgagtctctgggtctgtctacactggccgagtctccgactgtctgtgctttcacttacactcctcttgccaccccccatccctgcttacttagacctcagccggcgccggacccggtaggggcagtctgggcagcaggaaggaagggcgcagcgtcccctccttcagaggaggctctgggtggggcctgctccccatccccccaagcccacccagcactctcattgctgctgttgagttcagcttttaccagcctcagtgtggaggctccatcccagcacacaggcctggggcttggcaggggcccagctggggctgggccctgggttttgagaaactcgctggcaccacagtgggcccctggacccggccgcgcagctggtggactgtaggggctcctgactgggcacaggagctcccagcttttgtccacggccagcaggatgggctgtcgtgtatatagctggggcgagggggcaggccccccttgtgcagagccaggggtctgagggcacctggctgtgttcccagctgagggagggctggggcgggggccgggcttggaacgatgtacgataccctcatagtgaccattaaacctgatcctccaccgcggccgccgcgtgggtctgtcctctcagtgctttccaggggccttcctgtgcccagcttctgggcccactcctgtgaggtcactgctgcagggccttcctgcctggacagagttggagctaggccactagaccaccccacagggcatagccagggggaccagcacaggaggggacggagaggagctgcaggagggctggggggaggctgcagtctcggaggggggcctcgccgggtctggaggggacagcagagacagcccgttccccctgccgcctgagggcaccagggagagggctgtatgtccctcacgccacactgtgtgtgcagtcagcagtgtggccacagatgggggccactctctcaacctcaggtgtcctcagggcccagaccgctgctgggcacagccaggctggctgccagctggttccctgccccgtggctgggggacagagcagcacgtatcagctgggctagggtcagggggccactggtgcgcagcctggcacagcctggcaggcttgaggcccagtgtgctgggggtggtcacacagccgtcagccacctccagctcttccagggcattctagatggggtcccgggagggggcaggttttggtgccaatttgagtgtataaagttttaggtaaataccaaa

SEQ ID NO: 19584 - DNA, 672 bp, Homo sapiens
  source 1..672: mol_type = unassigned DNA
tgccgtcaccctctcacggccctcttcagcccctggcttcctcccccaggaacttccgcaaacacctgcgcatggtcggcagccggagggtgaaggcccagacgttcgctgagcggcgcgagcggagcttcagccggtcctggagcgaccccacccccatgaaagccgacacttcccacgactcccgagacagcagtgacctgcagagctcccactgcacgctggacgaggccttcgaggacctggactgggacactgagaagggcctggaggctgtggcctgcgacaccgaaggcttcgtgccaccaaaggtcatgctcatttcctccaaggtgcccaaggctgagtacatccccactatcatccgccgggatgacccctccatcatccccatcctctacgtgagtcccgccccgggcctgcccccaacagatgccctcttgcggccccaccctgggccagcgccggcaccccaggtccccagggtgctgtggcgctgctggctctgacgcagccttgatgtggccttgtggcctgtgtctgtccccaggaccatgagcacgcaaccttcgaggacatccttggtatgtgcctcattggccttctctctgctggttccaggcctgggaggggcagacacaggtgggggtgcccctggggctggggtggggg

SEQ ID NO: 19585 - DNA, 1838 bp, Homo sapiens
  source 1..1838: mol_type = unassigned DNA
acgcgcggagcgccgggtgcggccatgcggggaccgggcccgaccccgagcccgaccccgagcccaagcccgagccggagcccgagcgagaccccgagcccgagcccgagcgcgacccccggtgcggcgcggctaccccggcggaggcggcgggcgcggggcgcgctctgaggcccgggggatgcgccgccgcctcgaccatgggcgccgccgcctccaggaggagggcgctgaggagcgaggccatgtcctcggtggcggccaaagtgcgagcagcccgagcgtttggagagtacctgtcccagagtcaccctgagaaccgcaacggcgcagatcacctgctggctgatgcctactctggccacgacgggtcccccgagatgcagccggccccccagaacaagcgccgcctgtccctcgtctccaacggctgctacgagggcagcctctcagaggagcccagcattaggaagcccgcaggcgagggccctcagcctcgagtgtacaccatctctggggagcctgccctgctgcccagccctgaggcggaggccattgagctggcggtggtgaaggggcggcggcagcggcaccctcaccatcacagccagcccctgcgcgccagccctggtggcagccgggaggacgtcagcaggccctgccagagctgggcgggcagccgccagggctccaaggagtgccccggatgtgcccagctggctcctggccccacccctcgggcctttgggctggaccagccacctctgcctgagacctccggtcgccgcaagaagctggagaggatgtacagcgttgaccgtgtgtctgacgacatccctattcgtacctggttccccaaggaaaatcttttcagcttccagacagcaaccacaactatgcaagcggtgttcaggggctacgcggagaggaagcgccggaaacgggagaatgattccgcgtctgtaatccagaggaacttccgcaaacacctgcgcatggtcggcagccggagggtgaaggcccagacgttcgctgagcggcgcgagcggagcttcagccggtcctggagcgaccccacccccatgaaagccgacacttcccacgactcccgagacagcagtgacctgcagagctcccactgcacgctggacgaggccttcgaggacctggactgggacactgagaagggcctggaggctgtggcctgcgacaccgaaggcttcgtgccaccaaaggtcatgctcatttcctccaaggtgcccaaggctgagtacatccccactatcatccgccgggatgacccctccatcatccccatcctctacgaccatgagcacgcaaccttcgaggacatccttgaggagatagagaggaagctgaacgtctaccacaagggagccaagatctggaaaatgctgattttctgccagggaggtcctggacacctctatctcctcaagaacaaggtggccacctttgccaaagtggagaaggaagaggacatgattcacttctggaagcggctgagccgcctgatgagcaaagtgaacccagagccgaacgtcatccacatcatgggctgctacattctggggaaccccaatggagagaagctgttccagaacctcaggaccctcatgactccttatagggtcaccttcgagtcacccctggagctctcagcccaagggaagcagatgatcgagacgtactttgacttccggttgtatcgcctgtggaagagccgccagcactcgaagctgctggactttgacgacgtcctgtgaggggccgggcttggaacgatgtacgataccctcatagtgaccattaaacct

SEQ ID NO: 19586 - DNA, 3556 bp, Homo sapiens
  source 1..3556: mol_type = unassigned DNA
ggttcgggcagcgctctcccgggagcggcggcacgcgcggagcgccgggtgcggccatgcggggaccgggcccgaccccgagcccgaccccgagcccaagcccgagccggagcccgagcgagaccccgagcccgagcccgagcgcgacccccggtgcggcgcggctaccccggcggaggcggcgggcgcggggcgcgctctgaggcccgggggatgcgccgccgcctcgaccatgggcgccgccgcctccaggaggagggcgctgaggagcgaggccatgtcctcggtggcggccaaagtgcgagcagcccgagcgtttggagagtacctgtcccagagtcaccctgagaaccgcaacggcgcagatcacctgctggctgatgcctactctggccacgacgggtcccccgagatgcagccggccccccagaacaagcgccgcctgtccctcgtctccaacggctgctacgagggcagcctctcagaggagcccagcattaggaagcccgcaggcgagggccctcagcctcgagtgtacaccatctctggggagcctgccctgctgcccagccctgaggcggaggccattgagctggcggtggtgaaggggcggcggcagcggcaccctcaccatcacagccagcccctgcgcgccagccctggtggcagccgggaggacgtcagcaggccctgccagagctgggcgggcagccgccagggctccaaggagtgccccggatgtgcccagctggctcctggccccacccctcgggcctttgggctggaccagccacctctgcctgagacctccggtcgccgcaagaagctggagaggatgtacagcgttgaccgtgtgtctgacgacatccctattcgtacctggttccccaaggaaaatcttttcagcttccagacagcaaccacaactatgcaagccatctcggtgttcaggggctacgcggagaggaagcgccggaaacgggagaatgattccgcgtctgtaatccagaggaacttccgcaaacacctgcgcatggtcggcagccggagggtgaaggcccagagcagtgacctgcagagctcccactgcacgctggacgaggccttcgaggacctggactgggacactgagaagggcctggaggctgtggcctgcgacaccgaaggcttcgtgccaccaaaggtcatgctcatttcctccaaggtgcccaaggctgagtacatccccactatcatccgccgggatgacccctccatcatccccatcctctacgaccatgagcacgcaaccttcgaggacatccttgaggagatagagaggaagctgaacgtctaccacaagggagccaagatctggaaaatgctgattttctgccagggaggtcctggacacctctatctcctcaagaacaaggtggccacctttgccaaagtggagaaggaagaggacatgattcacttctggaagcggctgagccgcctgatgagcaaagtgaacccagagccgaacgtcatccacatcatgggctgctacattctggggaaccccaatggagagaagctgttccagaacctcaggaccctcatgactccttatagggtcaccttcgagtcacccctggagctctcagcccaagggaagcagatgatcgagacgtactttgacttccggttgtatcgcctgtggaagagccgccagcactcgaagctgctggactttgacgacgtcctgtgaggggcagaggcctccgcccagtcaccatcaggccactccctctgcaccgggacctggggctgggccgcctcgtgctccccgggactgtgtggctccggtctcgcctggagccacttcagggcacctcagacgttgctcaggttccccctgtgggttccggtcctcgctgcacccgtggccgcagaggctgcagtccctgggggccgggaggatcccgccctgtggcccgtggatgctcagcggccaggcactgacctgccatgcctcgcctggaggctcagctgtgggcatccctccatggggttcatagaaataagtgcaatttctacacccccgaaacaattcaaagggaagcagcatttcttgttaactagttaagcactatgctgctagttacagtgtaggcaccccggcccagcagcccagcagcccacatgtgttcaggaccctccctgcccaccccctccctgccgtatcgatcaccagcaccagggtggcccgtgtgcgtggggccagcgtcgccgggctgcccagcctggctctgtctacactggccgagtctctgggtctgtctacactggccgagtctccgactgtctgtgctttcacttacactcctcttgccaccccccatccctgcttacttagacctcagccggcgccggacccggtaggggcagtctgggcagcaggaaggaagggcgcagcgtcccctccttcagaggaggctctgggtggggcctgctccccatccccccaagcccacccagcactctcattgctgctgttgagttcagcttttaccagcctcagtgtggaggctccatcccagcacacaggcctggggcttggcaggggcccagctggggctgggccctgggttttgagaaactcgctggcaccacagtgggcccctggacccggccgcgcagctggtggactgtaggggctcctgactgggcacaggagctcccagcttttgtccacggccagcaggatgggctgtcgtgtatatagctggggcgagggggcaggccccccttgtgcagagccaggggtctgagggcacctggctgtgttcccagctgagggagggctggggcgggggccgggcttggaacgatgtacgataccctcatagtgaccattaaacctgatcctccaccgcggccgccgcgtgggtctgtcctctcagtgctttccaggggccttcctgtgcccagcttctgggcccactcctgtgaggtcactgctgcagggccttcctgcctggacagagttggagctaggccactagaccaccccacagggcatagccagggggaccagcacaggaggggacggagaggagctgcaggagggctggggggaggctgcagtctcggaggggggcctcgccgggtctggaggggacagcagagacagcccgttccccctgccgcctgagggcaccagggagagggctgtatgtccctcacgccacactgtgtgtgcagtcagcagtgtggccacagatgggggccactctctcaacctcaggtgtcctcagggcccagaccgctgctgggcacagccaggctggctgccagctggttccctgccccgtggctgggggacagagcagcacgtatcagctgggctagggtcagggggccactggtgcgcagcctggcacagcctggcaggcttgaggcccagtgtgctgggggtggtcacacagccgtcagccacctccagctcttccagggcattctagatggggtcccgggagggggcaggttttggtgccaatttgagtgtataaagttttaggtaaatacc

SEQ ID NO: 19587 - DNA, 3571 bp, Homo sapiens
  source 1..3571: mol_type = unassigned DNA
ggttcgggcagcgctctcccgggagcggcggcacgcgcggagcgccgggtgcggccatgcggggaccgggcccgaccccgagcccgaccccgagcccaagcccgagccggagcccgagcgagaccccgagcccgagcccgagcgcgacccccggtgcggcgcggctaccccggcggaggcggcgggcgcggggcgcgctctgaggcccgggggatgcgccgccgcctcgaccatgggcgccgccgcctccaggaggagggcgctgaggagcgaggccatgtcctcggtggcggccaaagtgcgagcagcccgagcgtttggagagtacctgtcccagagtcaccctgagaaccgcaacggcgcagatcacctgctggctgatgcctactctggccacgacgggtcccccgagatgcagccggccccccagaacaagcgccgcctgtccctcgtctccaacggctgctacgagggcagcctctcagaggagcccagcattaggaagcccgcaggcgagggccctcagcctcgagtgtacaccatctctggggagcctgccctgctgcccagccctgaggcggaggccattgagctggcggtggtgaaggggcggcggcagcggcaccctcaccatcacagccagcccctgcgcgccagccctggtggcagccgggaggacgtcagcaggccctgccagagctgggcgggcagccgccagggctccaaggagtgccccggatgtgcccagctggctcctggccccacccctcgggcctttgggctggaccagccacctctgcctgagacctccggtcgccgcaagaagctggagaggatgtacagcgttgaccgtgtgtctgacgacatccctattcgtacctggttccccaaggaaaatcttttcagcttccagacagcaaccacaactatgcaagcgaacttccgcaaacacctgcgcatggtcggcagccggagggtgaaggcccagacgttcgctgagcggcgcgagcggagcttcagccggtcctggagcgaccccacccccatgaaagccgacacttcccacgactcccgagacagcagtgacctgcagagctcccactgcacgctggacgaggccttcgaggacctggactgggacactgagaagggcctggaggctgtggcctgcgacaccgaaggcttcgtgccaccaaaggtcatgctcatttcctccaaggtgcccaaggctgagtacatccccactatcatccgccgggatgacccctccatcatccccatcctctacgaccatgagcacgcaaccttcgaggacatccttgaggagatagagaggaagctgaacgtctaccacaagggagccaagatctggaaaatgctgattttctgccagggaggtcctggacacctctatctcctcaagaacaaggtggccacctttgccaaagtggagaaggaagaggacatgattcacttctggaagcggctgagccgcctgatgagcaaagtgaacccagagccgaacgtcatccacatcatgggctgctacattctggggaaccccaatggagagaagctgttccagaacctcaggaccctcatgactccttatagggtcaccttcgagtcacccctggagctctcagcccaagggaagcagatgatcgagacgtactttgacttccggttgtatcgcctgtggaagagccgccagcactcgaagctgctggactttgacgacgtcctgtgaggggcagaggcctccgcccagtcaccatcaggccactccctctgcaccgggacctggggctgggccgcctcgtgctccccgggactgtgtggctccggtctcgcctggagccacttcagggcacctcagacgttgctcaggttccccctgtgggttccggtcctcgctgcacccgtggccgcagaggctgcagtccctgggggccgggaggatcccgccctgtggcccgtggatgctcagcggccaggcactgacctgccatgcctcgcctggaggctcagctgtgggcatccctccatggggttcatagaaataagtgcaatttctacacccccgaaacaattcaaagggaagcagcatttcttgttaactagttaagcactatgctgctagttacagtgtaggcaccccggcccagcagcccagcagcccacatgtgttcaggaccctccctgcccaccccctccctgccgtatcgatcaccagcaccagggtggcccgtgtgcgtggggccagcgtcgccgggctgcccagcctggctctgtctacactggccgagtctctgggtctgtctacactggccgagtctccgactgtctgtgctttcacttacactcctcttgccaccccccatccctgcttacttagacctcagccggcgccggacccggtaggggcagtctgggcagcaggaaggaagggcgcagcgtcccctccttcagaggaggctctgggtggggcctgctccccatccccccaagcccacccagcactctcattgctgctgttgagttcagcttttaccagcctcagtgtggaggctccatcccagcacacaggcctggggcttggcaggggcccagctggggctgggccctgggttttgagaaactcgctggcaccacagtgggcccctggacccggccgcgcagctggtggactgtaggggctcctgactgggcacaggagctcccagcttttgtccacggccagcaggatgggctgtcgtgtatatagctggggcgagggggcaggccccccttgtgcagagccaggggtctgagggcacctggctgtgttcccagctgagggagggctggggcgggggccgggcttggaacgatgtacgataccctcatagtgaccattaaacctgatcctccaccgcggccgccgcgtgggtctgtcctctcagtgctttccaggggccttcctgtgcccagcttctgggcccactcctgtgaggtcactgctgcagggccttcctgcctggacagagttggagctaggccactagaccaccccacagggcatagccagggggaccagcacaggaggggacggagaggagctgcaggagggctggggggaggctgcagtctcggaggggggcctcgccgggtctggaggggacagcagagacagcccgttccccctgccgcctgagggcaccagggagagggctgtatgtccctcacgccacactgtgtgtgcagtcagcagtgtggccacagatgggggccactctctcaacctcaggtgtcctcagggcccagaccgctgctgggcacagccaggctggctgccagctggttccctgccccgtggctgggggacagagcagcacgtatcagctgggctagggtcagggggccactggtgcgcagcctggcacagcctggcaggcttgaggcccagtgtgctgggggtggtcacacagccgtcagccacctccagctcttccagggcattctagatggggtcccgggagggggcaggttttggtgccaatttgagtgtataaagttttaggtaaatacc

SEQ ID NO: 19588 - DNA, 3646 bp, Homo sapiens
  source 1..3646: mol_type = unassigned DNA
ggttcgggcagcgctctcccgggagcggcggcacgcgcggagcgccgggtgcggccatgcggggaccgggcccgaccccgagcccgaccccgagcccaagcccgagccggagcccgagcgagaccccgagcccgagcccgagcgcgacccccggtgcggcgcggctaccccggcggaggcggcgggcgcggggcgcgctctgaggcccgggggatgcgccgccgcctcgaccatgggcgccgccgcctccaggaggagggcgctgaggagcgaggccatgtcctcggtggcggccaaagtgcgagcagcccgagcgtttggagagtacctgtcccagagtcaccctgagaaccgcaacggcgcagatcacctgctggctgatgcctactctggccacgacgggtcccccgagatgcagccggccccccagaacaagcgccgcctgtccctcgtctccaacggctgctacgagggcagcctctcagaggagcccagcattaggaagcccgcaggcgagggccctcagcctcgagtgtacaccatctctggggagcctgccctgctgcccagccctgaggcggaggccattgagctggcggtggtgaaggggcggcggcagcggcaccctcaccatcacagccagcccctgcgcgccagccctggtggcagccgggaggacgtcagcaggccctgccagagctgggcgggcagccgccagggctccaaggagtgccccggatgtgcccagctggctcctggccccacccctcgggcctttgggctggaccagccacctctgcctgagacctccggtcgccgcaagaagctggagaggatgtacagcgttgaccgtgtgtctgacgacatccctattcgtacctggttccccaaggaaaatcttttcagcttccagacagcaaccacaactatgcaagccatctcggtgttcaggggctacgcggagaggaagcgccggaaacgggagaatgattccgcgtctgtaatccagaggaacttccgcaaacacctgcgcatggtcggcagccggagggtgaaggcccagacgttcgctgagcggcgcgagcggagcttcagccggtcctggagcgaccccacccccatgaaagccgacacttcccacgactcccgagacagcagtgacctgcagagctcccactgcacgctggacgaggccttcgaggacctggactgggacactgagaagggcctggaggctgtggcctgcgacaccgaaggcttcgtgccaccaaaggtcatgctcatttcctccaaggtgcccaaggctgagtacatccccactatcatccgccgggatgacccctccatcatccccatcctctacgaccatgagcacgcaaccttcgaggacatccttgaggagatagagaggaagctgaacgtctaccacaagggagccaagatctggaaaatgctgattttctgccagggaggtcctggacacctctatctcctcaagaacaaggtggccacctttgccaaagtggagaaggaagaggacatgattcacttctggaagcggctgagccgcctgatgagcaaagtgaacccagagccgaacgtcatccacatcatgggctgctacattctggggaaccccaatggagagaagctgttccagaacctcaggaccctcatgactccttatagggtcaccttcgagtcacccctggagctctcagcccaagggaagcagatgatcgagacgtactttgacttccggttgtatcgcctgtggaagagccgccagcactcgaagctgctggactttgacgacgtcctgtgaggggcagaggcctccgcccagtcaccatcaggccactccctctgcaccgggacctggggctgggccgcctcgtgctccccgggactgtgtggctccggtctcgcctggagccacttcagggcacctcagacgttgctcaggttccccctgtgggttccggtcctcgctgcacccgtggccgcagaggctgcagtccctgggggccgggaggatcccgccctgtggcccgtggatgctcagcggccaggcactgacctgccatgcctcgcctggaggctcagctgtgggcatccctccatggggttcatagaaataagtgcaatttctacacccccgaaacaattcaaagggaagcagcatttcttgttaactagttaagcactatgctgctagttacagtgtaggcaccccggcccagcagcccagcagcccacatgtgttcaggaccctccctgcccaccccctccctgccgtatcgatcaccagcaccagggtggcccgtgtgcgtggggccagcgtcgccgggctgcccagcctggctctgtctacactggccgagtctctgggtctgtctacactggccgagtctccgactgtctgtgctttcacttacactcctcttgccaccccccatccctgcttacttagacctcagccggcgccggacccggtaggggcagtctgggcagcaggaaggaagggcgcagcgtcccctccttcagaggaggctctgggtggggcctgctccccatccccccaagcccacccagcactctcattgctgctgttgagttcagcttttaccagcctcagtgtggaggctccatcccagcacacaggcctggggcttggcaggggcccagctggggctgggccctgggttttgagaaactcgctggcaccacagtgggcccctggacccggccgcgcagctggtggactgtaggggctcctgactgggcacaggagctcccagcttttgtccacggccagcaggatgggctgtcgtgtatatagctggggcgagggggcaggccccccttgtgcagagccaggggtctgagggcacctggctgtgttcccagctgagggagggctggggcgggggccgggcttggaacgatgtacgataccctcatagtgaccattaaacctgatcctccaccgcggccgccgcgtgggtctgtcctctcagtgctttccaggggccttcctgtgcccagcttctgggcccactcctgtgaggtcactgctgcagggccttcctgcctggacagagttggagctaggccactagaccaccccacagggcatagccagggggaccagcacaggaggggacggagaggagctgcaggagggctggggggaggctgcagtctcggaggggggcctcgccgggtctggaggggacagcagagacagcccgttccccctgccgcctgagggcaccagggagagggctgtatgtccctcacgccacactgtgtgtgcagtcagcagtgtggccacagatgggggccactctctcaacctcaggtgtcctcagggcccagaccgctgctgggcacagccaggctggctgccagctggttccctgccccgtggctgggggacagagcagcacgtatcagctgggctagggtcagggggccactggtgcgcagcctggcacagcctggcaggcttgaggcccagtgtgctgggggtggtcacacagccgtcagccacctccagctcttccagggcattctagatggggtcccgggagggggcaggttttggtgccaatttgagtgtataaagttttaggtaaatacc

SEQ ID NO: 19589 - DNA, 2888 bp, Homo sapiens
  source 1..2888: mol_type = unassigned DNA
tctggagttgaaggggagccctggaaggctgtcgcgggaagagcactgggtgggatttgcctttgggtgggaggtggtgccaggagccagggagagcactggcttcccacaccgaaggggaacttccgcaaacacctgcgcatggtcggcagccggagggtgaaggcccagacgttcgctgagcggcgcgagcggagcttcagccggtcctggagcgaccccacccccatgaaagccgacacttcccacgactcccgagacagtaggtgccccgcacaggcccgcccaccttccccagagcctcccctagaccccagacccctgctgggggtcccctgccagggccgctgggctgcgcttttgcactcctgaatcttggtttacctgtttgtgagatggggacgccctcagcatctccgatcgcaaaggcggggctaacaacggccgcggcagtgctggccgggggcgcctgtagggccgtgcccaccgccactcgcaagaggccctcaggggcagggggctgcggtgcccgcccccactccctcccaggcgcccggcggacttggctggagctgatgcctgcacgcgccttccaccggcctcgcaccagggtctcccttcccacatcaggccgctgcccagtggtgtccacaggcctgtcctgccgggctggcggcgacctctgtatggtcctcccacttgcttggaggaccctccgggatggggctttcgggccctgtgggccttggggccatggccaggataggaggtgctgccgggcctgctgtcctggtgaccctcttgcttcccaggcagtgacctgcagagctcccactgcacgctggacgaggccttcgaggacctggactgggacactgagaagggcctggaggctgtggcctgcgacaccgaaggcttcgtgccaccaaaggtcatggtgaggcccagcccgggcagtgctcctctacaccccgagcaggactccgccccaacccgagtccagccagctctgcctgggaccacgcagccttctccagctgcctgggggagggtgtctcacagggctatacccttgggctgcctggcagccagaaggtagcctcatgggggctcccacagccccttggcttttggatgggcctggggcccctgagcagctctttgtctccgcagctcatttcctccaaggtgcccaaggctgagtacatccccactatcatccgccgggatgacccctccatcatccccatcctctacgaccatgagcacgcaaccttcgaggacatccttgaggagatagagaggaagctgaacgtctaccacaagggagccaagatctggaaaatgctgattttctgccagggaggtcctggacacctctatctcctcaagaacaaggtggccacctttgccaaagtggagaaggaagaggacatgattcacttctggaagcggctgagccgcctgatgagcaaagtgaacccagagccgaacgtcatccacatcatgggctgctacattctggggaaccccaatggagagaagctgttccagaacctcaggaccctcatgactccttatagggtcaccttcgagtcacccctggagctctcagcccaagggaagcagatgatcgagacgtactttgacttccggttgtatcgcctgtggaagagccgccagcactcgaagctgctggactttgacgacgtcctgtgaggggcagaggcctccgcccagtcaccatcaggccactccctctgcaccgggacctggggctgggccgcctcgtgctccccgggactgtgtggctccggtctcgcctggagccacttcagggcacctcagacgttgctcaggttccccctgtgggttccggtcctcgctgcacccgtggccgcagaggctgcagtccctgggggccgggaggatcccgccctgtggcccgtggatgctcagcggccaggcactgacctgccatgcctcgcctggaggctcagctgtgggcatccctccatggggttcatagaaataagtgcaatttctacacccccgaaacaattcaaagggaagcagcatttcttgttaactagttaagcactatgctgctagttacagtgtaggcaccccggcccagcagcccagcagcccacatgtgttcaggaccctccctgcccaccccctccctgccgtatcgatcaccagcaccagggtggcccgtgtgcgtggggccagcgtcgccgggctgcccagcctggctctgtctacactggccgagtctctgggtctgtctacactggccgagtctccgactgtctgtgctttcacttacactcctcttgccaccccccatccctgcttacttagacctcagccggcgccggacccggtaggggcagtctgggcagcaggaaggaagggcgcagcgtcccctccttcagaggaggctctgggtggggcctgctccccatccccccaagcccacccagcactctcattgctgctgttgagttcagcttttaccagcctcagtgtggaggctccatcccagcacacaggcctggggcttggcaggggcccagctggggctgggccctgggttttgagaaactcgctggcaccacagtgggcccctggacccggccgcgcagctggtggactgtaggggctcctgactgggcacaggagctcccagcttttgtccacggccagcaggatgggctgtcgtgtatatagctggggcgagggggcaggccccccttgtgcagagccaggggtctgagggcacctggctgtgttcccagctgagggagggctggggcgggggccgggcttggaacgatgtacgataccctcatagtgaccattaaacctgatcctccaccgcg

SEQ ID NO: 19590 - DNA, 3577 bp, Homo sapiens
  source 1..3577: mol_type = unassigned DNA
ggttcgggcagcgctctcccgggagcggcggcacgcgcggagcgccgggtgcggccatgcggggaccgggcccgaccccgagcccgaccccgagcccaagcccgagccggagcccgagcgagaccccgagcccgagcccgagcgcgacccccggtgcggcgcggctaccccggcggaggcggcgggcgcggggcgcgctctgaggcccgggggatgcgccgccgcctcgaccatgggcgccgccgcctccaggaggagggcgctgaggagcgaggccatgtcctcggtggcggccaaagtgcgagcagcccgagcgtttggagagtacctgtcccagagtcaccctgagaaccgcaacggcgcagatcacctgctggctgatgcctactctggccacgacgggtcccccgagatgcagccggccccccagaacaagcgccgcctgtccctcgtctccaacggctgctacgagggcagcctctcagaggagcccagcattaggaagcccgcaggcgagggccctcagcctcgagtgtacaccatctctggggagcctgccctgctgcccagccctgaggcggaggccattgagctggcggtggtgaaggggcggcggcagcggcaccctcaccatcacagccagcccctgcgcgccagccctggtggcagccgggaggacgtcagcaggccctgccagagctgggcgggcagccgccagggctccaaggagtgccccggatgtgcccagctggctcctggccccacccctcgggcctttgggctggaccagccacctctgcctgagacctccggtcgccgcaagaagctggagaggatgtacagcgttgaccgtgtgtctgacgacatccctattcgtacctggttccccaaggaaaatcttttcagcttccagacagcaaccacaactatgcaagcggttgggaacttccgcaaacacctgcgcatggtcggcagccggagggtgaaggcccagacgttcgctgagcggcgcgagcggagcttcagccggtcctggagcgaccccacccccatgaaagccgacacttcccacgactcccgagacagcagtgacctgcagagctcccactgcacgctggacgaggccttcgaggacctggactgggacactgagaagggcctggaggctgtggcctgcgacaccgaaggcttcgtgccaccaaaggtcatgctcatttcctccaaggtgcccaaggctgagtacatccccactatcatccgccgggatgacccctccatcatccccatcctctacgaccatgagcacgcaaccttcgaggacatccttgaggagatagagaggaagctgaacgtctaccacaagggagccaagatctggaaaatgctgattttctgccagggaggtcctggacacctctatctcctcaagaacaaggtggccacctttgccaaagtggagaaggaagaggacatgattcacttctggaagcggctgagccgcctgatgagcaaagtgaacccagagccgaacgtcatccacatcatgggctgctacattctggggaaccccaatggagagaagctgttccagaacctcaggaccctcatgactccttatagggtcaccttcgagtcacccctggagctctcagcccaagggaagcagatgatcgagacgtactttgacttccggttgtatcgcctgtggaagagccgccagcactcgaagctgctggactttgacgacgtcctgtgaggggcagaggcctccgcccagtcaccatcaggccactccctctgcaccgggacctggggctgggccgcctcgtgctccccgggactgtgtggctccggtctcgcctggagccacttcagggcacctcagacgttgctcaggttccccctgtgggttccggtcctcgctgcacccgtggccgcagaggctgcagtccctgggggccgggaggatcccgccctgtggcccgtggatgctcagcggccaggcactgacctgccatgcctcgcctggaggctcagctgtgggcatccctccatggggttcatagaaataagtgcaatttctacacccccgaaacaattcaaagggaagcagcatttcttgttaactagttaagcactatgctgctagttacagtgtaggcaccccggcccagcagcccagcagcccacatgtgttcaggaccctccctgcccaccccctccctgccgtatcgatcaccagcaccagggtggcccgtgtgcgtggggccagcgtcgccgggctgcccagcctggctctgtctacactggccgagtctctgggtctgtctacactggccgagtctccgactgtctgtgctttcacttacactcctcttgccaccccccatccctgcttacttagacctcagccggcgccggacccggtaggggcagtctgggcagcaggaaggaagggcgcagcgtcccctccttcagaggaggctctgggtggggcctgctccccatccccccaagcccacccagcactctcattgctgctgttgagttcagcttttaccagcctcagtgtggaggctccatcccagcacacaggcctggggcttggcaggggcccagctggggctgggccctgggttttgagaaactcgctggcaccacagtgggcccctggacccggccgcgcagctggtggactgtaggggctcctgactgggcacaggagctcccagcttttgtccacggccagcaggatgggctgtcgtgtatatagctggggcgagggggcaggccccccttgtgcagagccaggggtctgagggcacctggctgtgttcccagctgagggagggctggggcgggggccgggcttggaacgatgtacgataccctcatagtgaccattaaacctgatcctccaccgcggccgccgcgtgggtctgtcctctcagtgctttccaggggccttcctgtgcccagcttctgggcccactcctgtgaggtcactgctgcagggccttcctgcctggacagagttggagctaggccactagaccaccccacagggcatagccagggggaccagcacaggaggggacggagaggagctgcaggagggctggggggaggctgcagtctcggaggggggcctcgccgggtctggaggggacagcagagacagcccgttccccctgccgcctgagggcaccagggagagggctgtatgtccctcacgccacactgtgtgtgcagtcagcagtgtggccacagatgggggccactctctcaacctcaggtgtcctcagggcccagaccgctgctgggcacagccaggctggctgccagctggttccctgccccgtggctgggggacagagcagcacgtatcagctgggctagggtcagggggccactggtgcgcagcctggcacagcctggcaggcttgaggcccagtgtgctgggggtggtcacacagccgtcagccacctccagctcttccagggcattctagatggggtcccgggagggggcaggttttggtgccaatttgagtgtataaagttttaggtaaatacc

SEQ ID NO: 19591 - DNA, 3577 bp, Homo sapiens
  source 1..3577: mol_type = unassigned DNA
ggttcgggcagcgctctcccgggagcggcggcacgcgcggagcgccgggtgcggccatgcggggaccgggcccgaccccgagcccgaccccgagcccaagcccgagccggagcccgagcgagaccccgagcccgagcccgagcgcgacccccggtgcggcgcggctaccccggcggaggcggcgggcgcggggcgcgctctgaggcccgggggatgcgccgccgcctcgaccatgggcgccgccgcctccaggaggagggcgctgaggagcgaggccatgtcctcggtggcggccaaagtgcgagcagcccgagcgtttggagagtacctgtcccagagtcaccctgagaaccgcaacggcgcagatcacctgctggctgatgcctactctggccacgacgggtcccccgagatgcagccggccccccagaacaagcgccgcctgtccctcgtctccaacggctgctacgagggcagcctctcagaggagcccagcattaggaagcccgcaggcgagggccctcagcctcgagtgtacaccatctctggggagcctgccctgctgcccagccctgaggcggaggccattgagctggcggtggtgaaggggcggcggcagcggcaccctcaccatcacagccagcccctgcgcgccagccctggtggcagccgggaggacgtcagcaggccctgccagagctgggcgggcagccgccagggctccaaggagtgccccggatgtgcccagctggctcctggccccacccctcgggcctttgggctggaccagccacctctgcctgagacctccggtcgccgcaagaagctggagaggatgtacagcgttgaccgtgtgtctgacgacatccctattcgtacctggttccccaaggaaaatcttttcagcttccagacagcaaccacaactatgcaagccatctcgaacttccgcaaacacctgcgcatggtcggcagccggagggtgaaggcccagacgttcgctgagcggcgcgagcggagcttcagccggtcctggagcgaccccacccccatgaaagccgacacttcccacgactcccgagacagcagtgacctgcagagctcccactgcacgctggacgaggccttcgaggacctggactgggacactgagaagggcctggaggctgtggcctgcgacaccgaaggcttcgtgccaccaaaggtcatgctcatttcctccaaggtgcccaaggctgagtacatccccactatcatccgccgggatgacccctccatcatccccatcctctacgaccatgagcacgcaaccttcgaggacatccttgaggagatagagaggaagctgaacgtctaccacaagggagccaagatctggaaaatgctgattttctgccagggaggtcctggacacctctatctcctcaagaacaaggtggccacctttgccaaagtggagaaggaagaggacatgattcacttctggaagcggctgagccgcctgatgagcaaagtgaacccagagccgaacgtcatccacatcatgggctgctacattctggggaaccccaatggagagaagctgttccagaacctcaggaccctcatgactccttatagggtcaccttcgagtcacccctggagctctcagcccaagggaagcagatgatcgagacgtactttgacttccggttgtatcgcctgtggaagagccgccagcactcgaagctgctggactttgacgacgtcctgtgaggggcagaggcctccgcccagtcaccatcaggccactccctctgcaccgggacctggggctgggccgcctcgtgctccccgggactgtgtggctccggtctcgcctggagccacttcagggcacctcagacgttgctcaggttccccctgtgggttccggtcctcgctgcacccgtggccgcagaggctgcagtccctgggggccgggaggatcccgccctgtggcccgtggatgctcagcggccaggcactgacctgccatgcctcgcctggaggctcagctgtgggcatccctccatggggttcatagaaataagtgcaatttctacacccccgaaacaattcaaagggaagcagcatttcttgttaactagttaagcactatgctgctagttacagtgtaggcaccccggcccagcagcccagcagcccacatgtgttcaggaccctccctgcccaccccctccctgccgtatcgatcaccagcaccagggtggcccgtgtgcgtggggccagcgtcgccgggctgcccagcctggctctgtctacactggccgagtctctgggtctgtctacactggccgagtctccgactgtctgtgctttcacttacactcctcttgccaccccccatccctgcttacttagacctcagccggcgccggacccggtaggggcagtctgggcagcaggaaggaagggcgcagcgtcccctccttcagaggaggctctgggtggggcctgctccccatccccccaagcccacccagcactctcattgctgctgttgagttcagcttttaccagcctcagtgtggaggctccatcccagcacacaggcctggggcttggcaggggcccagctggggctgggccctgggttttgagaaactcgctggcaccacagtgggcccctggacccggccgcgcagctggtggactgtaggggctcctgactgggcacaggagctcccagcttttgtccacggccagcaggatgggctgtcgtgtatatagctggggcgagggggcaggccccccttgtgcagagccaggggtctgagggcacctggctgtgttcccagctgagggagggctggggcgggggccgggcttggaacgatgtacgataccctcatagtgaccattaaacctgatcctccaccgcggccgccgcgtgggtctgtcctctcagtgctttccaggggccttcctgtgcccagcttctgggcccactcctgtgaggtcactgctgcagggccttcctgcctggacagagttggagctaggccactagaccaccccacagggcatagccagggggaccagcacaggaggggacggagaggagctgcaggagggctggggggaggctgcagtctcggaggggggcctcgccgggtctggaggggacagcagagacagcccgttccccctgccgcctgagggcaccagggagagggctgtatgtccctcacgccacactgtgtgtgcagtcagcagtgtggccacagatgggggccactctctcaacctcaggtgtcctcagggcccagaccgctgctgggcacagccaggctggctgccagctggttccctgccccgtggctgggggacagagcagcacgtatcagctgggctagggtcagggggccactggtgcgcagcctggcacagcctggcaggcttgaggcccagtgtgctgggggtggtcacacagccgtcagccacctccagctcttccagggcattctagatggggtcccgggagggggcaggttttggtgccaatttgagtgtataaagttttaggtaaatacc

SEQ ID NO: 19592 - DNA, 1523 bp, Homo sapiens
  source 1..1523: mol_type = unassigned DNA
gaatgcagctcgggaggagacttgatccagagcgccaggcactgcacctttgttctggagttgaaggggagccctggaaggctgtcgcgggaagagcactgggtgggatttgcctttgggtgggaggtggtgccaggagccagggagagcactggcttcccacaccgaaggggaacttccgcaaacacctgcgcatggtcggcagccggagggtgaaggcccagacgttcgctgagcggcgcgagcggagcttcagccggtcctggagcgaccccacccccatgaaagccgacacttcccacgactcccgagacagcagtgacctgcagagctcccactgcacgctggacgaggccttcgaggacctggactgggacactgagaagggcctggaggctgtggcctgcgacaccgaaggcttcgtgccaccaaaggtcatgctcatttcctccaaggtgcccaaggctgagtacatccccactatcatccgccgggatgacccctccatcatccccatcctctacgaccatgagcacgcaaccttcgaggacatccttgaggagatagagaggaagctgaacgtctaccacaagggagccaagatctggaaaatgctgattttctgccagggaggtcctggacacctctatctcctcaagaacaaggtggccacctttgccaaagtggagaaggaagaggacatgattcacttctggaagcggctgagccgcctgatgagcaaagtgaacccagagccgaacgtcatccacatcatgggctgctacattctggggaaccccaatggagagaagctgttccagaacctcaggaccctcatgactccttatagggtcaccttcgagtcacccctggagctctcagcccaagggaagcagatgatcgagacgtactttgacttccggttgtatcgcctgtggaagagccgccagcactcgaagctgctggactttgacgacgtcctgtgaggggcagaggcctccgcccagtcaccatcaggccactccctctgcaccgggacctggggctgggccgcctcgtgctccccgggactgtgtggctccggtctcgcctggagccacttcagggcacctcagacgttgctcaggttccccctgtgggttccggtcctcgctgcacccgtggccgcagaggctgcagtccctgggggccgggaggatcccgccctgtggcccgtggatgctcagcggccaggcactgacctgccatgcctcgcctggaggctcagctgtgggcatccctccatggggttcatagaaataagtgcaatttctacacccccgaaacaattcaaagggaagcagcatttcttgttaactagttaagcactatgctgctagttacagtgtaggcaccccggcccagcagcccagcagcccacatgtgttcaggaccctccctgcccaccccctccctgccgtatcgatcaccagcaccagggtggcccgtgtgcgtggggccagcgtcgccgggctgcccagcct

SEQ ID NO: 19593 - DNA, 2690 bp, Homo sapiens
  source 1..2690: mol_type = unassigned DNA
tcccagctactctggaggctgagacgagaatcgcttgaacccgggaggccgaggttgcagtaagccgagatcgcgccactgcactccagcctgggcgacagagcgagactccgcctcaaaaaataaataaatgttgactggtttagctaattcaggtacagcaaatatttgttgagttcttttgtagggctgtgggaagatatgggaggcttttcattaacacaacactgattttacattctacttttcaaaaatacagttgtacaaagcatggtttaaggtggggtcccagacacctagaataaataagcttagaatatccaagaagtgccaggggcggtagttcacgcctgtaatcccagcactttgggaggccgaggcaggcggatcacctgaagtcaggaggagaccagcctggccaacatggagaaagcccgtctctactaaaaatacaaaaaatagactggcgtggtggcgcatgcctgtaatcccagctacccgggaggctgaggcaggagaatcgcttgacccgggaaggggaggttgcagtgagccgagatcgtgcctttgcaccccagcctgggcaataaaagtgagactgtcccaaaaacaaaacaaacaggctgggcatggtggctcacgcctgtaatcccagtagtttgggaggccgaggcaggcggattacctgaggtcaggagttcaagaccagcctggccaacatggtgaaacccgtctctactaaaaataaaaaattagccgggggtggtggcacacacctgtaatcccagctactcgggaggctgaggcgggacaactgcttgagccctggaggcggagattgcagtgagccgagatcgtgccactgcactctagcctggccgacagagcgactcaaaaaaaaaaaaaaaaaaatccaagaagtgcccaaaatagcaagcaaaggaattgtatatgtgcctatgttctttttttctgggaaggagaatctgcagctttataatttcaacatcggctaaattgtcgtgaacctaaaacaatcaaaagggccggaatctatttaaagagtttattcaagggcagtgtgaggatggaccaaccagaaaacctccaaagaatggagtcagccttcagaagtagagaagttacgatttcatttatttagggagacagaggagtttttagctggattacgttatccatacaaggttggaacataattacagaatttggttacaagaagtgttttttttggggggggggcgggggtacagctaacattgttttacgaagagtttaacacgcatgagttgctgtcatctggtgacatcgtttgagtctctctagtcattgaacagaacaagaaaaatcgaattaaatttataatctgaactgaagttatatgtgacccatcacatctctcaagttttaaaatgggtttttttgttgttgttgatggggggggagagggtccagcagcttttaaatgttttcacatcgtgtgttccaaaaataactggttagcctaagtcacttccaccctccaatgttgtgaatgcagtctctagcattcgctatttaatgtcttcttcctgcactatttgagaaatcgcgaggtcgacttaataccgcagtcgccacttcgcggaccggagggcggagtctgcttagttctgaggactgcgtgggtccgcgcagagagctcctgctaggcctgcgcgtcccgttctaaattcttaccctttagtccttgtcaccacccccgccgtgggaacggcctgacagtcactcgtcaaaggaagtggctgccggcagctcttgacccggaatcggatcctagtcccaccccctccgctccaggcttccttctgcaacaggcgtgggtcacgctctcgctcggtctttctgccgccatcttggttccgcgttccctgcacaaaatgcccggcgaagccacagaaaccgtccctgctacagagcaggagttgccgcagccccaggctgagacagggtctggaacagaatctgacagtgatgaatcagtaccagagcttgaagaacaggattccacccaggcaaccacacaacaagcccagctggcggcagcagctgaaattgatgaagaaccagtcagtaaagcaaaacagagtcggagtgaaaagaaggcacggaaggctatgtccaaactgggtcttcggcaggttacaggagttactagagtcactatccggaaatctaagaatatcctctttgtcatcacaaaaccagatgtctacaagagccctgcttcagatacttacatagtttttggggaagccaagatcgaagatttatcccagcaagcacaactagcagctgctgagaaattcaaagttcaaggtgaagctgtctcaaacattcaagaaaacacacagactccaactgtacaagaggagagtgaagaggaagaggtcgatgaaacaggtgtagaagttaaggacattgaattggtcatgtcacaagcaaatgtgtcgagagcaaaggcagtccgagccctgaagaacaacagtaatgatattgtaaatgcgattatggaattaacaatgtaaccatatggaagcaactttttttggtgtctcaaaggagtaactgcagcttggtttgaaatttgtactgtttctatcataaataaagttatggcttcttgttggatg

SEQ ID NO: 19594 - DNA, 1059 bp, Homo sapiens
  source 1..1059: mol_type = unassigned DNA
gcacagtaagtactttctgtgccgctactgtctatccgcagccatccgcctttctttcgggctaagccgccccggggactgagagttaaggagagttggaggctttactgggccacagggttcctactcgcccctgggcctccggacaaaatggggtctgcggttggtgtcctggcaaaagcagggtagaagggctgcggggcgggcccagaatccgagcctgcagagatgggagcagttgcagtgttgagggcggaagaggagtgcgtcttgttttgggaactgcttcacaggatccagaaaaggaaatgcccggcgaagccacagaaaccgtccctgctacagagcaggagttgccgcagccccaggctgagacagggtctggaacagaatctgacagtgatgaatcagtaccagagcttgaagaacaggattccacccaggcaaccacacaacaagcccagctggcggcagcagctgaaattgatgaagaaccagtcagtaaagcaaaacagagtcggagtgaaaagaaggcacggaaggctatgtccaaactgggtcttcggcaggttacaggagttactagagtcactatccggaaatctaagaatatcctctttgtcatcacaaaaccagatgtctacaagagccctgcttcagatacttacatagtttttggggaagccaagatcgaagatttatcccagcaagcacaactagcagctgctgagaaattcaaagttcaaggtgaagctgtctcaaacattcaagaaaacacacagactccaactgtacaagaggagagtgaagaggaagaggtcgatgaaacaggtgtagaagttaaggacattgaattggtcatgtcacaagcaaatgtgtcgagagcaaaggcagtccgagccctgaagaacaacagtaatgatattgtaaatgcgattatggaattaacaatgtaaccatatggaagcaactttttttggtgtctcaaaggagtaactgcagcttggtttgaaatttgtactgtttctatcataaataaagttatggcttcttgttgga

SEQ ID NO: 19595 - DNA, 6629 bp, Homo sapiens
  source 1..6629: mol_type = unassigned DNA
ggagtctgcttagttctgaggactgcgtgggtccgcgcagagagctcctgctaggcctgcgcgtcccgttctaaattcttaccctttagtccttgtcaccacccccgccgtgggaacggcctgacagtcactcgtcaaaggaagtggctgccggcagctcttgacccggaatcggatcctagtcccaccccctccgctccaggcttccttctgcaacaggcgtgggtcacgctctcgctcggtctttctgccgccatcttggttccgcgttccctgcacaaaatgcccggcgaagccacagaaaccgtccctgctacagagcaggagttgccgcagccccaggctgagacagctgtgctacctatgtcttcagccttgagtgtcactgctgccttagggcagcctggacctaccctcccccctccttgctctcctgccccacaacagtgccctctctcagctgctaaccaggcttccccattcccttccccctctactattgcctcgacccctttagaagttccttttccccagtcatcctctggaacagccctacctttgggaactgcccctgaagccccaaccttcctaccaaacctaatagggcctcccatctccccagctgccttagctctagcctctcccatgatagctccaactctgaaagggaccccttcctcttcagctcccttagctctggttgccctggctccccactcagttcagaagagttctgcttttccacctaaccttcttacttcacctccttcagtggctgtagctgagtcagggtcagtgataactctgtcagctcccattgctccctcagaaccaaagactaatcttaataaagttccctctgaggtagtccctaatccaaaaggcacccccagccctccatgtatagtcagtactgttccttaccactgtgtgactcccatggcctctattcaatctggagtggcctcccttcctcagacaacacccacaactaccctagccatcgcttcccctcaagtcaaagataccaccatttcctcagttctgatttctccacaaaacccaggaagcctcagcctgaaggggcctgttagtccacctgctgccttatctctttcaactcagtctcttcctgtggtgacctcttctcaaaagactgcgggtcccaacacccccccagattttcccatttctctgggctctcatcttgcacctttacatcagagttcttttggttctgtccaacttttaggtcaaacaggtcctagtgctttgtcagaccctacagtgaagaccatttctgtagatcattcttccacaggggcctcttatccttctcagagatctgtaattcctccccttccttccagaaatgaggtagttcctgctactgtggctgcctttccagtggtggctccatctgttgacaaaggtccctctaccatctctagcataacctgcagcccttctggctccttaaatgtagctacctctttttcattatctcctacaacctctctcattctcaaaagctctcctaatgccacttatcattatcctttagtggcccaaatgcccgtttcttctgttggaaccaccccacttgtggtgactaacccctgtacaattgctgcagcacctactactacctttgaggtagctacttgtgtttctcctccaatgtcatcaggtcccataagtaacatagaaccaacttcccctgctgccttggttatggcacctgtggctcccaaagagccttctactcaagtagcaaccactctgaggataccagtctctcctcctctgccagaccctgaagacctcaaaaatctccccagttcagtattggttaaatttccaacacaaaaagacctccaaactgtacctgcctctcttgaaggagcccctttctctccagcccaagcaggactcaccaccaagaaagaccctactgtattaccgttagtccaggcagcccctaaaaattccccttctttccaaagtacatcctcttctccagagatacctctttctcctgaagccaccctagcaaagaaaagccttggggagcctctccctataggtaagccagccagcagtatgacctcccctctgggtgttaactcctcggcctctgtaatcaagacagattcttatgcaggcccagactctgctggtccgcttctcaaaagttctctcattaccccaacagtggctgcatttcctttggaaagtgctgaccctgccggggtggctcccacaactgccaaaggtacctcaacttatacaactacagccagcccttttctagaaggaactgtctctttagctcctaaaaaccacccagttaaggaaggtactcttactactttacccttggttcctacagcttcagaaaattgccctgtggctccatccccccagaatacctgtgctcctctggctaccttagtgctggcccctgaaatcccaaagtctgtgccctcaccctctcttcccccagctgggactcctccaggtacaaaaaaggttgatggtatttctcatacttcagcattggcacctgttgcttcctctcccaaagagtgcccaactgaggactctggtgcttctgctactgcatcttccaaaggaactctgacttacctagctgattccccatctcctttaggggttagtgtgtctcctcagactaaaagacctccaaccaagaagggttctgctggccctgatactcctattggaaatctctcatcccctgtttctccagttgaagcttcatttcttccagagaatagtctttctttccaaggctctaaagactcaccagccacgacgcattctcccactcctccatcccccaaaggggcccctactccctcagctgtgactcctctgtctcccaaaggagtaacactaccccccaaagagacccccactccttcagtggtgaatctgcccttccccaaagagggtccagctactccagcacccaaacaggctcctgctctatccatgacttcttcctcccccaaaaaggcccgagcaactccagcccctaaaggaatcccagcttccccatcccccaaaggggcccccacacccccagctgcaactcctccctcccctaaaggaggcccagctaccccatccccgaaatgggcccccacacccccagctgcaactcctccctccccaaaaggaggtccagctactccatcccccaaaggggcccccacacccccagctgcaactcctccctcccccaaaggaggtccagctactccatcccccaaaggggcccccacacccccagctgtgactcctccctcccccaaaggaagtccagcagctaccccattccccaaaggggcatccacacccccagctgcaactcctccctcccccaaaggaagtccagcagctaccccactccccaaaggggcccccacaaccccagctgcaactcttccctccccaaaaggaggtccagctaccccatccctcaagggggcccccactcccccagctgcgactcctccctccccaaaaggaggcccagctaccccatcccccaaaggggcccccatgcccccagctgcaactcctccctccccaaaaggaggtctagctaccccaccccacaaaggggcacccacaaccccagctgcaactcctccctccccaaaaggaggtctagctaccccacccccaaaaggggcccccacaaccccagctgcaactcctccttccccaaaaggaggtctagctaccccacccccaaaaggggcccccacaaccccagctgcaactcctccttccccaaaaggaggtctagctaccccatcccccaaaggggcccccacaaccccagctgcaactcctccctccccaaaaggaggtctagctaccccatcccccaaaggggcccccacaaccccagctgcaactcctccctccccaaaaggaggtctggctaccccatcccccaaaggggcccccacaaccccagctgcaactcctccctccccaaaaggaggcccagctaccccaccccccaaaggggcccccactcccccagctgcaactcctccctccctaaaaggaggtctagctaccccaccccacaaaggggcccccaatcccgcagttgtaactcctccctctccaaaaggaggcccagctacctcaccccccaaaggggcccccactcctccagctgcaactcctccctccccaaaaggaagcccaggtaccccaccccccaaaggggcccccactcccccagctgtaactcctccctcccctaaagggacccctactctcccagctacaactccctcctctaaaggaggcccaactactccatcctccaaagagggccccactcccccagctgcaaccccctcccacaaaggaggtcccgctatgactcctccctcccccaaaagaggaccagctatcccatctcccaaaggggaccccacttccccagcagtgattcctctctcccccaaaaaggctccagcaactccagtcaccagagaaggcgcagccaccccatccaaaggagatctcactcccccagcagtgactcctgtctccctcaaaaaggccccagcaacttcagcccccaaaggaggcccagctaccccatcctccaaaggggatcccaccctcccagcagtgactcctccttcccccaaggagcccccagcccccaaacaagttgccacttcttcctctcccaaaaaggccccagcaactccagcccccatgggggcccccactctgccagctgtgattccttcttcccccaaagaggtcccagctaccccatcctccagaagggaccccattgccccaacagcgactcttctctctaaaaagaccccagcaactctagcccccaaagaggccctcattcccccagctatgactgttccctcccctaaaaagaccccagcaattccaacccccaaagaagccccagctaccccatcctccaaagaggcctccagtcccccagcagtgactccttccacttacaaaggggccccatcccccaaagagctcctcattccaccagctgtgacttctccttcccccaaagaggcacctactcctccagctgtgactcctccatcccccgaaaagggcccagcaactccagcccccaaagggactcccacttccccacctgtgactccttcctccctcaaagactcccctacttccccagcttctgtcacatgtaaaatgggggccactgttcctcaagcatctaaagggcttccagcaaagaaaggccccacagctctgaaagaagtacttgttgccccagctccagaaagcacgccaatcatcacagctcccactcggaaaggtccacagaccaaaaagagttctgctacttcacctcctatatgcccagatccctcagctaagaatggttctaaaggacccctttccacagtggctccagcccctctactccctgttcagaaagactcttcaaagacagcaaaaggcaaagatgcttctcattccccaaagggccccttggctcctcctgagtctaaggcgtccacccctctaacagcagctgcctttgagaaggtccttcctaaacctgaatcagcatctgtctctgcagcaccctccccaccagtctctctgcctcttgctccctccccagttcccactctgcctcctaaacagcaatttctgccgtcctctcctgggctggtgttggaatcaccctctaaaccccttgcccctgctgatgaggatgagctgctgcctctgattcccccggaaccaatctctgggggagtgcctttccagtcggtcctcgtcaacatgcccacccctaaatctgctggaatccctgtcccaaccccctctgccaagcaacctgttacgaagaacaacaaggggtctggaacagaatctgacagtgatgaatcagtaccagagcttgaagaacaggattccacccaggcaaccacacaacaagcccagctggcggcagcagctgaaattgatgaagaaccagtcagtaaagcaaaacagagtcggagtgaaaagaaggcacggaaggctatgtccaaactgggtcttcggcaggttacaggagttactagagtcactatccggaaatctaagaatatcctctttgtcatcacaaaaccagatgtctacaagagccctgcttcagatacttacatagtttttggggaagccaagatcgaagatttatcccagcaagcacaactagcagctgctgagaaattcaaagttcaaggtgaagctgtctcaaacattcaagaaaacacacagactccaactgtacaagaggagagtgaagaggaagaggtcgatgaaacaggtgtagaagttaaggacattgaattggtcatgtcacaagcaaatgtgtcgagagcaaaggcagtccgagccctgaagaacaacagtaatgatattgtaaatgcgattatggaattaacaatgtaaccatatggaagcaactttttttggtgtctcaaaggagtaactgcagcttggtttgaaatttgtactgtttctatcataaataaagttatggcttcttgttggatgaattc

SEQ ID NO: 19596 - DNA, 802 bp, Homo sapiens
  source 1..802: mol_type = unassigned DNA
cccctccgctccaggcttccttctgcaacaggcgtgggtcacgctctcgctcggtctttctgccgccatcttggttccgcgttccctgcacagcctcctttttattcccttccttcagaaatgcccggcgaagccacagaaaccgtccctgctacagagcaggagttgccgcagccccaggctgagacagggtctggaacagaatctgacagtgatgaatcagtaccagagcttgaagaacaggattccacccaggcaaccacacaacaagcccagctggcggcagcagctgaaattgatgaagaaccagtcagtaaagcaaaacagagtcggagtgaaaagaaggcacggaaggctatgtccaaactgggtcttcggcaggttacaggagttactagagtcactatccggaaatctaagaatatcctctttgtcatcacaaaaccagatgtctacaagagccctgcttcagatacttacatagtttttggggaagccaagatcgaagatttatcccagcaagcacaactagcagctgctgagaaattcaaagttcaaggtgaagctgtctcaaacattcaagaaaacacacagactccaactgtacaagaggagagtgaagaggaagaggtcgatgaaacaggtgtagaagttaaggacattgaattggtcatgtcacaagcaaatgtgtcgagagcaaaggcagtccgagccctgaagaacaacagtaatgatattgtaaatgcgattatggaattaacaatgtaaccatatggaagcaactttttttggtgtctcaaag

SEQ ID NO: 19597 - DNA, 299 bp, Homo sapiens
  source 1..299: mol_type = unassigned DNA
gtgggtccgcgcagagagctcctgctaggcctgcgcgtcccgttctaaattcttaccctttagtccttgtcaccacccccgccgtgggaacggcctgacagtcactcgtcaaaggaagtggctgccggcagctcttgacccggaatcggatcctagtcccaccccctccgctccaggcttccttctgcaacaggcgtgggtcacgctctcgctcggtctttctgccgccatcttggttccgcgttccctgcacagcctcctttttattcccttccttcagaaatgcccggcgaagccac

SEQ ID NO: 19598 - DNA, 690 bp, Homo sapiens
  source 1..690: mol_type = unassigned DNA
gtgacaagcaagtgttggacttaaaacaccgtctttcccctcctggtaccccaaagtcggcaaacgtagtccaggaggccccagcccagccagtaaatgcccggcgaagccacagaaaccgtccctgctacagagcaggagttgccgcagccccaggctgagacagggtctggaacagaatctgacagtgatgaatcagtaccagagcttgaagaacaggattccacccaggcaaccacacaacaagcccagctggcggcagcagctgaaattgatgaagaaccagtcagtaaagcaaaacagagtcggagtgaaaagaaggcacggaaggctatgtccaaactgggtcttcggcaggttacaggagttactagagtcactatccggaaatctaagaatatcctctttgtcatcacaaaaccagatgtctacaagagccctgcttcagatacttacatagtttttggggaagccaagatcgaagatttatcccagcaagcacaactagcagctgctgagaaattcaaagttcaaggtgaagctgtctcaaacattcaagaaaacacacagactccaactgtacaagaggagagtgaagaggaagaggtcgatgaaacaggtgtagaagttaaggacattgaattggtcatgtcacaagcaaatgtgtcgagagcaaaggcagtccgagcc

SEQ ID NO: 19599 - DNA, 711 bp, Homo sapiens
  source 1..711: mol_type = unassigned DNA
aactatatatgtgtcttaaacctcaaagtaaattttccttgagaaataatttatgttgaaaagatttcctggccaagtgcagtggctcacacccgtaatcccagcactttgggaggccgaggcaggcggatcacctgagtccttgtcaccacccccgccgtgggaacggcctgacagtcactcgtcaaaggaagtggctgccggcagctcttgacccggaatcggatcctagtcccaccccctccgctccaggcttccttctgcaacaggcgtgggtcacgctctcgctcggtctttctgccgccatcttggttccgcgttccctgcacaaaatgcccggcgaagccacagaaaccgtccctgctacagagcaggagttgccgcagccccaggctgagacagggtctggaacagaatctgacagtgatgaatcagtaccagagcttgaagaacaggattccacccaggcaaccacacaacaagcccagctggcggcagcagctgaaattgatgaagaaccagtcagtaaagcaaaacagagtcggagtgaaaagaaggcacggaaggctatgtccaaactgggtcttcggcaggttacaggagttactagagtcactatccggaaatctaagaatatcctctttgtcatcacaaaaccagatgtctacaagagccctgcttcagatacttacatagtttttggggaagcca

SEQ ID NO: 19600 - DNA, 1074 bp, Homo sapiens
  source 1..1074: mol_type = unassigned DNA
actttctgtgccgctactgtctatccgcagccatccgcctttctttcgggctaagccgccccggggactgagagttaaggagagttggaggctttactgggccacagggttcctactcgcccctgggcctccggacaaaatggggtctgcggttggtgtcctggcaaaagcagggtagaagggctgcggggcgggcccagaatccgagcctgcagagatgggagcagttgcagtgttgagggcggaagaggagtgcgtcttgttttgggaactgcttcacaggatccagaaaagggcctcctttttattcccttccttcagaaatgcccggcgaagccacagaaaccgtccctgctacagagcaggagttgccgcagccccaggctgagacagggtctggaacagaatctgacagtgatgaatcagtaccagagcttgaagaacaggattccacccaggcaaccacacaacaagcccagctggcggcagcagctgaaattgatgaagaaccagtcagtaaagcaaaacagagtcggagtgaaaagaaggcacggaaggctatgtccaaactgggtcttcggcaggttacaggagttactagagtcactatccggaaatctaagaatatcctctttgtcatcacaaaaccagatgtctacaagagccctgcttcagatacttacatagtttttggggaagccaagatcgaagatttatcccagcaagcacaactagcagctgctgagaaattcaaagttcaaggtgaagctgtctcaaacattcaagaaaacacacagactccaactgtacaagaggagagtgaagaggaagaggtcgatgaaacaggtgtagaagttaaggacattgaattggtcatgtcacaagcaaatgtgtcgagagcaaaggcagtccgagccctgaagaacaacagtaatgatattgtaaatgcgattatggaattaacaatgtaaccatatggaagcaactttttttggtgtctcaaaggagtaactgcagcttggtttgaaatttgtactgtttctatcataaataaagttatggcttcttgttgga

SEQ ID NO: 19601 - DNA, 2922 bp, Homo sapiens
  source 1..2922: mol_type = unassigned DNA
ctttctgccgccatcttggttccgcgttccctgcacaaaatgcccggcgaagccacagaaaccgtccctgctacagagcaggagttgccgcagccccaggctgagacagctgtgctacctatgtcttcagccttgagtgtcactgctgccttagggcagcctggacctaccctcccccctccttgctctcctgccccacaacagtgccctctctcagctgctaaccaggcttccccattcccttccccctctactattgcctcgacccctttagaagttccttttccccagtcatcctctggaacagccctacctttgggaactgcccctgaagccccaaccttcctaccaaacctaatagggcctcccatctccccagctgccttagctctagcctctcccatgatagctccaactctgaaagggaccccttcctcttcagctcccttagctctggttgccctggctccccactcagttcagaagagttctgcttttccacctaaccttcttacttcacctccttcagtggctgtagctgagtcagggtcagtgataactctgtcagctcccattgctccctcagaaccaaagactaatcttaataaagttccctctgaggtagtccctaatccaaaaggcacccccagccctccatgtatagtcagtactgttccttaccactgtgtgactcccatggcctctattcaatctggagtggcctcccttcctcagacaacacccacaactaccctagccatcgcttcccctcaagtcaaagataccaccatttcctcagttctgatttctccacaaaacccaggaagcctcagcctgaaggggcctgttagtccacctgctgccttatctctttcaactcagtctcttcctgtggtgacctcttctcaaaagactgcgggtcccaacacccccccagattttcccatttctctgggctctcatcttgcacctttacatcagagttcttttggttctgtccaacttttaggtcaaacaggtcctagtgctttgtcagaccctacagtgaagaccatttctgtagatcattcttccacaggggcctcttatccttctcagagatctgtaattcctccccttccttccagaaatgaggtagttcctgctactgtggctgcctttccagtggtggctccatctgttgacaaaggtccctctaccatctctagcataacctgcagcccttctggctccttaaatgtagctacctctttttcattatctcctacaacctctctcattctcaaaagctctcctaatgccacttatcattatcctttagtggcccaaatgcccgtttcttctgttggaaccaccccacttgtggtgactaacccctgtacaattgctgcagcacctactactacctttgaggtagctacttgtgtttctcctccaatgtcatcaggtcccataagtaacatagaaccaacttcccctgctgccttggttatggcacctgtggctcccaaagagccttctactcaagtagcaaccactctgaggataccagtctctcctcctctgccagaccctgaagacctcaaaaatctccccagttcagtattggttaaatttccaacacaaaaagacctccaaactgtacctgcctctcttgaaggagcccctttctctccagcccaagcaggactcaccaccaagaaagaccctactgtattaccgttagtccaggcagcccctaaaaattccccttctttccaaagtacatcctcttctccagagatacctctttctcctgaagccaccctagcaaagaaaagccttggggagcctctccctatagtggctgcatttcctttggaaagtgctgaccctgccggggtggctcccacaactgccaaagcagctgcctttgagaaggtccttcctaaacctgaatcagcatctgtctctgcagcaccctccccaccagtctctctgcctcttgctccctccccagttcccactctgcctcctaaacagcaatttctgccgtcctctcctgggctggtgttggaatcaccctctaaaccccttgcccctgctgatgaggatgagctgctgcctctgattcccccggaaccaatctctgggggagtgcctttccagtcggtcctcgtcaacatgcccacccctaaatctgctggaatccctgtcccaaccccctctgccaagcaacctgttacgaagaacaacaaggggtctggaacagaatctgacagtgatgaatcagtaccagagcttgaagaacaggattccacccaggcaaccacacaacaagcccagctggcggcagcagctgaaattgatgaagaaccagtcagtaaagcaaaacagagtcggagtgaaaagaaggcacggaaggctatgtccaaactgggtcttcggcaggttacaggagttactagagtcactatccggaaatctaagaatatcctctttgtcatcacaaaaccagatgtctacaagagccctgcttcagatacttacatagtttttggggaagccaagatcgaagatttatcccagcaagcacaactagcagctgctgagaaattcaaagttcaaggtgaagctgtctcaaacattcaagaaaacacacagactccaactgtacaagaggagagtgaagaggaagaggtcgatgaaacaggtgtagaagttaaggacattgaattggtcatgtcacaagcaaatgtgtcgagagcaaaggcagtccgagccctgaagaacaacagtaatgatattgtaaatgcgattatggaattaacaatgtaaccatatggaagcaactttttttggtgtctcaaaggagtaactgcagcttggtttgaaatttgtactgtttctatcataaataaagttatggcttcttgttggatg

SEQ ID NO: 19602 - DNA, 728 bp, Homo sapiens
  source 1..728: mol_type = unassigned DNA
ggactgccaggggtgaaggcagccctgtctgaggccagaggtctgcccacgtggcggatgaggcaggtgtgaggccagcttgagcatctggatccatttgtctcgggctgctggctgcctgccatttcctcctctccacccttatttggaggccctgacagctgagccacaaacaaaccaggggagctgggcaccagccaagcgtcaccctctgtttccccgcacgggtaccagcgtcgaggagaaagaatcctgaggcacggcgaatttgctggaccatttggaagaaaagatgcctttagaagatgaggtcgtgcccccacaagtgctcagtgagccgaatgaagaagcgggggctgctctcagccccctccctgaggtgcctccctggaccggggaagtcagcccagcccagagagatggaggtgccctcgggcggggcccctgggactcctctgatcgatctgccctcctaaaaagcaagctgagggcgctgctcactgcccctcggagcctgcggagatccagctgcttcgggggcaggatggacaggattggagcccagagcggactgggctgtaacagcttccggtactgaagataacagccagggaggacaagcagggctgggcctagggacagactgcaagaggctcctgtcccctggggtctctgctgcatttgtgtcatcttgttgccatggagttgtgatcatcccatctaagctg

SEQ ID NO: 19603 - DNA, 855 bp, Homo sapiens
  source 1..855: mol_type = unassigned DNA
gagacagggacagacgtaggccaagagaggggaaccagagaggaaccagaggggagagacagagcagcaagcagtggattgctccttgacgacgccagcatgagctccttctccaccaccaccgtgagcttcctccttttactggcattccagctcctaggtcagaccagagctaatcccatgtacaatgccgtgtccaacgcagacctgatggatttcaagaatttgctggaccatttggaagaaaagatgcctttagaagatgaggtcgtgcccccacaagtgctcagtgagccgaatgaagaagcgggggctgctctcagccccctccctgaggtgcctccctggaccggggaagtcagcccagcccagagagatggaggtgccctcgggcggggcccctgggactcctctgatcgatctgccctcctaaaaagcaagctgagggcgctgctcactgcccctcggagcctgcggagatccagctgcttcgggggcaggatggacaggattggagcccagagcggactgggctgtaacagcttccggtactgaagataacagccagggaggacaagcagggctgggcctagggacagactgcaagaggctcctgtcccctggggtctctgctgcatttgtgtcatcttgttgccatggagttgtgatcatcccatctaagctgcagcttcctgtcaacacttctcacatcttatgctaactgtagataaagtggtttgatggtgacttcctcgcctctcccaccccatgcattaaattttaaggtagaacctcacctgttactgaaagtggtttgaaagtgaataaacttcagcaccatggacagaagacaaa

SEQ ID NO: 19604 - DNA, 1449 bp, Homo sapiens
  source 1..1449: mol_type = unassigned DNA
ctgctgtcccgcatggagcagtacgcgaacaatctggaggaactggtggaggagcggacccaggcatacctggaggagaagcgcaaggctgaggccctgctctaccagatcctgcctcactcagtggctgagcagctgaagcgtggggagacggtgcaggccgaagcctttgacagtgttaccatctacttcagtgacattgtgggtttcacagcgctgtcggcggagagcacacccatgcaggtggtgaccctgctcaatgacctgtacacttgctttgatgctgtcatagacaactttgatgtgtacaaggtggagacaattggcgatgcctacatggtggtgtcagggctccctgtgcggaacgggcggctacacgcctgcgaggtagcccgcatggccctggcactgctggatgctgtgcgctccttccgaatccgccaccggccccaggagcagctgcgcttgcgcattggcatccacacaggacctgtgtgtgctggagtggtgggactgaagatgccccgttactgtctctttggggatacagtcaacacagcctcaagaatggagtctaatggggaagccctgaagatccacttgtcttctgagaccaaggctgtcctggaggagtttggtggtttcgagctggagcttcgaggggatgtagaaatgaaggtagagggagaagcctctgccctccccaccttttggggtcctagagggagttacccttctcaagcagccaatgccactcccatccctaaggctctcatctgactggggaaagggcatgtgccactccccagcccatcctcttttttccctccagggcaaaggcaaggttcggacctactggctccttggggagagggggagtagcacccgaggctgacctgcctcctctcctatccctccacacctccctaccctgtgccagaagcaacagaggtgccaggcctcagcctcacccacagcagccccatcgccaaaggatggaagtaatttgaatagctcaggtgtgctgaccccagtgaagacaccagataggacctctgagaggggactggcatggggggatctcagagcttacaggctgagccaagcccacggccatgcacagggacactcacacaggcacacgcacctgctctccacctggactcaggccgggctgggctgtggattcctgatcccctcccctccccatgctctcctccctcagccttgctaccctgtgacttactgggaggagaaagagtcacctgaaggggaacatgaaaagagactaggtgaagagagggcaggggagcccacatctggggctggcccacaatacctgctcccccgaccccctccacccagcagtagacacagtgcacaggggagaagaggggtggcgcagaagggttgggggcctgtatgccttgcttctaccatgagcagaga

SEQ ID NO: 19605 - DNA, 4236 bp, Homo sapiens
  source 1..4236: mol_type = unassigned DNA
ggttccctccggatagccggagacttgggccggccggacgccccttctggcacactccctggggcaggcgctcacgcacgctacaaacacacactcctctttcctccctcgcgcgccctctctcatccttcttcacgaagcgctcactcgcaccctttctctctctctctctctctctctaacacgcacgcacactcccagttgttcacactcgggtcctctccagcccgacgttctcctggcacccacctgctccgcggcgccctgcgcgcccccctcggtcgcgccccttgcgctctcggcccagaccgtcgcagctacagggggcctcgagccccggggtgagcgtccccgtcccgctcctgctccttcccatagggacgcgcctgatgcctgggaccggccgctgagcccaaggggaccgaggaggccatggtaggagcgctcgcctgctgcggtgcccgctgaggccatgccggggccccggcgccccgctggctcccgcctgcgcctgctcctgctcctgctgctgccgccgctgctgctgctgctccggggcagccacgcgggcaacctgacggtagccgtggtactgccgctggccaatacctcgtacccctggtcgtgggcgcgcgtgggacccgccgtggagctggccctggcccaggtgaaggcgcgccccgacttgctgccgggctggacggtccgcacggtgctgggcagcagcgaaaacgcgctgggcgtctgctccgacaccgcagcgcccctggccgcggtggacctcaagtgggagcacaaccccgctgtgttcctgggccccggctgcgtgtacgccgccgccccagtggggcgcttcaccgcgcactggcgggtcccgctgctgaccgccggcgccccggcgctgggcttcggtgtcaaggacgagtatgcgctgaccacccgcgcggggcccagctacgccaagctgggggacttcgtggcggcgctgcaccgacggctgggctgggagcgccaagcgctcatgctctacgcctaccggccgggtgacgaagagcactgcttcttcctcgtggaggggctgttcatgcgggtccgcgaccgcctcaatattacggtggaccacctggagttcgccgaggacgacctcagccactacaccaggctgctgcggaccatgccgcgcaaaggccgagttatctacatctgcagctcccctgatgccttcagaaccctcatgctcctggccctggaagctggcttgtgtggggaggactacgttttcttccacctggatatctttgggcaaagcctgcaaggtggacagggccctgctccccgcaggccctgggagagaggggatgggcaggatgtcagtgcccgccaggcctttcaggctgccaaaatcattacatataaagacccagataatcccgagtacttggaattcctgaagcagttaaaacacctggcctatgagcagttcaacttcaccatggaggatggcctggtgaacaccatcccagcatccttccacgacgggctcctgctctatatccaggcagtgacggagactctggcacatgggggaactgttactgatggggagaacatcactcagcggatgtggaaccgaagctttcaaggtgtgacaggatacctgaaaattgatagcagtggcgatcgggaaacagacttctccctctgggatatggatcccgagaatggtgccttcagggttgtactgaactacaatgggacttcccaagagctggtggctgtgtcggggcgcaaactgaactggcccctggggtaccctcctcctgacatccccaaatgtggctttgacaacgaagacccagcatgcaaccaagatcacctttccaccctggaggtgctggctttggtgggcagcctctccttgctcggcattctgattgtctccttcttcatatacaggaagatgcagctggagaaggaactggcctcggagctgtggcgggtgcgctgggaggacgttgagcccagtagccttgagaggcacctgcggagtgcaggcagccggctgaccctgagcgggagaggctccaattacggctccctgctaaccacagagggccagttccaagtctttgccaagacagcatattataagggcaacctcgtggctgtgaaacgtgtgaaccgtaaacgcattgagctgacacgaaaagtcctgtttgaactgaagcatatgcgggatgtgcagaatgaacacctgaccaggtttgtgggagcctgcaccgacccccccaatatctgcatcctcacagagtactgtccccgtgggagcctgcaggacattctggagaatgagagcatcaccctggactggatgttccggtactcactcaccaatgacatcgtcaagggcatgctgtttctacacaatggggctatctgttcccatgggaacctcaagtcatccaactgcgtggtagatgggcgctttgtgctcaagatcaccgactatgggctggagagcttcagggacctggacccagagcaaggacacaccgtttatgccaaaaagctgtggacggcccctgagctcctgcgaatggcttcaccccctgtgcggggctcccaggctggtgacgtatacagctttgggatcatccttcaggagattgccctgaggagtggggtcttccacgtggaaggtttggacctgagccccaaagagatcatcgagcgggtgactcggggtgagcagccccccttccggccctccctggccctgcagagtcacctggaggagttggggctgctcatgcagcggtgctgggctgaggacccacaggagaggccaccattccagcagatccgcctgacgttgcgcaaatttaacagggagaacagcagcaacatcctggacaacctgctgtcccgcatggagcagtacgcgaacaatctggaggaactggtggaggagcggacccaggcatacctggaggagaagcgcaaggctgaggccctgctctaccagatcctgcctcactcagtggctgagcagctgaagcgtggggagacggtgcaggccgaagcctttgacagtgttaccatctacttcagtgacattgtgggtttcacagcgctgtcggcggagagcacacccatgcaggtggtgaccctgctcaatgacctgtacacttgctttgatgctgtcatagacaactttgatgtgtacaaggtggagacaattggcgatgcctacatggtggtgtcagggctccctgtgcggaacgggcggctacacgcctgcgaggtagcccgcatggccctggcactgctggatgctgtgcgctccttccgaatccgccaccggccccaggagcagctgcgcttgcgcattggcatccacacaggacctgtgtgtgctggagtggtgggactgaagatgccccgttactgtctctttggggatacagtcaacacagcctcaagaatggagtctaatggggaagccctgaagatccacttgtcttctgagaccaaggctgtcctggaggagtttggtggtttcgagctggagcttcgaggggatgtagaaatgaagggcaaaggcaaggttcggacctactggctccttggggagagggggagtagcacccgaggctgacctgcctcctctcctatccctccacacctccctaccctgtgccagaagcaacagaggtgccaggcctcagcctcacccacagcagccccatcgccaaaggatggaagtaatttgaatagctcaggtgtgctgaccccagtgaagacaccagataggacctctgagaggggactggcatggggggatctcagagcttacaggctgagccaagcccacggccatgcacagggacactcacacaggcacacgcacctgctctccacctggactcaggccgggctgggctgtggattcctgatcccctcccctccccatgctctcctccctcagccttgctaccctgtgacttactgggaggagaaagagtcacctgaaggggaacatgaaaagagactaggtgaagagagggcaggggagcccacatctggggctggcccacaatacctgctcccccgaccccctccacccagcagtagacacagtgcacaggggagaagaggggtggcgcagaagggttgggggcctgtatgccttgcttctaccatgagcagagacaattaaaatctttattccagtga

SEQ ID NO: 19606 - DNA, 1699 bp, Homo sapiens
  source 1..1699: mol_type = unassigned DNA
caggaagatgcagctggagaaggaactggcctcggagctgtggcgggtgcgctgggaggacgttgagcccagtagccttgagaggcacctgcggagtgcaggcagccggctgaccctgagcgggagaggctccaattacggctccctgctaaccacagagggccagttccaagtctttgccaagacagcatattataagatgcgggatgtgcagaatgaacacctgaccaggtttgtgggagcctgcaccgacccccccaatatctgcatcctcacagagtactgtccccgtgggagcctgcaggacattctggagaatgagagcatcaccctggactggatgttccggtactcactcaccaatgacatcgtcaagggcatgctgtttctacacaatggggctatctgttcccatgggaacctcaagtcatccaactgcgtggtagatgggcgctttgtgctcaagatcaccgactatgggctggagagcttcagggacctggacccagagcaaggacacaccgtttatgccaaaaagctgtggacggcccctgagctcctgcgaatggcttcaccccctgtgcggggctcccaggctggtgacgtatacagctttgggatcatccttcaggagattgccctgaggagtggggtcttccacgtggaaggtttggacctgagccccaaagagatcatcgagcgggtgactcggggtgagcagccccccttccggccctccctggccctgcagagtcacctggaggagttggggctgctcatgcagcggtgctgggctgaggacccacaggagaggccaccattccagcagatccgcctgacgttgcgcaaatttaacagggagaacagcagcaacatcctggacaacctgctgtcccgcatggagcagtacgcgaacaatctggaggaactggtggaggagcggacccaggcatacctggaggagaagcgcaaggctgaggccctgctctaccagatcctgcctcactcagtggctgagcagctgaagcgtggggagacggtgcaggccgaagcctttgacagtgttaccatctacttcagtgacattgtgggtttcacagcgctgtcggcggagagcacacccatgcaggtggtgaccctgctcaatgacctgtacacttgctttgatgctgtcatagacaactttgatgtgtacaaggtggagacaattggcgatgcctacatggtggtgtcagggctccctgtgcggaacgggcggctacacgcctgcgaggtagcccgcatggccctggcactgctggatgctgtgcgctccttccgaatccgccaccggccccaggagcagctgcgcttgcgcattggcatccacacaggacctgtgtgtgctggagtggtgggactgaagatgccccgttactgtctctttggggatacagtcaacacagcctcaagaatggagtctaatggggaagccctgaagatccacttgtcttctgagaccaaggctgtcctggaggagtttggtggtttcgagctggagcttcgaggggatgtagaaatgaagggcaaaggcaaggttcggacctactggctccttggggagagggggagtagcacccgaggctgacctgcctcctctcctatccctccacacctccctaccctgtgccagaagcaacagaggtgccaggcctcagcc

SEQ ID NO: 19607 - DNA, 3686 bp, Homo sapiens
  source 1..3686: mol_type = unassigned DNA
tccccctgccaccccgttctcagtcctcagtccttgccctaggctggtagcccactccttgcccgccccccgccttcctcccatctccccctcctctccccggcccccagcaccttctgcatcccagcctacctagcctactcctcctcttcctggccctcttccccaggctccaggctggggggtgctcgcgtctcccctgtaggccagagcagccccaagttctgggggcggtggggctgctgctttatccccatggcgctgccatcacttctgctgttggtggcagccctggcaggtggggtgcgtcctcccggggcgcggaacctgacgctggcggtggtgctgccagaacacaacctgagctatgcctgggcctggccacgggtgggacccgctgtggcactagctgtggaggctctgggccgggcactgcccgtggacctgcggtttgtcagctccgaactggaaggcgcctgctctgagtacctggcaccgctgagcgctgtggacctcaagctgtaccatgaccccgacctgctgttaggtcccggttgcgtgtaccctgctgcctctgtggcccgctttgcctcccactggcgccttcccctgctgactgcgggtgctgtggcctctggtttttcggctaagaatgaccattatcgtaccctggttcgcactggcccctctgctcccaagctgggtgagtttgtggtgacactacacgggcacttcaattggactgcccgtgctgccttgctgtacctggatgctcgcacagatgaccggcctcactacttcaccatcgagggcgtctttgaggccctgcagggcagcaacctcagtgtgcagcaccaggtgtatgcccgagagccagggggccccgagcaggccacccacttcatccgggccaacgggcgcattgtgtatatctgcggccctctggagatgctgcatgagatcctgcttcaggcccagagggagaatctgaccaatggggattatgtcttcttttacctggatgtctttggggagagtctccgtgcaggccccacacgtgctacaggccggccctggcaggacaatcgcacccgggaacaggcccaggccctcagagaggcctttcagactgtattggtgatcacgtaccgagaacccccaaatcctgagtatcaggaattccagaatcgtctgctgataagagcccgggaagactttggtgtggagctgggcccttccctgatgaacctcatcgctggctgcttctatgatgggatcctgctatatgctgaagtcctgaatgagacaatacaggaaggaggcacccgggaggatggacttcgaattgtggaaaagatgcagggacgaagatatcacggtgtaactgggctggttgtcatggacaagaacaatgaccgagagactgactttgtcctctgggccatgggagacctggattctggggactttcagcctgcagcccactactcgggagctgagaagcagatttggtggacgggacggcctattccctgggtgaagggggctcctccctcggacaatcccccctgtgcctttgacttggacgacccatcctgtgataaaactccactttcaaccctggcaattgtggctctgggcacaggaatcaccttcatcatgtttggtgtttccagcttcctaattttccgaaagctgatgctggagaaggagctggctagcatgttgtggcgtattcgctgggaagaactgcagtttggcaactcagagcgttatcacaaaggtgcaggcagtcgcctcacactgtcgctgcggggatccagttacggctcgctcatgacagcccatgggaaataccagatctttgccaacaccggtcacttcaagggaaatgttgtcgccatcaaacatgtgaataagaagcgcattgagctgacccggcaggttctgtttgaactcaaacatatgagagatgttcagttcaaccatctcactcgcttcattggcgcctgcatagaccctcccaacatttgcattgtcactgaatactgtcctcgtgggagtttacaggatattctagaaaatgacagcatcaacttggactggatgtttcgttattcactcattaatgaccttgttaagggcatggcctttctccacaacagcattatttcatcgcatgggagtctcaagtcctccaactgtgtggtggatagtcgttttgtgctcaaaatcacagactatggcctggccagcttccgatcaactgctgaacctgatgacagccatgccctctatgccaagaagctgtggactgccccagaactgctcagtgggaaccccttgccaaccacaggcatgcagaaggctgacgtctatagctttgggatcatcctgcaggagatagcacttcgcagtggtcctttctacttggagggcctggacctcagccccaaagagattgtccagaaggtacgaaatggtcagcggccatatttccggccaagcattgaccggacccaactgaatgaagagctagttttgctgatggagcgatgttgggctcaggacccagctgagcggccagactttggacagattaagggcttcattcggcgctttaacaaggagggtggcaccagcatattggacaacctcctgctgcgcatggaacagtatgccaataacttggagaagctggtggaggaacgcacacaggcctatctggaggaaaaacgcaaggctgaagctctgctctaccaaatcctaccccattcagtggcagagcagttaaaacggggagagactgtacaggctgaggcctttgacagtgttaccatctacttcagtgacattgttggcttcacagcattgtcagcagagagcacccccatgcaggtagtgacacttcttaatgacctgtatacctgctttgatgccataattgacaactttgatgtctacaaggtggagacgattggggatgcttacatggtggtatctggcctcccaggccgaaatggtcaacgccatgcaccagaaattgctcgtatggccctagcattactagatgcagtttcttcctttcgcatccgccaccgaccccatgaccagctgaggctacgcataggggtccatactgggccagtctgtgctggggttgttggcctgaagatgccccgttattgtctttttggagacacagtgaacactgcttctcgaatggagtctaatggtcaagcgctgaagatccatgtctcctctaccaccaaggatgccctagatgagctaggatgcttccagctagagcttcggggggatgtggaaatgaagggaaaaggaaagatgcgaacatactggctcttaggagagcggaaaggacctcctggactcctgtaaacccccattctttccaagtcagatagtcttctgctgctggtacctgggtgggcaatggccaccatgtctgcacacaccagaaatggacattttcatatgcaatggaaaacagccacaaaaaaacctaccttatatggaagttgtagccctctgcagctcagccctgtacatatacctgtccctctctggcttggtccccttcctccctactttctgtaaatatctgtatctaaaccagaatattttggtcaaatataaaacaataataaaaaaagttctgatgtcat

SEQ ID NO: 19608 - DNA, 7337 bp, Homo sapiens
  source 1..7337: mol_type = unassigned DNA
acgcccaaataagaagccacctctaagcaaaatagtatatgtataaacggagggcgaatatatacaagtatatatatatgtatattacagacgcacaggtttacacccggtgaactttttctttttctttttcttttttttttaagaaaaactagtgacattgcagagaaggacgcttcctctctatcttttggcgcattagtgaagggggtattctattttgttaaagcgcccaagggggcgcagggaccttggagagaagagtggggaggaaagaggaagggtgggtggggggcagagggcgagtcggcggcggcgagggcaagctctttcttgcggcacgatgccgtctctgctggtgctcactttctccccgtgcgtactactcggctgggcgttgctggccggcggcaccggtggcggtggcgttggcggcggcggcggtggcgcgggcataggcggcggacgccaggagagagaggcgctgccgccacagaagatcgaggtgctggtgttactgccccaggatgactcgtacttgttttcactcacccgggtgcggccggccatcgagtatgctctgcgcagcgtggagggcaacgggactgggaggcggcttctgccgccgggcactcgcttccaggtggcttacgaggattcagactgtgggaaccgtgcgctcttcagcttggtggaccgcgtggcggcggcgcggggcgccaagccagaccttatcctggggccagtgtgcgagtatgcagcagcgccagtggcccggcttgcatcgcactgggacctgcccatgctgtcggctggggcgctggccgctggcttccagcacaaggactctgagtactcgcacctcacgcgcgtggcgcccgcctacgccaagatgggcgagatgatgctcgccctgttccgccaccaccactggagccgcgctgcactggtctacagcgacgacaagctggagcggaactgctacttcaccctcgagggggtccacgaggtcttccaggaggagggtttgcacacgtccatctacagtttcgacgagaccaaagacttggatctggaagacatcgtgcgcaatatccaggccagtgagagagtggtgatcatgtgtgcgagcagtgacaccatccggagcatcatgctggtggcgcacaggcatggcatgaccagtggagactacgccttcttcaacattgagctcttcaacagctcttcctatggagatggctcatggaagagaggagacaaacacgactttgaagctaagcaagcatactcgtccctccagacagtcactctactgaggacagtgaaacctgagtttgagaagttttccatggaggtgaaaagttcagttgagaaacaagggctcaatatggaggattacgttaacatgtttgttgaaggattccacgatgccatcctcctctacgtcttggctctacatgaagtactcagagctggttacagcaaaaaggatggagggaaaattatacagcagacttggaacagaacatttgaaggtatcgccgggcaggtgtccatagatgccaacggagaccgatatggggatttctctgtgattgccatgactgatgtggaggcgggcacccaggaggttattggtgattattttggaaaagaaggtcgttttgaaatgcggccgaatgtcaaatatccttggggccctttaaaactgagaatagatgaaaaccgaattgtagagcatacaaacagctctccctgcaaatcatcaggtggcctagaagaatcggcagtgacaggaattgtcgtgggggctttactaggagctggcttgctaatggccttctactttttcaggaagaaatacagaataaccattgagaggcgaacccagcaagaagaaagtaaccttggaaaacatcgggaattacgggaagattccatcagatcccatttttcagtagcttaaaggaagccccccactttttttttttctgcctgagattctttaaggagatagacgggttgaaagacatcaatgaaacagaaggggcgttcttgaagaattcataattttaagcagttagtaatttcattttaaaatttctgtagaagctcaggaattatgattaatcaccatctgcctccaggcctttcatctcatgacaaacaaatataataatgatatcgtgtcactctgttaaatgttcatactgtttcaagcccatatgattagatttatgtttttaaaatctgttgtctccatatcttgatggcttttgggagcatttcacacaaggatataaaatgcggttttcttaaatgaaatgttttgtagctagaataaaatcatttttacaagtacagcattcttggaaagaatttaacacccaaaaaggggaaaatgtaatgaaaaatctcaaggttggaaatacagccttactctctctagagctggaggacaggtttgtggttgaggacttctctgtccgatgtctacattcaggttctgacttcatatcttgaaaaaggatttcctccctgtctttttcagtgtctcataaacgctactctggattgttgtaaatattagtgagatgggaggatttacagaagaaaagcaagtcaaaaatatttcctttttgatgtaaaaaaaaaaagccctatttcgcactaacattttattttacaagtattttaatcttatattttggtattagaaaaatttgtctattttttcattttgaagattaaatgttgcttacattttaaaagcatgggtgaagtgtacaacaaaccaataatgataaaaaatacttctctttttctccctgtttccctttttcccttggccacagccaaatgctaattgctgctttaattacagagatgtgtaaatgtattcagattacaaactctacaggaatacatcaacattttaactcttttgcgtttttactgtttaactgttttaaatgcaagttattttagggtgacactccttccagttctggccagatcatgagtttcaagatcaagagtaaaaagttattagaattaaacagttttataaagggaggcagcccttttccctcaagaacaactttgttgagagttactacttgacagcaagcacagaaatgacaaatttaaaacttttacacatggcatttaccaaaattcccagtgattattttgtttaaaagagggaacctaaatatctactctattccctttcagttaactccacagaactttgtaggcatccatgaatacctgtaatagtgggttaggtgtggagataaggaatttggacaaagttgagtaagtttttactgggtatctgctttgcacccagtagtctgcaacatgagtttaaactcaggttactactttcacttatactttatggagaagatagacagtgagggaggaatgggaagctgtcatgagagtgcaccgtcttggaattacataactggggtctttcctcaataacattttgagcatctgaaaaatagtttaaaaaattgtcttaatatctattaaaaggcatgtctagtgaggaaacaggagagtctgagcaatcccttggtggcgatgaaggtggtagttcacacaagtaacagtggaggcaaaggtaagcgcaagctgcctgtcccagatgctggcccatgtgtgagtgcttccctggagaagtccgcttctgttgctcccacctgagtcacagttaacagattatttctgtgtgaggcacatttcccttctgttgtttaagaaatgggagctgggaggcagctgagagggcgtgataaaagaattaagtgtgatcaactgaaacaactatgttgtagttctccatgctggatgcaaaggaaaaagtgtcgaattccaaaaaggatggaagaagaaggcaagaagggcaaactccagaagttctagtgcaggaagagagtttgagaagtaaaatccaggcaagcaaagcgttgtaccacttgggactccccaaagtgaaacagcaaggaaggattgtgtccatcttacttacttgaattggagagcttgtttctctctcatttttatttttcaatgatgttttctttatattttagagatattcattttctcttatcttgtgcttgtaaaaagcatttacatttcaagtctatgtgcttattacaggggaaaaataatctacctggttgcagtctttgagtataaacatttctaacctttttaaaacttctatagcagcccattaacactaacatttttagagcaaatatattctattttaacttcaggtagaggaatagtcctaaacttaatatgatagctctagataagatcttagagataagtgagcatttagtattctaaaagtggcagaacaaatcatgaggtttctggatgctataccaatttaaaatcaattcttatgttaatattgattgcttatttacatgtcagtcatctactttttttctttgaaatctgcatatgggttacaaaaactctgttaggttttgaaaattccattaagttggaaaccttggttaaaaatgtaggtgcctggcccatggttaccctggattcaggtctctcatgattatatttggggatttacgttcctaactgctaagcaacatctttgacaactagtaattcatactctactagtagtcacatgtcatatagtaaaataaatagggctttagttcttaagtaattctataggattttaccctgaaatccagggtgttcagatttcaaaaaggataatttatcagtattttctcatccagtcaaacttcagctgacattgatacaggtcaaaatgcgtagatgctttttggtgttggaaataagtgtctgtcttatggtcatcattgtcttcttagatttttgggtaggggggccaggtagggggagactcagaaataaaagcgttccccagataacttcaatctggaaagaattttttgtatagagtccatctctccctcaagactgaccacaggtttcatgagaaggtccctgaaaacatcacatttctctgaagaaccatcaacttgtcttttcttgaaccacaggaatggttctacagaccctactataattcttcacatttcagaacccatgtttaatggagggaagagagaaatgcatgggaaaagaacacctccttttctcctttctcttaaattcaaagacgtttgctttggaatgccctcacttctccctattcacaggcttctaaaatcattaatttactcaaggcacatgtgccttctttgccccaaatgcatcactttccttttagttatggctgattttgggtgtgtgtgtgtaagacatgcagtcaacaatgagatgaaggccattgcatagatctcatgcagatagtgatggattcagaaagtaggttccagtggcgtcactaccttcttgtaagccagtatacactggctatttgtggaaatctctttgggagatcaaatagagtattatgccactgtgagtgtttataaactggaaggaacaagtacctgtgtttcttgggacacaaagcactcagatcctgagtggatgcagacatgagagtaaatgtcagcccaaattaggcccctcgacctacagacatttcatgggttttatttaatcacaccccatggtttggggctacatgaggaagttggtaatgagctgaatttcttattcagtggaaaaaactgaaactgtctaaaaacacgggatatattttagaggcaattgtggaagcggagagaatgagatgatggtgttcagagggaccagcttctttttcagttgtctttagaactcaagaataatcaataatttagtgccccttcaacagccatactcagcaagaagaatcagaagcttgatcctctaacagaaatagaagagggtagctttgcccattgccactgtctttactgccccttctgcccctccacccacatccacattcagcatcactccaaggatgtgtcagcatcttgcccatgcaggtagaaatttgtgagtaggcctccatacttcctcgggggaagaaagagaaactagtgctggttttaagaatgtagctggcttttcatcagaacccttatgctaacctgaccacacttgctctcggggaagttcaagcctgtgatgtgcataaactccaacaagcctggctttggtgttcagcatgcacattccataaatatctcttgcaggcataccccacagctagactgcaggattaaaataacttccaaaaggtgctggattggagtttgttcaaatttctcattaaccactaatgttaattcataccaaatgcaaagtattctaaaccagctgatgctgtcagtgttcaagttttaagtgacttcaaacacaatggaagtgtttcaatgggagccagatctcatgagtaaaaatccattttataatagctctgtgatatatcagtgggagatgattcataggggagagatttgaacaagcagaattaagtgttagcaaaaatgctgcattgctttgattcatgtttaaagacctaaatttctatgcacaaggaataaagggcctacttaccaagtgtaaatcacaacataggctaccaaaatatttcttatttgctaggagaacaaagctgtcacggtgcatgatagttggacagagatggctaaaaaagaggcaaattcagatttggaaacagggtggcctcttcattatttattgccaagatctgaaaatcttcaacatcttataagacaacaatgaagtagcccctgaacagcatggagttgctgtgagtttgttcgttgcagacctttgtgttgggtcctgggaatctgagctttgttccctgtgcatggtggataattgaaaccaagaggacatgggatagaccttgtgacagaccaattctgtgacccctgtcttctgggtcacattattcattgttgatttaaatacaggactaccaaacagtacaaatctatcatgagtctggtagaaaagtaaaagtaaaagctgcacacgttacatactgtttattgttctaatgtacaactaactatttgcatataatgtgatttaatttattgctgttttgtgtagaaaaggagaactaatgactgtggatataacccatgttttgtataatatattttatttcttgtgcgaactggtcatttaaaatatctacttcatttgatgtttggatataaatgtgtatgtgtccttgtaaatgtttctatcaagcaagaatgccacgtactcagagtataacaatgtgttctcattaaaaaatacatccc

SEQ ID NO: 19609 - DNA, 1753 bp, Homo sapiens
  source 1..1753: mol_type = unassigned DNA
ggggggcagagggcgagtcggcggcggcgagggcaagctctttcttgcggcacgatgccgtctctgctggtgctcactttctccccgtgcgtactactcggctgggcgttgctggccggcggcaccggtggcggtggcgttggcggcggcggcggtggcgcgggcataggcggcggacgccaggagagagaggcgctgccgccacagaagatcgaggtgctggtgttactgccccaggatgactcgtacttgttttcactcacccgggtgcggccggccatcgagtatgctctgcgcagcgtggagggcaacgggactgggaggcggcttctgccgccgggcactcgcttccaggtggcttacgaggattcagactgtgggaaccgtgcgctcttcagcttggtggaccgcgtggcggcggcgcggggcgccaagccagaccttatcctggggccagtgtgcgagtatgcagcagcgccagtggcccggcttgcatcgcactgggacctgcccatgctgtcggctggggcgctggccgctggcttccagcacaaggactctgagtactcgcacctcacgcgcgtggcgcccgcctacgccaagatgggcgagatgatgctcgccctgttccgccaccaccactggagccgcgctgcactggtctacagcgacgacaagctggagcggaactgctacttcaccctcgagggggtccacgaggtcttccaggaggagggtttgcacacgtccatctacagtttcgacgagaccaaagacttggatctggaagacatcgtgcgcaatatccaggccagtgagagagtggtgatcatgtgtgcgagcagtgacaccatccggagcatcatgctggtggcgcacaggcatggcatgaccagtggagactacgccttcttcaacattgagctcttcaacagctcttcctatggagatggctcatggaagagaggagacaaacacgactttgaagctaagcaagcatactcgtccctccagacagtcactctactgaggacagtgaaacctgagtttgagaagttttccatggaggtgaaaagttcagttgagaaacaagggctcaatatggaggattacgttaacatgtttgttgaaggattccacgatgccatcctcctctacgtcttggctctacatgaagtactcagagctggttacagcaaaaaggatggagggaaaattatacagcagacttggaacagaacatttgaaggtatcgccgggcaggtgtccatagatgccaacggagaccgatatggggatttctctgtgattgccatgactgatgtggaggcgggcacccaggaggttattggtgattattttggaaaagaaggtcgttttgaaatgcggccgaatgtcaaatatccttggggccctttaaaactgagaatagatgaaaaccgaattgtagagcatacaaacagctctccctgcaaatcatgtggcctagaagaatcggcagtgacaggaattgtcgtgggggctttactaggagctggcttgctaatggccttctactttttcaggaagaaatacagaataaccattgagaggcgaacccagcaagaagaaagtaaccttggaaaacatcgggaattacgggaagattccatcagatcccatttttcagtagcttaaaggaagccccccactttttttttttctgcctgagattctttaaggagatagacgggttgaaagacatcaatgaaac

SEQ ID NO: 19610 - DNA, 1474 bp, Homo sapiens
  source 1..1474: mol_type = unassigned DNA
aggtccgcgatggagccatctgcactgggaccttggtccttgttccctgaccttgcgccgagggaccaggaaggtcaggtgctcgccccgcgtcggtgcttcaggagggaatgtggccagaacgagaaagtggtgatcatgtgtgcgagcagtgacaccatccggagcatcatgctggtggcgcacaggcatggcatgaccagtggagactacgccttcttcaacattgagctcttcaacagctcttcctatggagatggctcatggaagagaggagacaaacacgactttgaagctaagcaagcatactcgtccctccagacagtcactctactgaggacagtgaaacctgagtttgagaagttttccatggaggtgaaaagttcagttgagaaacaagggctcaatatggaggattacgttaacatgtttgttgaaggattccacgatgccatcctcctctacgtcttggctctacatgaagtactcagagctggttacagcaaaaaggatggagggaaaattatacagcagacttggaacagaacatttgaaggtatcgccgggcaggtgtccatagatgccaacggagaccgatatggggatttctctgtgattgccatgactgatgtggaggcgggcacccaggaggttattggtgattattttggaaaagaaggtcgttttgaaatgcggccgaatgtcaaatatccttggggccctttaaaactgagaatagatgaaaaccgaattgtagagcatacaaacagctctccctgcaaatcatgtggcctagaagaatcggcagtgacaggaattgtcgtgggggctttactaggagctggcttgctaatggccttctactttttcaggaagaaatacagaataaccattgagaggcgaacccagcaagaagaaagtaaccttggaaaacatcgggaattacgggaagattccatcagatcccatttttcagtagcttaaaggaagccccccactttttttttttctgcctgagattctttaaggagatagacgggttgaaagacatcaatgaaacagaaggggcgttcttgaagaattcataattttaagcagttagtaatttcattttaaaatttctgtagaagctcaggaattatgattaatcaccatctgcctccaggcctttcatctcatgacaaacaaatataataatgatatcgtgtcactctgttaaatgttcatactgtttcaagcccatatgattagatttatgtttttaaaatctgttgtctccatatcttgatggcttttgggagcatttcacacaaggatataaaatgcggttttcttaaatgaaatgttttgtagctagaataaaatcatttttacaagtacagcattcttggaaagaatttaacacccaaaaaggggaaaatgtaatgaaaaatctcaaggttggaaatacagccttactctctctagagctgga

SEQ ID NO: 19611 - DNA, 1153 bp, Homo sapiens
  source 1..1153: mol_type = unassigned DNA
tccccactgctcagcactaggccggcagaatctgagcgatgtcttccacactccctgccctgctctgcgtcgggctgtgtctgagtcagaggatcagcgcccagcagcagactctcccaaaaccgttcatctgggccgagccccatttcatggttccaaaggaaaagcaagtgaccatctgttgccagggaaattatggggctgttgaataccagctgcactttgaaggaagcctttttgccgtggacagaccaaaaccccctgagcggattaacaaagtcaaattctacatcccggacatgaactcccgcatggcagggcaatacagctgcatctatcgggttggggagctctggtcagagcccagcaacttgctggatctggtggtaacagaaatgtatgacacacccaccctctcggttcatcctggacccgaagtgatctcgggagagaaggtgaccttctactgccgtctagacactgcaacaagcatgttcttactgctcaaggagggaagatccagccacgtacagcgcggatacgggaaggtccaggcggagttccccctgggccctgtgaccacagcccaccgagggacataccgatgttttggctcctataacaaccatgcctggtctttccccagtgagccagtgaagctcctggtcacaggcgacattgagaacaccagccttgcacctgaagaccccacctttcctgcagacacttggggcacctaccttttaaccacagagacgggactccagaaagaccatgccctctgggatcacactgcccagaatctccttcggatgggcctggcctttctagtcctggtggctctagtgtggttcctggttgaagactggctcagcaggaagaggactagagagcgagccagcagagcttccacttgggaaggcaggagaaggctgaacacacagactctttgaagaatgaccatgagacacagtggccatgggtggatctgaaagctggtgttgagcctgggcggcgtgagctctgtgttggacccacggaggagggagtcactgcagggaaagagggacactggcattccatttgtcagagcatcccggacgatgcagagggtgggagaactacatgctaaatttctttttttttttttttg

SEQ ID NO: 19612 - DNA, 1102 bp, Homo sapiens
  source 1..1102: mol_type = unassigned DNA
tccccactgctcagcactaggccggcagaatctgagcgatgtcttccacactccctgccctgctctgcgtcgggctgtgtctgagtcagaggatcagcgcccagcagcagactctcccaaaaccgttcatctgggccgagccccatttcatggttccaaaggaaaagcaagtgaccatctgttgccagggaaattatggggctgttgaataccagctgcactttgaaggaagcctttttgccgtggacagaccaaaaccccctgagcggattaacaaagtcaaattctacatcccggacatgaactcccgcatggcagggcaatacagctgcatctatcgggttggggagctctggtcagagcccagcaacttgctggatctggtggtaacagaaatgtatgacacacccaccctctcggttcatcctggacccgaagtgatctcgggagagaaggtgaccttctactgccgtctagacactgcaacaagcatgttcttactgctcaaggagggaagatccagccacgtacagcgcggatacgggaaggtccaggcggagttccccctgggccctgtgaccacagcccaccgagggacataccgatgttttggctcctataacaaccatgcctggtctttccccagtgagccagtgaagctcctggtcacaggcgacattgagaacaccagccttgcacctgaagaccccacctttcctgaccatgccctctgggatcacactgcccagaatctccttcggatgggcctggcctttctagtcctggtggctctagtgtggttcctggttgaagactggctcagcaggaagaggactagagagcgagccagcagagcttccacttgggaaggcaggagaaggctgaacacacagactctttgaagaatgaccatgagacacagtggccatgggtggatctgaaagctggtgttgagcctgggcggcgtgagctctgtgttggacccacggaggagggagtcactgcagggaaagagggacactggcattccatttgtcagagcatcccggacgatgcagagggtgggagaactacatgctaaatttctttttttttttttttg

SEQ ID NO: 19613 - DNA, 868 bp, Homo sapiens
  source 1..868: mol_type = unassigned DNA
tccccactgctcagcactaggccggcagaatctgagcgatgtcttccacactccctgccctgctctgcgtcgggctgtgtctgagtcagaggatcagcgcccagcagcaaatgtatgacacacccaccctctcggttcatcctggacccgaagtgatctcgggagagaaggtgaccttctactgccgtctagacactgcaacaagcatgttcttactgctcaaggagggaagatccagccacgtacagcgcggatacgggaaggtccaggcggagttccccctgggccctgtgaccacagcccaccgagggacataccgatgttttggctcctataacaaccatgcctggtctttccccagtgagccagtgaagctcctggtcacaggcgacattgagaacaccagccttgcacctgaagaccccacctttcctgcagacacttggggcacctaccttttaaccacagagacgggactccagaaagaccatgccctctgggatcacactgcccagaatctccttcggatgggcctggcctttctagtcctggtggctctagtgtggttcctggttgaagactggctcagcaggaagaggactagagagcgagccagcagagcttccacttgggaaggcaggagaaggctgaacacacagactctttgaagaatgaccatgagacacagtggccatgggtggatctgaaagctggtgttgagcctgggcggcgtgagctctgtgttggacccacggaggagggagtcactgcagggaaagagggacactggcattccatttgtcagagcatcccggacgatgcagagggtgggagaactacatgctaaatttctttttttttttttttg

SEQ ID NO: 19614 - DNA, 832 bp, Homo sapiens
  source 1..832: mol_type = unassigned DNA
tccccactgctcagcactaggccggcagaatctgagcgatgtcttccacactccctgccctgctctgcgtcgaaatgtatgacacacccaccctctcggttcatcctggacccgaagtgatctcgggagagaaggtgaccttctactgccgtctagacactgcaacaagcatgttcttactgctcaaggagggaagatccagccacgtacagcgcggatacgggaaggtccaggcggagttccccctgggccctgtgaccacagcccaccgagggacataccgatgttttggctcctataacaaccatgcctggtctttccccagtgagccagtgaagctcctggtcacaggcgacattgagaacaccagccttgcacctgaagaccccacctttcctgcagacacttggggcacctaccttttaaccacagagacgggactccagaaagaccatgccctctgggatcacactgcccagaatctccttcggatgggcctggcctttctagtcctggtggctctagtgtggttcctggttgaagactggctcagcaggaagaggactagagagcgagccagcagagcttccacttgggaaggcaggagaaggctgaacacacagactctttgaagaatgaccatgagacacagtggccatgggtggatctgaaagctggtgttgagcctgggcggcgtgagctctgtgttggacccacggaggagggagtcactgcagggaaagagggacactggcattccatttgtcagagcatcccggacgatgcagagggtgggagaactacatgctaaatttctttttttttttttttg

SEQ ID NO: 19615 - DNA, 1150 bp, Homo sapiens
  source 1..1150: mol_type = unassigned DNA
tccccactgctcagcactaggccggcagaatctgagcgatgtcttccacactccctgccctgctctgcgtcgggctgtgtctgagtcagaggatcagcgcccagcagcagactctcccaaaaccgttcatctgggccgagccccatttcatggttccaaaggaaaagcaagtgaccatctgttgccagggaaattatggggctgttgaataccagctgcactttgaaggaagcctttttgccgtggacagaccaaaaccccctgagcggattaacaaagtcaaattctacatcccggacatgaactcccgcatggcagggcaatacagctgcatctatcgggttggggagctctggtcagagcccagcaacttgctggatctggtggtaacagaaatgtatgacacacccaccctctcggttcatcctggacccgaagtgatctcgggagagaaggtgaccttctactgccgtctagacactgcaacaagcatgttcttactgctcaaggagggaagatccagccacgtacagcgcggatacgggaaggtccaggcggagttccccctgggccctgtgaccacagcccaccgagggacataccgatgttttggctcctataacaaccatgcctggtctttccccagtgagccagtgaagctcctggtcacaggcgacattgagaacaccagccttgcacctgaagaccccacctttcctgacacttggggcacctaccttttaaccacagagacgggactccagaaagaccatgccctctgggatcacactgcccagaatctccttcggatgggcctggcctttctagtcctggtggctctagtgtggttcctggttgaagactggctcagcaggaagaggactagagagcgagccagcagagcttccacttgggaaggcaggagaaggctgaacacacagactctttgaagaatgaccatgagacacagtggccatgggtggatctgaaagctggtgttgagcctgggcggcgtgagctctgtgttggacccacggaggagggagtcactgcagggaaagagggacactggcattccatttgtcagagcatcccggacgatgcagagggtgggagaactacatgctaaatttctttttttttttttttg

SEQ ID NO: 19616 - DNA, 1154 bp, Homo sapiens
  source 1..1154: mol_type = unassigned DNA
agcccaccagacccagactcacctacagctggagatccccacttccctgtgcccacagaatctgccctttgcagtctcccatctccccaacccaggcctcagcctgtctcatttttctatcagacgtgctggaagagcagcagaatcaggcccagctcccaattccctctccccagtcttctccaggtgtcccctcccatgagcgcacaggaaaaggaccacatggcctggcgagccctacacccactgctactgctgctgctgctgttcccaggctctcaggcacaatccaaggctcaggtacttcaaagtgtggcagggcagacgctaaccgtgagatgccagtacccgcccacgggcagtctctacgagaagaaaggctggtgtaaggaggcttcagcacttgtgtgcatcaggttagtcaccagctccaagcccaggacgatggcttggacctctcgattcacaatctgggacgaccctgatgctggcttcttcactgtcaccatgactgatctgagagaggaagactcaggacattactggtgtagaatctaccgcccttctgacaactctgtctctaagtccgtcagattctatctggtggtatctccagcctctgcctccacacagacctcctggactccccgcgacctggtctcttcacagacccagacccagagctgtgtgcctcccactgcaggagccagacaagcccctgagtctccatctaccatccctgtcccttcacagccacagaactccacgctccgccctggccctgcagcccccattgccctggtgcctgtgttctgtggactcctcgtagccaagagcctggtgctgtcagccctgctcgtctggtgggttttaaggaatcggcacatgcagcatcaagggaggtctctgctgcacccagctcagcccaggccccaggcccatagacacttcccactgagccacagggcaccaggggggacatatggtggaaaaccatgatggagctcaggagcctggatacccaaaaagccacctgccaccttcaacaggtcacggaccttccctggacctcagtttcctcacctgtagagagagaaatattatatcacactgttgcaaggactaagataagcgatgatgatgatgaacacact

SEQ ID NO: 19617 - DNA, 1000 bp, Homo sapiens
  source 1..1000: mol_type = unassigned DNA
ccatgagcgcacaggaaaaggaccacatggcctggcgagccctacacccactgctactgctgctgctgctgttcccaggctctcaggcacaatccaaggctcaggtacttcaaagtgtggcagggcagacgctaaccgtgagatgccagtacccgcccacgggcagtctctacgagaagaaaggctggtgtaaggaggcttcagcacttgtgtgcatcaggttagtcaccagctccaagcccaggacgatggcttggacctctcgattcacaatctgggacgaccctgatgctggcttcttcactgtcaccatgactgatctgagagaggaagactcaggacattactggtgtagaatctaccgcccttctgacaactctgtctctaagtccgtcagattctatctggtggtatctccagcctctgcctccacacagacctcctggactccccgcgacctggtctcttcacagacccagacccagagctgtgtgcctcccactgcaggagccagacaagcccctgagtctccatctaccatccctgtcccttcacacccgtcctctccccttcctgtccctctgccttccaggccacagaactccacgctccgccctggccctgcagcccccattgccctggtgcctgtgttctgtggactcctcgtagccaagagcctggtgctgtcagccctgctcgtctggtgggttttaaggaatcggcacatgcagcatcaagggaggtctctgctgcacccagctcagcccaggccccaggcccatagacacttcccactgagccacagggcaccaggggggacatatggtggaaaaccatgatggagctcaggagcctggatacccaaaaagccacctgccaccttcaacaggtcacggaccttccctggacctcagtttcctcacctgtagagagagaaatattatatcacactgttgcaaggactaagataagcgatgatgatgatgaacacactttgtga

SEQ ID NO: 19618 - DNA, 942 bp, Homo sapiens
  source 1..942: mol_type = unassigned DNA
gagcagcagaatcaggcccagctcccaattccctctccccagtcttctccaggtgtcccctcccatgagcgcacaggaaaaggaccacatggcctggcgagccctacacccactgctactgctgctgctgctgttcccaggctctcaggcacaatccaaggctcaggtacttcaaagtgtggcagggcagacgctaaccgtgagatgccagtacccgcccacgggcagtctctacgagaagaaaggctggtgtaaggaggcttcagcacttgtgtgcatcaggttagtcaccagctccaagcccaggacgatggcttggacctctcgattcacaatctgggacgaccctgatgctggcttcttcactgtcaccatgactgatctgagagaggaagactcaggacattactggtgtagaatctaccgcccttctgacaactctgtctctaagtccgtcagattctatctggtggtatctccagcctctgcctccacacagacctcctggactccccgcgacctggtctcttcacagacccagacccagagctgtgtgcctcccactgcaggagccagacaagcccctgagtctccatctaccatccctgtcccttcacagccacagaactccacgctccgccctggccctgcagcccccattgccctggtgcctgtgttctgtggactcctcgtagccaagagcctggtgctgtcagccctgctcgtctggtggggggacatatggtggaaaaccatgatggagctcaggagcctggatacccaaaaagccacctgccaccttcaacaggtcacggaccttccctggacctcagtttcctcacctgtagagagagaaatattatatcacactgttgcaaggactaagataagcgatgatgatgatgaacacactttgtgaataataaaattatctgaatgttt

SEQ ID NO: 19619 - DNA, 1042 bp, Homo sapiens
  source 1..1042: mol_type = unassigned DNA
ccacaagctggccccttggcctcctagagaccctgacatctcctccagcagcatctgtcctctctcctcagggaggcaagcatttgatgctcgaggtccctggcagttgtggtccttggcaagtgatgtgtgagtcccgtgtgtcataggaagctccccatccccatctggtgaccaaaggcctggctacaagtagtgagtccttcctcctccacccagacctcactgctcagatccccttcgccaactgggacatcttccgacatggcctggatgctgttgctcatcttgatcatggtccatccaggatcctgtgctctctgggtgtcccagccccctgagattcgtaccctggaaggatcctctgccttcctgccctgctccttcaatgccagccaagggagactggccattggctccgtcacgtggttccgagatgaggtggttccagggaaggaggtgaggaatggaaccccagagttcaggggccgcctggccccacttgcttcttcccgtttcctccatgaccaccaggctgagctgcacatccgggacgtgcgaggccatgacgccagcatctacgtgtgcagagtggaggtgctgggccttggtgtcgggacagggaatgggactcggctggtggtggagaaagaacatcctcagctaggggctggtacagtcctcctccttcgggctggattctatgctgtcagctttctctctgtggccgtgggcagcaccgtctattaccagggcaaatgtctgacctggaaaggtccaagaaggcagctgccggctgtggtcccagcgcccctcccaccaccatgtgggagctcagcacatctgcttcccccagtcccaggaggctgagcctgattgtcctgagaaatgggaaggatcagatatgactcctccttggcaactgccctttcctgccaggcccacacataccctcttctggctgttaggggagcttgggtccctgaacactgtcattcacccaataaattactatttgaccccagagtgggtggaagggtga

SEQ ID NO: 19620 - DNA, 541 bp, Homo sapiens
  source 1..541: mol_type = unassigned DNA
cccttcgccaactgggacatcttccgacatggcctggatgctgttgctcatcttgatcatggtccatccaggatcctgtgctctctgggtgtcccagccccctgagattcgtaccctggaaggatcctctgccttcctgccctgctccttcaatgccagccaagggagactggccattggctccgtcacgtggttccgagatgaggtggttccagggaaggaggctgagctgcacatccgggacgtgcgaggccatgacgccagcatctacgtgtgcagagtggaggtgctgggccttggtgtcgggacagggaatgggactcggctggtggtggagaaagaacatcctcagctaggggctggtacagtcctcctccttcgggctggattctatgctgtcagctttctctctgtggccgtgggcagcaccgtctattaccagggcaaatgccactgtcacatgggaacacactgccactcctcagatgggccccgaggagtgattccagagcccagatgtccctagtcctcttcaaaagac

SEQ ID NO: 19621 - DNA, 875 bp, Homo sapiens
  source 1..875: mol_type = unassigned DNA
ccacaagctggccccttggcctcctagagaccctgacatctcctccagcagcatctgtcctctctcctcagggaggcaagcatttgatgctcgaggtccctggcagttgtggtccttggcaagtgatgtgtgagtcccgtgtgtcataggaagctccccatccccatctggtgaccaaaggcctggctacaagtagtgagtccttcctcctccacccagacctcactgctcagatccccttcgccaactgggacatcttccgacatggcctggatgctgttgctcatcttgatcatggtccatccaggatcctgtgctctctgggtgtcccagccccctgagattcgtaccctggaaggatcctctgccttcctgccctgctccttcaatgccagccaagggagactggccattggctccgtcacgtggttccgagatgaggtggttccagggaaggaggtgaggaatggaaccccagagttcaggggccgcctggccccacttgcttcttcccgtttcctccatgaccaccaggctgagctgcacatccgggacgtgcgaggccatgacgccagcatctacgtgtgcagagtggaggtgctgggccttggtgtcgggacagggaatgggactcggctggtggtggagaaagaacatcctcagctaggggctggtacagtcctcctccttcgggctggattctatgctgtcagctttctctctgtggccgtgggcagcaccgtctattaccagggcaaatgccactgtcacatgggaacacactgccactcctcagatgggccccgaggagtgattccagagcccagatgtccctagtcctcttcaaaagaccccaataaatctgccccaccact

SEQ ID NO: 19622 - DNA, 1097 bp, Homo sapiens
  source 1..1097: mol_type = unassigned DNA
ccacaagctggccccttggcctcctagagaccctgacatctcctccagcagcatctgtcctctctcctcagggaggcaagcatttgatgctcgaggtccctggcagttgtggtccttggcaagtgatgtgtgagtcccgtgtgtcataggaagctccccatccccatctggtgaccaaaggcctggctacaagtagtgagtccttcctcctccacccagacctcactgctcagatccccttcgccaactgggacatcttccgacatggcctggatgctgttgctcatcttgatcatggtccatccaggatcctgtgctctctgggtgtcccagccccctgagattcgtaccctggaaggatcctctgccttcctgccctgctccttcaatgccagccaagggagactggccattggctccgtcacgtggttccgagatgaggtggttccagggaaggaggtgaggaatggaaccccagagttcaggggccgcctggccccacttgcttcttcccgtttcctccatgaccaccaggctgagctgcacatccgggacgtgcgaggccatgacgccagcatctacgtgtgcagagtggaggtgctgggccttggtgtcgggacagggaatgggactcggctggtggtggagaaagaacatcctcagctaggggctggtacagtcctcctccttcgggctggattctatgctgtcagctttctctctgtggccgtgggcagcaccgtctattaccagggcaaatatgccaaatctactctctccggattcccccaactctgaactttcccttccaccaggtctgacctggaaaggtccaagaaggcagctgccggctgtggtcccagcgcccctcccaccaccatgtgggagctcagcacatctgcttcccccagtcccaggaggctgagcctgattgtcctgagaaatgggaaggatcagatatgactcctccttggcaactgccctttcctgccaggcccacacataccctcttctggctgttaggggagcttgggtccctgaacactgtcattcacccaataaattactatttgaccccagagtgggtggaagggtga

SEQ ID NO: 19623 - DNA, 875 bp, Homo sapiens; identical to SEQ ID NO: 19621
  source 1..875: mol_type = unassigned DNA

SEQ ID NO: 19624 - DNA, 1042 bp, Homo sapiens; identical to SEQ ID NO: 19619
  source 1..1042: mol_type = unassigned DNA

SEQ ID NO: 19625 - DNA, 1097 bp, Homo sapiens; identical to SEQ ID NO: 19622
  source 1..1097: mol_type = unassigned DNA

SEQ ID NO: 19626 - DNA, 541 bp, Homo sapiens; identical to SEQ ID NO: 19620
  source 1..541: mol_type = unassigned DNA

SEQ ID NO: 19627 - DNA, 875 bp, Homo sapiens
  source 1..875: mol_type = unassigned DNA
ccacaagctggccccttggcctcctagagaccctgacatctcctccagcagcatctgtcccctctcctcagggaggcaagcatttgatgctcgaggtccctggcagttgtggtccttggcaagtgatgtgtgagtcccgtgtgtcataggaagctccccatccccatctggtgaccaaaggcctggctacaagtagtgagtccttcctcctccacccagacctcactgctcagatccccttcgccaactgggacatcttccgacatggcctggatgctgttgctcatcttgatcatggtccatccaggatcctgtgctctctgggtgtcccagccccctgagattcgtaccctggaaggatcctctgccttcctgccctgctccttcaatgccagccaagggagactggccattggctccgtcacgtggttccgagatgaggtggttccagggaaggaggtgaggaatggaaccccagagttcaggggccgcctggccccacttgcttcttcccgtttcctccatgaccaccaggctgagctgcacatccgggacgtgcgaggccatgacgccagcatctacgtgtgcagagtggaggtgctgggccttggtgtcgggacagggaatgggactcggctggtggtggagaaagaacatcctcagctaggggctggtacagtcctcctccttcgggctggattctatgctgtcagctttctctctgtggccgtgggcagcaccgtctattaccagggcaaatgccactgtcacatgggaacacactgccactcctcagatgggccccgaggagtgattccagagcccagatgtccctagtcctcttcaaaagaccccaataaatctgccccaccact

SEQ ID NO: 19628 - DNA, 1042 bp, Homo sapiens; identical to SEQ ID NO: 19619
  source 1..1042: mol_type = unassigned DNA

SEQ ID NO: 19629 - DNA, 874 bp, Homo sapiens
  source 1..874: mol_type = unassigned DNA
ccacaagctggccccttggcctcctagagaccctgacatctcctccagcagcatctgtcctctctcctcagggaggcaagcatttgatgctcgaggtccctggcagttgtggtccttggcaagtgatgtgtgagtcccgtgtgtcataggaagctccccatccccatctggtgaccaaaggcctggctacaagtagtgagtccttcctcctccacccagacctcactgctcagatccccttcgccaactgggacatcttccgacatggcctggatgctgttgctcatcttgatcatggtccatccaggatcctgtgctctctgggtgtcccagccccctgagattcgtaccctggaaggatcctctgccttcctgccctgctccttcaatgccagccaagggagactggccattggctccgtcacgtggttccgagatgaggtggttccagggaaggaggtgaggaatggaaccccagagttcaggggccgcctggccccacttgcttcttcccgtttcctccatgaccaccaggctgagctgcacatccgggacgtgcgaggccatgacgccagcatctacgtgtgcagagtggaggtgctgggccttggtgtcgggacagggaatgggactcggctggtggtggagaaagaacatcctcagctaggggctggtacagtcctcctccttcgggctggattctatgctgtcagctttctctctgtggccgtgggcagcaccgtctattaccagggcaaatgccactgtcacatgggaacacactgccactcctcagatgggccccgaggagtgattccagagcccagatgtccctagtcctcttcaaaagaccccaataaatctgccccaccac

SEQ ID NO: 19630 - DNA, 541 bp, Homo sapiens; identical to SEQ ID NO: 19620
  source 1..541: mol_type = unassigned DNA

SEQ ID NO: 19631 - DNA, 541 bp, Homo sapiens; identical to SEQ ID NO: 19620
  source 1..541: mol_type = unassigned DNA

SEQ ID NO: 19632 - DNA, 541 bp, Homo sapiens; identical to SEQ ID NO: 19620
  source 1..541: mol_type = unassigned DNA

SEQ ID NO: 19633 - DNA, 1042 bp, Homo sapiens; identical to SEQ ID NO: 19619
  source 1..1042: mol_type = unassigned DNA

SEQ ID NO: 19634 - DNA, 1042 bp, Homo sapiens; identical to SEQ ID NO: 19619
  source 1..1042: mol_type = unassigned DNA

SEQ ID NO: 19635 - DNA, 1097 bp, Homo sapiens; identical to SEQ ID NO: 19622
  source 1..1097: mol_type = unassigned DNA

SEQ ID NO: 19636 - DNA, 1097 bp, Homo sapiens; identical to SEQ ID NO: 19622
  source 1..1097: mol_type = unassigned DNA

SEQ ID NO: 19637 - DNA, 1042 bp, Homo sapiens
  source 1..1042: mol_type = unassigned DNA
ccacaagctggccccttggcctcctagagaccctgacatctcctccagcagcatctgtcccctctcctcagggaggcaagcatttgatgctcgaggtccctggcagttgtggtccttggcaagtgatgtgtgagtcccgtgtgtcataggaagctccccatccccatctggtgaccaaaggcctggctacaagtagtgagtccttcctcctccacccagacctcactgctcagatccccttcgccaactgggacatcttccgacatggcctggatgctgttgctcatcttgatcatggtccatccaggatcctgtgctctctgggtgtcccagccccctgagattcgtaccctggaaggatcctctgccttcctgccctgctccttcaatgccagccaagggagactggccattggctccgtcacgtggttccgagatgaggtggttccagggaaggaggtgaggaatggaaccccagagttcaggggccgcctggccccacttgcttcttcccgtttcctccatgaccaccaggctgagctgcacatccgggacgtgcgaggccatgacgccagcatctacgtgtgcagagtggaggtgctgggccttggtgtcgggacagggaatgggactcggctggtggtggagaaagaacatcctcagctaggggctggtacagtcctcctccttcgggctggattctatgctgtcagctttctctctgtggccgtgggcagcaccgtctattaccagggcaaatgtctgacctggaaaggtccaagaaggcagctgccggctgtggtcccagcgcccctcccaccaccatgtgggagctcagcacatctgcttcccccagtcccaggaggctgagcctgattgtcctgagaaatgggaaggatcagatatgactcctccttggcaactgccctttcctgccaggcccacacataccctcttctggctgttaggggagcttgggtccctgaacactgtcattcacccaataaattactatttgaccccagagtgggtggaagggtga

SEQ ID NO: 19638 - DNA, 1097 bp, Homo sapiens; identical to SEQ ID NO: 19622
  source 1..1097: mol_type = unassigned DNA

SEQ ID NO: 19639 - DNA, 875 bp, Homo sapiens; identical to SEQ ID NO: 19621
  source 1..875: mol_type = unassigned DNA

SEQ ID NO: 19640 - DNA, 1042 bp, Homo sapiens; identical to SEQ ID NO: 19619
  source 1..1042: mol_type = unassigned DNA

SEQ ID NO: 19641 - DNA, 541 bp, Homo sapiens; identical to SEQ ID NO: 19620
  source 1..541: mol_type = unassigned DNA

SEQ ID NO: 19642 - DNA, 1097 bp, Homo sapiens; identical to SEQ ID NO: 19622
  source 1..1097: mol_type = unassigned DNA

SEQ ID NO: 19643 - DNA, 875 bp, Homo sapiens; identical to SEQ ID NO: 19621
  source 1..875: mol_type = unassigned DNA

SEQ ID NO: 19644 - DNA, 1097 bp, Homo sapiens; identical to SEQ ID NO: 19622
  source 1..1097: mol_type = unassigned DNA

SEQ ID NO: 19645 - DNA, 1042 bp, Homo sapiens; identical to SEQ ID NO: 19619
  source 1..1042: mol_type = unassigned DNA

SEQ ID NO: 19646 - DNA, 874 bp, Homo sapiens; identical to SEQ ID NO: 19629
  source 1..874: mol_type = unassigned DNA

SEQ ID NO: 19647 - DNA, 541 bp, Homo sapiens; identical to SEQ ID NO: 19620
  source 1..541: mol_type = unassigned DNA

SEQ ID NO: 19648 - DNA, 541 bp, Homo sapiens; identical to SEQ ID NO: 19620
  source 1..541: mol_type = unassigned DNA

SEQ ID NO: 19649 - DNA, 1097 bp, Homo sapiens
  source 1..1097: mol_type = unassigned DNA
ccacaagctggccccttggcctcctagagaccctgacatctcctccagcagcatctgtcccctctcctcagggaggcaagcatttgatgctcgaggtccctggcagttgtggtccttggcaagtgatgtgtgagtcccgtgtgtcataggaagctccccatccccatctggtgaccaaaggcctggctacaagtagtgagtccttcctcctccacccagacctcactgctcagatccccttcgccaactgggacatcttccgacatggcctggatgctgttgctcatcttgatcatggtccatccaggatcctgtgctctctgggtgtcccagccccctgagattcgtaccctggaaggatcctctgccttcctgccctgctccttcaatgccagccaagggagactggccattggctccgtcacgtggttccgagatgaggtggttccagggaaggaggtgaggaatggaaccccagagttcaggggccgcctggccccacttgcttcttcccgtttcctccatgaccaccaggctgagctgcacatccgggacgtgcgaggccatgacgccagcatctacgtgtgcagagtggaggtgctgggccttggtgtcgggacagggaatgggactcggctggtggtggagaaagaacatcctcagctaggggctggtacagtcctcctccttcgggctggattctatgctgtcagctttctctctgtggccgtgggcagcaccgtctattaccagggcaaatatgccaaatctactctctccggattcccccaactctgaactttcccttccaccaggtctgacctggaaaggtccaagaaggcagctgccggctgtggtcccagcgcccctcccaccaccatgtgggagctcagcacatctgcttcccccagtcccaggaggctgagcctgattgtcctgagaaatgggaaggatcagatatgactcctccttggcaactgccctttcctgccaggcccacacataccctcttctggctgttaggggagcttgggtccctgaacactgtcattcacccaataaattactatttgaccccagagtgggtggaagggtga

SEQ ID NO: 19650 - DNA, 875 bp, Homo sapiens; identical to SEQ ID NO: 19621
  source 1..875: mol_type = unassigned DNA

SEQ ID NO: 19651 - DNA, 7337 bp, Homo sapiens
  source 1..7337: mol_type = unassigned DNA
gtactctcgcggtatttgtcccgactctcgcggggtttagcgtggcattgggaggcccggcctgggggaggagacggcgttccgttagcggcgttggggtttggctgcagtggcagtgctttctcttctgctcacggggacccgctcaggctggaggccagccagctcttgccgccacctcggtcgcgatgggggcgcaggaccggccgcagtgccacttcgacatcgagatcaaccgggagccggttggtcgcattatgtttcagctcttctcagacatatgtccaaaaacatgcaaaaacttcctttgcttgtgctcaggagagaaaggccttgggaaaacaactgggaagaagttatgttataaaggttctacgttccatcgtgtggttaaaaactttatgattcagggtggggacttcagtgaaggtaatggaaaaggtggagaatcaatttatggtggatattttaaagatgaaaactttattctcaaacatgacagagcgttccttttatcaatggcaaatcgagggaaacataccaatggttcccagtttttcattaccacaaagcctgctccacacctggatggggtgcatgtagtctttggactggttatttctggttttgaagtaatcgaacaaattgaaaatctgaagaccgatgctgcaagcagaccatatgcagatgtgcgagttattgactgtggagtacttgccacaaaatcaataaaagatgtttttgagaaaaaaaggaagaaaccaactcattcagaaggctcggattcctcttccaattcctcctcttcttcagaatcatcttcagaaagtgaacttgaacatgagagaagcagaaggaggaaacataagaggaggccaaaagttaaacgttctaaaaagaggcgaaaggaagcaagcagttcagaagagccaaggaataaacatgcaatgaacccaaaaggtcactctgagaggagtgataccaatgaaaaaaggtcagttgattccagtgctaaaagggaaaaacctgtggtccgcccagaagagattcctccagtgcctgagaaccgatttttactgagaagagatatgcctgttgttactgcagaacctgaaccgaagattcctgatgttgcacccattgtaagtgatcagaaaccatctgtatcaaagtctggacggaagattaaaggaaggggcacaattcgctatcacacacctccaagatcaagatcctgttctgagtcagatgatgatgacagcagtgaaactcctcctcactggaaagaggaaatgcagagattaagagcatatagaccacctagtggagaaaaatggagtaaaggagataagttaagtgacccctgttcaagccgatgggatgaaagaagcttgtctcagagatccagatcatggtcctataatggatattattcagaccttagtacagcaagacactctggccaccataaaaaacgcagaaaagaaaaaaaggttaagcataaaaagaaagggaaaaagcagaaacactgcagaagacacaaacaaacaaagaagagaaggattcttataccgtctgacatagaatcctcaaaatcttccactcgaagaatgaaatcctcttgtgatagagaaaggagttctcgttcttcctcattgtcatctcatcactcatcaaagagagactggtctaaatctgataaggatgtccagagctctttaacccattccagcagagactcatacagatcaaaatctcactcacagtcttattctagaggaagctcaagatcaaggactgcgtcaaagtcctcatcacattctcgaagtagatcaaagtccagatctagttccaagtctgggcaccgaaagagagcatcaaaatcaccaagaaaaacagcttctcagttaagtgaaaataaaccagttaaaacagaacctttaagagcaaccatggcacaaaatgaaaatgtagtagtacaaccagttgtagcagaaaatattcctgtaataccactgagtgacagtccccccccttcaagatggaagcctggacagaaaccttggaagccctcttatgagcgaattcaggaaatgaaagctaaaacaacccatttgctacccatccaaagcacttacagtttagcaaatattaaagagactggtagctcatcatcctaccataaaagagaaaaaaattcggaaagtgatcagagcacttattcaaaatacagtgatagaagttcagaaagctcaccaaggtcaaggagcagatcttctaggagtagatcttattccagatcatatacaagatcacgtagtctagctagttcacattcaaggtctaggtctccatcatctagatctcattcacgaaataaatacagtgatcattcacagtgtagtagatcatcttcatatacttctattagcagtgatgatggaaggcgagctaagaggagacttagatccagtgggaaaaaaaatagcgtttcacataaaaagcatagcagcagctctgaaaagacacttcacagtaaatatgtcaaaggtagagacaggtcttcatgtgtgagaaagtatagcgagagcagatcatctttagattattcttcagacagtgagcagtcaagtgttcaggccacacagtcagcccaggaaaaagagaagcagggccaaatggaaagaacacataataaacaagaaaaaaacagaggtgaagaaaaatccaagtctgaacgggaatgccctcattcaaaaaaaagaactttgaaagagaatctttctgatcaccttagaaatggcagtaagcccaaaaggaagaattatgctggtagtaaatgggactctgagtcaaattcagaacgagatgtcactaaaaacagtaaaaatgactcccatccatcctctgacaaggaagaaggtgaggccacatccgattctgaatcagaggttagtgaaattcacatcaaagtcaaacccacaaccaagtcgtccacaaatacttcactgcctgatgataatggtgcttggaaatcaagcaaacagcgcacatcaacttctgactctgaggggtcctgttccaattcggaaaacaataggggaaagccacaaaagcacaaacatgggtcaaaggaaaatcttaaaagagaacacaccaaaaaagtgaaagagaaattgaaagggaaaaaagacaaaaagcataaggctccaaaacgaaagcaagcatttcactggcagcctccactagaatttggtgaagaggaggaggaggagattgatgacaagcaagttactcaggaatcaaaagagaaaaaagtttctgaaaacaatgaaaccataaaagataatattctaaaaactgagaaatccagtgaagaggacctttcaggtaaacatgatacagtgactgtttcatcagatcttgatcagtttactaaagatgatagtaaactcagtatttctcccacagctttaaatactgaggaaaatgtggcctgtttacaaaacattcagcacgttgaagaaagtgttcccaatggagtggaagatgtgcttcaaacagatgacaacatggagatctgcactcctgataggagttccccagcaaaagtagaggagacttcccctctaggaaatgcacggcttgataccccagatataaacattgttttgaagcaggatatggcaacggaacatcctcaagcagaggtagtaaaacaggaaagcagcatgtccgaaagtaaagtgttgggtgaagtggggaaacaggacagcagctctgctagcttggctagtgctggagaaagtaccgggaagaaggaggtggctgagaagagccagatcaacctcattgataagaaatggaagcccctgcaaggtgtggggaacctggcagcacctaatgctgccacatccagtgctgtggaagttaaggtgttgaccactgtgcctgaaatgaaaccacaaggcttgagaatagaaattaaaagcaaaaataaagttcggcctgggtctctctttgatgaagtaagaaagacagcacgcttaaaccgtagaccaagaaatcaggagagttcaagtgatgagcagacgcctagtcgggatgatgatagccagtccaggagtccaagtagatctcgaagtaaatctgaaaccaaatcaagacacagaacaaggtctgtctcctatagtcactcaagaagtcgatcgagaagttccacatcatcttatcgatcaagaagctactctagaagtcggagcagaggatggtacagcagaggccgaaccagaagccggagcagttcctaccggagttacaaaagtcacaggacgtccagcaggagcagatccaggagcagctcatatgatccccacagtcgatccaggtcctacacctacgatagctactatagcaggagtcggagtcgaagtagaagccagagaagtgacagttaccaccgaggcagaagttataatcggcggtccaggagttgtagatcttatggctctgacagtgaaagtgaccgaagttactctcatcaccggagccccagtgagagcagcagatacagttgaaaacgtccggatacaaattatatcttatttgtaaatatctggcaacttagcttaagaaatgtaatgacagtctgttgttctatttcaatatcagaggtgaatttcaaaaatagacacttcttaattgttactggttcatttacatgtggggagaagaatttaaaatacagatatgtctcctaaaaatatttttatgccacattttacagtagccaactatggaaatgaatttcattttcttgaatcaagaaatcgtgaaatttatctatgtataatttgcaatattattttaagtctatttcactctatcttacgtatcccttagaatacagattctttttgcctgtttttccagttttagcatatatgctgccaagcatagaactgtgaaggagaactgttaaaggcggccaaatatttatatactgattacatagagtcttgtacatatgtgctctaaaaacaaaccacccagaattgatactgttggtaaccaggagtataaggcagtggctctggggttcttaattcattcctaacttctttgatacttcacaggattaggaaagtggtcatcatacatcccacacagtctgtattacttcaggcttgtgggcaaggttaggaagaatcaatcagccttaactataaatacctgcactgtctctgaggacttactattttatgttctttttaatcaataccgatcagaagtttaggttataaaaacaattctacttcatgctttggtgcttggtaatttttggtgcgtctttaagcattactcttatatatcatatattaaaataccataaaaatgaaattcagacaaaatcactggcaccaaaaatggtttattctgagctgtcttcactttgactatttggggggcttctctcaagtacagatgtgggttggggtcccctggagcaggcaggattggcagtaagagatattggccactcaagtctactgtgtgtgtgtgcctctggaagagtgaagaatggacttcaaaagtaacatcaaaaatctaactgccaccatcctggagacattttgcagggctttcctttcaagtctttcaagtacaggatattaccacaacagcagctgaactgttgtaaccagcatgtttttcctatttccactgtgacctgcagctgactcaaagccttgcgtgacctgacccaggtgcaagagacaggggaagagggatagagggtatagcataaattacatattttcatggctttgggtggttcctccaaaaataattggacctgtaaaaactagtgtgtgtgtgtgtgtgtgtgtgtgtgtgtgtgtggtttttttttttaatctttactttgaatttgttccccaagtgtacttaatcaccttagtgccagtttaatccagttatgcagaagaaattcatattggttgcctgatgtagagctcagcaccaccctaccacaggccttgtctggtgtatttgggaagtggaaaagagccctcagttggagggagctgacaacccttggtggagggagggtgcccttgaatgtattaaaactatcacccaaagaaggtatgaaaacagggtaaggtggtcagttgtttgccaggtcaatagacagaaagtacattagaaaacaggacttaggccaaacaaacaatactggatactgaatacaaaacagtatgatttatattaaaggtttccaaaggttgcctgcaaaggagaatattactactagtcagcaggaaaaaaatgcattcagaacccaagcagaaactgccaaatgtaattaggttaagaaaagttacccttgggcagtgtattagttttctattgctgtgtgacaaattaccccaaatttagcagtttaaaaaacaatacccatagcagttctgtagctcatgagtctggcacagtgtggctggattctctgctcagggtcttaaaggctgaaataagggttggcaggacaacattccttcatggaggctctggggaagaatctgcttctaagttcattcaggttgttggcggaattcagttctttgctggctctcagctggaggcccctctctcacctcaaggctgcctgcattccttcttatgtggtcccctccagcttcaaaccagccttcctgctctttctcatgcttcatatctctctcccgtcctcctgttttaggggcatatgattagctcaagcccacagatatattttaaggttgattgtgcgatagaacataattgcaggagtactgtctcatctcatcatattcacgggttctggagattagctcattgaaagtgggaggggcattttcaaattctgcctaccacaggcaataactgcccatctcagctgtaggtggaatttttacccagaaaagataggccctagaagcctcatttcttttctccatggaaaaggacagccctctgctgcagcgttcaacttgtgtgtttactgacagagtgaactacagaaatagcttttcttcctaaaggggattgttctacattttgaagttattttttaataaaattgaattatgttgtgtattgtgcttcttaataggaaatgcattattggactgtttttgtaacatcctgtttattgcaaatagctagtatcgttcaaaaactgtataaaatacttttgtacatattagcaatgtctaatttgtatacacttcagttaaatttccctaaaacttgaaaggggaccttgtagaaattaaaatatatacttagtctaa

SEQ ID NO: 19652 - DNA, 560 bp, Homo sapiens
  source 1..560: mol_type = unassigned DNA
aggctggaggccagccaggtgaagagctcgcccgcatgcgtgcgcgctgcgtgggagccgcgaggcccggggcgggagggggcctcgtcttggcctcctgcgctgtcgcgacgggccggcgtgaggcaccgtggcgcggacttcgtctcagccccgccctcgcccctgccctcgcccccgccctcgcccctgccctgaccgcttttctccccctctctcccagctcttgccgccacctcggtcgcgatgggggcgcaggaccggccgcagtgccacttcgacatcgagatcaaccgggagccggttggtcgcattatgtttcagctcttctcagacatatgtccaaaaacatgcaaaaacttcctttgcttgtgctcaggagagaaaggccttgggaaaacaactgggaagaagttatgttataaaggttctacgttccatcgtgtggttaaaaactttatgattcagggtggggacttcagtgaaggtaatggaaaaggtggagaatcaatttatggtggatattttaaagagaatgtggtcttttgcaaaatgaaaag

SEQ ID NO: 19653 - DNA, 2683 bp, Homo sapiens
  source 1..2683: mol_type = unassigned DNA
gccgcggggatcgtcaggccggagccgcgcggccgagcgggcggcgggcggaggggagggcttggcggccgggaggctcgcggcgcccgggccggcagggtccgcccgggccggcagcgtccgcccggcggcgggaggagggagcggcgcagacaaagagcggcgcctgggcgggcgcagcgcggccaccgccccgggacccgcgccgctgccctccggctccgcgggcggcccacggcgagatttcatgtgttctttgtatacaagcgacgtcccagattataattctctgctgagatttgagttggatttgaggatttggagaatccctgcagctttgtaacttcagaggtgtaattagctgaaaacatcatcgttttgaagagttctgcgttttgccagtcacctctcaactgtgtgccaaagaaggactccatgaaagatgacagaagaagttattgtgatagccaagtgggactacaccgcccagcaggaccaggagctggacatcaagaagaacgagcggctgtggttgctggacgactccaagacgtggtggcgggtgaggaacgcggccaacaggacgggctatgtaccgtccaactacgtggagcggaagaacagcctgaagaagggctccctcgtgaagaacctgaaggacacactaggcctcggcaagacgcgcaggaagaccagcgcgcgggatgcgtcccccacgcccagcacggacgccgagtaccccgccaatggcagcggcgccgaccgcatctacgacctcaacatcccggccttcgtcaagttcgcctatgtggccgagcgggaggatgagttgtccctggtgaaggggtcgcgcgtcaccgtcatggagaagtgcagcgacggttggtggcggggcagctacaacgggcagatcggctggttcccctccaactacgtcttggaggaggtggacgaggcggctgcggagtccccaagcttcctgagcctgcgcaagggcgcctcgctgagcaatggccagggctcccgcgtgctgcatgtggtccagacgctgtaccccttcagctcagtcaccgaggaggagctcaacttcgagaagggggagaccatggaggtgattgagaagccggagaacgaccccgagtggtggaaatgcaaaaatgcccggggccaggtgggcctcgtccccaaaaactacgtggtggtcctcagtgacgggcctgccctgcaccctgcgcacgccccacagataagctacaccgggccctcgtccagcgggcgcttcgcgggcagagagtggtactacgggaacgtgacgcggcaccaggccgagtgcgccctcaacgagcggggcgtggagggcgacttcctcattagggacagcgagtcctcgcccagcgacttctccgtgtcccttaaagcgtcagggaagaacaaacacttcaaggtgcagctcgtggacaatgtctactgcattgggcagcggcgcttccacaccatggacgagctggtggaacactacaaaaaggcgcccatcttcaccagcgagcacggggagaagctctacctcgtcagggccctgcagtgacggcgccccggccccacactcgcctcccgggccccacggtggagctgcccgcccggccttgtggcagaggctcctcccgcggggacggccccgacggcttctctgcgagtctctctttatgttcaggtcgcttggtcggttcgtctcccatttgccatccaggcctcacacccacactcgagcccacccggccggccagctttagaggaggggaggagcagggcgagttcacattattccttttccatcggaagtggcgctcgtgcattcaactcgttcccgctcatggaacccctctttaaaaagacgcagggcacctgtgagcgcaggagcgagcctaaggccacccagcggcagcgcccgtgtcctgggcactcagcgtgctgggcagagcaggtgcgatggccccagtcctagcagccctcgcccatgtcctgtgcccttacatggctcccggactgtgcagggagccgatacgtttgctgatagcaatactggaaccaccgggtgcgatggcagtgaggagactgcccagtgcctttggggctgtgcttgcaataaagaatttcctggaaaggcagtctgcaaaagagggaaccggtgactcagaaagacagatgttttggtaatttaccccaaatgtgccatccacatagtgctttttcctcttgcccttcggcttgtttgaatctcacaattatgtatttaattctcaaagaaatatgtatctgtagccgtttgttgacactaatacagatgattaaggaaaacagctgatctttggggaagggagctaccaacactttatacacacacacacgtgcacacacacacacacacacactatatatatatatattatttacagggaaatttttcagggtttacaaaagagtatgtgattggtagtaagagacacacagaatgtttatgaagaaattgcattttctttttcctttacatttgaacttctttatagtttaaatataacgtcttgagatggcacattcctacgattgaagaaggggtcttgagatcccctaaacttgcatacccagttttttggatattgtaataaaaaaaagtattatgacaagg

SEQ ID NO: 19654 - DNA, 790 bp, Homo sapiens
  source 1..790: mol_type = unassigned DNA
ggagcttttgtgcccggcttcaggctctgcgccctgccccagatttacaggactctaacagccacctgaatgaaccaaagtttctcacaatcgctcggctctctcggtttttttcagggcgatttaatcaccgagtgcttttggaaaaatttgatatatttcatgtgttctttgtatacaagcgacgtcccagattataattctctgctgagatttgagttggatttgaggatttggagaatccctgcagctttgtaacttcagaggtgtaattagctgaaaacatcatcgttttgaagagttctgcgttttgccagtcacctctcaactgtgtgccaaagaaggactccatgaaagatgacagaagaagttattgtgatagccaagtgggactacaccgcccagcaggaccaggagctggacatcaagaagaacgagcggctgtggttgctggacgactccaagacgtggtggcgggtgaggaacgcggccaacaggacgggctatgtaccgtccaactacgtggagcggaagaacagcctgaagaagggctccctcgtgaagaacctgaaggacacactaggcctcggcaagacgcgcaggaagaccagcgcgcgggatgcgtcccccacgcccagcacggacgccgagtaccccgccaatggcagcggcgccgaccgcatctacgacctcaacatcccggccttcgtcaagttcgcctatgtggccgagcgggaggatgagttgtccctggtgaaggggtcgcgcgtcaccgtcatggagaagtgca

SEQ ID NO: 19655 - DNA, 2371 bp, Homo sapiens
  source 1..2371: mol_type = unassigned DNA
tggagtgaagtggtcgtttattggctggccctctgatatgaggtggtggtgaattggtgggcgtcagtgcagtaagtgagcgagccggacgtcgattgactggtcttcagaagcagaaggactccatgaaagatgacagaagaagttattgtgatagccaagtgggactacaccgcccagcaggaccaggagctggacatcaagaagaacgagcggctgtggttgctggacgactccaagacgtggtggcgggtgaggaacgcggccaacaggacgggctatgtaccgtccaactacgtggagcggaagaacagcctgaagaagggctccctcgtgaagaacctgaaggacacactaggcctcggcaagacgcgcaggaagaccagcgcgcgggatgcgtcccccacgcccagcacggacgccgagtaccccgccaatggcagcggcgccgaccgcatctacgacctcaacatcccggccttcgtcaagttcgcctatgtggccgagcgggaggatgagttgtccctggtgaaggggtcgcgcgtcaccgtcatggagaagtgcagcgacggttggtggcggggcagctacaacgggcagatcggctggttcccctccaactacgtcttggaggaggtggacgaggcggctgcggagtccccaagcttcctgagcctgcgcaagggcgcctcgctgagcaatggccagggctcccgcgtgctgcatgtggtccagacgctgtaccccttcagctcagtcaccgaggaggagctcaacttcgagaagggggagaccatggaggtgattgagaagccggagaacgaccccgagtggtggaaatgcaaaaatgcccggggccaggtgggcctcgtccccaaaaactacgtggtggtcctcagtgacgggcctgccctgcaccctgcgcacgccccacagataagctacaccgggccctcgtccagcgggcgcttcgcgggcagagagtggtactacgggaacgtgacgcggcaccaggccgagtgcgccctcaacgagcggggcgtggagggcgacttcctcattagggacagcgagtcctcgcccagcgacttctccgtgtcccttaaagcgtcagggaagaacaaacacttcaaggtgcagctcgtggacaatgtctactgcattgggcagcggcgcttccacaccatggacgagctggtggaacactacaaaaaggcgcccatcttcaccagcgagcacggggagaagctctacctcgtcagggccctgcagtgacggcgccccggccccacactcgcctcccgggccccacggtggagctgcccgcccggccttgtggcagaggctcctcccgcggggacggccccgacggcttctctgcgagtctctctttatgttcaggtcgcttggtcggttcgtctcccatttgccatccaggcctcacacccacactcgagcccacccggccggccagctttagaggaggggaggagcagggcgagttcacattattccttttccatcggaagtggcgctcgtgcattcaactcgttcccgctcatggaacccctctttaaaaagacgcagggcacctgtgagcgcaggagcgagcctaaggccacccagcggcagcgcccgtgtcctgggcactcagcgtgctgggcagagcaggtgcgatggccccagtcctagcagccctcgcccatgtcctgtgcccttacatggctcccggactgtgcagggagccgatacgtttgctgatagcaatactggaaccaccgggtgcgatggcagtgaggagactgcccagtgcctttggggctgtgcttgcaataaagaatttcctggaaaggcagtctgcaaaagagggaaccggtgactcagaaagacagatgttttggtaatttaccccaaatgtgccatccacatagtgctttttcctcttgcccttcggcttgtttgaatctcacaattatgtatttaattctcaaagaaatatgtatctgtagccgtttgttgacactaatacagatgattaaggaaaacagctgatctttggggaagggagctaccaacactttatacacacacacacgtgcacacacacacacacacacactatatatatatatattatttacagggaaatttttcagggtttacaaaagagtatgtgattggtagtaagagacacacagaatgtttatgaagaaattgcattttctttttcctttacatttgaacttctttatagtttaaatataacgtcttgagatggcacattcctacgattgaagaaggggtcttgagatcccctaaacttgcatacccagttttttggatattgtaataaaaaaaagtattatgacaa

SEQ ID NO: 19656 - DNA, 494 bp, Homo sapiens
  source 1..494: mol_type = unassigned DNA
tggtgtgacttagtttttgattgctggatttcactggagtgaagtggtcgtttattggctggccctctgatatgaggtggtggtgaattggtgggcgtcagtgcagtaagtgagcgagccggacgtcgattgactggtcttcagaagcaggactccatgaaagatgacagaagaagttattgtgatagccaagtgggactacaccgcccagcaggaccaggagctggacatcaagaagaacgagcggctgtggttgctggacgactccaagacgtggtggcgggtgaggaacgcggccaacaggacgggctatgtaccgtccaactacgtggagcggaagaacagcctgaagaagggctccctcgtgaagaacctgaaggacacactaggcctcggcaagacgcgcaggaagaccagcgcgcgggatgcgtcccccacgcccagcacggacgccgagtaccccgccaatggcagcggcgccgaccgcatctacg

SEQ ID NO: 19657 - DNA, 1795 bp, Homo sapiens
  source 1..1795: mol_type = unassigned DNA
ctgggcgggcgcagcgcggccaccgccccgggacccgcgccgctgccctccggctccgcgggcggcccacggcgagatttcatgtgttctttgtatacaagcgacgtcccagattataattctctgctgagatttgagttggatttgaggatttggagaatccctgcagctttgtaacttcagaggtgtaattagctgaaaacatcatcgttttgaagagttctgcgttttgccagtcacctctcaactgtgtgccaaagaaggactccatgaaagatgacagaagaagttattgtgatagccaagtgggactacaccgcccagcaggaccaggagctggacatcaagaagaacgagcggctgtggttgctggacgactccaagacgtggtggcgggtgaggaacgcggccaacaggacgggctatgtaccgtccaactacgtggagcggaagaacagcctgaagaagggctccctcgtgaagaacctgaaggacacactagcccagcgacttctccgtgtcccttaaagcgtcagggaagaacaaacacttcaaggtgcagctcgtggacaatgtctactgcattgggcagcggcgcttccacaccatggacgagctggtggaacactacaaaaaggcgcccatcttcaccagcgagcacggggagaagctctacctcgtcagggccctgcagtgacggcgccccggccccacactcgcctcccgggccccacggtggagctgcccgcccggccttgtggcagaggctcctcccgcggggacggccccgacggcttctctgcgagtctctctttatgttcaggtcgcttggtcggttcgtctcccatttgccatccaggcctcacacccacactcgagcccacccggccggccagctttagaggaggggaggagcagggcgagttcacattattccttttccatcggaagtggcgctcgtgcattcaactcgttcccgctcatggaacccctctttaaaaagacgcagggcacctgtgagcgcaggagcgagcctaaggccacccagcggcagcgcccgtgtcctgggcactcagcgtgctgggcagagcaggtgcgatggccccagtcctagcagccctcgcccatgtcctgtgcccttacatggctcccggactgtgcagggagccgatacgtttgctgatagcaatactggaaccaccgggtgcgatggcagtgaggagactgcccagtgcctttggggctgtgcttgcaataaagaatttcctggaaaggcagtctgcaaaagagggaaccggtgactcagaaagacagatgttttggtaatttaccccaaatgtgccatccacatagtgctttttcctcttgcccttcggcttgtttgaatctcacaattatgtatttaattctcaaagaaatatgtatctgtagccgtttgttgacactaatacagatgattaaggaaaacagctgatctttggggaagggagctaccaacactttatacacacacacacgtgcacacacacacacacacacactatatatatatatattatttacagggaaatttttcagggtttacaaaagagtatgtgattggtagtaagagacacacagaatgtttatgaagaaattgcattttctttttcctttacatttgaacttctttatagtttaaatataacgtcttgagatggcacattcctacgattgaagaaggggtcttgagatcccctaaacttgcatacccagttttttggatattgtaataaaaaaaagtattatgacaagg

SEQ ID NO: 19658 - DNA, 490 bp, Homo sapiens
  source 1..490: mol_type = unassigned DNA
tcatcgttttgaagagttctgcgttttgccagtcacctctcaactgtgtgccaaaggactccatgaaagatgacagaagaagttattgtgatagccaagtgggactacaccgcccagcaggaccaggagctggacatcaagaagaacgagcggctgtggttgctggacgactccaagacgtggtggcgggtgaggaacgcggccaacaggacgggctatgtaccgtccaactacgtggagcggaagaacagcctgaagaagggctccctcgtgaagaacctgaaggacacactagcccagcgacttctccgtgtcccttaaagcgtcagggaagaacaaacacttcaaggtgcagctcgtggacaatgtctactgcattgggcagcggcgcttccacaccatggacgagctggtggaacactacaaaaaggcgcccatcttcaccagcgagcacggggagaagctctacctcgtcagggccctgcagtga

SEQ ID NO: 19659 - DNA, 2989 bp, Homo sapiens
  source 1..2989: mol_type = unassigned DNA
gcgcgcgcctgcgtagtgtgtcacggggcgggacaaccgcggcgcggctcggcgctcccggcctggcgttgtggcgccgcagcccttgccaccttccctgcacctgccctgcccggcctcatgtaccgcgcgctgtacgcgttccgctcggcggagcccaacgcgctggcgttcgccgcgggcgagaccttcctggtgctagagcgaagcagcgcgcactggtggctggccgcgcgggcgcgcagtggtgagacgggctacgtgccgccagcctacctgcgccgcctgcagggcctggagcaggatgtcctccaggccattgaccgggccatcgaggctgtacacaacacagccatgcgggatggtggcaagtacagcctggaacagcgtggagtcctccagaagctgatccaccaccggaaagagaccctgtcacgcagaggcccttcagcctccagtgttgcagttatgacctcatcaaccagtgaccaccacttggatgctgctgcagccaggcagcccaatggggtgtgtcgagctgggttcgagcggcagcacagcctacccagttctgagcatcttggggcagatggaggcctctaccagatcccacttccatcttcccagatcccaccacagcctcgccgagcagcacccaccacaccgcccccaccagtgaagcgccgagaccgcgaggccctgatggcctctgggagtggtggccacaacaccatgccctccgggggtaactctgtgtccagcggctcctcagtcagcagcacctccctggacacgctctataccagctccagcccatctgaaccaggctccagctgctcacccacacccccacctgtgccccgccgaggcacccacaccaccgtgtcccaagtccagccccctccctccaaggcatcagcacctgaaccccctgcagaagaagaagtggcaactggtacaacctcagcctctgatgacctggaagccctgggtacactgagcctggggaccacagaggagaaggcagcagctgaggcggctgtgcccaggaccattggggccgagctgatggagctggtgcggagaaacactggcctgagccacgaattatgccgggtggccatcggcatcatagtgggtcacatccaggcctcggtgccggccagctcaccagtcatggagcaggtcctcctctcactcgtagagggcaaggacctcagcatggccctgccctcagggcaggtctgccacgaccagcagaggctggaggtgatctttgcagacctggctcgccggaaggacgacgcccagcagcgcagttgggcactatatgaggatgagggtgtcatccgctgctacctagaggagctgctgcatattctgactgatgcagaccctgaagtttgcaagaaaatgtgcaagagaaacgagttcgagtctgtcctggccttggtggcctattaccaaatggaacaccgagcatcactgcggctgctgctcctcaagtgctttggcgccatgtgcagcctggatgcagccatcatctccacgcttgtgtcatccgtgctgcctgtagagctggcgagggacatgcagacagacacgcaggaccaccagaaactctgttactctgccctcatcctggccatggtcttctccatgggagaggcagtgccctatgcacactatgagcacctgggcacgcctttcgcccagttcctactgaacatcgtcgaggatgggctgcccttggacaccacagagcagctgccggacctctgcgtgaacctgcttctggctctcaacctgcacctgccagctgctgaccagaatgtcatcatggctgccctgagcaaacacgccaatgtcaagatcttctccgagaagctgttgttgctcctgaacagaggggatgaccctgtgcgcatcttcaaacatgagccacagccaccacactctgtcctcaagttcctgcaggacgtgtttggcagcccggccacagctgccatcttctaccacacagacatgatggctctcattgacatcactgtgcggcacatcgcagacctgtcaccaggagacaagctgcgcatggagtacctctccctgatgcatgctatagtccgcaccacaccctacctgcagcaccgccaccggctacccgacctgcaggccatactgcgacgcatcctgaatgaggaggagacctcaccccagtgccagatggaccgcatgattgtccgagagatgtgcaaggaattcctggtgctgggggaggctcccagctagcaccttgctgtcctcccttccctgcagctccagtcagtgtgcaggggactcaggggcttggccctaagaatgttttgcactgacagtgggaggggataaggtggcagaaggaacctgagcaggacccccacctgaagtagaacttaagagaggggccaagtgtaggattggggaccatggtctgggagctgttctggggcagggggaatatgcaagctaaagcccctctataccctggtaggcttcctcttcagcatgcccccctcttcaccccacacccatgtgtacactcagagtcctgctgccgctccaggctggaccagacccccatccccacccctcctggtctgtatcctgggcctcagcaagccatgcccctggggtgaggggaggcatctcccaccagctctattctttgccttagctttgcagtgagtgctgctcatgtcctcccctccacccgcacatgggggtcgctgcccttcactcctacccccagaggccttggccaagctgctgctttgaaagcgggatcttggagacaggccatccatcctggagcctcatggaacaggatgatggcactgagaaagccaatgaccgaatctcttttctctgtaaaaatgtagactgaaaagccatgtgtattttcctatgtgctgtagctctcctttggaaataaatcacaggcatctggaaa

SEQ ID NO: 19660 - DNA, 2263 bp, Homo sapiens
  source 1..2263: mol_type = unassigned DNA
ggcgggacaaccgcggcgcggctcggcgctcccggcctggcgttgtggcgccgcagcccttgccaccttccctgcacctgccctgcccggcctcatgtaccgcgcgctgtacgcgttccgctcggcggagcccaacgcgctggcgttcgccgcgggcgagaccttcctggtgctagagcgaagcagcgcgcactggtggctggccgcgcgggcgcgcagtggtgagacgggctacgtgccgccagcctacctgcgccgcctgcagggcctggagcaggatgtcctccaggccattgaccgggccatcgaggctgtacacaacacagccatgcgggatggtggcaagtacagcctggaacagcgtggagtcctccagaagctgatccaccaccggaaagagaccctgtcacgcagaggcccttcagcctccagtgttgcagttatgacctcatcaaccagtgaccaccacttggatgctgctgcagccaggcagcccaatggggtgtgtcgagctgggttcgagcggcagcacagcctacccagttctgagcatcttggggcagatggaggcctctaccagatcccacttccatcttcccagatcccaccacagcctcgccgagcagcacccaccacaccgcccccaccagtgaagcgccgagaccgcgaggccctgatggcctctgggagtggtggccacaacaccatgccctccgggggtaactctgtgtccagcggctcctcagtcagcagcacctccctggacacgctctataccagctccagcccatctgaaccaggctccagctgctcacccacacccccacctgtgccccgccgaggcacccacaccaccgtgtcccaagtccagccccctccctccaaggcatcagcacctgaaccccctgcagaagaagaagtggcaactggtacaacctcagcctctgatgacctggaagccctgggtacactgagcctggggaccacagaggagaaggcagcagctgaggcggctgtgcccaggaccattggggccgagctgatggagctggtgcggagaaacactggcctgagccacgaattatgccgggtggccatcggcatcatagtgggtcacatccaggcctcggtgccggccagctcaccagtcatggagcaggtcctcctctcactcgtagagggcaaggacctcagcatggccctgccctcagggcaggtctgccacgaccagcagaggctggaggtgatctttgcagacctggctcgccggaaggacgacgcccagcagcgcagttgggcactatatgaggatgagggtgtcatccgctgctacctagaggagctgctgcatattctgactgatgcagaccctgaagtttgcaagaaaatgtgcaagagaaacgagttcgagtctgtcctggccttggtggcctattaccaaatggaacaccgagcatcactgcggctgctgctcctcaagtgctttggcgccatgtgcagcctggatgcagccatcatctccacgcttgtgtcatccgtgctgcctgtagagctggcgagggacatgcagacagacacgcaggaccaccagaaactctgttactctgccctcatcctggccatggtcttctccatgggagaggcagtgccctatgcacactatgagcacctgggcacgcctttcgcccagttcctactgaacatcgtcgaggatgggctgcccttggacaccacagagcagctgccggacctctgcgtgaacctgcttctggctctcaacctgcacctgccagctgctgaccagaatgtcatcatggctgccctgagcaaacacgccaatgtcaagatcttctccgagaagctgttgttgctcctgaacagaggggatgaccctgtgcgcatcttcaaacatgagccacagccaccacactctgtcctcaagttcctgcaggacgtgtttggcagcccggccacagctgccatcttctaccacacagacatgatggctctcattgacatcactgtgcggcacatcgcagacctgtcaccaggagacaagggaccgttcggggcgggccagaggccttggccaggagttcctcgcctgttagaaccaggatccaccccatcgcgggagccgcaccctgtggagcgttctggggtcccggccctgacctcttcctgggcttcgggatgcccgcgtcctctgcacccggcgctgcagctcgttatcgattccgcctttggaggccggtccgtatag

SEQ ID NO: 19661 - DNA, 2925 bp, Homo sapiens
  source 1..2925: mol_type = unassigned DNA
gcggctcggcgctcccggcctggcgttgtggcgccgcagcccttgccaccttccctgcacctgccctgcccggcctcatgtaccgcgcgctgtacgcgttccgctcggcggagcccaacgcgctggcgttcgccgcgggcgagaccttcctggtgctagagcgaagcagcgcgcactggtggctggccgcgcgggcgcgcagtggtgagacgggctacgtgccgccagcctacctgcgccgcctgcagggcctggagcaggatgtcctccaggccattgaccgggccatcgaggctgtacacaacacagccatgcgggatggtggcaagtacagcctggaacagcgtggagtcctccagaagctgatccaccaccggaaagagaccctgtcacgcagaggcccttcagcctccagtgttgcagttatgacctcatcaaccagtgaccaccacttggatgctgctgcagccaggcagcccaatggggtgtgtcgagctgggttcgagcggcagcacagcctacccagttctgagcatcttggggcagatggaggcctctaccagatcccaccacagcctcgccgagcagcacccaccacaccgcccccaccagtgaagcgccgagaccgcgaggccctgatggcctctgggagtggtggccacaacaccatgccctccgggggtaactctgtgtccagcggctcctcagtcagcagcacctccctggacacgctctataccagctccagcccatctgaaccaggctccagctgctcacccacacccccacctgtgccccgccgaggcacccacaccaccgtgtcccaagtccagccccctccctccaaggcatcagcacctgaaccccctgcagaagaagaagtggcaactggtacaacctcagcctctgatgacctggaagccctgggtacactgagcctggggaccacagaggagaaggcagcagctgaggcggctgtgcccaggaccattggggccgagctgatggagctggtgcggagaaacactggcctgagccacgaattatgccgggtggccatcggcatcatagtgggtcacatccaggcctcggtgccggccagctcaccagtcatggagcaggtcctcctctcactcgtagagggcaaggacctcagcatggccctgccctcagggcaggtctgccacgaccagcagaggctggaggtgatctttgcagacctggctcgccggaaggacgacgcccagcagcgcagttgggcactatatgaggatgagggtgtcatccgctgctacctagaggagctgctgcatattctgactgatgcagaccctgaagtttgcaagaaaatgtgcaagagaaacgagttcgagtctgtcctggccttggtggcctattaccaaatggaacaccgagcatcactgcggctgctgctcctcaagtgctttggcgccatgtgcagcctggatgcagccatcatctccacgcttgtgtcatccgtgctgcctgtagagctggcgagggacatgcagacagacacgcaggaccaccagaaactctgttactctgccctcatcctggccatggtcttctccatgggagaggcagtgccctatgcacactatgagcacctgggcacgcctttcgcccagttcctactgaacatcgtcgaggatgggctgcccttggacaccacagagcagctgccggacctctgcgtgaacctgcttctggctctcaacctgcacctgccagctgctgaccagaatgtcatcatggctgccctgagcaaacacgccaatgtcaagatcttctccgagaagctgttgttgctcctgaacagaggggatgaccctgtgcgcatcttcaaacatgagccacagccaccacactctgtcctcaagttcctgcaggacgtgtttggcagcccggccacagctgccatcttctaccacacagacatgatggctctcattgacatcactgtgcggcacatcgcagacctgtcaccaggagacaagctgcgcatggagtacctctccctgatgcatgctatagtccgcaccacaccctacctgcagcaccgccaccggctacccgacctgcaggccatactgcgacgcatcctgaatgaggaggagacctcaccccagtgccagatggaccgcatgattgtccgagagatgtgcaaggaattcctggtgctgggggaggctcccagctagcaccttgctgtcctcccttccctgcagctccagtcagtgtgcaggggactcaggggcttggccctaagaatgttttgcactgacagtgggaggggataaggtggcagaaggaacctgagcaggacccccacctgaagtagaacttaagagaggggccaagtgtaggattggggaccatggtctgggagctgttctggggcagggggaatatgcaagctaaagcccctctataccctggtaggcttcctcttcagcatgcccccctcttcaccccacacccatgtgtacactcagagtcctgctgccgctccaggctggaccagacccccatccccacccctcctggtctgtatcctgggcctcagcaagccatgcccctggggtgaggggaggcatctcccaccagctctattctttgccttagctttgcagtgagtgctgctcatgtcctcccctccacccgcacatgggggtcgctgcccttcactcctacccccagaggccttggccaagctgctgctttgaaagcgggatcttggagacaggccatccatcctggagcctcatggaacaggatgatggcactgagaaagccaatgaccgaatctcttttctctgtaaaaatgtagactgaaaagccatgtgtattttcctatgtgctgtagctctcctttggaaataaatcacaggcatctggaaa

SEQ ID NO: 19662 - DNA, 4989 bp, Homo sapiens
  source 1..4989: mol_type = unassigned DNA
gcggcgagcgcctgtcaagcagtgggaggaaaaagcgcttggagccaccagcccactcttaagcgaaactcgcctggaaaacaccccgcctcccagcagagtttctgccggtttctttagaagggtggtgcggaaaagcaacttttgggaacttgaaggagtggggtgtggggcgaagtggaaagagcacacaacgcgaccccactcagtccccgcttgggactcccatcccggcatcaggcgtagtgggcggtccgggccagggccagggccagagcggcggcggcgaggccatgccgagggcccgtcggccgcagttccccgtccggcctcgcgggggcgccggcgctgccgatcaggtgaccgagggcccgtccggggctgcgggaagcggcctcgttctcagccgccggagacgccgccgccgccgccgccgccgccacacctagtggagcagccggggaaggcggctcgttgggggctggggcggagagcgccgggggtgggggcggaagggcggcgggcggaaggcaggaggctgccggggcgcgggctgctgcgggagaaggggctccgaggagtccgccgcggctcgctctgtcgccggcgcgggattggggcgcgagggccatgggcgcgctctcctaaggcggaggtcgcgggcgggaggggaggaggcccgagagaggctgctgcgaaggccgcgggcccgtgactgggcgcgaggcggccggcggcggcggcggcaccagcaccaccatgtcgcgctcagtgctgcagcccagtcagcagaagctggcggagaagctcaccatcctcaacgaccggggcgtcggcatgctcacccgcctctacaacatcaagaagcaaggacaagtttggaaggcatgtggagaccccaaggcaaaaccatcctatcttatcgacaaaaacctggaatctgctgtgaaattcatagtcagaaaattccctgctgtagaaacccgcaacaacaatcaacagcttgcacaactacagaaagaaaaatcagagattctgaaaaatctggcattatattacttcacatttgtagatgttatggaatttaaggaccatgtttgtgaattgctgaatactattgacgtttgccaagtcttctttgatattactgtaaactttgatttaacaaagaactacttagatttaattataacctatacaacactaatgatactgctgtctcgaattgaagaaaggaaggcaatcattggattatacaactatgcccatgaaatgactcatggagcaagtgacagagaatacccacgccttggccagatgattgtggattatgaaaaccctttaaagaagatgatggaagaatttgtaccccatagcaagtctctttcagatgcactaatttctcttcaaatggtatatcctcgaaggaatctttcagctgaccagtggagaaatgcccagttattgagcctcatcagtgcacctagtacaatgcttaatccagcacagtccgacactatgccttgtgaatacctctctttggatgcaatggaaaagtggattatctttggctttattttgtgccatgggatcctaaatactgacgctacagcactgaacctttggaaactagctcttcaaagtagctcttgcctctctctctttcgggatgaagttttccacattcacaaagctgcagaagacttatttgtaaacatacgaggctataataaacgtattaatgacataagagaatgcaaggaggcagccgtgtcacatgctggttcaatgcacagagaaagacgcaagtttttaagatctgcactgaaggaattggctactgtcctctctgatcaacctggattgctaggtcccaaggcactttttgtttttatggcattatcctttgcccgtgatgaaatcatctggctacttcgtcatgcagataacatgccaaagaagagtgcagacgactttatagataagcacattgctgaattaatattttacatggaagaacttagagcacatgtgaggaaatacggacctgtaatgcagaggtattacgtgcagtacctttctggctttgatgctgttgtcctcaatgaactcgtgcagaatctttctgtttgccctgaagatgaatcaatcatcatgtcctcttttgttaacactatgacttccctaagtgtaaaacaagttgaagatggggaagtatttgatttcagaggaatgagattagattggtttaggttacaggcatatactagtgtctcaaaggcttcacttggccttgcagatcacagagaacttggaaagatgatgaatacaataatttttcatacaaaaatggtagattccttggtggaaatgttggtggaaacatcagatctctccatattttgtttttatagtcgtgcttttgagaagatgtttcaacagtgtttggagttaccctctcaatcaagatactcaattgcatttccactactttgcactcattttatgagttgcacgcatgaactatgtccagaagagcgacatcatattggagatcgcagtctttccttatgtaatatgttcctagatgaaatggccaaacaagctcgaaatctcatcactgatatttgcacagaacagtgtacccttagtgaccagttgctacccaagcattgtgccaaaactatcagtcaagcagtgaataagaaatcaaaaaagcagactggtaagaaaggggaacctgaaagggagaaaccaggtgttgagagcatgaggaaaaacaggctggttgtgaccaaccttgataaattgcacactgcactttctgagttatgcttctctataaattatgtaccaaacatggtggtatgggaacatacctttaccccacgagaatatttgacttctcatctggaaatacgctttaccaagtcaattgttgggatgactatgtataatcaagccacacaggaaattgcaaaaccttcagaacttctaacaagtgtaagagcatacatgaccgtactccagtcaatagaaaactatgtgcagattgatattacaagagtatttaataatgtgcttcttcaacaaacacaacatttagacagtcatggagagccaaccattacaagtctatacacaaattggtatttggaaactttgttacgacaagtcagcaatggccatatagcatattttcctgcaatgaaagcgtttgtgaacttacctacagaaaatgaattaacattcaatgcagaggaatattctgacatatcagaaatgaggtcattatcagaactactaggcccatatggtatgaagtttctaagtgaaagccttatgtggcatatttcatcacaagttgctgaacttaagaaacttgtggtggagaatgttgatgtgttaacacaaatgaggaccagctttgacaaaccagaccagatggctgcactgtttaaaagattatcatctgttgacagtgtcttgaagaggatgacaataattggtgtaattttatccttccgatcattggcacaagaagcacttagagatgtcttatcctaccacattccttttcttgtaagttcaattgaagattttaaggatcacattccaagggaaactgatatgaaggttgcaatgaatgtgtatgagttatcatcagctgccggattaccttgtgagattgatcctgcattggtcgtagctctttcttcacaaaaatcggaaaacattagtccagaagaagagtataaaattgcctgccttctcatggtgtttgtggcagtttctttgccaacactggccagtaatgtgatgtctcagtacagccctgctatagaagggcattgcaacaacatacattgcttggccaaagccatcaaccagattgctgcagctttgtttacaattcacaaaggaagcattgaagaccgtcttaaagaatttctggcgcttgcatcctccagtctactgaaaattggccaggagacagataaaactacaacaagaaatagagaatctgtttatttactgctagatatgattgtacaagaatctccattccttacaatggatcttttggaatcttgttttccttatgtcttgctgagaaatgcataccatgctgtctacaaacaaagtgttacatcttctgcataaaattacctacttaatcaagataagcacgcatttttgttgccttggttttacctgtagactgtggaactattttaccttaagacctgaaaaagttttgtggattataaatttctttcatacggttgtattttctgatcattggtttcttaatatggttgtactacagtatacttggttgatttaggttgcacattcactgaattcactgagattattcctataattttaaagtatcatttatttgaaaaacatacattatcaacatgtttttgatatttgataatgaaaaaaatctttgcttgtttatttctgaaaaagaactgtatttagtgattattttagatagtgatattatagtattcatctgtgtgtaaattatttcatatagggaagagttctgatctgtacctatggttcttattgaaaacaacattggatgtgcatttctgtgatgttatgaatacatttctactttattttgaaacatttgccaaactaaatactgtaacactgtataacatttaaaaatgttaaagaactgcttagtattagaagcagatcatttcccaaaattctaagagcagcagcatatgttgttgcttgtataaagcctagcgataatttttagactaacttccatggtgccctgttggcattagcactaccattgtaccctgctgtataataaacaatcttagacatttatcaactgttgatacaaatgttagtccctaaccactttttatatatgttttaaatttttgaaattcaagtgtacctgccataacataaaataaacactagactgtatcacacttcgattga

SEQ ID NO: 19663 - DNA, 4585 bp, Homo sapiens
  source 1..4585: mol_type = unassigned DNA
ggaagcggcctcgttctcagccgccggagacgccgccgccgccgccgccgccgccacacctagtggagcagccggggaaggcggctcgttgggggctggggcggagagcgccgggggtgggggcggaagggcggcgggcggaaggcaggaggctgccggggcgcgggctgctgcgggagaaggggctccgaggagtccgccgcggctcgctctgtcgccggcgcgggattggggcgcgagggccatgggcgcgctctcctaaggcggaggtcgcgggcgggaggggaggaggcccgagagaggctgctgcgaaggccgcgggcccgtgactgggcgcgaggcggccggcggcggcggcggcaccagcaccaccatgtcgcgctcagtgctgcagcccagtcagcagaagctggcggagaagctcaccatcctcaacgaccggggcgtcggcatgctcacccgcctctacaacatcaagaaggcatgtggagaccccaaggcaaaaccatcctatcttatcgacaaaaacctggaatctgctgtgaaattcatagtcagaaaattccctgctgtagaaacccgcaacaacaatcaacagcttgcacaactacagaaagaaaaatcagagattctgaaaaatctggcattatattacttcacatttgtagatgttatggaatttaaggaccatgtttgtgaattgctgaatactattgacgtttgccaagtcttctttgatattactgtaaactttgatttaacaaagaactacttagatttaattataacctatacaacactaatgatactgctgtctcgaattgaagaaaggaaggcaatcattggattatacaactatgcccatgaaatgactcatggagcaagtgacagagaatacccacgccttggccagatgattgtggattatgaaaaccctttaaagaagatgatggaagaatttgtaccccatagcaagtctctttcagatgcactaatttctcttcaaatggtatatcctcgaaggaatctttcagctgaccagtggagaaatgcccagttattgagcctcatcagtgcacctagtacaatgcttaatccagcacagtccgacactatgccttgtgaatacctctctttggatgcaatggaaaagtggattatctttggctttattttgtgccatgggatcctaaatactgacgctacagcactgaacctttggaaactagctcttcaaagtagctcttgcctctctctctttcgggatgaagttttccacattcacaaagctgcagaagacttatttgtaaacatacgaggctataataaacgtattaatgacataagagaatgcaaggaggcagccgtgtcacatgctggttcaatgcacagagaaagacgcaagtttttaagatctgcactgaaggaattggctactgtcctctctgatcaacctggattgctaggtcccaaggcactttttgtttttatggcattatcctttgcccgtgatgaaatcatctggctacttcgtcatgcagataacatgccaaagaagagtgcagacgactttatagataagcacattgctgaattaatattttacatggaagaacttagagcacatgtgaggaaatacggacctgtaatgcagaggtattacgtgcagtacctttctggctttgatgctgttgtcctcaatgaactcgtgcagaatctttctgtttgccctgaagatgaatcaatcatcatgtcctcttttgttaacactatgacttccctaagtgtaaaacaagttgaagatggggaagtatttgatttcagaggaatgagattagattggtttaggttacaggcatatactagtgtctcaaaggcttcacttggccttgcagatcacagagaacttggaaagatgatgaatacaataatttttcatacaaaaatggtagattccttggtggaaatgttggtggaaacatcagatctctccatattttgtttttatagtcgtgcttttgagaagatgtttcaacagtgtttggagttaccctctcaatcaagatactcaattgcatttccactactttgcactcattttatgagttgcacgcatgaactatgtccagaagagcgacatcatattggagatcgcagtctttccttatgtaatatgttcctagatgaaatggccaaacaagctcgaaatctcatcactgatatttgcacagaacagtgtacccttagtgaccagttgctacccaagcattgtgccaaaactatcagtcaagcagtgaataagaaatcaaaaaagcagactggtaagaaaggggaacctgaaagggagaaaccaggtgttgagagcatgaggaaaaacaggctggttgtgaccaaccttgataaattgcacactgcactttctgagttatgcttctctataaattatgtaccaaacatggtggtatgggaacatacctttaccccacgagaatatttgacttctcatctggaaatacgctttaccaagtcaattgttgggatgactatgtataatcaagccacacaggaaattgcaaaaccttcagaacttctaacaagtgtaagagcatacatgaccgtactccagtcaatagaaaactatgtgcagattgatattacaagagtatttaataatgtgcttcttcaacaaacacaacatttagacagtcatggagagccaaccattacaagtctatacacaaattggtatttggaaactttgttacgacaagtcagcaatggccatatagcatattttcctgcaatgaaagcgtttgtgaacttacctacagaaaatgaattaacattcaatgcagaggaatattctgacatatcagaaatgaggtcattatcagaactactaggcccatatggtatgaagtttctaagtgaaagccttatgtggcatatttcatcacaagttgctgaacttaagaaacttgtggtggagaatgttgatgtgttaacacaaatgaggaccagctttgacaaaccagaccagatggctgcactgtttaaaagattatcatctgttgacagtgtcttgaagaggatgacaataattggtgtaattttatccttccgatcattggcacaagaagcacttagagatgtcttatcctaccacattccttttcttgtaagttcaattgaagattttaaggatcacattccaagggaaactgatatgaaggttgcaatgaatgtgtatgagttatcatcagctgccggattaccttgtgagattgatcctgcattggtcgtagctctttcttcacaaaaatcggaaaacattagtccagaagaagagtataaaattgcctgccttctcatggtgtttgtggcagtttctttgccaacactggccagtaatgtgatgtctcagtacagccctgctatagaagggcattgcaacaacatacattgcttggccaaagccatcaaccagattgctgcagctttgtttacaattcacaaaggaagcattgaagaccgtcttaaagaatttctggcgcttgcatcctccagtctactgaaaattggccaggagacagataaaactacaacaagaaatagagaatctgtttatttactgctagatatgattgtacaagaatctccattccttacaatggatcttttggaatcttgttttccttatgtcttgctgagaaatgcataccatgctgtctacaaacaaagtgttacatcttctgcataaaattacctacttaatcaagataagcacgcatttttgttgccttggttttacctgtagactgtggaactattttaccttaagacctgaaaaagttttgtggattataaatttctttcatacggttgtattttctgatcattggtttcttaatatggttgtactacagtatacttggttgatttaggttgcacattcactgaattcactgagattattcctataattttaaagtatcatttatttgaaaaacatacattatcaacatgtttttgatatttgataatgaaaaaaatctttgcttgtttatttctgaaaaagaactgtatttagtgattattttagatagtgatattatagtattcatctgtgtgtaaattatttcatatagggaagagttctgatctgtacctatggttcttattgaaaacaacattggatgtgcatttctgtgatgttatgaatacatttctactttattttgaaacatttgccaaactaaatactgtaacactgtataacatttaaaaatgttaaagaactgcttagtattagaagcagatcatttcccaaaattctaagagcagcagcatatgttgttgcttgtataaagcctagcgataatttttagactaacttccatggtgccctgttggcattagcactaccattgtaccctgctgtataataaacaatcttagacatttatcaactgttgatacaaatgttagtccctaaccactttttatatatgttttaaatttttgaaattcaagtgtacctgccataacataaaataaacactagactgtatcacacttcgattga

SEQ ID NO: 19664 - DNA, 8030 bp, Homo sapiens
  source 1..8030: mol_type = unassigned DNA
aacagtaatgccatttttcctggccctgggattaggtgcagccgtgttaaggagaggacattcgagagggcgtggcgaagtgaagaggaacctcacgccactgcctggagctccgccttagccccgtgggccccacggagtgagcggcatgcagcacccccgggcctgtccagtgtcctctggcctgctgccctgcacccccagaaggccctgacgccctggggcacttctgctctgcacaggaccacgcgggggtttgccatggtgacataaaggggcgcggaggaaggaaggagcgtgaccagcctgtggactgcgcccctggctgggaggaaggactgggggcccagatcctccactcccagtgccccacaagggcgtcgcttcctaagtctctgtgaatttgttggtcagtggacgattctcgtgtctcctcctgtgtggggccttggggtagccagggcaggccgggcctccggtggccaaggtctcggaggccaggatgcctgccctggcatgcctccggaggctgtgtcggcacgtgtccccgcaggctgtccttttcctgctgttcatcttctgcctgttcagcgttttcatctcggcctactacctatatggctggaagcgaggcctggagccctcggcggatgcccccgagcctgactgcggggacccgccgcctgtggcccccagtcgcctgctgccactcaagcctgtgcaggcagccaccccttcccgcacagacccgttggtgctggtctttgtggagagcctctactcgcaactgggccaggaggtggtggccatcctggagtccagccgcttcaaataccgcacagagattgcgccgggcaagggtgacatgcccacgctcactgacaagggccgtggccgcttcgccctcatcatctatgagaacatcctcaagtatgtcaacctggacgcctggaaccgggagctgctggacaagtactgtgtggcctacggcgtgggcatcattggcttcttcaaggccaatgagaacagcctgctgagtgcgcagctcaagggcttccccctgttcctgcactcaaacctgggcctgaaggactgcagcatcaaccccaagtccccgctgctctacgtgacgcgacctagcgaggtggagaaaggtgtgctccccggcgaggactggacggttttccagtcaaatcactccacctatgagccagtgctgctggccaagacgcgctcgtctgagtccatcccacacctgggcgcagacgccggcctgcatgctgcactgcacgccactgtggtccaggacctgggcctgcacgacggcatccagcgcgtgctgtttggcaacaacctgaacttctggctgcacaagcttgtcttcgtggatgccgtggccttcctcacggggaagcgcctctccctgccattggaccgctacatcctggtggacattgatgacatcttcgtgggcaaggagggcacacgcatgaaggtggaggacgtgaaggccctgtttgacacacagaacgaactacgcgcacacatcccaaacttcaccttcaacctgggctactcagggaaattcttccacacaggtaccaatgctgaggacgctggggatgatctgctgctgtcgtatgtgaaggagttctggtggttcccccacatgtggagccacatgcagccccaccttttccacaaccagtccgtgttggccgagcagatggccttgaacaagaagttcgctgtcgagcatggcattcccacagacatggggtatgcagtggcgccccaccactcgggcgtgtaccccgtgcacgtgcagctgtacgaggcttggaagcaggtgtggagcatccgcgtgaccagcacggaggagtacccccacctgaagccagcccgctaccgccgtggcttcatccacaatggcatcatggttctcccacggcagacctgcggcctcttcacacacaccatcttctacaacgagtaccctggcggctccagtgagctggacaagatcatcaacgggggcgagctcttcctcaccgtgctcctcaatcctatcagcatcttcatgacgcacctgtccaactatgggaatgaccgcctgggcctgtacaccttcaagcacctggtgcgcttcctgcactcctggacgaacctccggctgcagacactgccccctgtgcagttggcgcagaagtacttccagatcttctccgaggagaaggacccgctctggcaggacccctgcgaggacaaacgtcacaaagacatctggtccaaggagaagacgtgtgaccgcttcccaaagctcctcatcatcggcccccagaaaacaggcaccactgccctctacctgttcctgggcatgcaccctgacctaagcagcaactaccccagctctgagacctttgaggagatccagttttttaatggccacaactatcacaaaggcatcgactggtacatggagttcttccccatcccttccaacaccacctccgacttctactttgagaaaagcgccaactactttgattcagaagtggcgccccggcgggcagcagccctcttgcccaaagccaaggtcctgaccatcctcatcaaccccgcggaccgggcctattcctggtaccagcaccagcgagcccatgacgacccagtggccctaaagtacaccttccatgaggtgattaccgccggctctgacgcatcctcgaagctgcgtgccctccagaaccgctgcctggtccctggctggtacgccacccacatcgagcgctggctcagtgcctatcacgccaaccagattctggtcttggatggcaaactgcttcgcacagaacctgccaaagtgatggacatggtgcagaagttccttggggtgaccaacaccattgactaccacaaaaccttggcgtttgatccaaagaaaggattttggtgccaactgcttgaaggaggaaaaaccaagtgtctgggcaaaagcaagggccggaaatatcccgagatggacttggattcccgagccttcctgaaggactattaccgggaccacaacatcgagctctccaagctgctgtataagatgggccagacacttcccacttggctacgagaggacctccagaacaccaggtagccgtggccaccacagccagactgaacgtttgtgaaagctgggacatcccaccacacgctgagccagacctgcagagtgggaagctggaccagggcagctgcgcacttatgagcaatactctgtggaggtctggtggggctgggggagcacccaggcggatctgcaagcacctcggagcacccaccgctgggtctgcggcctaagggacctccctcgccagcagaggtccattccgttcccagctgctcctggggaggccgcttcctggtaggagggagtccacgagactcttttctgtccctcactgtgttccgccgactgtcccctctcgtcacccatcactccctgcttccgcagggcgcccctcagtattcgctgccatatgtccctgtcctccaggctgtaggggaggagagcctggccgggggagacagactggacatttccctgtttcgagccaggctcttccaaggggccagctgggtccccggagtcagtcctaggctggatgggagggtggccccctcaagaggactcccagcctccacatctggttcctaccttcacatctcaccctcccgttctggggaagaatttctggttcctacagtatccactccatcctcaaggcttcccgcagggccttggggcactgccttgccatcgggcccagttctccgggccccacctgcacccctttcttccccctgggatatgatgtgtggtgtttcctgtggtaaaagactgaggcaggccaggggtctgccagtaacatgttcccatgtacagacacggtccccacaccctcccagcctcaggcccaggcagacatgggcgagctggtgagactgccagccacggctttgcttagccacctgtggccgagggctctcagagacccccttaacctcccaaatactaagaagctaaaatattttaatattttgtttttttttttcttggtgccagagtttataccctgggtgctggggtcgcactgtgttatatatatatatatatatatataatgtgtatatatatatattctattttttttggttgggttcgtttttaattcagtcctacaaaatggtggtaagccccagtctcaggggtcaccctgtcttagagctagagatgaggtggcagggagggaggctgtgtcctcagtggcctggggctgagcagaccttaggaaggggccctccccagtgccgtggctgctctggggctaccccaggtgaacagaggtggtgagatgcgcagggaagaccagctctctccaggacatcgggctgcgtgaagtccagtgaccctgaggggattttggccaaaggaaacagccagggctgggctaggagagctggggtcaaaagctgccccacccactctccctcacatggtgctaggctgggagctgccctgagagctgggatgcccaccaaggcccacagaactgtctccaggcccttgtagacagtgggatctctgggctgatttctggttggggtctgctcctaccccaccccatttaacaatgtgaagtgactgaggctggggtgcctctccctggccccctccaactgccaaattctgcttccctctgaaccccaggaaatactttctggagaggcttgtcttgttcagaagactctagcatcttggggctggaaggtcctttgacgggtatgaaacaggtccagaaaggggaggtggcctgcttggccgacgtcatggagccagctgggagcagggctgagcgttgaacccgaggctcccggttccaagtcccatcgtgctcctcttccaatgccacactgcctctgagcccatccttgggaccctactctgtgccaggttcctgtcccttcctccgtcacagcatggtcattccaggatatggggacaaaccactccttcccagccagggtgcctttgagccttctcattccgaggtctgcgtttgcatccctgtcgtgttctccctcgaggggtccttccccagcctgtgggggcctgggtctgttctgagctgattcccttttctccagttctctgctgggatgaagaaagttggacactcagtgggaccagctgcaggtggtttcactgtgtacacagcagtgtccccatcatgcctctcaatggggcctgcaagcctgggaacttgggcatcgttgggccagcaggatgagcagcaaagggtctgaggacagggtggcatgtctgcttgtgtgctcatgaagacatgcccacgccatggagccaggggcttatagagaggggcagtgacttccagagtcccatccgtcagtgaggggactgggctgcgggatgggtgaggatcttacagctcccaggttcggaaatctaccctctaggcctggaggcctctctcgcagagcatggaaggcaggagaggtgggctggcctagggcaggagctccacttctctctgcctctggctatgggaaggagcaggcggttggaaatcctgtgacagcagagatcttctggatttttgcctggacccttctgcaagcctggagactggacctgccacatgttccaagtctgtctgcctaggtcactgctgccacttctcctcccactaacagacctttcttgaagacccactaggtccagacactgccgggacttgcaggtatggggggtagaaggagaggcagataagctgcctggggggctgttagctaatgggtacaaggacaccccctcccgagaagagaagccacagatgagtgggccagcgaggccagtcttcaatgtccactaattcactctaagcatttggccaaaaaaaggagagagaaataactgaaattgttcaggtggctccatcgtctattctgtggtcccctccatgagcctttgccccagggtgggtgcaggtgcgagtgtcacctgcagctgcctcagtcattcagagttccagagccttctgtggtggagcatcctgctgcttggaggatgagtctgaagtttaaaaatgggccttttctgagcccccctgatgagcagtcagtgcttctgggcccagctaaggaagccatctgttcccagcagaggagagctgctgcgctgacctgcagaggttggtggtcccagcacagagctgtgcccatgggcttgttagtgggaaaagcaaatacaacaatgttttaccaaacatttaattatgaatgcccactccccagcatctagatctaaaattattaacattttgccacattctttttctctctctgtgtatgtatatgttttctctgtcctaatttaaaagtacattgcaaacatcatgaaacttgatccctgaaagcttcagcctgcatctcctaagagttagggcattgtcctacacattggcccagtatcacagccaagacgagaagtcatttcccagcgatgtctgctatctaatctgtattcaaatccccccaattgtctcccaggtaacttatgtgtctggttttggaatcagcatccagtcacggtgcacacattgcattttctaactatgtttttaaaacctctttgaatgctgaaaggtcttccctcagctcactttgagtttttaaatgacattgtttttgaggccctaggcctgctgtctttttgaagccccacattctgaatttgtcagattgtttgctcatggtgtcgcataaccacttcttctatcccctgtactttcaaggataatttaggctacatgagattttgccttttgtgctgacttgacagcttcacttctgcctaagatgcgcctccactgtcacctgtaccaagtgccaaaacagcagaggggccagttagagcaagagctctgggggggccggaaagtctccctggagaaggccgtaatatctgggccttggaaggaaggacacagggctctggaaggaggaggctgcatgcctgaaggctgggccttcgaccctggggatgggccacagggcaccaaacacatcatatgtctctctctttctattttggggtcccagggttttcatttcctggagacccgtggtctgtgtgcactggagcagagccaggctctcagttgcagcagggaaaagcctacatggggaactgcctcccgcaagctgtggtgtgagaagagccctggctggcagcaggagctgtgaagtttcatcccagccgggtgcatttagtagctgcctgaccatcttcctcccaggccctcagtttcttcatctgtagaatgagcagataggggccacagcagggattttcacacatcaaaggaggcagcctctgctctagttgatgtgaggatgagggggcggcctagaccccctgctgcccaggccgttgaggcaacactgggttcctggcttgacagctgtgggctggctgcccttgccagctcagacggctggcgagttttcagcttccctaagggactggcatagggttttgtggggtcaatgccaggaacctgggggaaactggatgcgttttatcctaagaagttcatccctcctgctcttactgtttccggccctggaggagaatgagggaggagagggttttctatgactgtgttagcttttattattagcaagagggctccttttgtaatttgtgcatgaaattcatgtcatttcctgggagaggagagggccgactggagagggtggggggcacactggggaagcaggcagaggtttccttcccttgtaggggggtggggagagtggggagagggggtgctatccagttcgcctgatgagggctctcgaaccagccgttttgggttgtgttaaaggtgagaccttcctccattaatgtacaatctcgaactaactgctaataaagtggggttctgtttgta

SEQ ID NO: 19665 - DNA, 769 bp, Homo sapiens
  source 1..769: mol_type = unassigned DNA
gtgatcgtgacctgtccattcccaccagtgcaggggtccatgagcccccaaaggtgcagtgagttgtaggcatttctgtgttttctttttctgaagaaagagtttgttggtttcatcagatcatcagaaggctgggtgtccctgtggagtgctgacggggccgtgtgcactgcgggcttgagaaatggtggcagcgtggtgcaaatagaaagtagcctggtggcagtgtagcatcctgggtcagggtgtggtcttggagacgggctgttggcttctgagctggcacctccacttaggagctgtgtgacattggccttagccccgtgggccccacggagtgagcggcatgcagcacccccgggcctgtccagtgtcctctggcctgctgccctgcacccccagaaggccctgacgccctggggcacttctgctctgcacaggaccacgcgggggtttgccatggtgacataaaggggcgcggaggaaggaaggagcgtgaccagcctgtggactgcgcccctggctgggaggaaggactgggggcccagatcctccactcccagtgccccacaagggcgtcgcttcctaagtctctgtgaatttgttggtcagtggacgattctcgtgtctcctcctgtgtggggccttggggtagccagggcaggccgggcctccggtggccaaggtctcggaggccaggatgcctgccctggcatgcctccggaggctgtgtcggcacgtgtccccgcaggctgtccttttcctgctg

SEQ ID NO: 19666 - DNA, 576 bp, Homo sapiens
  source 1..576: mol_type = unassigned DNA
gttaaccctggcccgggccggagcccggaggcgcacgcacggcccgggggacccaggcgtcccgctcctcgccgggagcgccccttcccccgagccaggatgcctgccctggcatgcctccggaggctgtgtcggcacgtgtccccgcaggctgtccttttcctgctgttcatcttctgcctgttcagcgttttcatctcggcctactacctatatggctggaagcgaggcctggagccctcggcggatgcccccgagcctgactgcggggacccgccgcctgtggcccccagtcgcctgctgccactcaagcctgtgcaggcagccaccccttcccgcacagacccgttggtgctggtctttgtggagagcctctactcgcaactgggccaggaggtggtggccatcctggagtccagccgcttcaaataccgcacagagattgcgccgggcaagggtgacatgcccacgctcactgacaagggccgtggccgcttcgccctcatcatctatgagaacatcctcaagtatgtcaacctggacgcctggaaccgggagctgctggacaagtactgt

SEQ ID NO: 19667 - DNA, 777 bp, Homo sapiens
  source 1..777: mol_type = unassigned DNA
gggagaatccgggtggaagtcgagaaatccagccccgatagcagcgctcggtcccgccccggcccccgccccggggcgctcaccgcacgcccgccggccgccccggcctccggagctcttctctggccggcacccacgcggcatcacgggatcgaaccccgctcccagcggccgcgattcggggagccttagccccgtgggccccacggagtgagcggcatgcagcacccccgggcctgtccagtgtcctctggcctgctgccctgcacccccagaaggccctgacgccctggggcacttctgctctgcacaggaccacgcgggggtttgccatggtgacataaaggggcgcggaggaaggaaggagcgtgaccagcctgtggactgcgcccctggctgggaggaaggactgggggcccagatcctccactcccagtgccccacaagggcgtcgcttcctaagtctctgtgaatttgttggtcagtggacgattctcgtgtctcctcctgtgtggggccttggggtagccagggcaggccgggcctccggtggccaaggtctcggaggccaggatgcctgccctggcatgcctccggaggctgtgtcggcacgtgtccccgcaggctgtccttttcctgctgttcatcttctgcctgttcagcgttttcatctcggcctactacctatatggctggaagcgaggcctggagccctcggcggatgcccccgagcctgactgcggggacccgccgcctgtggcccccagtcgcctgctg

SEQ ID NO: 19668 - DNA, 3789 bp, Homo sapiens
  source 1..3789: mol_type = unassigned DNA
gctcggccggcagtgccatcgcgcggagaggagggggtgcgcttccgcgggcggggcgcggagcccgccgtctcggaggccgcggctcggcccggcactgcggagggccgcttgatttcccggaacccaggtcgcgcggctgctagggccggagccggtggatccgagcgggtgccaccagcggcggcgcgccgcctcccccggtgggagcggtggttgggccaggctgcggcagagcgttcgctcggagatggcggagcagccgcgacgcggcccgtggccccgaaagcagggaagccgggcagccccgggacgcggcggagcccggggacagcggggacgccgcccagtcctccgggtatgaagctaaaatgcagcggctaagaacgcggctctggagcttgacaggcctgacgtcgaatcccagccctcccaccaactgagctgtgtgatcctgggcaaggtagaggggaagagattgaactttgctgacctttgatgtgaggcgctcagccagggccaaggggagagcctggcaagatttgcagcctgaagccatgggccagggggccatggtgacctgagacaagtggactctgtatagttgccccctgcttccccttctacctcccctaccctatgctaaggggactcgtctccacctcgtaaaggaaactccccaagggaatccctgtcccctattttcctatccttctacccttccaagacagtcctagcctatagaactcctacctcccatcccctgaggtggtccccattcctccctcccttcctccccccgccatgctccagttgtggaaggtggtacgcccagctcgacagctcgaactgaacccgtggtccttgtgtttgtggagagtgcatactcacagctggggcaggaaattgtggccatcctggagtctagtcgttttcgttatagcactgagttggcacctggccgaggggacatgcccacattgactgataatacccatggccgctatgtcttggtcatttatgagaacctgctcaagtatgtcaacctggatgcctggagtcgggaactgctagaccggtactgcgtggagtatggtgtgggcatcattggctttttccgagcccacgagcacagcctactgagcgcccagctcaagggctttcccctttttttacactcaaacttggggctccgggactaccaagtgaatccttctgccccgctactgcatctcacacgccccagccgcctagaaccagggccactgcctggtgatgactggaccatcttccaatccaatcatagtacatatgaaccagtgcttcttgccagccttcggccagctgagcccgcagtgccaggaccagttcttcgtcgggcccggcttcccactgtggtacaggacctggggcttcatgatggcatccagcgggtgctctttggacatggcctttccttctggctccacaaacttatcttcgttgatgctgttgcatacctcactggcaagcgcctctgcctggaccttgaccgctacatcttggtagacatcgatgacatctttgtgggcaaggaagggacccgcatgaaggtggctgatgttgaggctctgttgaccacccagaacaaactcaggaccttagttcccaacttcaccttcaacttgggcttctcgggcaagttctatcatactgggacagaggaggaggatgcaggggacgacatgctgctgaagcaccgcaaagagttctggtggttcccccacatgtggagccacatgcagccacacctgttccacaatcgctccgtgctggctgaccagatgaggctcaacaaacagtttgctctggagcatgggattcccacggacctggggtatgctgtggccccccaccactcgggtgtgtaccccatccacacgcagctctatgaggcctggaaatccgtgtggggcatccaggtgaccagcactgaggagtatccccatctccgccctgcccgctaccgccgtggcttcattcacaatggcattatggtgctgccccggcagacatgtggcctcttcactcacacaatcttctataatgagtatcctggaggctctcgtgaactagaccggagcatccgaggtggagagctctttctgacagtgctgcttaatccgatcagcatctttatgacccatctgtccaattatggaaatgaccggctgggcctatacacctttgagagcttggtgcgcttcctccagtgttggacacggctgcgcctacagacccttcctcctgtcccacttgcacagaagtactttgaacttttccctcaggagcgaagccccctttggcagaatccctgtgatgacaagaggcacaaagatatctggtccaaggagaaaacctgtgatcgtctcccgaagttcctcattgtgggaccccagaaaacagggactacagctattcacttcttcctgagcctgcacccagctgtaactagcagcttccctagccccagcacatttgaggagattcagttcttcaacagccctaattaccacaagggtattgactggtacatggatttcttccctgttccttccaatgccagcactgatttcctatttgaaaaaagtgccacctactttgactctgaagttgtaccacggcggggggctgccctcctgccacgagccaagatcatcacagtgctcaccaaccctgctgacagggcctactcctggtaccagcatcagcgagcccatggagacccagttgctctgaactataccttctatcaggtgatttcagcctcctcccagacccctctggcactacgctccctgcagaaccgctgtcttgtccctggctactattctacccatctacaacgctggctgacttactacccctctggacagttgctgattgtggatgggcaagagctgcgtaccaacccagcagcctcaatggagagcatccagaagttcctgggtatcacaccctttctgaactacacacggaccctcaggtttgatgatgataagggattttggtgccagggacttgaaggtggtaagactcgctgtctaggccggagcaaaggccggaggtatccagatatggacactgagtcccgtcttttccttacggattttttccggaaccataatttggagttgtcgaagctgctgagccggcttggacagccagtgccctcgtggcttcgggaagaactgcagcattccagtctgggctgatgtcccagcctcccataccagcaaaatgccccctgcttccctaaggggcaggtccagagcagggcccacaagggggattagagtggcctggcccctccccctctacctcagtagcccccaggcctgagatggctgagaagggaagggtatccttttcccacagttctgggacaaataaaggggcttcctttggtaccccacataatagtgctaggtacctttgacccatcatcttgggaggtggggaggaatgagagggtccaggcagggtgtaggggaatgtattagtccaatgagatttccctcttcatccgcagcagtgtatctattctatacctggctatgggagagaccccttgcatgggagggaccccttgctatggcccctttagccaggcagtgggatctacctgtggcccggcctccctaatgtcattcacattgaatggggatgaggtcggacagtggctcatagagccgagtatgagccctagctgtgggctagaaatgtccttaataaacatccttatttttc

SEQ ID NO: 19669 - DNA, 3749 bp, Homo sapiens
  source 1..3749: mol_type = unassigned DNA
gagatggcggagcagccgcgacgcggcccgtggccccgaaagcagggaagccgggcagccccgggacgcggcggagcccggggacagcggggacgccgcccagtcctccgggtatgaagctaaaatgcagcggctaagaacgcggctctggagcttgacaggcctgacgtcgaatcccagccctcccaccaactgagctgtgtgatcctgggcaaggtagaggggaagagattgaactttgctgacctttgatgtgaggcgctcagccagggccaaggggagagcctggcaagatttgcagcctgaagccatgggccagggggccatggtgacctgagacaagtggactctgtatagttgccccctgcttccccttctacctcccctaccctatgctaaggggactcgtctccacctcgtaaaggaaactccccaagggaatccctgtcccctattttcctatccttctacccttccaagacagtcctagcctatagaactcctacctcccatcccctgaggtggtccccattcctccctcccttcctccccccgccatgctccagttgtggaaggtggtacgcccagctcggcagctggaactgcaccgcctcatactgctgctgatcgctttcagcctgggctccatgggcttcctggcttattatgtgtccaccagccctaaggccaaggaacccttgcccctgcccttgggagactgcagcagcggtggggcagctggtcctggccctgcacggcctccagttccacctcggccccccaggcctccagagacagctcgaactgaacccgtggtccttgtgtttgtggagagtgcatactcacagctggggcaggaaattgtggccatcctggagtctagtcgttttcgttatagcactgagttggcacctggccgaggggacatgcccacattgactgataatacccatggccgctatgtcttggtcatttatgagaacctgctcaagtatgtcaacctggatgcctggagtcgggaactgctagaccggtactgcgtggagtatggtgtgggcatcattggctttttccgagcccacgagcacagcctactgagcgcccagctcaagggctttcccctttttttacactcaaacttggggctccgggactaccaagtgaatccttctgccccgctactgcatctcacacgccccagccgcctagaaccagggccactgcctggtgatgactggaccatcttccaatccaatcatagtacatatgaaccagtgcttcttgccagccttcggccagctgagcccgcagtgccaggaccagttcttcgtcgggcccggcttcccactgtggtacaggacctggggcttcatgatggcatccagcgggtgctctttggacatggcctttccttctggctccacaaacttatcttcgttgatgctgttgcatacctcactggcaagcgcctctgcctggaccttgaccgctacatcttggtagacatcgatgacatctttgtgggcaaggaagggacccgcatgaaggtggctgatgttgaggctctgttgaccacccagaacaaactcaggaccttagttcccaacttcaccttcaacttgggcttctcgggcaagttctatcatactgggacagaggaggaggatgcaggggacgacatgctgctgaagcaccgcaaagagttctggtggttcccccacatgtggagccacatgcagccacacctgttccacaatcgctccgtgctggctgaccagatgaggctcaacaaacagtttgctctggagcatgggattcccacggacctggggtatgctgtggccccccaccactcgggtgtgtaccccatccacacgcagctctatgaggcctggaaatccgtgtggggcatccaggtgaccagcactgaggagtatccccatctccgccctgcccgctaccgccgtggcttcattcacaatggcattatggtgctgccccggcagacatgtggcctcttcactcacacaatcttctataatgagtatcctggaggctctcgtgaactagaccggagcatccgaggtggagagctctttctgacagtgctgcttaatccgatcagcatctttatgacccatctgtccaattatggaaatgaccggctgggcctatacacctttgagagcttggtgcgcttcctccagtgttggacacggctgcgcctacagacccttcctcctgtcccacttgcacagaagtactttgaacttttccctcaggagcgaagccccctttggcagaatccctgtgatgacaagaggcacaaagatatctggtccaaggagaaaacctgtgatcgtctcccgaagttcctcattgtgggaccccagaaaacagggactacagctattcacttcttcctgagcctgcacccagctgtaactagcagcttccctagccccagcacatttgaggagattcagttcttcaacagccctaattaccacaagggtattgactggtacatggatttcttccctgttccttccaatgccagcactgatttcctatttgaaaaaagtgccacctactttgactctgaagttgtaccacggcggggggctgccctcctgccacgagccaagatcatcacagtgctcaccaaccctgctgacagggcctactcctggtaccagcatcagcgagcccatggagacccagttgctctgaactataccttctatcaggtgatttcagcctcctcccagacccctctggcactacgctccctgcagaaccgctgtcttgtccctggctactattctacccatctacaacgctggctgacttactacccctctggacagttgctgattgtggatgggcaagagctgcgtaccaacccagcagcctcaatggagagcatccagaagttcctgggtatcacaccctttctgaactacacacggaccctcaggtttgatgatgataagggattttggtgccagggacttgaaggtggtaagactcgctgtctaggccggagcaaaggccggaggtatccagatatggacactgagtcccgtcttttccttacggattttttccggaaccataatttggagttgtcgaagctgctgagccggcttggacagccagtgccctcgtggcttcgggaagaactgcagcattccagtctgggctgatgtcccagcctcccataccagcaaaatgccccctgcttccctaaggggcaggtccagagcagggcccacaagggggattagagtggcctggcccctccccctctacctcagtagcccccaggcctgagatggctgagaagggaagggtatccttttcccacagttctgggacaaataaaggggcttcctttggtaccccacataatagtgctaggtacctttgacccatcatcttgggaggtggggaggaatgagagggtccaggcagggtgtaggggaatgtattagtccaatgagatttccctcttcatccgcagcagtgtatctattctatacctggctatgggagagaccccttgcatgggagggaccccttgctatggcccctttagccaggcagtgggatctacctgtggcccggcctccctaatgtcattcacattgaatggggatgaggtcggacagtggctcatagagccgagtatgagccctagctgtgggctagaaatgtccttaataaacatccttatttttctgttt

SEQ ID NO: 19670 - DNA, 447 bp, Homo sapiens
  source 1..447: mol_type = unassigned DNA
ggagacccagttgctctgaactataccttctatcaggtgatttcagcctcctcccagacccctctggcactacgctccctgcagaaccgctgtcttgtccctggctactattctacccatctacaacgctggctgacttactacccctctggacagttgctgattgtggatgggcaagagctgcgtaccaacccagcagcctcaatggagagcatccagaagttcctgggtatcacaccctttctgaactacacacggaccctcaggtttgatgatgataagggattttggtgccagggacttgaaggtggtaagactcgctgtctaggccggagcaaaggccggaggtatccagatatggacactgaggtaagtaaagccaggggcaggggaatccctctccacttccaggatctgattctgtgtcccacttcttaccatttctgc

SEQ ID NO: 19671 - DNA, 1599 bp, Homo sapiens
  source 1..1599: mol_type = unassigned DNA
aagggtaaaaatgagggtccctgtatttgaggatataaaagatgaaactgaagaagaaaagataggggaagaagaaaatgaagaagaccaggtcttctataagcctgttattgaagacttaagcatggaattggccagaaaatgcacggaactcattagcgatatccgttataaagaagagtttaaaaagtccaaggataagtgtacatttgtgactgacagtcctatgctaaaccatgtaaaaaatatcggtgcttttatttctgaggcaaaatacaaaggcaccattaaagctgacctttctaattctctttataagcggatgccagccacaattgacagtgtttttgcaggagaagttacacagctccagagtgaggtggcctacaagcagaaacatgatgctgccaaaggattctcagattatgcccacatgaaggagccccctgaggttaaacatgccatggaggtcaataaacaccagagtaatatttcttataggaaagacgtgcaggacacccacacgtacagtgcagaacttgaccgaccagacatcaagatggcaacccagatctctaagatcataagcaatgcagaatacaagaaaggacaaggaataatgaataaagagcccgctgtaattggaagaccagattttgaacatgccgtggaagcttctaaactttctagtcaagtaaggctttagtgatgattccacaatgactttattcagatattttgtttctaacagcacaggagaatattgcattttagataatatctttaattgcaagaataaacagagataatgtttctgaacccagttcagatgggcttgcaatcattatgaatttcagtaaaggaaaaaaattaagtctaattttaagcataaaacaaagttttcttttctccaggcataaatctgaacatttttcaatgtctctagccatgttgtcacatttccctggatttccagaagtcattaatagtcatactaaataattgtgttttaacctacacacacacacacacacacacacacacacagtttttaacttagtaataaaaatattaattttcccaattttcaagtgcttttgtttaatcacaaaatttaaaaagggagatgaaaatgaagaaaactttgaagtcttatcaaagagcataaaataagatctgaaaaagtataaaggcattttatgtttttggctgaaagtttcaatagataaagatgtcagttctttcagaattatataaacgtcatgcaacttctgttagactccaacagcgtttttttttttttttaatatagataaaatgatcttaaagtttgtgtggaaagaaaataccagggaatagcctttaaaagtatgaaaatgaagaccagtgaaggggaacttaagttatgagttactataagttaatagaaaaccactgaaattaaatcaatatgggattggtgtagtgagagattaaataatcagtaggatagaatagggagtcctgaaatagattccagtatgtataagaatttaatatatgataaaagtgtcgattcaagtcagtgggaagaagttggattagctaataaatggtgct

SEQ ID NO: 19672 - DNA, 9216 bp, Homo sapiens
  source 1..9216: mol_type = unassigned DNA
cttgagtgttagagctgagtagttttcccagaatctctaagtcctttttatgctcttttatgaatgaatagaattagtaaaagataaataaattttttcttttggatttcttaaccagtggaaaaaatgttgactttaaaagttcataaaatcaaattttgcttaagaatatgttatttccacttgtgaggccagcctggtagacctctgggatccttttctgttcactcacacaccactgagataaggagtgaagtgtgggctaaatagggctgaggcttgggcaagggcatttctgccagagcaccagagacgtcagcatctcaagggcactgtggtatggaaaaggacgccacatgagtaaattttaaaaatataaatattttaaagggtaaaaatgagggtccctgtatttgaggatataaaagatgaaactgaagaagaaaagataggggaagaagaaaatgaagaagaccaggtcttctataagcctgttattgaagacttaagcatggaattggccagaaaatgcacggaactcattagcgatatccgttataaagaagagtttaaaaagtccaaggataagtgtacatttgtgactgacagtcctatgctaaaccatgtaaaaaatatcggtgcttttatttctgaggcaaaatacaaaggcaccattaaagctgacctttctaattctctttataagcggatgccagccacaattgacagtgtttttgcaggagaagttacacagctccagagtgaggtggcctacaagcagaaacatgatgctgccaaaggattctcagattatgcccacatgaaggagccccctgaggttaaacatgccatggaggtcaataaacaccagagtaatatttcttataggaaagacgtgcaggacacccacacgtacagtgcagaacttgaccgaccagacatcaagatggcaacccagatctctaagatcataagcaatgcagaatacaagaaaggacaaggaataatgaataaagagcccgctgtaattggaagaccagattttgaacatgccgtggaagcttctaaactttctagtcaaattaaatacaaagaaaaatttgataatgaaatgaaggataagaaacatcattacaatcctcttgaaagtgcttcttttaggcagaatcagcttgctgctacactggcgagcaatgtgaagtacaagaaagacattcaaaatatgcatgatccagtttcagatctcccaaatttgttgtttttagaccatgttttgaaagccagcaaaatgctcagcggccgagaatataaaaagctctttgaggaaaacaaaggaatgtatcattttgatgcagatgctgtggaacatctgcaccataaaggcaatgccgtcctccaaagtcaggtgaaatataaagaagaatatgagaaaaataagggaaagccaatgcttgaatttgttgagacaccatcatatcaagcttcaaaggaggctcaaaagatgcaaagtgaaaaagtttacaaagaggattttgagaaggagattaaaggaaggtcatcactggatttagacaagactccagaatttttacatgtaaagtacatcaccaaccttctgagggagaaagaatataaaaaagatttggaaaatgagataaaagggaaaggaatggaacttaattcagaagttcttgatatccaaagagcaaagcgagcctctgaaatggcaagtgagaaagaatacaagaaagacctggagtcaataattaaagggaaaggaatgcaagctggcactgacacccttgaaatgcagcatgccaagaaggctgcagagatagcgagtgagaaagactataaaagagatctggagactgaaattaaagggaaagggatgcaggtgagcacagacactcttgatgtccagagagctaagaaagcatccgagatggccagccagaaacaatacaagaaggacttagaaaatgaaattaaagggaaaggaatgcaagtgagcatggatatcccagatatccttcgagccaagaggacatctgaaatctatagccagagaaagtataaagatgaagcagagaagatgctttctaactattctaccatagcagatactcctgaaattcagagaattaagacaactcaacaaaacattagtgcggtattttataagaaagaagtgggagctggcactgcagtgaaagatagcccagagatcgaacgagtgaagaaaaatcagcagaatattagttcagtgaaatacaaagaagagattaaacatgcaacagccatttctgatcctccagaactaaagagagttaaagaaaaccagaagaacatcagcaatctccagtataaagagcaaaactacaaggccactccggtaagcatgaccccggagatagagagagtgaggcgaaaccaggagcagctgagtgcggtaaaatataagggagaacttcaacggggaactgcaatttctgatccaccagagctgaagagggcaaaagaaaaccagaaaaacatcagcaatgtttattacagaggtcagctgggaagagctaccactttaagtgtaactcctgaaatggaaagagtgaagaagaatcaagaaaatattagctcggtaaaatatacccaggaccataaacagatgaaaggtagaccaagtctgattttagatacacctgctatgagacatgttaaagaagcacaaaatcatatttcaatggtaaaataccatgaagattttgaaaaaacaaaggggagaggctttactcccgtcgtggacgatcctgtgacagagagagtgaggaagaacacccaggtggtcagcgatgctgcctataaaggggtccaccctcacatcgtggagatggacaggagacctggaatcattgttgacctcaaagtttggcgcacagatcctggctccatcttcgaccttgatcccctggaagacaatattcagtctagaagtctccatatgctctctgaaaaggcgagtcactataggcgacactggtctcgatcccattccagcagtactttcggtacaggtctcggagacgacaggtcagaaatctccgagatttaccctagcttttcatgctgcagtgaggtaacaagaccgtctgatgaaggagcacctgttcttcccggagcctatcagcaaagccattcccaaggctatggctacatgcaccagaccagtgtgtcatccatgagatcaatgcagcattcaccaaatctaaggacctaccgagccatgtacgattacagtgcccaggatgaagacgaggtctcctttagagacggcgactacatcgtcaacgtgcagcctattgacgatggctggatgtacggcacagtgcagagaacagggagaacaggaatgctcccagcgaattacattgagtttgttaattaattatttctccctgccctttgagctttattctaatgtatcccaaacctaatctttttaaaagatagaagatacttttaagacaacttggccattattttacaatgatgtatccttcctttgacaattagacacacaggtaccaggaagaaggaatgacctctgggctgaaaacagcagcattttcagtaattcctacaaacaaaaatctttgtgtctggacacctggtgctgctaattgtgttcatggtttcctttgattggctattgaacccttctgggaaatgtatttttgtagactttaatagagaagttgattgtcccttaaatgtagtgtgtgtttgaaacttcttagctgtcactttggaatcaccccaagccaattctcttaactctgtaatgcagccaataatttcaaacccgttttgcttttgagtcatgaggcaatttccaatattagtgaaaattgcccaatataataagtgtaaacagtggcagaaggacagtctggttaaaattatattgactggtggccttagggatctagaaacttctactaaacagagaaatttccttgttccctaggctgactggtatctatttatttctcatttgtaccaaggcatctcctactctccatttatattctatggacccaagtctatgctcagttccacagaatgtcaggaccaaataacttcacagctactctgcaaagggcaaattataatgtcattgatataatttccctagtagcatttaccctgttgcatgtcatgtagattcaagcttctgtaacataggcagctgcactgcgcgttcctattattgaagcaaaaagggtgactgatacctaaaagccctttcttcctctagtcgccagctcatcagaaaaacatactttgaaaagatgcttgagattttcctgctgcatcgcactctagttttgaaggatttacatcttaggaaataacatgtatactctagtaaataagcgatttaggtgttccattgaacagctttgattaacttaatgccaccattgatttcaaagtgaagaaaatgtaacagaagccagtgaagcaatggaagctggagtgtgactggaaaaatactcagcaaacaaagttaccaattccatacagagatgatctggtatcttcttttggaaaatggtattcaaattctggaatggaaatctagccaccaaaacgggttaatcaaaagacgtccttttccatttttttttgcttttattttctaaatcatttttaagggaatgaaacaggaatgtcatcagagattttttagtacaggcccaagagcctgttctctaagaaagaaattgttgccatgttttgattttcgaataagtgactttgcaggctttatgctagcccttgctggtgggtcttgaaatttcatccagagtctgcagtccaggtcaccaagccagcggcacccgtcggcaaccctgtgtttttctgattgtgccgtttactgtgacctgcaacggggtggcattcacttagggtctgacttcacagctatgacaaaaccgaaaaagcaaaactgcaaaaaagtactaagatgtacgggtcttggggatatctgccttatatgttatattcaaggaaattaacaaaacatcctgtaaaacatcgtttaaggaaacgtttactagtccaaaggccaaagctaatttatttccactttagaaaagttagcacatgcttttgaaaatctgtgatttcattttattaggctaaaagggtaaataggctttattacactgaagctgcatctatatgtcactgacataaagttgaaaaaataaatgcaggcaaataactagagacttcttttaagggggtttggctggttttctctcactgaaatggccagtcgtgattaaagtgataaaaccccatatctgttttggtatattgtacacaaacctacaaaaataaactgaacttgcaatatttttgcaaaaaaatctgtcgttaaaactgaggataaaatacctgctcaattttattttactaagtatatatttacatttcacccaggcaggccattttcttttgtgattataagaaagagtagttgttgattaaattttcagactaaatataggacaggtacaattttggataaatagcacatttataagaaccgcaatgaaaactgacttgaaataatgcttgtaatcaggaaagtaatttcatccaccgatttcaaaaccagattcactgagcataaaagtcaatacatatttgaggaataagtctcctaaaattttaagcttcacgtaataatgtttgcatagcaaaatatttctgcttcaagcctttaggaattaagatctgatcagaatttaactaaagggtagttgttttacaatgaagactaaaactgaacaagatgttgcatgctcttgaggccataatttggtagtgttggcagttgttaataaagcttgtcaggatgttaagcatctcaggagaaatattggaaaattatatgtataaaaccaaagtgctatttttaaaagcatcatttaaaaaaaaatgacatgcctgaacaacttttccactttccacgtgcttccctcccacctttggtttggcaacaggtatctcgtgcatgaagctgacagctaaagaagattttaaaaattgagttaaagatgactgtgtaaatgtccaagcacagagagcatgcacctgactttctaaagtttgatgtgttctcaagcctgacagaagcacaaggaacagtttgatacacttttaaaaggttctgaaaacaaagctgtatagggatcctctctctcttgagcaaagtatagcaacagaatatattgcttttgttgtaagcttttgtagtacatgtttttactaataattcttgttctctagaaagctttctatttctaacctatggcaaaatgaatccttcatgtcttcttgttattgtttacacacttgcagtgtagcccagtttgaaatatttatttggttatcaactgcccatggaggaggctcttgatgatcccaggtctcctcgacctccatacaccacacaggcatttgtaagcacagtttccacaagcaccttgtaggaatatggataagattagaccagcccctctctgtccactgggtttatttcttgaagaagatgcagatctggtttttccaatgtgccacagtctttccttatcctctccatgctgagcttgacaacactctgggaatgaggaacaagactttttctaaaaagatagtggaagttcaagggatgtacctcgttttcaggttcatccatctccagtggaatgttttcaataaaagatgaagaaaatgtgtgtgatctttaataacacatccctatagaaagtggataaaagatataccaaaactgtaatacagatatatacaaatataggtgcctttttgattactcttgtttgtctagtatgctcttggaaagaaaaccaagcaagcaagttgctgcctattctatagtaatattttattacacatgattgatatttttgtggtagggaagtgggatgctcctcagatattaaaggtgttagctgattgtattttatctctaaagatttagaactttagaaaatgccgacttcttccatctatttctgaaaggttctttgtggatttatatagagttgagctatataaacattaactttagatttgggatttaaaatgcctattgtaagatagaataattgtgaggctggattcactacacaagatgaacttcacttcataaattaattataccttagcgatttgcttctgataatctaaaagtggctagattgtggttgttttggttaaggtgatatggaggtgggagagcttttagttaagtaagaagctatgtaaactgacaaggatgctaaaataaaagtctctgaagtattccatgccttttggaccctttcctcgcaactaactgtcaactgttgatcaaaaaagtcaaggcattgtatgttgcttctgtggttattattctgtgatgcttagactacttgaacccataaacttggaagaatctttgagcaaattttctcagttgtctgtatgacttcagtatattcctgggaatgccataggattttttgtgcttgatacatggtatccagtttgcatagtatcacttctttgtaatccagttgctgttaagaatgatgtactttaaaggaaaagagaaaactgcatcacagtcccattctccagtgtccatgcaatgaattgctgagcatttaggaagcagcaccaagtctattacaggcatggtgtgaaacttgatgtttgacctgtgatcaaaattgaaccattgtacagtttggcttctgtttgcttcaaaatatgtagaattgtggttgatgattaatttgcgagactaactttgagagtgtaacagttttgaagaaaacattgaatgttttgcaaatgaaggggcttcacggaatgttacaatgttactaatataatttggcttttgttatgcaaattgttaacaccagctattaaaatatattttagtagaaatgctttaattcatatttttttcctctacactgtgaatctttaagccttggtggactagagcaacatcgtgctgcccaaaggactaacctatgcaaactagttcacattttagtggatgtcgcagttaatgtgtaataagacattatttcccctgcataatgtacaacagcattgaaatgacacattaagcctagcatcacattgtatagtacagtcactcacaaacccttcaaggctaccctaatcattaacattaatatttgtttaaaagcaaatcaccgatttatctattgaaactacttaaatgacggcaaaccaggaatgacagatggctgtgtcagcaatggctttaatgtgttccctgcaagtggtctcctatgatagaactgcgttctcaaatgcactctcttcagggtcttaatattctgtgttttctctctgtatttgtaaaacattataacacattaatttcctatctctacacatttggtttgcttaaataaatgcaggatataaaaaaaatggttcacttcttggctctcaccgtggtttcttggagcatgggttgttagatgcaagcaatgcaccctaataataccccgggtctgagatttaacatgacaactcacatcaaatcgcatcagaggtgtgtgctgccttcagtgcatttacattggtgaatcagtcaagatattttcctcccccaaataaacttagttgtaagtgataacaatattatgcttctccaagctcagtatctttctgattttatatcaaagtaccgcaacaatgcatcattgtagttaatttatttcaagaataaattcctcatatgtcctcaatagtacaattctaattttcttctattcataagatgaaagaaatggtttggagcatagaatagaaagtgcacaaattgagtacataaaatgggaagcaactgatttctcagctaagaaaggctcatttatcacagaacacaattgcttttctccccccactacgcttcccataattgaaaaagtgagtccctatttttcacactcatataaatctatgcgatttggatgctagtcttattgtattattttgtaaaactttctctttggctcataatccttcctaattgtaaattgataaactttgcggatgacatctgctcgtagaataaacacttcttccaaa

SEQ ID NO: 19673 - DNA, 989 bp, Homo sapiens
  source 1..989: mol_type = unassigned DNA
agatgcttcatttctattatgagtggctgcattctggctccaggggcgcagtccctaagccgctacactacccgaagcagtccttcaccacggtggcagatacacctgaaaatcttcgcctgaagcagcaaagtgaattgcagagtcaggtcaagtacaaaagagattttgaagaaagcaaagggaggggcttcagcatcgtcacggacactcctgagctacagagactgaagaggactcaggagcaaatcagtaatgtaaaataccatgaagattttgaaaaaacaaaggggagaggctttactcccgtcgtggacgatcctgtgacagagagagtgaggaagaacacccaggtggtcagcgatgctgcctataaaggggtccaccctcacatcgtggagatggacaggagacctggaatcattgttgcacctgttcttcccggagcctatcagcaaagccattcccaaggctatggctacatgcaccagaccagtgtgtcatccatgagatcaatgcagcattcaccaaatctaaggacctaccgagccatgtacgattacagtgcccaggatgaagacgaggtctcctttagagacggcgactacatcgtcaacgtgcagcctattgacgatggctggatgtacggcacagtgcagagaacagggagaacaggaatgctcccagcgaattacattgagtttgttaattaattatttctccctgccctttgagctttattctaatgtatcccaaacctaatctttttaaaagatagaagatacttttaagacaacttggccattattttacaatgatgtatccttcctttgacaattagacacacaggtaccaggaagaaggaatgacctctgggctgaaaacagcagcattttcagtaattcctacaaacaaaaatctttgtgtctggacacctggtgctgctaattgtgttcatggtttcctttgattggctattgaacccttct

SEQ ID NO: 19674 - DNA, 3008 bp, Homo sapiens
  source 1..3008: mol_type = unassigned DNA
cctgcgcggcggcggcggcgaggcgggggagcgagtgagcgcgaggggcgggcgcgagtgactgtgtgagtcacccgtacctggagtgcgagcgacgcagagccagcggcgcggagccggagccggagccgagacccagcgcctgcgagcccgagagcgcggccggccccaggcgccaggccccgtcgccctccccgtgcactcacccgtggcccggcgccgactccctacccggcgcccgccgcccgcagccctcccgcctgccaggaggcggtgcggggctcgccgggggatgtcacagcggctcctgggagccagcagccgccgccgccgccgcccccgggaaccgcgatcatgaacccccagtgcgcccgttgcggaaaagtcgtgtatcccaccgagaaagtcaactgcctggataagtattggcataaaggatgtttccattgtgaggtctgcaagatggcactcaacatgaacaactacaaaggctatgaaaagaagccctattgtaatgcacactacccgaagcagtccttcaccacggtggcagatacacctgaaaatcttcgcctgaagcagcaaagtgaattgcagagtcaggtcaagtacaaaagagattttgaagaaagcaaagggaggggcttcagcatcgtcacggacactcctgagctacagagactgaagaggactcaggagcaaatcagtaatgtaaaataccatgaagattttgaaaaaacaaaggggagaggctttactcccgtcgtggacgatcctgtgacagagagagtgaggaagaacacccaggtggtcagcgatgctgcctataaaggggtccaccctcacatcgtggagatggacaggagacctggaatcattgttgcacctgttcttcccggagcctatcagcaaagccattcccaaggctatggctacatgcaccagaccagtgtgtcatccatgagatcaatgcagcattcaccaaatctaaggacctaccgagccatgtacgattacagtgcccaggatgaagacgaggtctcctttagagacggcgactacatcgtcaacgtgcagcctattgacgatggctggatgtacggcacagtgcagagaacagggagaacaggaatgctcccagcgaattacattgagtttgttaattaattatttctccctgccctttgagctttattctaatgtatcccaaacctaatctttttaaaagatagaagatacttttaagacaacttggccattattttacaatgatgtatccttcctttgacaattagacacacaggtaccaggaagaaggaatgacctctgggctgaaaacagcagcattttcagtaattcctacaaacaaaaatctttgtgtctggacacctggtgctgctaattgtgttcatggtttcctttgattggctattgaacccttctgggaaatgtatttttgtagactttaatagagaagttgattgtcccttaaatgtagtgtgtgtttgaaacttcttagctgtcactttggaatcaccccaagccaattctcttaactctgtaatgcagccaataatttcaaacccgttttgcttttgagtcatgaggcaatttccaatattagtgaaaattgcccaatataataagtgtaaacagtggcagaaggacagtctggttaaaattatattgactggtggccttagggatctagaaacttctactaaacagagaaatttccttgttccctaggctgactggtatctatttatttctcatttgtaccaaggcatctcctactctccatttatattctatggacccaagtctatgctcagttccacagaatgtcaggaccaaataacttcacagctactctgcaaagggcaaattataatgtcattgatataatttccctagtagcatttaccctgttgcatgtcatgtagattcaagcttctgtaacataggcagctgcactgcgcgttcctattattgaagcaaaaagggtgactgatacctaaaagccctttcttcctctagtcgccagctcatcagaaaaacatactttgaaaagatgcttgagattttcctgctgcatcgcactctagttttgaaggatttacatcttaggaaataacatgtatactctagtaaataagcgatttaggtgttccattgaacagctttgattaacttaatgccaccattgatttcaaagtgaagaaaatgtaacagaagccagtgaagcaatggaagctggagtgtgactggaaaaatactcagcaaacaaagttaccaattccatacagagatgatctggtatcttcttttggaaaatggtattcaaattctggaatggaaatctagccaccaaaacgggttaatcaaaagacgtccttttccatttttttttgcttttattttctaaatcatttttaagggaatgaaacaggaatgtcatcagagattttttagtacaggcccaagagcctgttctctaagaaagaaattgttgccatgttttgattttcgaataagtgactttgcaggctttatgctagcccttgctggtgggtcttgaaatttcatccagagtctgcagtccaggtcaccaagccagcggcacccgtcggcaaccctgtgtttttctgattgtgccgtttactgtgacctgcaacggggtggcattcacttagggtctgacttcacagctatgacaaaaccgaaaaagcaaaactgcaaaaaagtactaagatgtacgggtcttggggatatctgccttatatgttatattcaaggaaattaacaaaacatcctgtaaaacatcgtttaaggaaacgtttactagtccaaaggccaaagctaatttatttccactttagaaaagttagcacatgcttttgaaaatctgtgatttcattttattaggctaaaagggtaaataggctttattacactgaagctgcatctatatgtcactgacataaagttgaaaaaataaatgcagg

SEQ ID NO: 19675 - DNA, 633 bp, Homo sapiens
  source 1..633: mol_type = unassigned DNA
gttctgatcctagtgcttcattgaatggctttgtaaatgagacacataatttttcatagccttcattttgtcatctgtgaaagagagggctttaggtgtattgatttcttaaggatccctttggcttgaaattctgattctagaatctcaaatggaaaatttgtgttcacattgcacgtggtgtttggtttttgttttcaaaagtttgtgcattaaatctcaacagcttattttcttgcagcacagtgaagagtccctaagaacatattacgtgatgggaaatgagaaataactgcactgcaagcctgatgaaggtcttctataagcctgttattgaagacttaagcatggaattggccagaaaatgcacggaactcattagcgatatccgttataaagaagagtttaaaaagtccaaggataagtgtacatttgtgactgacagtcctatgctaaaccatgtaaaaaatatcggtgcttttatttctgaggcaaaatacaaaggcaccattaaagctgacctttctaattctctttataagcggatgccagccacaattgacagtgtttttgcaggagaagttacacagctccagagtgaggtggcctacaagcagaaacatgatgctgcca

SEQ ID NO: 19676 - DNA, 20577 bp, Homo sapiens
  source 1..20577: mol_type = unassigned DNA
tttgctgctgaggaaatttatttggtagattgaaggtttgaacgagagctacagaaacgaaagaaaaagtctgtataagccaatggtgttcgggaagaaaataaccccattgccttgagtttgtaggtgccactactactctggaaaaatggcagatgacgaagactatgaggaggtggtggagtactacacagaagaagtggtttacgaagaggtgccgggagagacaataacaaaaatttatgagactacgacaacaaggacatctgactatgagcaatcagaaacttccaaaccagctctggcacagccagcactggcacagccagcatcagcaaagccggtggagaggaggaaggtcatccggaagaaagtggatccttcaaagttcatgaccccctacattgcacacagtcagaaaatgcaggatctttttagcccaaataaatacaaggagaagtttgagaaaacaaaaggacagccatacgccagcacaacagatactccagaacttcgcagaatcaaaaaagtacaagatcaactcagtgaggttaagtatcgaatggatggtgatgttgctaagactatatgtcacgtagatgaaaaagcaaaggatattgaacatgcaaagaaagtgtcgcagcaagtcagtaaggttttatacaagcagaactgggaagacaccaaggataagtacctgcttcctcctgatgcccctgaacttgtccaggccgttaagaacaccgccatgttcagcaagaaactgtacactgaagactgggaagcagacaaaagtttgttttacccctataatgatagcccggaactgaggagagttgcccaggcccagaaagctctcagtgatgttgcctacaaaaaaggtctcgctgaacagcaagctcaattcacgcctctggctgatcctccagatatagaatttgccaagaaagtaaccaatcaagtgagcaagcaaaaatacaaagaagactatgaaaataaaatcaaaggcaaatggagtgagacaccttgctttgaagttgcaaatgccagaatgaatgctgataacattagcacaaggaaataccaggaagattttgaaaacatgaaagaccagatctacttcatgcagaccgaaacaccagagtataaaatgaataaaaaagctggtgtggcagctagcaaggtaaaatacaaagaagactatgaaaagaataaaggaaaagcagattataatgtgcttcctgcttcagagaacccacagcttaggcagctgaaggcagcaggagatgccctaagtgacaaactatacaaggaaaactatgaaaagacaaaagcaaagagcataaattactgcgagacccccaaattcaagctcgatactgttctgcagaacttcagtagtgataaaaaatataaagattcctacttaaaagatattttgggacattatgtaggcagcttcgaggatccataccattcacactgcatgaaagtcacagctcaaaacagtgataaaaactacaaagcagaatacgaagaagacagaggcaaaggcttcttccctcagaccataactcaagaatatgaagcaattaagaaactagatcagtgtaaagaccacacctacaaagtccatccagataagacaaaattcacccaagttacagactctcctgttctgctacaagcccaagtcaattccaaacaactgagtgacttaaattacaaagcaaaacatgaaagtgaaaagttcaagtgccatatcccccctgatactcctgcttttatccagcacaaagtcaatgcctataacttgagtgataatctttataagcaagactgggagaagagcaaagccaaaaagtttgacattaaagtggatgccattcccctgctggcagccaaagccaacaccaagaacaccagcgatgtgatgtacaagaaagactatgaaaaaaacaaagggaaaatgattggagtcctcagcattaatgacgatcccaagatgctgcactccttgaaggtggccaaaaaccagagtgatagattatacaaggaaaactatgagaagacaaaggcaaagagtatgaattactgtgagaccccaaaatatcaacttgatactcagctgaagaacttcagtgaggctagatataaagacttatatgtaaaggatgttttgggacattatgtaggcagcatggaggacccatatcacacacactgcatgaaagttgcagctcaaaacagtgataaaagttacaaagcagaatatgaagaagataaaggaaaatgctatttccctcagacaataacacaagaatatgaagcaatcaagaagctggaccagtgtaaagatcatacctacaaagttcatccagataagaccaaattcacggcagtcactgattctcctgtactgttgcaagcccagctcaacacgaaacagcttagtgatctgaattacaaagcaaaacatgaaggtgagaagttcaagtgccatataccagcagatgctccacagtttatccaacacagagtcaatgcctataatctgagtgataatgtttataagcaagactgggagaagagcaaagccaagaagtttgacattaaagtggacgccattcccctgttggcagccaaagccaacaccaagaacaccagcgatgtgatgtacaagaaagactatgaaaagagcaaagggaaaatgattggagccctcagcattaatgacgatccaaagatgctgcactccttgaagacagccaaaaaccagagtgatcgcgaatatcgaaaagattatgaaaagtcaaaaactatctacacggcacctcttgatatgctccaagtcactcaagctaagaaatctcaggcaattgccagcgacgttgattataagcacatcttacacagttacagctacccccctgatagcatcaatgtggaccttgccaagaaggcatatgcgctgcagagcgatgttgaatacaaagctgactacaatagctggatgaaaggttgtggctgggtgccttttgggtccttagaaatggaaaaggcaaagcgagcttcagacatcctcaatgagaaaaaatatcgccaacatccagacaccctcaagtttacctcgattgaagatgctccaattacagtacagtctaaaattaaccaggcccagaggagtgatatcgcttacaaagccaaaggagaggaaattattcacaaatacaacctgccaccagacctgccccagttcatccaggctaaagttaatgcctacaatatcagtgagaatatgtacaaagcagacttgaaagacttgagcaagaagggatatgacctgagaactgatgcgattcccatcagagctgccaaagctgccaggcaggcggcgagtgacgttcagtacaaaaaagactatgaaaaggctaaagggaaaatggttggcttccaaagtcttcaagatgaccctaaactggttcattatatgaacgtggccaagatacaatcagatcgggagtataaaaaagactatgagaagacaaagtccaaatacaacacgccccatgatatgttcaatgtcgtggcggctaagaaagcccaggatgtggtcagcaatgtcaactataagcattctctccatcattacacctacttgcctgacgccatggacctggagctgtctaagaacatgatgcagatacagagtgataacgtctacaaggaagactacaacaactggatgaaaggcattggctggattcctattggcagtctcgacgtcgaaaaagttaaaaaggccggtgatgctctgaatgaaaagaagtacaggcaacatccagacaccctcaaatttaccagcattgtggactccccagttatggtccaggcaaaacagaacacgaagcaagtcagtgatatcttatacaaggctaaaggagaagatgtgaaacataaatacaccatgagtcctgatcttcctcagtttctccaggccaagtgcaatgcttacaatataagtgacgtctgttataaacgggattggtatgacttaatagccaagggcaacaatgtgctgggcgatgctattcccatcactgcagccaaggcatcgagaaacattgccagtgattataaatacaaggaagcttatgagaagtcaaagggaaagcatgtgggtttcagaagcctccaggatgatcccaagctggtccactatatgaatgtggcaaagctgcagtctgatcgtgaatacaagaagaactatgagaacaccaaaaccagctaccatacccctggggacatggttagcatcacagctgcaaagatggcccaggatgtcgctaccaatgtcaactacaaacagccattgcatcattacacatacctacctgacgccatgagtcttgagcatacgaggaatgtcaatcaaattcagagtgataatgtgtataaagacgagtataacagcttcttgaagggcatcggatggatccctattggttccctggaggtggagaaggtcaagaaagcaggcgatgcattaaatgagaggaagtatcgacagcacccagataccgtcaagttcacaagtgtgcctgattccatgggcatggtgttggctcagcataacacaaagcagctaagtgatttgaactacaaggtagagggagagaaactgaagcacaagtatactattgaccctgaattgcctcagtttattcaagccaaagtcaacgccctcaacatgagtgatgctcattataaagcagattggaagaaaaccattgccaagggctatgatttgagaccagatgccatcccaattgttgctgcaaaaagttcaaggaatattgctagtgattgcaaatataaggaggcctacgagaaagccaaaggcaagcaagttggatttctcagtcttcaggatgatcctaaactggttcactacatgaatgtggccaaaatccagtctgatcgtgagtacaaaaagggctatgaagccagcaagaccaagtaccacacacctctggatatggtcagtgtgacagctgcaaagaaatctcaggaggttgccaccaacgccaactacagacagtcataccaccactacactctcctgcccgatgccttgaatgtggagcactccaggaatgccatgcagattcagagtgataatctgtacaaatctgacttcaccaattggatgaaagggatcggctgggtgcccatagagtccctggaggtggagaaggcaaagaaagcaggagagattcttagtgagaagaagtatcgccagcaccccgagaagctgaagttcacttacgccatggacacaatggaacaggcacttaacaagagtaacaaactgaacatggacaagaggctctacactgaaaaatggaacaaggacaagaccaccattcatgtcatgcctgacacaccggatattttactctccagagtaaaccaaatcaccatgagtgataaactgtacaaagctggctgggaagaggaaaagaagaaaggatatgacctgaggcctgatgccattgcaataaaggctgcaagagcctctagagacattgccagtgattacaaatacaagaaagcctatgaacaagccaaagggaaacacattggcttccggagcctggaagatgaccccaagctggtgcacttcatgcaagtggccaagatgcagtcagaccgggaatacaagaagggatatgagaaatccaagacctccttccacaccccggtggacatgctcagtgtggtggcagccaagaagtctcaggaagtggccaccaatgccaactacaggaacgtgatccatacctacaacatgcttcctgatgccatgagctttgaattggccaaaaatatgatgcagattcaaagtgataatcagtacaaggctgactatgctgacttcatgaagggcattggatggctccctctgggctccctggaagcagagaaaaacaagaaagccatggagattattagtgaaaagaagtaccgccagcacccagacactttgaagtattccacactcatggactcgatgaacatggttttggcccagaataatgcaaaaattatgaacgaacatctctacaaacaagcatgggaggctgacaaaaccaaagtccacatcatgcctgatatcccccagattattttggcaaaggcaaatgcaattaatatgagtgataaactctacaaactttccttggaagagtctaaaaagaaaggctatgatctcagacctgatgcaattcctatcaaagctgccaaggcttccagagatattgcaagtgattataaatacaagtacaattatgaaaaagggaaggggaaaatggttggtttccgcagtctcgaggatgatcccaaattagtccattccatgcaagtggctaagatgcaatctgatcgggagtacaagaaaaactatgagaacacaaagaccagctaccacacccctgccgacatgctcagtgtcacggctgcaaaggatgcccaagccaacatcaccaacactaactacaagcacctgattcacaagtacatcctccttccagatgcaatgaacattgagctgaccaggaatatgaatcgcatacagagtgataatgaatataagcaagattacaatgaatggtacaaagggcttggctggagtccagcaggttctctggaagtggagaaggccaagaaagcaactgaatatgccagtgatcagaaataccgccagcacccgagcaacttccagtttaagaagctgactgattccatggacatggtgcttgccaagcagaatgcacataccatgaacaagcatttatacaccattgattggaataaagataagaccaagattcatgtgatgcctgatacaccagatattttacaagccaagcagaatcaaacactgtatagtcagaaactctataaacttggatgggaagaagctttgaagaaaggctatgatctcccagttgatgcaatttctgtacagctagctaaagcttcaagagacattgctagtgattataaatacaaacaaggctaccgaaagcaacttggccaccatgttggattccggagtctgcaagatgacccaaaacttgtgttgtccatgaatgtagccaaaatgcagagtgaaagagaatacaagaaggactttgagaagtggaaaactaagttctccagcccagtggacatgttgggagtggtactggccaagaagtgtcaggagttggttagtgacgtggactacaagaactacctgcatcagtggacatgtctgcctgatcagaacgatgttgtgcaagctaagaaagtttatgaactgcaaagtgagaatctatataaatctgaccttgagtggctgagaggcataggatggagtcccttgggttctttagaggcagaaaagaacaagcgggcttcggaaatcatcagtgagaagaaatatcgtcagcctccagacagaaacaagttcaccagcattcctgatgccatggatatagttctggcaaagacaaatgccaaaaataggagtgatagactttatagagaagcttgggacaaagacaagactcagatccacatcatgcctgatacacctgacattgttctggctaaagcaaacttaatcaacacaagtgataaactctaccgaatgggttatgaggagctgaagagaaaaggttacgatcttcctgttgatgccataccaatcaaagcagcaaaagcctcccgggaaattgccagtgaatacaagtacaaggaaggctttcgcaagcagctcggccaccacattggtgcccggaacattgaagatgaccccaagatgatgtggtccatgcatgtggccaagatccagagtgacagggagtacaagaaggactttgagaagtggaagaccaagttcagcagcccagtggacatgctgggggtggtgttggccaagaagtgccagaccttagtcagcgacgtggactacaagaactacctgcaccagtggacatgcctgcccgaccagagcgatgtcatccatgctcggcaggcctatgacctccagagcgataatttgtacaagtcagaccttcagtggctaaaaggcattggctggatgactagtggttctctcgaggatgagaaaaataaacgagccacccagattttgagtgaccatgtttaccgtcagcacccagatcaatttaagttttccagccttatggattccataccaatggttttggcaaaaaacaatgctattaccatgaatcatcgcctctatacagaagcttgggataaagataaaaccactgtccacattatgccagatacccctgaagttttattagctaaacaaaacaaagtaaattacagtgagaaattgtataagcttggcctagaagaagccaagaggaaaggttatgacatgcgggtagatgccattcctatcaaggcagccaaggcctccagagatattgcaagtgaattcaagtacaaagaaggctatcgtaagcagctcggccaccacattggtgcccgagctatacgtgatgaccccaagatgatgtggtccatgcacgtggccaagatccagagtgacagggagtacaagaaggactttgagaagtggaagaccaagttcagcagcccagtggacatgctgggggtggtgctggccaagaagtgccagaccttagtcagcgatgtggactacaagaactacctgcaccagtggacatgcctgcccgaccagagcgacgtcatccatgctcggcaggcctatgacctccagagcgataatatgtacaagtctgatctccagtggatgagaggcattggctgggtgtccattggctctttggatgtggaaaaatgcaaaagggcaactgaaattttgagtgataaaatctatcgccagcctccagacagattcaaatttaccagtgtgactgactctctggaacaagtgttggccaaaaataatgccatcactatgaacaagcgtttatacacagaggcctgggacaaagacaagactcaaattcacataatgcctgatacaccagagattatgttggcaaggcagaacaaaatcaactacagtgagactctatacaaacttgccaatgaagaagcaaaaaagaaaggctacgacttgcgaagtgacgccatccccatcgtggctgccaaggcctccagggacgttatcagtgattacaaatacaaagatggttaccgcaagcagctcggccaccacattggagcccggaacattgaagatgaccccaagatgatgtggtccatgcatgtggccaagatccagagtgacagggagtataagaaggactttgagaagtggaagaccaagttcagcagcccagtggacatgctgggagtggtgttagccaagaagtgccagaccttagtcagcgatgtggactacaagaactacctgcacgagtggacgtgcctgcccgaccagaatgatgtcatccatgctcggcaggcctatgacctccagagcgataacatttacaaatctgatctccagtggctgagaggcattggctgggtccccattgggtctatggatgtggtcaagtgcaagagagctgctgaaatactgagtgataacatctaccgccagcctccggacaagctgaaatttaccagtgtgactgactctctagagcaggtgctggccaagaacaatgctctcaatatgaacaagcgcttatacacagaagcctgggacaaagacaagacccaagtccatattatgcctgatacacctgaaatcatgttggcaagacaaaataaaataaattatagtgagagcctctatcgtcaggccatggaagaagccaagaaagaaggctatgacttgagaagtgatgccattcccattgtggctgccaaggcctctcgggatattgccagtgattacaaatacaaagaagcatatcgtaaacagttgggtcaccacattggcgcccgagcagtacacgatgaccccaagataatgtggtccctccacattgccaaagtgcagagtgaccgtgagtacaagaaagattttgagaaatacaagacaaggtacagcagcccagtggacatgcttggtatcgttttggccaagaagtgtcagaccttggtcagcgatgtggactataaacatcctctgcatgaatggatctgcctgcccgaccagaatgacatcattcatgcacggaaagcctatgacctccagagtgacaatttgtataagtcagaccttgaatggatgaaaggcattggctgggttccgattgattccttggaagttgttagggccaagagagctggagaattacttagtgatactatctaccgtcagcgtccagaaacgctgaaatttaccagtataacggacactccggagcaggtgctggcaaaaaacaatgctttaaacatgaataagcgcttatatactgaagcctgggacaatgacaagaaaactattcatgtcatgcctgatacaccagaaatcatgttagccaaactcaaccgaataaactacagtgataaactctataaacttgctttggaagagtccaagaaggaaggctatgacttgcgtctggatgccattccaatccaagcagccaaggcttcaagagatattgctagtgattacaagtacaaggaaggctaccgcaaacagcttggccaccatattggggcccggaacattaaggatgacccgaagatgatgtggtccatccatgtggccaagatccagagtgacagggagtacaagaaggagtttgagaagtggaagaccaagttcagcagcccagtggacatgctgggggtggtgctggccaagaagtgtcagatccttgtaagcgacatagactacaagcatcccctgcatgaatggacctgcctgcctgatcagaatgacgtcattcaggctcggaaggcctatgacctgcagagtgatgctatttacaaatctgatcttgagtggctgagaggcataggatgggttcccattggctctgtagaggtcgagaaagtgaagagagctggagaaatcctgagtgacaggaagtatcgccagcctgcagaccagctcaaattcacatgcattaccgacactccggaaattgtcctagcaaagaataatgccctgacaatgagcaagcatttatacacagaagcttgggatgctgacaaaacctccatccacgtgatgccagacaccccagatatcctgctggccaagagtaattctgccaatatcagccaaaaactttacaccaagggatgggatgaatcaaagatgaaggactatgatctgagagcagatgctatttccatcaaaagtgccaaggcctccagggacatcgccagtgactacaaatacaaggaagcctatgagaaacagaaaggccaccacattggagcccagagcattgaagatgatcccaagattatgtgtgccatacatgcaggaaaaattcaaagtgaaagggagtacaagaaggaattccaaaagtggaaaaccaagttctctagcccagtggacatgttaagcatcttgctggccaagaaatgtcagactttggtcactgacattgattatcgcaattacctgcatgaatggacatgcatgccggatcaaaacgacattatccaagcaaaaaaggcctatgacctgcagagtgatgccctctacaaggctgacttggagtggttgcgtggcattggctggatgccccaagggtctcctgaagtgttgagagtcaaaaacgcccagaatatcttttgtgacagtgtctatcggacgcctgtggtgaaccttaagtacacaagcattgttgacacacctgaagtggtccttgctaaatcaaatgctgaaaatattagtattccaaagtacagagaggtttgggacaaggataaaacttcaatacacataatgccagatactccagaaattaatctcgctagagcaaatgctcttaatgtgagcaataaactttaccgtgagggctgggatgaaatgaaggcgggctgtgatgtccggctggatgccatccccatccaggctgccaaggcctccagggagattgccagtgactataaatataagcttgaccatgagaagcagaagggacactacgtgggcaccctcacagccagggatgacaacaagatccgctgggccctcatagctgacaagctccagaatgaacgagagtaccggctggactgggccaaatggaaggccaagatccagagccctgtggacatgctttccatcctgcactctaaaaattcccaggctctggtcagtgacatggattaccgcaattacctgcaccagtggacctgcatgcccgaccagaacgatgtgattcaggccaagaaggcctacgaactgcagagcgataatgtttacaaggctgacttggaatggttgcgtggaattgggtggatgccaaatgactccgtgtccgtcaatcatgccaaacatgccgcggacatcttcagtgagaaaaaatatcgcacaaaaatagaaactctcaactttacgcctgtggatgacagagttgattatgtgacagcgaaacaaagtggcgagatcctcgatgatattaaataccggaaagactggaatgccaccaaatcaaagtacaccctcacagaaacccccctgctgcacactgcccaggaggctgctaggatactggaccagtatctctacaaggaaggctgggagagacaaaaagccacaggttacattttgcctccagatgctgtgccatttgttcatgcccatcactgcaatgacgttcagagtgagctgaaatacaaagctgaacatgtgaagcaaaaaggtcattatgttggtgtcccgacgatgagagatgatcctaagctggtttggtttgagcatgcaggccagattcagaatgagagactatacaaagaggactatcacaaaacaaaggccaaaatcaatatacctgctgatatggtgtcagtcttggccgccaagcaggggcagacccttgtcagtgatattgattatcgtaattacttgcaccaatggatgtgtcatcctgaccagaacgatgttattcaggcaagaaaggcctatgacctacagagtgataatgtctacagagctgacctggagtggctccgaggcattggctggatcccactggattctgtggaccatgtaagggttactaagaaccaggaaatgatgagtcagatcaaatataagaaaaatgcccttgaaaactatcctaactttagaagtgtggtggatcctccagagattgttttagccaagattaattctgtcaatcaaagtgatgtaaaatataaagaaacatttaataaagcaaagggcaaatatacgttttcaccagatacaccacatatctcccactccaaagacatgggaaaactctacagtactatactgtataaaggggcgtgggagggcaccaaggcctatggctacaccctggatgagcgctacattcccattgttggagccaagcatgctgatctggtgaacagtgagcttaaatacaaagagacatatgagaagcagaaaggtcactacctggctggaaaagtgatcggtgaattccctggtgtggttcactgtctggatttccaaaagatgaggagtgcgttgaactacagaaaacattatgaggataccaaagcaaatgttcatatccccaatgacatgatgaatcacgtgctggctaaaaggtgccagtacatcctcagtgacctggagtatcgacactatttccaccagtggacgtctcttctggaagaacccaatgttatacgcgtccgaaacgcccaggagatcttgagtgataatgtgtataaagatgacctgaattggttgaaaggcattggttgctacgtttgggatacaccccaaatcctccatgccaagaaatcatacgaccttcagagtcagctacaatatacagcagcaggtaaagaaaatctacaaaactataatctggtcacagacacgcccctctatgtgactgctgttcagagtggcattaatgccagtgaggtaaaatataaagaaaattatcatcagattaaggacaaatacacaacagttctagaaacagtggattatgacagaaccagaaacctgaagaatctttacagcagtaacctgtacaaggaggcctgggatagagtgaaagccaccagctacatcctgccttccagcaccttgtccctgacacacgccaagaaccagaagcatctggccagccatatcaaatatcgggaagaatatgaaaagttcaaagctctttatacgttaccaagaagtgttgacgatgatccgaacacagcacggtgcctccgagttggcaagcttaacatcgatcgcctgtacagatcagtttatgaaaagaacaagatgaaaatccacatcgtgcccgacatggtagagatggttactgccaaggattcccagaagaaagtcagtgagattgattaccgcctgcgcctccacgaatggatttgccaccccgacttgcaagtcaatgatcacgtcaggaaagtcacagatcagatcagcgatattgtatacaaggatgacctcaactggctgaaaggcattggttgctacgtctgggacactcctgaaatcctccatgccaagcatgcttatgatctacgtgatgatatcaagtataaagctcacatgttgaaaacaaggaatgactacaagcttgtcacagatacaccagtctacgtgcaggctgtcaaaagtgggaaacagctaagtgacgctgtctaccactatgactatgtgcacagtgtcagaggcaaagtggctccaactaccaaaaccgtggatctggaccgggcccttcatgcatacaagctccagagttcgaatctatacaaaaccagcctgcgcaccctgcccactggatatagacttccaggtgacactcctcacttcaaacacatcaaggacacccgttacatgagcagttatttcaagtacaaagaagcctatgaacacaccaaggcatatgggtatacacttggccccaaagatgttccatttgtccacgtccggagagtcaacaatgttaccagcgagagactgtatcgggaattgtaccacaaactgaaagacaagatccatacaactcccgatacccctgagatccgccaagtcaagaagacacaagaggctgtcagtgagttgatctacaaatcagacttcttcaagatgcagggccacatgatctctctgccatacacaccccaagtgatccattgccgctatgtgggagacatcaccagtgatattaaatacaaagaggacttgcaggtcctgaagggatttggctgcttcctgtatgacactcctgacatggtccgctcccggcacctgcggaagctctggtctaattacctatacactgataaggcaaggaagatgcgagacaaatacaaagtggtgcttgacactccagaatacagaaaagtgcaagaactgaagacacatctgagtgagctggtctacagagctgcaggcaagaagcagaagtcaatctttacttcagttcctgatactcctgatcttttaagagccaagcgagggcagaagcttcagagtcagtatctgtatgttgaacttgccaccaaagagagaccccatcatcacgctggaaaccagaccacagccttgaagcatgctaaagacgtgaaggacatggtcagtgagaaaaagtacaagattcaatatgaaaagatgaaagacaagtacactccggttccagatacgccaatcctcatcagagccaagagggcttactggaatgccagtgatctacgctacaaagaaacatttcaaaagaccaaagggaaataccacacggtgaaagatgccctagacattgtctatcatcgcaaagtcacagatgacatcagtaaaataaaatacaaggagaactacatgagccagttgggtatctggaggtccattcctgatcgtccagagcatttccaccaccgagcagtcactgacacagtcagtgatgtaaaatataaagaagacttgacttggcttaaaggcattggttgctatgcctatgatacccctgatttcactctggctgaaaagaacaagactctctacagcaagtataagtataaagaagtatttgaaaggacaaagtcagatttcaagtatgttgccgactctccgatcaataggcatttcaagtatgcaactcaattgatgaatgagaaaaaatacagagctgattatgagcagcggaaagataaataccacctggtagtcgatgagcctagacatctgctggctaagaccgcaggcgaccagatcagtcagatcaaatacaggaaaaactatgaaaaatcaaaggacaaatttacctcaattgtggatactccagaacacctgcgtactacaaaagtcaacaaacaaatcagcgatatcctttataaattggaatacaacaaggccaaacccagaggctacaccacaatccacgacacacccatgttgctgcatgtccgcaaggttaaagatgaagtcagtgatctgaaatacaaagaagtataccaaagaaataaatccaactgcaccattgagccagatgctgttcatatcaaagcagccaaggacgcctacaaagtcaacaccaatctggactataagaaacagtacgaagccaacaaagcccactggaagtggactcctgaccgaccggacttcctccaggctgccaagtcatccctgcagcaaagcgattttgaatataagctggaccgggagttcctcaagggttgcaagctttctgtcactgatgacaaaaacacggtgctcgccctcaggaatactttaatagaaagtgatctgaaatacaaagagaaacatgtcaaggaaagaggaacctgccatgccgtacctgacacgcctcagatcctgctggcgaagactgtcagcaacctggtgtctgagaacaagtacaaggaccatgtcaagaagcacttggcacagggctcatacacaacactaccagagacccgggacactgttcacgtcaaggaagtgaccaagcatgtcagtgatacaaattacaaaaagaagtttgtcaaggagaaaggaaaatccaactactccatcatgctggagccaccagaggtgaaacatgctatggaagtggccaagaagcaaagtgatgtcgcttacagaaaagatgccaaagagaacctgcattacaccacagtggctgatcgaccagacatcaagaaggccacacaggcagccaaacaggccagtgaggtggagtacagagccaagcaccgcaaggaaggcagccatggcttaagcatgctcggtcgcccagacatagaaatggccaagaaggcagccaagctgagcagccaggttaaataccgagaaaatttcgataaagaaaagggcaagacaccaaaatacaatccaaaagacagccagctctacaaagtcatgaaagatgctaataatcttgcaagtgaggttaaatacaaggctgacctgaagaaacttcacaaacccgtgactgacatgaaggagtctctgatcatgaatcatgtcctgaatacaagccaacttgccagttcttaccagtacaagaagaagtatgagaagagtaaaggccactaccacaccatacccgataatctggagcagcttcacctaaaagaggccacagaattacagagtatagtgaaatacaaagaaaagtatgaaaaggaacgaggaaaacccatgctggactttgaaacaccaacgtacatcactgccaaagagtctcagcagatgcagagtgggaaagaatataggaaagattatgaagagtccattaaaggcagaaacctgactggcctggaggtcacgccagctttgttacatgtcaaatatgcaactaaaatagcaagcgagaaagagtacaggaaagatctagaggaaagcatccgtgggaagggcctcactgaaatggaagatacacctgacatgctaagagcaaagaatgccactcaaatcctcaatgagaaagaatataagcgagacctggaactggaagtcaaaggaagaggcctgaatgccatggccaatgaaactccggattttatgagggccaggaatgctactgatattgccagtcagattaagtataagcaatcagcagaaatggagaaagccaatttcacttctgtggttgatactccagagatcattcatgcccaacaagtcaagaatctttcaagccagaaaaagtacaaggaagatgctgagaagtccatgtcgtattatgagactgttttggacaccccagagatacagagagtccgggagaaccaaaagaacttcagccttctccaataccagtgtgaccttaaaaacagtaaaggaaaaattacagttgttcaagacacgccagaaatactgcgtgtaaaagaaaatcagaagaatttcagctcggttttatataaagaggatgtctcaccaggaacggctatcggaaagacacctgagatgatgagagtgaaacaaacacaggaccacattagctcggtgaagtataaggaagcaataggacaaggaactccaatccctgacctgcctgaagtgaaacgtgtgaaggagacgcagaagcacattagctcggttatgtacaaagaaaacttgggaacaggcattccaaccactgtgactccagagattgagagagtcaaacgcaatcaagagaactttagctcggttttgtacaaagaaaatttggggaaaggaatcccaacacctatcactccagagatggagagagtcaaacgcaatcaagagaactttagctcggtgttatacaaagaaaacatgggcaagggaactcctttagctgtcactcccgagatggagcgagtcaaacacaatcaagaaaatattagctcggttttgtacaaagaaaatgtggggaaagccaccgcaacccctgtcactcctgagatgcagagagtcaaacgcaatcaagaaaacattagctcggtgttatacaaagagaacctggggaaagcaacccccacaccctttactcctgagatggaaagagtgaaacgcaatcaagaaaactttagctcggtattgtacaaagagaacatgagaaaagcaactccgacacctgttactccagagatggagagagctaagcgcaaccaagaaaacattagctcggttctttattctgatagtttccggaaacaaatacaaggcaaagctgcctatgtattggatacccccgagatgagacgggtgagggagacccaacggcacatctcaacggtgaaatatcatgaagactttgagaaacacaagggttgcttcacaccagtggtgacagatcctatcactgaacgagtaaagaagaacatgcaggacttcagtgacattaactaccgaggtattcagaggaaagtggtagaaatggaacaaaaacggaatgaccaagatcaggagactattacaggtttacgtgtctggcgtactaatcctggttcggtttttgactatgatccagcagaagacaacatccagtcccgaagcttacacatgattaatgtccaagctcagcgccggagccgggagcagtcacgatctgccagtgcactaagcatcagtgggggtgaggagaagtctgagcattcagaagcaccagaccaccacctttcgacttacagcgacgggggtgtctttgcagtctcaacagcttacaaacatgcaaaaaccacagagctcccacaacaacgatcatcttcagttgctacccaacagacaacggtatcttccatcccatctcatccatctactgctggaaaaatcttccgtgccatgtatgactatatggctgctgatgcagatgaggtgtccttcaaggatggagatgccatcataaatgttcaagcaattgatgaaggctggatgtatggcactgtgcagaggactggcaggaccggaatgctcccagccaactacgttgaagctatttaggcatttcaaagcatcacacttgtctgcaggacttacagatcctgcagtcaatgtttcggtttagactctccactgttacctaagttctcaagctgcctatggtttttctgtgtcaatgtgatttatggtagtaccatcctttctcctttgggttttaaaataagttgcagaacagacactttaaaagcttctgcaatattatttctgtgcctagagtctttctccattataaacatgttttaacattatttcttttctaaaacagggattttgaatatgccaaacacattaaaggaaaaatagcagagatgttcaccttttccttgctgattgctaatgcttattatttctaattcagttctgaagttataaacttataatcaatacaaaccagcaactaataaaacctctaattctgc

SEQ ID NO: 19677 - DNA, 2057 bp, Homo sapiens
  source 1..2057: mol_type = unassigned DNA
gaaaacttgggaacaggcattccaaccactgtgactccagagattgagagagtcaaacgcaatcaagagaactttagctcggttttgtacaaagaaaatttggggaaaggaatcccaacacctatcactccagagatggagagagtcaaacgcaatcaagagaactttagctcggtgctatacaaagaaaacctggggacaggaattccaatccccatcactcctgagatgcagagagtcaaacacaatcaagaaaaccttagctcggtgttatacaaagaaaacatgggcaagggaacccctttacctgtcactcccgagatggaaagagtcaaacacaatcaagaaaatattagctcggtgttatacaaagaaaacatgggcaagggaacccctctacctgtcactcctgagatggagagagtcaaacacaatcaagaaaatattagctcggtgttatacaaagaaaacatgggcaagggaactcctttagctgtcactcccgagatggagcgagtcaaacacaatcaagaaaatattagctcggttttgtacaaagaaaatgtggggaaagccaccgcaacccctgtcactcctgagatgcagagagtcaaacgcaatcaagaaaacattagctcggtgttatacaaagagaacctggggaaagcaacccccacaccctttactcctgagatggaaagagtgaaacgcaatcaagaaaactttagctcggtattgtacaaagagaacatgagaaaagcaactccgacacctgttactccagagatggagagagctaagcgcaaccaagaaaacattagctcggttctttattctgatagtttccggaaacaaatacaaggcaaagctgcctatgtattggatacccccgagatgagacgggtgagggagacccaacggcacatctcaacggtgaaatatcatgaagactttgagaaacacaagggttgcttcacaccagtggtgacagatcctatcactgaacgagtaaagaagaacatgcaggacttcagtgacattaactaccgaggtattcagaggaaagtggtagaaatggaacaaaaacggaatgaccaagatcaggagactattacaggtttacgtgtctggcgtactaatcctggttcggtttttgactatgatccagcagaagacaacatccagtcccgaagcttacacatgattaatgtccaagctcagcgccggagccgggagcagtcacgatctgccagtgcactaagcatcagtgggggtgaggagaagtctgagcattcagaagcaccagaccaccacctttcgacttacagcgacgggggtgtctttgcagtctcaacagcttacaaacatgcaaaaaccacagagctcccacaacaacgatcatcttcagttgctacccaacagacaacggtatcttccatcccatctcatccatctactgctggaaaaatcttccgtgccatgtatgactatatggctgctgatgcagatgaggtgtccttcaaggatggagatgccatcataaatgttcaagcaattgatgaaggctggatgtatggcactgtgcagaggactggcaggaccggaatgctcccagccaactacgttgaagctatttaggcatttcaaagcatcacacttgtctgcaggacttacagatcctgcagtcaatgtttcggtttagactctccactgttacctaagttctcaagctgcctatggtttttctgtgtcaatgtgatttatggtagtaccatcctttctcctttgggttttaaaataagttgcagaacagacactttaaaagcttctgcaatattatttctgtgcctagagtctttctccattataaacatgttttaacattatttcttttctaaaacagggattttgaatatgccaaacacattaaaggaaaaatagcagagatgttcaccttttccttgctgattgctaatgcttattatttctaattcagttctgaagttataaacttataatcaatacaaaccagcaactaataaaacctctaattctgc

SEQ ID NO: 19678 - DNA, 25458 bp, Homo sapiens
  source 1..25458: mol_type = unassigned DNA
aggcatcacgctggcttttgcctggggttctcaggaggggagagttgggagaggctttgctgctgaggaaatttatttggtagattgaaggtttgaacgagagctacagaaacgaaagaaaaagtctgtataagccaatggtgttcgggaagaaaataaccccattgccttgagtttgtaggtgccactactactctggaaaaatggcagatgacgaagactatgaggaggtggtggagtactacacagaagaagtggtttacgaagaggtgccgggagagacaataacaaaaatttatgagactacgacaacaaggacatctgactatgagcaatcagaaacttccaaaccagctctggcacagccagcactggcacagccagcatcagcaaagccggtggagaggaggaaggtcatccggaagaaagtggatccttcaaagttcatgaccccctacattgcacacagtcagaaaatgcaggatctttttagcccaaataaatacaaggagaagtttgagaaaacaaaaggacagccatacgccagcacaacagatactccagaacttcgcagaatcaaaaaagtacaagatcaactcagtgaggttaagtatcgaatggatggtgatgttgctaagactatatgtcacgtagatgaaaaagcaaaggatattgaacatgcaaagaaagtgtcgcagcaagtcagtaaggttttatacaagcagaactgggaagacaccaaggataagtacctgcttcctcctgatgcccctgaacttgtccaggccgttaagaacaccgccatgttcagcaagaaactgtacactgaagactgggaagcagacaaaagtttgttttacccctataatgatagcccggaactgaggagagttgcccaggcccagaaagctctcagtgatgttgcctacaaaaaaggtctcgctgaacagcaagctcaattcacgcctctggctgatcctccagatatagaatttgccaagaaagtaaccaatcaagtgagcaagcaaaaatacaaagaagactatgaaaataaaatcaaaggcaaatggagtgagacaccttgctttgaagttgcaaatgccagaatgaatgctgataacattagcacaaggaaataccaggaagattttgaaaacatgaaagaccagatctacttcatgcagaccgaaacaccagagtataaaatgaataaaaaagctggtgtggcagctagcaaggtaaaatacaaagaagactatgaaaagaataaaggaaaagcagattataatgtgcttcctgcttcagagaacccacagcttaggcagctgaaggcagcaggagatgccctaagtgacaaactatacaaggaaaactatgaaaagacaaaagcaaagagcataaattactgcgagacccccaaattcaagctcgatactgttctgcagaacttcagtagtgataaaaaatataaagattcctacttaaaagatattttgggacattatgtaggcagcttcgaggatccataccattcacactgcatgaaagtcacagctcaaaacagtgataaaaactacaaagcagaatacgaagaagacagaggcaaaggcttcttccctcagaccataactcaagaatatgaagcaattaagaaactagatcagtgtaaagaccacacctacaaagtccatccagataagacaaaattcacccaagttacagactctcctgttctgctacaagcccaagtcaattccaaacaactgagtgacttaaattacaaagcaaaacatgaaagtgaaaagttcaagtgccatatcccccctgatactcctgcttttatccagcacaaagtcaatgcctataacttgagtgataatctttataagcaagactgggagaagagcaaagccaaaaagtttgacattaaagtggatgccattcccctgctggcagccaaagccaacaccaagaacaccagcgatgtgatgtacaagaaagactatgaaaaaaacaaagggaaaatgattggagtcctcagcattaatgacgatcccaagatgctgcactccttgaaggtggccaaaaaccagagtgatagattatacaaggaaaactatgagaagacaaaggcaaagagtatgaattactgtgagaccccaaaatatcaacttgatactcagctgaagaacttcagtgaggctagatataaagacttatatgtaaaggatgttttgggacattatgtaggcagcatggaggacccatatcacacacactgcatgaaagttgcagctcaaaacagtgataaaagttacaaagcagaatatgaagaagataaaggaaaatgctatttccctcagacaataacacaagaatatgaagcaatcaagaagctggaccagtgtaaagatcatacctacaaagttcatccagataagaccaaattcacggcagtcactgattctcctgtactgttgcaagcccagctcaacacgaaacagcttagtgatctgaattacaaagcaaaacatgaaggtgagaagttcaagtgccatataccagcagatgctccacagtttatccaacacagagtcaatgcctataatctgagtgataatgtttataagcaagactgggagaagagcaaagccaagaagtttgacattaaagtggacgccattcccctgttggcagccaaagccaacaccaagaacaccagcgatgtgatgtacaagaaagactatgaaaagagcaaagggaaaatgattggagccctcagcattaatgacgatccaaagatgctgcactccttgaagacagccaaaaaccagagtgatcgcgaatatcgaaaagattatgaaaagtcaaaaactatctacacggcacctcttgatatgctccaagtcactcaagctaagaaatctcaggcaattgccagcgacgttgattataagcacatcttacacagttacagctacccccctgatagcatcaatgtggaccttgccaagaaggcatatgcgctgcagagcgatgttgaatacaaagctgactacaatagctggatgaaaggttgtggctgggtgccttttgggtccttagaaatggaaaaggcaaagcgagcttcagacatcctcaatgagaaaaaatatcgccaacatccagacaccctcaagtttacctcgattgaagatgctccaattacagtacagtctaaaattaaccaggcccagaggagtgatatcgcttacaaagccaaaggagaggaaattattcacaaatacaacctgccaccagacctgccccagttcatccaggctaaagttaatgcctacaatatcagtgagaatatgtacaaagcagacttgaaagacttgagcaagaagggatatgacctgagaactgatgcgattcccatcagagctgccaaagctgccaggcaggcggcgagtgacgttcagtacaaaaaagactatgaaaaggctaaagggaaaatggttggcttccaaagtcttcaagatgaccctaaactggttcattatatgaacgtggccaagatacaatcagatcgggagtataaaaaagactatgagaagacaaagtccaaatacaacacgccccatgatatgttcaatgtcgtggcggctaagaaagcccaggatgtggtcagcaatgtcaactataagcattctctccatcattacacctacttgcctgacgccatggacctggagctgtctaagaacatgatgcagatacagagtgataacgtctacaaggaagactacaacaactggatgaaaggcattggctggattcctattggcagtctcgacgtcgaaaaagttaaaaaggccggtgatgctctgaatgaaaagaagtacaggcaacatccagacaccctcaaatttaccagcattgtggactccccagttatggtccaggcaaaacagaacacgaagcaagtcagtgatatcttatacaaggctaaaggagaagatgtgaaacataaatacaccatgagtcctgatcttcctcagtttctccaggccaagtgcaatgcttacaatataagtgacgtctgttataaacgggattggtatgacttaatagccaagggcaacaatgtgctgggcgatgctattcccatcactgcagccaaggcatcgagaaacattgccagtgattataaatacaaggaagcttatgagaagtcaaagggaaagcatgtgggtttcagaagcctccaggatgatcccaagctggtccactatatgaatgtggcaaagctgcagtctgatcgtgaatacaagaagaactatgagaacaccaaaaccagctaccatacccctggggacatggttagcatcacagctgcaaagatggcccaggatgtcgctaccaatgtcaactacaaacagccattgcatcattacacatacctacctgacgccatgagtcttgagcatacgaggaatgtcaatcaaattcagagtgataatgtgtataaagacgagtataacagcttcttgaagggcatcggatggatccctattggttccctggaggtggagaaggtcaagaaagcaggcgatgcattaaatgagaggaagtatcgacagcacccagataccgtcaagttcacaagtgtgcctgattccatgggcatggtgttggctcagcataacacaaagcagctaagtgatttgaactacaaggtagagggagagaaactgaagcacaagtatactattgaccctgaattgcctcagtttattcaagccaaagtcaacgccctcaacatgagtgatgctcattataaagcagattggaagaaaaccattgccaagggctatgatttgagaccagatgccatcccaattgttgctgcaaaaagttcaaggaatattgctagtgattgcaaatataaggaggcctacgagaaagccaaaggcaagcaagttggatttctcagtcttcaggatgatcctaaactggttcactacatgaatgtggccaaaatccagtctgatcgtgagtacaaaaagggctatgaagccagcaagaccaagtaccacacacctctggatatggtcagtgtgacagctgcaaagaaatctcaggaggttgccaccaacgccaactacagacagtcataccaccactacactctcctgcccgatgccttgaatgtggagcactccaggaatgccatgcagattcagagtgataatctgtacaaatctgacttcaccaattggatgaaagggatcggctgggtgcccatagagtccctggaggtggagaaggcaaagaaagcaggagagattcttagtgagaagaagtatcgccagcaccccgagaagctgaagttcacttacgccatggacacaatggaacaggcacttaacaagagtaacaaactgaacatggacaagaggctctacactgaaaaatggaacaaggacaagaccaccattcatgtcatgcctgacacaccggatattttactctccagagtaaaccaaatcaccatgagtgataaactgtacaaagctggctgggaagaggaaaagaagaaaggatatgacctgaggcctgatgccattgcaataaaggctgcaagagcctctagagacattgccagtgattacaaatacaagaaagcctatgaacaagccaaagggaaacacattggcttccggagcctggaagatgaccccaagctggtgcacttcatgcaagtggccaagatgcagtcagaccgggaatacaagaagggatatgagaaatccaagacctccttccacaccccggtggacatgctcagtgtggtggcagccaagaagtctcaggaagtggccaccaatgccaactacaggaacgtgatccatacctacaacatgcttcctgatgccatgagctttgaattggccaaaaatatgatgcagattcaaagtgataatcagtacaaggctgactatgctgacttcatgaagggcattggatggctccctctgggctccctggaagcagagaaaaacaagaaagccatggagattattagtgaaaagaagtaccgccagcacccagacactttgaagtattccacactcatggactcgatgaacatggttttggcccagaataatgcaaaaattatgaacgaacatctctacaaacaagcatgggaggctgacaaaaccaaagtccacatcatgcctgatatcccccagattattttggcaaaggcaaatgcaattaatatgagtgataaactctacaaactttccttggaagagtctaaaaagaaaggctatgatctcagacctgatgcaattcctatcaaagctgccaaggcttccagagatattgcaagtgattataaatacaagtacaattatgaaaaagggaaggggaaaatggttggtttccgcagtctcgaggatgatcccaaattagtccattccatgcaagtggctaagatgcaatctgatcgggagtacaagaaaaactatgagaacacaaagaccagctaccacacccctgccgacatgctcagtgtcacggctgcaaaggatgcccaagccaacatcaccaacactaactacaagcacctgattcacaagtacatcctccttccagatgcaatgaacattgagctgaccaggaatatgaatcgcatacagagtgataatgaatataagcaagattacaatgaatggtacaaagggcttggctggagtccagcaggttctctggaagtggagaaggccaagaaagcaactgaatatgccagtgatcagaaataccgccagcacccgagcaacttccagtttaagaagctgactgattccatggacatggtgcttgccaagcagaatgcacataccatgaacaagcatttatacaccattgattggaataaagataagaccaagattcatgtgatgcctgatacaccagatattttacaagccaagcagaatcaaacactgtatagtcagaaactctataaacttggatgggaagaagctttgaagaaaggctatgatctcccagttgatgcaatttctgtacagctagctaaagcttcaagagacattgctagtgattataaatacaaacaaggctaccgaaagcaacttggccaccatgttggattccggagtctgcaagatgacccaaaacttgtgttgtccatgaatgtagccaaaatgcagagtgaaagagaatacaagaaggactttgagaagtggaaaactaagttctccagcccagtggacatgttgggagtggtactggccaagaagtgtcaggagttggttagtgacgtggactacaagaactacctgcatcagtggacatgtctgcctgatcagaacgatgttgtgcaagctaagaaagtttatgaactgcaaagtgagaatctatataaatctgaccttgagtggctgagaggcataggatggagtcccttgggttctttagaggcagaaaagaacaagcgggcttcggaaatcatcagtgagaagaaatatcgtcagcctccagacagaaacaagttcaccagcattcctgatgccatggatatagttctggcaaagacaaatgccaaaaataggagtgatagactttatagagaagcttgggacaaagacaagactcagatccacatcatgcctgatacacctgacattgttctggctaaagcaaacttaatcaacacaagtgataaactctaccgaatgggttatgaggagctgaagagaaaaggttacgatcttcctgttgatgccataccaatcaaagcagcaaaagcctcccgggaaattgccagtgaatacaagtacaaggaaggctttcgcaagcagctcggccaccacattggtgcccggaacattgaagatgaccccaagatgatgtggtccatgcatgtggccaagatccagagtgacagggagtacaagaaggactttgagaagtggaagaccaagttcagcagcccagtggacatgctgggggtggtgttggccaagaagtgccagaccttagtcagcgacgtggactacaagaactacctgcaccagtggacatgcctgcccgaccagagcgatgtcatccatgctcggcaggcctatgacctccagagcgataatttgtacaagtcagaccttcagtggctaaaaggcattggctggatgactagtggttctctcgaggatgagaaaaataaacgagccacccagattttgagtgaccatgtttaccgtcagcacccagatcaatttaagttttccagccttatggattccataccaatggttttggcaaaaaacaatgctattaccatgaatcatcgcctctatacagaagcttgggataaagataaaaccactgtccacattatgccagatacccctgaagttttattagctaaacaaaacaaagtaaattacagtgagaaattgtataagcttggcctagaagaagccaagaggaaaggttatgacatgcgggtagatgccattcctatcaaggcagccaaggcctccagagatattgcaagtgaattcaagtacaaagaaggctatcgtaagcagctcggccaccacattggtgcccgagctatacgtgatgaccccaagatgatgtggtccatgcacgtggccaagatccagagtgacagggagtacaagaaggactttgagaagtggaagaccaagttcagcagcccagtggacatgctgggggtggtgctggccaagaagtgccagaccttagtcagcgatgtggactacaagaactacctgcaccagtggacatgcctgcccgaccagagcgacgtcatccatgctcggcaggcctatgacctccagagcgataatatgtacaagtctgatctccagtggatgagaggcattggctgggtgtccattggctctttggatgtggaaaaatgcaaaagggcaactgaaattttgagtgataaaatctatcgccagcctccagacagattcaaatttaccagtgtgactgactctctggaacaagtgttggccaaaaataatgccatcactatgaacaagcgtttatacacagaagcctgggacaaagacaagactcagatccacataatgccagacacaccagaaattatgttggcaagaatgaacaaaatcaactacagtgagagtctgtacaaacttgctaatgaagaagcaaagaagaaaggctatgacttgcgaagcgacgccatccccatcgtggcggccaaggcctccagggacatcatcagtgactacaaatataaagatggttactgcaagcaacttggccaccatattggagcccggaacattgaagatgaccccaagatgatgtggtccatgcacgtagccaagatccagagtgacagggagtacaaaaaggactttgagaagtggaagaccaagttcagcagcccagtggacatgctgggggtggtgctggccaagaagtgccagaccttagtcagtgacgtggactataagaactacctgcacgagtggacatgcctgcctgaccagagcgatgtcatccatgctcggcaggcctatgacctccagagtgacaatatttacaagtcagatctccagtggctgagaggcattggctgggtccccattgggtctatggatgtggtcaagtgcaagagagctaccgaaatactgagtgataacatctaccgccagcctccggacaagctgaaatttaccagtgtgactgattctctagagcaggtgctggccaagaacaatgctctcaacatgaataagcgtttatacacagaggcctgggacaaagacaagactcaaattcacataatgcctgatacaccagagattatgttggcaaggcagaacaaaatcaactacagtgagactctatacaaacttgccaatgaagaagcaaaaaagaaaggctacgacttgcgaagtgacgccatccccatcgtggctgccaaggcctccagggacgttatcagtgattacaaatacaaagatggttaccgcaagcagctcggccaccacattggagcccggaacattgaagatgaccccaagatgatgtggtccatgcatgtggccaagatccagagtgacagggagtataagaaggactttgagaagtggaagaccaagttcagcagcccagtggacatgctgggagtggtgttagccaagaagtgccagaccttagtcagcgatgtggactacaagaactacctgcacgagtggacgtgcctgcccgaccagaatgatgtcatccatgctcggcaggcctatgacctccagagcgataacatttacaaatctgatctccagtggctgagaggcattggctgggtccccattgggtctatggatgtggtcaagtgcaagagagctgctgaaatactgagtgataacatctaccgccagcctccggacaagctgaaatttaccagtgtgactgactctctagagcaggtgctggccaagaacaatgctctcaatatgaacaagcgcttatacacagaagcctgggacaaagacaagacccaagtccatattatgcctgatacacctgaaatcatgttggcaagacaaaataaaataaattatagtgagagcctctatcgtcaggccatggaagaagccaagaaagaaggctatgacttgagaagtgatgccattcccattgtggctgccaaggcctctcgggatattgccagtgattacaaatacaaagaagcatatcgtaaacagttgggtcaccacattggcgcccgagcagtacacgatgaccccaagataatgtggtccctccacattgccaaagtgcagagtgaccgtgagtacaagaaagattttgagaaatacaagacaaggtacagcagcccagtggacatgcttggtatcgttttggccaagaagtgtcagaccttggtcagcgatgtggactataaacatcctctgcatgaatggatctgcctgcccgaccagaatgacatcattcatgcacggaaagcctatgacctccagagtgacaatttgtataagtcagaccttgaatggatgaaaggcattggctgggttccgattgattccttggaagttgttagggccaagagagctggagaattacttagtgatactatctaccgtcagcgtccagaaacgctgaaatttaccagtataacggacactccggagcaggtgctggcaaaaaacaatgctttaaacatgaataagcgcttatatactgaagcctgggacaatgacaagaaaactattcatgtcatgcctgatacaccagaaatcatgttagccaaactcaaccgaataaactacagtgataaactctataaacttgctttggaagagtccaagaaggaaggctatgacttgcgtctggatgccattccaatccaagcagccaaggcttcaagagatattgctagtgattacaagtacaaggaaggctaccgcaaacagcttggccaccatattggggcccggaacattaaggatgacccgaagatgatgtggtccatccatgtggccaagatccagagtgacagggagtacaagaaggagtttgagaagtggaagaccaagttcagcagcccagtggacatgctgggggtggtgctggccaagaagtgtcagatccttgtaagcgacatagactacaagcatcccctgcatgaatggacctgcctgcctgatcagaatgacgtcattcaggctcggaaggcctatgacctgcagagtgatgctatttacaaatctgatcttgagtggctgagaggcataggatgggttcccattggctctgtagaggtcgagaaagtgaagagagctggagaaatcctgagtgacaggaagtatcgccagcctgcagaccagctcaaattcacatgcattaccgacactccggaaattgtcctagcaaagaataatgccctgacaatgagcaagcatttatacacagaagcttgggatgctgacaaaacctccatccacgtgatgccagacaccccagatatcctgctggccaagagtaattctgccaatatcagccaaaaactttacaccaagggatgggatgaatcaaagatgaaggactatgatctgagagcagatgctatttccatcaaaagtgccaaggcctccagggacatcgccagtgactacaaatacaaggaagcctatgagaaacagaaaggccaccacattggagcccagagcattgaagatgatcccaagattatgtgtgccatacatgcaggaaaaattcaaagtgaaagggagtacaagaaggaattccaaaagtggaaaaccaagttctctagcccagtggacatgttaagcatcttgctggccaagaaatgtcagactttggtcactgacattgattatcgcaattacctgcatgaatggacatgcatgccggatcaaaacgacattatccaagcaaaaaaggcctatgacctgcagagtgatagtgtgtataaggcagacctggagtggctgcgtggcatcggctggatgccagaaggctcagtggaaatgaacagagtgaaggttgctcaagacctcgtgaatgaaagactctataggacacgtccagaagctttgtcattcaccagcattgtcgacactccagaagttgtcttggcaaaagccaattctctgcaaataagtgagaaactgtatcaggaagcctggaataaagataaaagcaacatcaccattccttctgatactccggagatgctgcaggcccacatcaatgccttgcaaatcagcaataaactctaccaaaaagactggaatgacgccaagcagaaaggctatgacataagggcagatgccattgaaatcaagcacgccaaggcctccagagaaattgccagtgagtacaaatacaaagaaggttaccgtaagcaactgggccaccacatgggtttccgcaccctacaagatgaccccaagtcagtatgggctatacatgctgccaagatccagagtgacagagaatataagaaagcttatgagaagtctaaaggaattcacaacacaccgttggacatgatgtcaattgttcaagccaagaaatgccaggtcctggttagcgacattgattatcgcaattatctgcaccagtggacgtgtctgccagatcagaacgatgtgatccaggccaagaaagcctacgacctgcagagcgataacttgtacaagtcagacctggaatggctgaagggtattggatggctgccagagggttctgtggaagtgatgagagtgaagaatgcccagaatctcttgaatgaaaggctgtatcgtataaagcctgaggccctcaaattcaccagcattgttgacaccccggaagtaatccaggcaaagatcaatgctgtacagatcagtgagccattgtatcgcgatgcctgggagaaagagaaggctaatgtgaacgtgccagctgacactcccctgatgctgcaatccaaaatcaatgccctgcagatcagcaataaacgctatcagcaagcttgggaagatgtcaagatgactggttatgacctgcgagcagatgccattgggatccagcatgccaaggcttccagggatattgccagtgactatctgtacaaaactgcttatgagaaacagaaaggccattacattggctgtcgcagcgccaaggaagaccctaaactggtttgggcagcaaatgtgttgaagatgcagaatgacaggctgtacaaaaaggcctacaacgaccacaaagccaagatctccatccctgtggacatggtgtccatcagcgctgccaaagaaggtcaggcactggcaagtgatgtggactatcgccattacctgcaccactggtcttgctttcccgaccagaatgatgtgatccaagccaggaaagcctacgacctacagagcgacagtgtgtataaggcagacctggagtggctgcgtggcatcggctggatgccagaaggctcagtggaaatgaacagagtgaaggttgctcaagacctcgtgaatgaaagactctataggacacgtccagaagctttgtcattcaccagcattgtcgacactccagaagttgtcttggcaaaagccaattctctgcaaataagtgagaaactgtatcaggaagcctggaataaagataaaagcaacatcaccattccttctgatactccggagatgctgcaggcccacatcaatgccttgcaaatcagcaataaactctaccaaaaagactggaatgacaccaagcagaaaggctatgacataagggcagatgccattgaaatcaagcacgccaaggcctccagagaaattgccagtgagtacaaatacaaagaaggttaccgtaagcaactgggccaccacatgggtttccgcaccctacaagatgaccccaagtcagtatgggctatacatgctgccaagatccagagtgacagagaatataagaaagcttatgagaagtctaaaggaattcacaacacaccgttggacatgatgtcaattgttcaagccaagaaatgccaggtcctggttagcgacattgattatcgcaattatctgcaccagtggacgtgtctgccagatcagaacgatgtgatccaggccaagaaagcctacgacctgcagagcgataacttgtacaagtcagacctggaatggctgaagggtattggatggttgccagagggttctgtggaagtgatgagagtgaagaatgcccagaatctcttgaatgaaaggctgtatcgtataaagcctgaggccctcaaattcaccagcattgttgacaccccggaagtaatccaggcaaagatcaatgctgtacagatcagtgagccattgtatcgcaatgcctgggagaaagagaaggctaatgtgaacgtgccagctgacactcccctgatgctgcaatccaaaatcaatgctctgcagatcagcaataaacgctatcagcaagcttgggaagatgtcaagatgactggttatgacctgcgagcagatgccattgggatccagcatgccaaggcttccagggatattgccagtgattatctgtacaaaactgcttatgagaaacagaaaggccattacattggctgtcgcagcgccaaggaagaccctaaactggtttgggcagcaaatgtgttgaagatgcagaatgacaggctgtacaaaaaggcctacaacgaccacaaagccaagatctccatccctgtggacatggtgtccatcagcgctgccaaagaaggtcaggcactggcaagtgatgtggactatcgccattacctgcaccactggtcttgctttcccgaccagaatgatgtgatccaagccaggaaagcctacgacctacagagcgacagtgtgtataaggcagacctggagtggctgcgtggcatcggctggatgccagaaggctcagtggaaatgaacagagtgaaggttgctcaagacctcgtgaatgaaagactctataggacacgtccagaagctttgtcattcaccagcattgtcgacactccagaagttgtcttggcaaaagccaattctctgcaaataagtgagaaactgtatcaggaagcctggaataaagataaaagcaacatcaccattccttctgatactccggagatgctgcaggcccacatcaatgccttgcaaatcagcaataaactctaccaaaaagactggaatgacaccaagcagaaaggctatgacataagggcagatgccattgaaatcaagcacgccaaggcctccagagaaattgccagtgagtacaaatacaaagaaggttaccgtaagcaactgggccaccacatgggtttccgcaccctacaagatgaccccaagtcagtatgggctatacatgctgccaagatccagagtgacagagaatataagaaagcttatgagaagtctaaaggaattcacaacacaccgttggacatgatgtcaattgttcaagccaagaaatgccaggtcctggttagcgacattgattatcgcaattatctgcaccagtggacgtgtctgccagatcagaacgatgtgatccaggccaagaaagcctacgacctgcagagcgataacttgtacaagtcagacctggaatggctgaagggtattggatggttgccagagggttctgtggaagtgatgagagtgaagaatgcccagaatctcttgaatgaaaggctgtatcgtataaagcctgaggccctcaaattcaccagcattgttgacaccccggaagtaatccaggcaaagatcaatgctgtacagatcagtgagccattgtatcgcgatgcctgggagaaagagaaggctaatgtgaacgtgccagctgacactcccctgatgctgcaatccaaaatcaatgccctgcagatcagcaataaacgctatcagcaagcttgggaagatgtcaagatgactggttatgacctgcgagcagatgccattgggatccagcatgccaaggcttccagggatattgccagtgactatctgtacaaaactgcttatgagaaacagaaaggccattacattggctgtcgcagcgccaaggaagaccctaaactggtttgggcagcaaatgtgttgaagatgcagaatgacaggctgtacaaaaaggcctacaacgaccacaaagccaagatctccatccctgtggacatggtgtccatcagcgctgccaaagaaggtcaggcactggcaagtgatgtggactatcgccattacctgcaccgctggtcttgctttcccgaccagaatgatgtgatccaagccaggaaagcctacgacctacagagcgacgccctctacaaggctgacttggagtggttgcgtggcattggctggatgccccaagggtctcctgaagtgttgagagtcaaaaacgcccagaatatcttttgtgacagtgtctatcggacgcctgtggtgaaccttaagtacacaagcattgttgacacacctgaagtggtccttgctaaatcaaatgctgaaaatattagtattccaaagtacagagaggtttgggacaaggataaaacttcaatacacataatgccagatactccagaaattaatctcgctagagcaaatgctcttaatgtgagcaataaactttaccgtgagggctgggatgaaatgaaggcgggctgtgatgtccggctggatgccatccccatccaggctgccaaggcctccagggagattgccagtgactataaatataagcttgaccatgagaagcagaagggacactacgtgggcaccctcacagccagggatgacaacaagatccgctgggccctcatagctgacaagctccagaatgaacgagagtaccggctggactgggccaaatggaaggccaagatccagagccctgtggacatgctttccatcctgcactctaaaaattcccaggctctggtcagtgacatggattaccgcaattacctgcaccagtggacctgcatgcccgaccagaacgatgtgattcaggccaagaaggcctacgaactgcagagcgataatgtttacaaggctgacttggaatggttgcgtggaattgggtggatgccaaatgactccgtgtccgtcaatcatgccaaacatgccgcggacatcttcagtgagaaaaaatatcgcacaaaaatagaaactctcaactttacgcctgtggatgacagagttgattatgtgacagcgaaacaaagtggcgagatcctcgatgatattaaataccggaaagactggaatgccaccaaatcaaagtacaccctcacagaaacccccctgctgcacactgcccaggaggctgctaggatactggaccagtatctctacaaggaaggctgggagagacaaaaagccacaggttacattttgcctccagatgctgtgccatttgttcatgcccatcactgcaatgacgttcagagtgagctgaaatacaaagctgaacatgtgaagcaaaaaggtcattatgttggtgtcccgacgatgagagatgatcctaagctggtttggtttgagcatgcaggccagattcagaatgagagactatacaaagaggactatcacaaaacaaaggccaaaatcaatatacctgctgatatggtgtcagtcttggccgccaagcaggggcagacccttgtcagtgatattgattatcgtaattacttgcaccaatggatgtgtcatcctgaccagaacgatgttattcaggcaagaaaggcctatgacctacagagtgataatgtctacagagctgacctggagtggctccgaggcattggctggatcccactggattctgtggaccatgtaagggttactaagaaccaggaaatgatgagtcagatcaaatataagaaaaatgcccttgaaaactatcctaactttagaagtgtggtggatcctccagagattgttttagccaagattaattctgtcaatcaaagtgatgtaaaatataaagaaacatttaataaagcaaagggcaaatatacgttttcaccagatacaccacatatctcccactccaaagacatgggaaaactctacagtactatactgtataaaggggcgtgggagggcaccaaggcctatggctacaccctggatgagcgctacattcccattgttggagccaagcatgctgatctggtgaacagtgagcttaaatacaaagagacatatgagaagcagaaaggtcactacctggctggaaaagtgatcggtgaattccctggtgtggttcactgtctggatttccaaaagatgaggagtgcgttgaactacagaaaacattatgaggataccaaagcaaatgttcatatccccaatgacatgatgaatcacgtgctggctaaaaggtgccagtacatcctcagtgacctggagtatcgacactatttccaccagtggacgtctcttctggaagaacccaatgttatacgcgtccgaaacgcccaggagatcttgagtgataatgtgtataaagatgacctgaattggttgaaaggcattggttgctacgtttgggatacaccccaaatcctccatgccaagaaatcatacgaccttcagagtcagctacaatatacagcagcaggtaaagaaaatctacaaaactataatctggtcacagacacgcccctctatgtgactgctgttcagagtggcattaatgccagtgaggtaaaatataaagaaaattatcatcagattaaggacaaatacacaacagttctagaaacagtggattatgacagaaccagaaacctgaagaatctttacagcagtaacctgtacaaggaggcctgggatagagtgaaagccaccagctacatcctgccttccagcaccttgtccctgacacacgccaagaaccagaagcatctggccagccatatcaaatatcgggaagaatatgaaaagttcaaagctctttatacgttaccaagaagtgttgacgatgatccgaacacagcacggtgcctccgagttggcaagcttaacatcgatcgcctgtacagatcagtttatgaaaagaacaagatgaaaatccacatcgtgcccgacatggtagagatggttactgccaaggattcccagaagaaagtcagtgagattgattaccgcctgcgcctccacgaatggatttgccaccccgacttgcaagtcaatgatcacgtcaggaaagtcacagatcagatcagcgatattgtatacaaggatgacctcaactggctgaaaggcattggttgctacgtctgggacactcctgaaatcctccatgccaagcatgcttatgatctacgtgatgatatcaagtataaagctcacatgttgaaaacaaggaatgactacaagcttgtcacagatacaccagtctacgtgcaggctgtcaaaagtgggaaacagctaagtgacgctgtctaccactatgactatgtgcacagtgtcagaggcaaagtggctccaactaccaaaaccgtggatctggaccgggcccttcatgcatacaagctccagagttcgaatctatacaaaaccagcctgcgcaccctgcccactggatatagacttccaggtgacactcctcacttcaaacacatcaaggacacccgttacatgagcagttatttcaagtacaaagaagcctatgaacacaccaaggcatatgggtatacacttggccccaaagatgttccatttgtccacgtccggagagtcaacaatgttaccagcgagagactgtatcgggaattgtaccacaaactgaaagacaagatccatacaactcccgatacccctgagatccgccaagtcaagaagacacaagaggctgtcagtgagttgatctacaaatcagacttcttcaagatgcagggccacatgatctctctgccatacacaccccaagtgatccattgccgctatgtgggagacatcaccagtgatattaaatacaaagaggacttgcaggtcctgaagggatttggctgcttcctgtatgacactcctgacatggtccgctcccggcacctgcggaagctctggtctaattacctatacactgataaggcaaggaagatgcgagacaaatacaaagtggtgcttgacactccagaatacagaaaagtgcaagaactgaagacacatctgagtgagctggtctacagagctgcaggcaagaagcagaagtcaatctttacttcagttcctgatactcctgatcttttaagagccaagcgagggcagaagcttcagagtcagtatctgtatgttgaacttgccaccaaagagagaccccatcatcacgctggaaaccagaccacagccttgaagcatgctaaagacgtgaaggacatggtcagtgagaaaaagtacaagattcaatatgaaaagatgaaagacaagtacactccggttccagatacgccaatcctcatcagagccaagagggcttactggaatgccagtgatctacgctacaaagaaacatttcaaaagaccaaagggaaataccacacggtgaaagatgccctagacattgtctatcatcgcaaagtcacagatgacatcagtaaaataaaatacaaggagaactacatgagccagttgggtatctggaggtccattcctgatcgtccagagcatttccaccaccgagcagtcactgacacagtcagtgatgtaaaatataaagaagacttgacttggcttaaaggcattggttgctatgcctatgatacccctgatttcactctggctgaaaagaacaagactctctacagcaagtataagtataaagaagtatttgaaaggacaaagtcagatttcaagtatgttgccgactctccgatcaataggcatttcaagtatgcaactcaattgatgaatgagaaaaaatacagagctgattatgagcagcggaaagataaataccacctggtagtcgatgagcctagacatctgctggctaagaccgcaggcgaccagatcagtcagatcaaatacaggaaaaactatgaaaaatcaaaggacaaatttacctcaattgtggatactccagaacacctgcgtactacaaaagtcaacaaacaaatcagcgatatcctttataaattggaatacaacaaggccaaacccagaggctacaccacaatccacgacacacccatgttgctgcatgtccgcaaggttaaagatgaagtcagtgatctgaaatacaaagaagtataccaaagaaataaatccaactgcaccattgagccagatgctgttcatatcaaagcagccaaggacgcctacaaagtcaacaccaatctggactataagaaacagtacgaagccaacaaagcccactggaagtggactcctgaccgaccggacttcctccaggctgccaagtcatccctgcagcaaagcgattttgaatataagctggaccgggagttcctcaagggttgcaagctttctgtcactgatgacaaaaacacggtgctcgccctcaggaatactttaatagaaagtgatctgaaatacaaagagaaacatgtcaaggaaagaggaacctgccatgccgtacctgacacgcctcagatcctgctggcgaagactgtcagcaacctggtgtctgagaacaagtacaaggaccatgtcaagaagcacttggcacagggctcatacacaacactaccagagacccgggacactgttcacgtcaaggaagtgaccaagcatgtcagtgatacaaattacaaaaagaagtttgtcaaggagaaaggaaaatccaactactccatcatgctggagccaccagaggtgaaacatgctatggaagtggccaagaagcaaagtgatgtcgcttacagaaaagatgccaaagagaacctgcattacaccacagtggctgatcgaccagacatcaagaaggccacacaggcagccaaacaggccagtgaggtggagtacagagccaagcaccgcaaggaaggcagccatggcttaagcatgctcggtcgcccagacatagaaatggccaagaaggcagccaagctgagcagccaggttaaataccgagaaaatttcgataaagaaaagggcaagacaccaaaatacaatccaaaagacagccagctctacaaagtcatgaaagatgctaataatcttgcaagtgaggttaaatacaaggctgacctgaagaaacttcacaaacccgtgactgacatgaaggagtctctgatcatgaatcatgtcctgaatacaagccaacttgccagttcttaccagtacaagaagaagtatgagaagagtaaaggccactaccacaccatacccgataatctggagcagcttcacctaaaagaggccacagaattacagagtatagtgaaatacaaagaaaagtatgaaaaggaacgaggaaaacccatgctggactttgaaacaccaacgtacatcactgccaaagagtctcagcagatgcagagtgggaaagaatataggaaagattatgaagagtccattaaaggcagaaacctgactggcctggaggtcacgccagctttgttacatgtcaaatatgcaactaaaatagcaagcgagaaagagtacaggaaagatctagaggaaagcatccgtgggaagggcctcactgaaatggaagatacacctgacatgctaagagcaaagaatgccactcaaatcctcaatgagaaagaatataagcgagacctggaactggaagtcaaaggaagaggcctgaatgccatggccaatgaaactccggattttatgagggccaggaatgctactgatattgccagtcagattaagtataagcaatcagcagaaatggagaaagccaatttcacttctgtggttgatactccagagatcattcatgcccaacaagtcaagaatctttcaagccagaaaaagtacaaggaagatgctgagaagtccatgtcgtattatgagactgttttggacaccccagagatacagagagtccgggagaaccaaaagaacttcagccttctccaataccagtgtgaccttaaaaacagtaaaggaaaaattacagttgttcaagacacgccagaaatactgcgtgtaaaagaaaatcagaagaatttcagctcggttttatataaagaggatgtctcaccaggaacggctatcggaaagacacctgagatgatgagagtgaaacaaacacaggaccacattagctcggtgaagtataaggaagcaataggacaaggaactccaatccctgacctgcctgaagtgaaacgtgtgaaggagacgcagaagcacattagctcggttatgtacaaagaaaacttgggaacaggcattccaaccactgtgactccagagattgagagagtcaaacgcaatcaagagaactttagctcggtgttatacaaagaaaacatgggcaagggaacccctctacctgtcactcctgagatggagagagtcaaacacaatcaagaaaatattagctcggttttgtacaaagaaaatgtggggaaagccaccgcaacccctgtcactcctgagatgcagagagtcaaacgcaatcaagaaaacattagctcggttctttattctgatagtttccggaaacaaatacaaggcaaagctgcctatgtattggatacccccgagatgagacgggtgagggagacccaacggcacatctcaacggtgaaatatcatgaagactttgagaaacacaagggttgcttcacaccagtggtgacagatcctatcactgaacgagtaaagaagaacatgcaggacttcagtgacattaactaccgaggtattcagaggaaagtggtagaaatggaacaaaaacggaatgaccaagatcaggagactattacaggtttacgtgtctggcgtactaatcctggttcggtttttgactatgatccagcagaagacaacatccagtcccgaagcttacacatgattaatgtccaagctcagcgccggagccgggagcagtcacgatctgccagtgcactaagcatcagtgggggtgaggagaagtctgagcattcagaagcaccagaccaccacctttcgacttacagcgacgggggtgtctttgcagtctcaacagcttacaaacatgcaaaaaccacagagctcccacaacaacgatcatcttcagttgctacccaacagacaacggtatcttccatcccatctcatccatctactgctggaaaaatcttccgtgccatgtatgactatatggctgctgatgcagatgaggtgtccttcaaggatggagatgccatcataaatgttcaagcaattgatgaaggctggatgtatggcactgtgcagaggactggcaggaccggaatgctcccagccaactacgttgaagctatttaggcatttcaaagcatcacacttgtctgcaggacttacagatcctgcagtcaatgtttcggtttagactctccactgttacctaagttctcaagctgcctatggtttttctgtgtcaatgtgatttatggtagtaccatcctttctcctttgggttttaaaataagttgcagaacagacactttaaaagcttctgcaatattatttctgtgcctagagtctttctccattataaacatgttttaacattatttcttttctaaaacagggattttgaatatgccaaacacattaaaggaaaaatagcagagatgttcaccttttccttgctgattgctaatgcttattatttctaattcagttctgaagttataaacttataatcaatacaaaccagcaactaataaaacctctaattctgcaa

SEQ ID NO: 19679 - DNA, 26202 bp, Homo sapiens
  source 1..26202: mol_type = unassigned DNA
aggcatcacgctggcttttgcctggggttctcaggaggggagagttgggagaggctttgctgctgaggaaatttatttggtagattgaaggtttgaacgagagctacagaaacgaaagaaaaagtctgtataagccaatggtgttcgggaagaaaataaccccattgccttgagtttgtaggtgccactactactctggaaaaatggcagatgacgaagactatgaggaggtggtggagtactacacagaagaagtggtttacgaagaggtgccgggagagacaataacaaaaatttatgagactacgacaacaaggacatctgactatgagcaatcagaaacttccaaaccagctctggcacagccagcactggcacagccagcatcagcaaagccggtggagaggaggaaggtcatccggaagaaagtggatccttcaaagttcatgaccccctacattgcacacagtcagaaaatgcaggatctttttagcccaaataaatacaaggagaagtttgagaaaacaaaaggacagccatacgccagcacaacagatactccagaacttcgcagaatcaaaaaagtacaagatcaactcagtgaggttaagtatcgaatggatggtgatgttgctaagactatatgtcacgtagatgaaaaagcaaaggatattgaacatgcaaagaaagtgtcgcagcaagtcagtaaggttttatacaagcagaactgggaagacaccaaggataagtacctgcttcctcctgatgcccctgaacttgtccaggccgttaagaacaccgccatgttcagcaagaaactgtacactgaagactgggaagcagacaaaagtttgttttacccctataatgatagcccggaactgaggagagttgcccaggcccagaaagctctcagtgatgttgcctacaaaaaaggtctcgctgaacagcaagctcaattcacgcctctggctgatcctccagatatagaatttgccaagaaagtaaccaatcaagtgagcaagcaaaaatacaaagaagactatgaaaataaaatcaaaggcaaatggagtgagacaccttgctttgaagttgcaaatgccagaatgaatgctgataacattagcacaaggaaataccaggaagattttgaaaacatgaaagaccagatctacttcatgcagaccgaaacaccagagtataaaatgaataaaaaagctggtgtggcagctagcaaggtaaaatacaaagaagactatgaaaagaataaaggaaaagcagattataatgtgcttcctgcttcagagaacccacagcttaggcagctgaaggcagcaggagatgccctaagtgacaaactatacaaggaaaactatgaaaagacaaaagcaaagagcataaattactgcgagacccccaaattcaagctcgatactgttctgcagaacttcagtagtgataaaaaatataaagattcctacttaaaagatattttgggacattatgtaggcagcttcgaggatccataccattcacactgcatgaaagtcacagctcaaaacagtgataaaaactacaaagcagaatacgaagaagacagaggcaaaggcttcttccctcagaccataactcaagaatatgaagcaattaagaaactagatcagtgtaaagaccacacctacaaagtccatccagataagacaaaattcacccaagttacagactctcctgttctgctacaagcccaagtcaattccaaacaactgagtgacttaaattacaaagcaaaacatgaaagtgaaaagttcaagtgccatatcccccctgatactcctgcttttatccagcacaaagtcaatgcctataacttgagtgataatctttataagcaagactgggagaagagcaaagccaaaaagtttgacattaaagtggatgccattcccctgctggcagccaaagccaacaccaagaacaccagcgatgtgatgtacaagaaagactatgaaaaaaacaaagggaaaatgattggagtcctcagcattaatgacgatcccaagatgctgcactccttgaaggtggccaaaaaccagagtgatagattatacaaggaaaactatgagaagacaaaggcaaagagtatgaattactgtgagaccccaaaatatcaacttgatactcagctgaagaacttcagtgaggctagatataaagacttatatgtaaaggatgttttgggacattatgtaggcagcatggaggacccatatcacacacactgcatgaaagttgcagctcaaaacagtgataaaagttacaaagcagaatatgaagaagataaaggaaaatgctatttccctcagacaataacacaagaatatgaagcaatcaagaagctggaccagtgtaaagatcatacctacaaagttcatccagataagaccaaattcacggcagtcactgattctcctgtactgttgcaagcccagctcaacacgaaacagcttagtgatctgaattacaaagcaaaacatgaaggtgagaagttcaagtgccatataccagcagatgctccacagtttatccaacacagagtcaatgcctataatctgagtgataatgtttataagcaagactgggagaagagcaaagccaagaagtttgacattaaagtggacgccattcccctgttggcagccaaagccaacaccaagaacaccagcgatgtgatgtacaagaaagactatgaaaagagcaaagggaaaatgattggagccctcagcattaatgacgatccaaagatgctgcactccttgaagacagccaaaaaccagagtgatcgcgaatatcgaaaagattatgaaaagtcaaaaactatctacacggcacctcttgatatgctccaagtcactcaagctaagaaatctcaggcaattgccagcgacgttgattataagcacatcttacacagttacagctacccccctgatagcatcaatgtggaccttgccaagaaggcatatgcgctgcagagcgatgttgaatacaaagctgactacaatagctggatgaaaggttgtggctgggtgccttttgggtccttagaaatggaaaaggcaaagcgagcttcagacatcctcaatgagaaaaaatatcgccaacatccagacaccctcaagtttacctcgattgaagatgctccaattacagtacagtctaaaattaaccaggcccagaggagtgatatcgcttacaaagccaaaggagaggaaattattcacaaatacaacctgccaccagacctgccccagttcatccaggctaaagttaatgcctacaatatcagtgagaatatgtacaaagcagacttgaaagacttgagcaagaagggatatgacctgagaactgatgcgattcccatcagagctgccaaagctgccaggcaggcggcgagtgacgttcagtacaaaaaagactatgaaaaggctaaagggaaaatggttggcttccaaagtcttcaagatgaccctaaactggttcattatatgaacgtggccaagatacaatcagatcgggagtataaaaaagactatgagaagacaaagtccaaatacaacacgccccatgatatgttcaatgtcgtggcggctaagaaagcccaggatgtggtcagcaatgtcaactataagcattctctccatcattacacctacttgcctgacgccatggacctggagctgtctaagaacatgatgcagatacagagtgataacgtctacaaggaagactacaacaactggatgaaaggcattggctggattcctattggcagtctcgacgtcgaaaaagttaaaaaggccggtgatgctctgaatgaaaagaagtacaggcaacatccagacaccctcaaatttaccagcattgtggactccccagttatggtccaggcaaaacagaacacgaagcaagtcagtgatatcttatacaaggctaaaggagaagatgtgaaacataaatacaccatgagtcctgatcttcctcagtttctccaggccaagtgcaatgcttacaatataagtgacgtctgttataaacgggattggtatgacttaatagccaagggcaacaatgtgctgggcgatgctattcccatcactgcagccaaggcatcgagaaacattgccagtgattataaatacaaggaagcttatgagaagtcaaagggaaagcatgtgggtttcagaagcctccaggatgatcccaagctggtccactatatgaatgtggcaaagctgcagtctgatcgtgaatacaagaagaactatgagaacaccaaaaccagctaccatacccctggggacatggttagcatcacagctgcaaagatggcccaggatgtcgctaccaatgtcaactacaaacagccattgcatcattacacatacctacctgacgccatgagtcttgagcatacgaggaatgtcaatcaaattcagagtgataatgtgtataaagacgagtataacagcttcttgaagggcatcggatggatccctattggttccctggaggtggagaaggtcaagaaagcaggcgatgcattaaatgagaggaagtatcgacagcacccagataccgtcaagttcacaagtgtgcctgattccatgggcatggtgttggctcagcataacacaaagcagctaagtgatttgaactacaaggtagagggagagaaactgaagcacaagtatactattgaccctgaattgcctcagtttattcaagccaaagtcaacgccctcaacatgagtgatgctcattataaagcagattggaagaaaaccattgccaagggctatgatttgagaccagatgccatcccaattgttgctgcaaaaagttcaaggaatattgctagtgattgcaaatataaggaggcctacgagaaagccaaaggcaagcaagttggatttctcagtcttcaggatgatcctaaactggttcactacatgaatgtggccaaaatccagtctgatcgtgagtacaaaaagggctatgaagccagcaagaccaagtaccacacacctctggatatggtcagtgtgacagctgcaaagaaatctcaggaggttgccaccaacgccaactacagacagtcataccaccactacactctcctgcccgatgccttgaatgtggagcactccaggaatgccatgcagattcagagtgataatctgtacaaatctgacttcaccaattggatgaaagggatcggctgggtgcccatagagtccctggaggtggagaaggcaaagaaagcaggagagattcttagtgagaagaagtatcgccagcaccccgagaagctgaagttcacttacgccatggacacaatggaacaggcacttaacaagagtaacaaactgaacatggacaagaggctctacactgaaaaatggaacaaggacaagaccaccattcatgtcatgcctgacacaccggatattttactctccagagtaaaccaaatcaccatgagtgataaactgtacaaagctggctgggaagaggaaaagaagaaaggatatgacctgaggcctgatgccattgcaataaaggctgcaagagcctctagagacattgccagtgattacaaatacaagaaagcctatgaacaagccaaagggaaacacattggcttccggagcctggaagatgaccccaagctggtgcacttcatgcaagtggccaagatgcagtcagaccgggaatacaagaagggatatgagaaatccaagacctccttccacaccccggtggacatgctcagtgtggtggcagccaagaagtctcaggaagtggccaccaatgccaactacaggaacgtgatccatacctacaacatgcttcctgatgccatgagctttgaattggccaaaaatatgatgcagattcaaagtgataatcagtacaaggctgactatgctgacttcatgaagggcattggatggctccctctgggctccctggaagcagagaaaaacaagaaagccatggagattattagtgaaaagaagtaccgccagcacccagacactttgaagtattccacactcatggactcgatgaacatggttttggcccagaataatgcaaaaattatgaacgaacatctctacaaacaagcatgggaggctgacaaaaccaaagtccacatcatgcctgatatcccccagattattttggcaaaggcaaatgcaattaatatgagtgataaactctacaaactttccttggaagagtctaaaaagaaaggctatgatctcagacctgatgcaattcctatcaaagctgccaaggcttccagagatattgcaagtgattataaatacaagtacaattatgaaaaagggaaggggaaaatggttggtttccgcagtctcgaggatgatcccaaattagtccattccatgcaagtggctaagatgcaatctgatcgggagtacaagaaaaactatgagaacacaaagaccagctaccacacccctgccgacatgctcagtgtcacggctgcaaaggatgcccaagccaacatcaccaacactaactacaagcacctgattcacaagtacatcctccttccagatgcaatgaacattgagctgaccaggaatatgaatcgcatacagagtgataatgaatataagcaagattacaatgaatggtacaaagggcttggctggagtccagcaggttctctggaagtggagaaggccaagaaagcaactgaatatgccagtgatcagaaataccgccagcacccgagcaacttccagtttaagaagctgactgattccatggacatggtgcttgccaagcagaatgcacataccatgaacaagcatttatacaccattgattggaataaagataagaccaagattcatgtgatgcctgatacaccagatattttacaagccaagcagaatcaaacactgtatagtcagaaactctataaacttggatgggaagaagctttgaagaaaggctatgatctcccagttgatgcaatttctgtacagctagctaaagcttcaagagacattgctagtgattataaatacaaacaaggctaccgaaagcaacttggccaccatgttggattccggagtctgcaagatgacccaaaacttgtgttgtccatgaatgtagccaaaatgcagagtgaaagagaatacaagaaggactttgagaagtggaaaactaagttctccagcccagtggacatgttgggagtggtactggccaagaagtgtcaggagttggttagtgacgtggactacaagaactacctgcatcagtggacatgtctgcctgatcagaacgatgttgtgcaagctaagaaagtttatgaactgcaaagtgagaatctatataaatctgaccttgagtggctgagaggcataggatggagtcccttgggttctttagaggcagaaaagaacaagcgggcttcggaaatcatcagtgagaagaaatatcgtcagcctccagacagaaacaagttcaccagcattcctgatgccatggatatagttctggcaaagacaaatgccaaaaataggagtgatagactttatagagaagcttgggacaaagacaagactcagatccacatcatgcctgatacacctgacattgttctggctaaagcaaacttaatcaacacaagtgataaactctaccgaatgggttatgaggagctgaagagaaaaggttacgatcttcctgttgatgccataccaatcaaagcagcaaaagcctcccgggaaattgccagtgaatacaagtacaaggaaggctttcgcaagcagctcggccaccacattggtgcccggaacattgaagatgaccccaagatgatgtggtccatgcatgtggccaagatccagagtgacagggagtacaagaaggactttgagaagtggaagaccaagttcagcagcccagtggacatgctgggggtggtgttggccaagaagtgccagaccttagtcagcgacgtggactacaagaactacctgcaccagtggacatgcctgcccgaccagagcgatgtcatccatgctcggcaggcctatgacctccagagcgataatttgtacaagtcagaccttcagtggctaaaaggcattggctggatgactagtggttctctcgaggatgagaaaaataaacgagccacccagattttgagtgaccatgtttaccgtcagcacccagatcaatttaagttttccagccttatggattccataccaatggttttggcaaaaaacaatgctattaccatgaatcatcgcctctatacagaagcttgggataaagataaaaccactgtccacattatgccagatacccctgaagttttattagctaaacaaaacaaagtaaattacagtgagaaattgtataagcttggcctagaagaagccaagaggaaaggttatgacatgcgggtagatgccattcctatcaaggcagccaaggcctccagagatattgcaagtgaattcaagtacaaagaaggctatcgtaagcagctcggccaccacattggtgcccgagctatacgtgatgaccccaagatgatgtggtccatgcacgtggccaagatccagagtgacagggagtacaagaaggactttgagaagtggaagaccaagttcagcagcccagtggacatgctgggggtggtgctggccaagaagtgccagaccttagtcagcgatgtggactacaagaactacctgcaccagtggacatgcctgcccgaccagagcgacgtcatccatgctcggcaggcctatgacctccagagcgataatatgtacaagtctgatctccagtggatgagaggcattggctgggtgtccattggctctttggatgtggaaaaatgcaaaagggcaactgaaattttgagtgataaaatctatcgccagcctccagacagattcaaatttaccagtgtgactgactctctggaacaagtgttggccaaaaataatgccatcactatgaacaagcgtttatacacagaagcctgggacaaagacaagactcagatccacataatgccagacacaccagaaattatgttggcaagaatgaacaaaatcaactacagtgagagtctgtacaaacttgctaatgaagaagcaaagaagaaaggctatgacttgcgaagcgacgccatccccatcgtggcggccaaggcctccagggacatcatcagtgactacaaatataaagatggttactgcaagcaacttggccaccatattggagcccggaacattgaagatgaccccaagatgatgtggtccatgcacgtagccaagatccagagtgacagggagtacaaaaaggactttgagaagtggaagaccaagttcagcagcccagtggacatgctgggggtggtgctggccaagaagtgccagaccttagtcagtgacgtggactataagaactacctgcacgagtggacatgcctgcctgaccagagcgatgtcatccatgctcggcaggcctatgacctccagagtgacaatatttacaagtcagatctccagtggctgagaggcattggctgggtccccattgggtctatggatgtggtcaagtgcaagagagctaccgaaatactgagtgataacatctaccgccagcctccggacaagctgaaatttaccagtgtgactgattctctagagcaggtgctggccaagaacaatgctctcaacatgaataagcgtttatacacagaggcctgggacaaagacaagactcaaattcacataatgcctgatacaccagagattatgttggcaaggcagaacaaaatcaactacagtgagactctatacaaacttgccaatgaagaagcaaaaaagaaaggctacgacttgcgaagtgacgccatccccatcgtggctgccaaggcctccagggacgttatcagtgattacaaatacaaagatggttaccgcaagcagctcggccaccacattggagcccggaacattgaagatgaccccaagatgatgtggtccatgcatgtggccaagatccagagtgacagggagtataagaaggactttgagaagtggaagaccaagttcagcagcccagtggacatgctgggagtggtgttagccaagaagtgccagaccttagtcagcgatgtggactacaagaactacctgcacgagtggacgtgcctgcccgaccagaatgatgtcatccatgctcggcaggcctatgacctccagagcgataacatttacaaatctgatctccagtggctgagaggcattggctgggtccccattgggtctatggatgtggtcaagtgcaagagagctgctgaaatactgagtgataacatctaccgccagcctccggacaagctgaaatttaccagtgtgactgactctctagagcaggtgctggccaagaacaatgctctcaatatgaacaagcgcttatacacagaagcctgggacaaagacaagacccaagtccatattatgcctgatacacctgaaatcatgttggcaagacaaaataaaataaattatagtgagagcctctatcgtcaggccatggaagaagccaagaaagaaggctatgacttgagaagtgatgccattcccattgtggctgccaaggcctctcgggatattgccagtgattacaaatacaaagaagcatatcgtaaacagttgggtcaccacattggcgcccgagcagtacacgatgaccccaagataatgtggtccctccacattgccaaagtgcagagtgaccgtgagtacaagaaagattttgagaaatacaagacaaggtacagcagcccagtggacatgcttggtatcgttttggccaagaagtgtcagaccttggtcagcgatgtggactataaacatcctctgcatgaatggatctgcctgcccgaccagaatgacatcattcatgcacggaaagcctatgacctccagagtgacaatttgtataagtcagaccttgaatggatgaaaggcattggctgggttccgattgattccttggaagttgttagggccaagagagctggagaattacttagtgatactatctaccgtcagcgtccagaaacgctgaaatttaccagtataacggacactccggagcaggtgctggcaaaaaacaatgctttaaacatgaataagcgcttatatactgaagcctgggacaatgacaagaaaactattcatgtcatgcctgatacaccagaaatcatgttagccaaactcaaccgaataaactacagtgataaactctataaacttgctttggaagagtccaagaaggaaggctatgacttgcgtctggatgccattccaatccaagcagccaaggcttcaagagatattgctagtgattacaagtacaaggaaggctaccgcaaacagcttggccaccatattggggcccggaacattaaggatgacccgaagatgatgtggtccatccatgtggccaagatccagagtgacagggagtacaagaaggagtttgagaagtggaagaccaagttcagcagcccagtggacatgctgggggtggtgctggccaagaagtgtcagatccttgtaagcgacatagactacaagcatcccctgcatgaatggacctgcctgcctgatcagaatgacgtcattcaggctcggaaggcctatgacctgcagagtgatgctatttacaaatctgatcttgagtggctgagaggcataggatgggttcccattggctctgtagaggtcgagaaagtgaagagagctggagaaatcctgagtgacaggaagtatcgccagcctgcagaccagctcaaattcacatgcattaccgacactccggaaattgtcctagcaaagaataatgccctgacaatgagcaagcatttatacacagaagcttgggatgctgacaaaacctccatccacgtgatgccagacaccccagatatcctgctggccaagagtaattctgccaatatcagccaaaaactttacaccaagggatgggatgaatcaaagatgaaggactatgatctgagagcagatgctatttccatcaaaagtgccaaggcctccagggacatcgccagtgactacaaatacaaggaagcctatgagaaacagaaaggccaccacattggagcccagagcattgaagatgatcccaagattatgtgtgccatacatgcaggaaaaattcaaagtgaaagggagtacaagaaggaattccaaaagtggaaaaccaagttctctagcccagtggacatgttaagcatcttgctggccaagaaatgtcagactttggtcactgacattgattatcgcaattacctgcatgaatggacatgcatgccggatcaaaacgacattatccaagcaaaaaaggcctatgacctgcagagtgatagtgtgtataaggcagacctggagtggctgcgtggcatcggctggatgccagaaggctcagtggaaatgaacagagtgaaggttgctcaagacctcgtgaatgaaagactctataggacacgtccagaagctttgtcattcaccagcattgtcgacactccagaagttgtcttggcaaaagccaattctctgcaaataagtgagaaactgtatcaggaagcctggaataaagataaaagcaacatcaccattccttctgatactccggagatgctgcaggcccacatcaatgccttgcaaatcagcaataaactctaccaaaaagactggaatgacgccaagcagaaaggctatgacataagggcagatgccattgaaatcaagcacgccaaggcctccagagaaattgccagtgagtacaaatacaaagaaggttaccgtaagcaactgggccaccacatgggtttccgcaccctacaagatgaccccaagtcagtatgggctatacatgctgccaagatccagagtgacagagaatataagaaagcttatgagaagtctaaaggaattcacaacacaccgttggacatgatgtcaattgttcaagccaagaaatgccaggtcctggttagcgacattgattatcgcaattatctgcaccagtggacgtgtctgccagatcagaacgatgtgatccaggccaagaaagcctacgacctgcagagcgataacttgtacaagtcagacctggaatggctgaagggtattggatggctgccagagggttctgtggaagtgatgagagtgaagaatgcccagaatctcttgaatgaaaggctgtatcgtataaagcctgaggccctcaaattcaccagcattgttgacaccccggaagtaatccaggcaaagatcaatgctgtacagatcagtgagccattgtatcgcgatgcctgggagaaagagaaggctaatgtgaacgtgccagctgacactcccctgatgctgcaatccaaaatcaatgccctgcagatcagcaataaacgctatcagcaagcttgggaagatgtcaagatgactggttatgacctgcgagcagatgccattgggatccagcatgccaaggcttccagggatattgccagtgactatctgtacaaaactgcttatgagaaacagaaaggccattacattggctgtcgcagcgccaaggaagaccctaaactggtttgggcagcaaatgtgttgaagatgcagaatgacaggctgtacaaaaaggcctacaacgaccacaaagccaagatctccatccctgtggacatggtgtccatcagcgctgccaaagaaggtcaggcactggcaagtgatgtggactatcgccattacctgcaccactggtcttgctttcccgaccagaatgatgtgatccaagccaggaaagcctacgacctacagagcgacagtgtgtataaggcagacctggagtggctgcgtggcatcggctggatgccagaaggctcagtggaaatgaacagagtgaaggttgctcaagacctcgtgaatgaaagactctataggacacgtccagaagctttgtcattcaccagcattgtcgacactccagaagttgtcttggcaaaagccaattctctgcaaataagtgagaaactgtatcaggaagcctggaataaagataaaagcaacatcaccattccttctgatactccggagatgctgcaggcccacatcaatgccttgcaaatcagcaataaactctaccaaaaagactggaatgacaccaagcagaaaggctatgacataagggcagatgccattgaaatcaagcacgccaaggcctccagagaaattgccagtgagtacaaatacaaagaaggttaccgtaagcaactgggccaccacatgggtttccgcaccctacaagatgaccccaagtcagtatgggctatacatgctgccaagatccagagtgacagagaatataagaaagcttatgagaagtctaaaggaattcacaacacaccgttggacatgatgtcaattgttcaagccaagaaatgccaggtcctggttagcgacattgattatcgcaattatctgcaccagtggacgtgtctgccagatcagaacgatgtgatccaggccaagaaagcctacgacctgcagagcgataacttgtacaagtcagacctggaatggctgaagggtattggatggttgccagagggttctgtggaagtgatgagagtgaagaatgcccagaatctcttgaatgaaaggctgtatcgtataaagcctgaggccctcaaattcaccagcattgttgacaccccggaagtaatccaggcaaagatcaatgctgtacagatcagtgagccattgtatcgcaatgcctgggagaaagagaaggctaatgtgaacgtgccagctgacactcccctgatgctgcaatccaaaatcaatgctctgcagatcagcaataaacgctatcagcaagcttgggaagatgtcaagatgactggttatgacctgcgagcagatgccattgggatccagcatgccaaggcttccagggatattgccagtgattatctgtacaaaactgcttatgagaaacagaaaggccattacattggctgtcgcagcgccaaggaagaccctaaactggtttgggcagcaaatgtgttgaagatgcagaatgacaggctgtacaaaaaggcctacaacgaccacaaagccaagatctccatccctgtggacatggtgtccatcagcgctgccaaagaaggtcaggcactggcaagtgatgtggactatcgccattacctgcaccactggtcttgctttcccgaccagaatgatgtgatccaagccaggaaagcctacgacctacagagcgacagtgtgtataaggcagacctggagtggctgcgtggcatcggctggatgccagaaggctcagtggaaatgaacagagtgaaggttgctcaagacctcgtgaatgaaagactctataggacacgtccagaagctttgtcattcaccagcattgtcgacactccagaagttgtcttggcaaaagccaattctctgcaaataagtgagaaactgtatcaggaagcctggaataaagataaaagcaacatcaccattccttctgatactccggagatgctgcaggcccacatcaatgccttgcaaatcagcaataaactctaccaaaaagactggaatgacaccaagcagaaaggctatgacataagggcagatgccattgaaatcaagcacgccaaggcctccagagaaattgccagtgagtacaaatacaaagaaggttaccgtaagcaactgggccaccacatgggtttccgcaccctacaagatgaccccaagtcagtatgggctatacatgctgccaagatccagagtgacagagaatataagaaagcttatgagaagtctaaaggaattcacaacacaccgttggacatgatgtcaattgttcaagccaagaaatgccaggtcctggttagcgacattgattatcgcaattatctgcaccagtggacgtgtctgccagatcagaacgatgtgatccaggccaagaaagcctacgacctgcagagcgataacttgtacaagtcagacctggaatggctgaagggtattggatggttgccagagggttctgtggaagtgatgagagtgaagaatgcccagaatctcttgaatgaaaggctgtatcgtataaagcctgaggccctcaaattcaccagcattgttgacaccccggaagtaatccaggcaaagatcaatgctgtacagatcagtgagccattgtatcgcgatgcctgggagaaagagaaggctaatgtgaacgtgccagctgacactcccctgatgctgcaatccaaaatcaatgccctgcagatcagcaataaacgctatcagcaagcttgggaagatgtcaagatgactggttatgacctgcgagcagatgccattgggatccagcatgccaaggcttccagggatattgccagtgactatctgtacaaaactgcttatgagaaacagaaaggccattacattggctgtcgcagcgccaaggaagaccctaaactggtttgggcagcaaatgtgttgaagatgcagaatgacaggctgtacaaaaaggcctacaacgaccacaaagccaagatctccatccctgtggacatggtgtccatcagcgctgccaaagaaggtcaggcactggcaagtgatgtggactatcgccattacctgcaccgctggtcttgctttcccgaccagaatgatgtgatccaagccaggaaagcctacgacctacagagcgacgccctctacaaggctgacttggagtggttgcgtggcattggctggatgccccaagggtctcctgaagtgttgagagtcaaaaacgcccagaatatcttttgtgacagtgtctatcggacgcctgtggtgaaccttaagtacacaagcattgttgacacacctgaagtggtccttgctaaatcaaatgctgaaaatattagtattccaaagtacagagaggtttgggacaaggataaaacttcaatacacataatgccagatactccagaaattaatctcgctagagcaaatgctcttaatgtgagcaataaactttaccgtgagggctgggatgaaatgaaggcgggctgtgatgtccggctggatgccatccccatccaggctgccaaggcctccagggagattgccagtgactataaatataagcttgaccatgagaagcagaagggacactacgtgggcaccctcacagccagggatgacaacaagatccgctgggccctcatagctgacaagctccagaatgaacgagagtaccggctggactgggccaaatggaaggccaagatccagagccctgtggacatgctttccatcctgcactctaaaaattcccaggctctggtcagtgacatggattaccgcaattacctgcaccagtggacctgcatgcccgaccagaacgatgtgattcaggccaagaaggcctacgaactgcagagcgataatgtttacaaggctgacttggaatggttgcgtggaattgggtggatgccaaatgactccgtgtccgtcaatcatgccaaacatgccgcggacatcttcagtgagaaaaaatatcgcacaaaaatagaaactctcaactttacgcctgtggatgacagagttgattatgtgacagcgaaacaaagtggcgagatcctcgatgatattaaataccggaaagactggaatgccaccaaatcaaagtacaccctcacagaaacccccctgctgcacactgcccaggaggctgctaggatactggaccagtatctctacaaggaaggctgggagagacaaaaagccacaggttacattttgcctccagatgctgtgccatttgttcatgcccatcactgcaatgacgttcagagtgagctgaaatacaaagctgaacatgtgaagcaaaaaggtcattatgttggtgtcccgacgatgagagatgatcctaagctggtttggtttgagcatgcaggccagattcagaatgagagactatacaaagaggactatcacaaaacaaaggccaaaatcaatatacctgctgatatggtgtcagtcttggccgccaagcaggggcagacccttgtcagtgatattgattatcgtaattacttgcaccaatggatgtgtcatcctgaccagaacgatgttattcaggcaagaaaggcctatgacctacagagtgataatgtctacagagctgacctggagtggctccgaggcattggctggatcccactggattctgtggaccatgtaagggttactaagaaccaggaaatgatgagtcagatcaaatataagaaaaatgcccttgaaaactatcctaactttagaagtgtggtggatcctccagagattgttttagccaagattaattctgtcaatcaaagtgatgtaaaatataaagaaacatttaataaagcaaagggcaaatatacgttttcaccagatacaccacatatctcccactccaaagacatgggaaaactctacagtactatactgtataaaggggcgtgggagggcaccaaggcctatggctacaccctggatgagcgctacattcccattgttggagccaagcatgctgatctggtgaacagtgagcttaaatacaaagagacatatgagaagcagaaaggtcactacctggctggaaaagtgatcggtgaattccctggtgtggttcactgtctggatttccaaaagatgaggagtgcgttgaactacagaaaacattatgaggataccaaagcaaatgttcatatccccaatgacatgatgaatcacgtgctggctaaaaggtgccagtacatcctcagtgacctggagtatcgacactatttccaccagtggacgtctcttctggaagaacccaatgttatacgcgtccgaaacgcccaggagatcttgagtgataatgtgtataaagatgacctgaattggttgaaaggcattggttgctacgtttgggatacaccccaaatcctccatgccaagaaatcatacgaccttcagagtcagctacaatatacagcagcaggtaaagaaaatctacaaaactataatctggtcacagacacgcccctctatgtgactgctgttcagagtggcattaatgccagtgaggtaaaatataaagaaaattatcatcagattaaggacaaatacacaacagttctagaaacagtggattatgacagaaccagaaacctgaagaatctttacagcagtaacctgtacaaggaggcctgggatagagtgaaagccaccagctacatcctgccttccagcaccttgtccctgacacacgccaagaaccagaagcatctggccagccatatcaaatatcgggaagaatatgaaaagttcaaagctctttatacgttaccaagaagtgttgacgatgatccgaacacagcacggtgcctccgagttggcaagcttaacatcgatcgcctgtacagatcagtttatgaaaagaacaagatgaaaatccacatcgtgcccgacatggtagagatggttactgccaaggattcccagaagaaagtcagtgagattgattaccgcctgcgcctccacgaatggatttgccaccccgacttgcaagtcaatgatcacgtcaggaaagtcacagatcagatcagcgatattgtatacaaggatgacctcaactggctgaaaggcattggttgctacgtctgggacactcctgaaatcctccatgccaagcatgcttatgatctacgtgatgatatcaagtataaagctcacatgttgaaaacaaggaatgactacaagcttgtcacagatacaccagtctacgtgcaggctgtcaaaagtgggaaacagctaagtgacgctgtctaccactatgactatgtgcacagtgtcagaggcaaagtggctccaactaccaaaaccgtggatctggaccgggcccttcatgcatacaagctccagagttcgaatctatacaaaaccagcctgcgcaccctgcccactggatatagacttccaggtgacactcctcacttcaaacacatcaaggacacccgttacatgagcagttatttcaagtacaaagaagcctatgaacacaccaaggcatatgggtatacacttggccccaaagatgttccatttgtccacgtccggagagtcaacaatgttaccagcgagagactgtatcgggaattgtaccacaaactgaaagacaagatccatacaactcccgatacccctgagatccgccaagtcaagaagacacaagaggctgtcagtgagttgatctacaaatcagacttcttcaagatgcagggccacatgatctctctgccatacacaccccaagtgatccattgccgctatgtgggagacatcaccagtgatattaaatacaaagaggacttgcaggtcctgaagggatttggctgcttcctgtatgacactcctgacatggtccgctcccggcacctgcggaagctctggtctaattacctatacactgataaggcaaggaagatgcgagacaaatacaaagtggtgcttgacactccagaatacagaaaagtgcaagaactgaagacacatctgagtgagctggtctacagagctgcaggcaagaagcagaagtcaatctttacttcagttcctgatactcctgatcttttaagagccaagcgagggcagaagcttcagagtcagtatctgtatgttgaacttgccaccaaagagagaccccatcatcacgctggaaaccagaccacagccttgaagcatgctaaagacgtgaaggacatggtcagtgagaaaaagtacaagattcaatatgaaaagatgaaagacaagtacactccggttccagatacgccaatcctcatcagagccaagagggcttactggaatgccagtgatctacgctacaaagaaacatttcaaaagaccaaagggaaataccacacggtgaaagatgccctagacattgtctatcatcgcaaagtcacagatgacatcagtaaaataaaatacaaggagaactacatgagccagttgggtatctggaggtccattcctgatcgtccagagcatttccaccaccgagcagtcactgacacagtcagtgatgtaaaatataaagaagacttgacttggcttaaaggcattggttgctatgcctatgatacccctgatttcactctggctgaaaagaacaagactctctacagcaagtataagtataaagaagtatttgaaaggacaaagtcagatttcaagtatgttgccgactctccgatcaataggcatttcaagtatgcaactcaattgatgaatgagagaaaatataaatctagtgccaagatgtttctgcaacatggatgtaatgaaattctgcgtccagatatgttgactgctctctacaattcgcatatgtggagccagatcaaatacaggaaaaactatgaaaaatcaaaggacaaatttacctcaattgtggatactccagaacacctgcgtactacaaaagtcaacaaacaaatcagcgatatcctttataaattggaatacaacaaggccaaacccagaggctacaccacaatccacgacacacccatgttgctgcatgtccgcaaggttaaagatgaagtcagtgatctgaaatacaaagaagtataccaaagaaataaatccaactgcaccattgagccagatgctgttcatatcaaagcagccaaggacgcctacaaagtcaacaccaatctggactataagaaacagtacgaagccaacaaagcccactggaagtggactcctgaccgaccggacttcctccaggctgccaagtcatccctgcagcaaagcgattttgaatataagctggaccgggagttcctcaagggttgcaagctttctgtcactgatgacaaaaacacggtgctcgccctcaggaatactttaatagaaagtgatctgaaatacaaagagaaacatgtcaaggaaagaggaacctgccatgccgtacctgacacgcctcagatcctgctggcgaagactgtcagcaacctggtgtctgagaacaagtacaaggaccatgtcaagaagcacttggcacagggctcatacacaacactaccagagacccgggacactgttcacgtcaaggaagtgaccaagcatgtcagtgatacaaattacaaaaagaagtttgtcaaggagaaaggaaaatccaactactccatcatgctggagccaccagaggtgaaacatgctatggaagtggccaagaagcaaagtgatgtcgcttacagaaaagatgccaaagagaacctgcattacaccacagtggctgatcgaccagacatcaagaaggccacacaggcagccaaacaggccagtgaggtggagtacagagccaagcaccgcaaggaaggcagccatggcttaagcatgctcggtcgcccagacatagaaatggccaagaaggcagccaagctgagcagccaggttaaataccgagaaaatttcgataaagaaaagggcaagacaccaaaatacaatccaaaagacagccagctctacaaagtcatgaaagatgctaataatcttgcaagtgaggttaaatacaaggctgacctgaagaaacttcacaaacccgtgactgacatgaaggagtctctgatcatgaatcatgtcctgaatacaagccaacttgccagttcttaccagtacaagaagaagtatgagaagagtaaaggccactaccacaccatacccgataatctggagcagcttcacctaaaagaggccacagaattacagagtatagtgaaatacaaagaaaagtatgaaaaggaacgaggaaaacccatgctggactttgaaacaccaacgtacatcactgccaaagagtctcagcagatgcagagtgggaaagaatataggaaagattatgaagagtccattaaaggcagaaacctgactggcctggaggtcacgccagctttgttacatgtcaaatatgcaactaaaatagcaagcgagaaagagtacaggaaagatctagaggaaagcatccgtgggaagggcctcactgaaatggaagatacacctgacatgctaagagcaaagaatgccactcaaatcctcaatgagaaagaatataagcgagacctggaactggaagtcaaaggaagaggcctgaatgccatggccaatgaaactccggattttatgagggccaggaatgctactgatattgccagtcagattaagtataagcaatcagcagaaatggagaaagccaatttcacttctgtggttgatactccagagatcattcatgcccaacaagtcaagaatctttcaagccagaaaaagtacaaggaagatgctgagaagtccatgtcgtattatgagactgttttggacaccccagagatacagagagtccgggagaaccaaaagaacttcagccttctccaataccagtgtgaccttaaaaacagtaaaggaaaaattacagttgttcaagacacgccagaaatactgcgtgtaaaagaaaatcagaagaatttcagctcggttttatataaagaggatgtctcaccaggaacggctatcggaaagacacctgagatgatgagagtgaaacaaacacaggaccacattagctcggtgaagtataaggaagcaataggacaaggaactccaatccctgacctgcctgaagtgaaacgtgtgaaggagacgcagaagcacattagctcggttatgtacaaagaaaacttgggaacaggcattccaaccactgtgactccagagattgagagagtcaaacgcaatcaagagaactttagctcggttttgtacaaagaaaatttggggaaaggaatcccaacacctatcactccagagatggagagagtcaaacgcaatcaagagaactttagctcgatattgtacaaagagaacttgagcaaggggactcccctacctgtcactcctgagatggagcgagtcaaactcaatcaagaaaactttagctcggtgttgtataaagaaaacgttggaaaagggattccaatccccatcactccagagatggagagagtcaaacacaatcaagaaaactttagttcggtgctatacaaagaaaacctggggacaggaattccaatccccatcactcctgagatgcagagagtcaaacacaatcaagaaaaccttagctcggtgttatacaaagaaaacatgggcaagggaacccctttacctgtcactcccgagatggaaagagtcaaacacaatcaagaaaatattagctcggtgttatacaaagaaaacatgggcaagggaacccctctacctgtcactcctgagatggagagagtcaaacacaatcaagaaaatattagctcggtgttatacaaagaaaacatgggcaagggaactcctttagctgtcactcccgagatggagcgagtcaaacacaatcaagaaaatattagctcggttttgtacaaagaaaatgtggggaaagccaccgcaacccctgtcactcctgagatgcagagagtcaaacgcaatcaagaaaacattagctcggtgttatacaaagagaacctggggaaagcaacccccacaccctttactcctgagatggaaagagtgaaacgcaatcaagaaaactttagctcggtattgtacaaagagaacatgagaaaagcaactccgacacctgttactccagagatggagagagctaagcgcaaccaagaaaacattagctcggttctttattctgatagtttccggaaacaaatacaaggcaaagctgcctatgtattggatacccccgagatgagacgggtgagggagacccaacggcacatctcaacggtgaaatatcatgaagactttgagaaacacaagggttgcttcacaccagtggtgacagatcctatcactgaacgagtaaagaagaacatgcaggacttcagtgacattaactaccgaggtattcagaggaaagtggtagaaatggaacaaaaacggaatgaccaagatcaggagactattacaggtttacgtgtctggcgtactaatcctggttcggtttttgactatgatccagcagaagacaacatccagtcccgaagcttacacatgattaatgtccaagctcagcgccggagccgggagcagtcacgatctgccagtgcactaagcatcagtgggggtgaggagaagtctgagcattcagaagcaccagaccaccacctttcgacttacagcgacgggggtgtctttgcagtctcaacagcttacaaacatgcaaaaaccacagagctcccacaacaacgatcatcttcagttgctacccaacagacaacggtatcttccatcccatctcatccatctactgctggaaaaatcttccgtgccatgtatgactatatggctgctgatgcagatgaggtgtccttcaaggatggagatgccatcataaatgttcaagcaattgatgaaggctggatgtatggcactgtgcagaggactggcaggaccggaatgctcccagccaactacgttgaagctatttaggcatttcaaagcatcacacttgtctgcaggacttacagatcctgcagtcaatgtttcggtttagactctccactgttacctaagttctcaagctgcctatggtttttctgtgtcaatgtgatttatggtagtaccatcctttctcctttgggttttaaaataagttgcagaacagacactttaaaagcttctgcaatattatttctgtgcctagagtctttctccattataaacatgttttaacattatttcttttctaaaacagggattttgaatatgccaaacacattaaaggaaaaatagcagagatgttcaccttttccttgctgattgctaatgcttattatttctaattcagttctgaagttataaacttataatcaatacaaaccagcaactaataaaacctctaattctgcaa

SEQ ID NO: 19680 - DNA, 20637 bp, Homo sapiens
  source 1..20637: mol_type = unassigned DNA
aggcatcacgctggcttttgcctggggttctcaggaggggagagttgggagaggctttgctgctgaggaaatttatttggtagattgaaggtttgaacgagagctacagaaacgaaagaaaaagtctgtataagccaatggtgttcgggaagaaaataaccccattgccttgagtttgtaggtgccactactactctggaaaaatggcagatgacgaagactatgaggaggtggtggagtactacacagaagaagtggtttacgaagaggtgccgggagagacaataacaaaaatttatgagactacgacaacaaggacatctgactatgagcaatcagaaacttccaaaccagctctggcacagccagcactggcacagccagcatcagcaaagccggtggagaggaggaaggtcatccggaagaaagtggatccttcaaagttcatgaccccctacattgcacacagtcagaaaatgcaggatctttttagcccaaataaatacaaggagaagtttgagaaaacaaaaggacagccatacgccagcacaacagatactccagaacttcgcagaatcaaaaaagtacaagatcaactcagtgaggttaagtatcgaatggatggtgatgttgctaagactatatgtcacgtagatgaaaaagcaaaggatattgaacatgcaaagaaagtgtcgcagcaagtcagtaaggttttatacaagcagaactgggaagacaccaaggataagtacctgcttcctcctgatgcccctgaacttgtccaggccgttaagaacaccgccatgttcagcaagaaactgtacactgaagactgggaagcagacaaaagtttgttttacccctataatgatagcccggaactgaggagagttgcccaggcccagaaagctctcagtgatgttgcctacaaaaaaggtctcgctgaacagcaagctcaattcacgcctctggctgatcctccagatatagaatttgccaagaaagtaaccaatcaagtgagcaagcaaaaatacaaagaagactatgaaaataaaatcaaaggcaaatggagtgagacaccttgctttgaagttgcaaatgccagaatgaatgctgataacattagcacaaggaaataccaggaagattttgaaaacatgaaagaccagatctacttcatgcagaccgaaacaccagagtataaaatgaataaaaaagctggtgtggcagctagcaaggtaaaatacaaagaagactatgaaaagaataaaggaaaagcagattataatgtgcttcctgcttcagagaacccacagcttaggcagctgaaggcagcaggagatgccctaagtgacaaactatacaaggaaaactatgaaaagacaaaagcaaagagcataaattactgcgagacccccaaattcaagctcgatactgttctgcagaacttcagtagtgataaaaaatataaagattcctacttaaaagatattttgggacattatgtaggcagcttcgaggatccataccattcacactgcatgaaagtcacagctcaaaacagtgataaaaactacaaagcagaatacgaagaagacagaggcaaaggcttcttccctcagaccataactcaagaatatgaagcaattaagaaactagatcagtgtaaagaccacacctacaaagtccatccagataagacaaaattcacccaagttacagactctcctgttctgctacaagcccaagtcaattccaaacaactgagtgacttaaattacaaagcaaaacatgaaagtgaaaagttcaagtgccatatcccccctgatactcctgcttttatccagcacaaagtcaatgcctataacttgagtgataatctttataagcaagactgggagaagagcaaagccaaaaagtttgacattaaagtggatgccattcccctgctggcagccaaagccaacaccaagaacaccagcgatgtgatgtacaagaaagactatgaaaaaaacaaagggaaaatgattggagtcctcagcattaatgacgatcccaagatgctgcactccttgaaggtggccaaaaaccagagtgatagattatacaaggaaaactatgagaagacaaaggcaaagagtatgaattactgtgagaccccaaaatatcaacttgatactcagctgaagaacttcagtgaggctagatataaagacttatatgtaaaggatgttttgggacattatgtaggcagcatggaggacccatatcacacacactgcatgaaagttgcagctcaaaacagtgataaaagttacaaagcagaatatgaagaagataaaggaaaatgctatttccctcagacaataacacaagaatatgaagcaatcaagaagctggaccagtgtaaagatcatacctacaaagttcatccagataagaccaaattcacggcagtcactgattctcctgtactgttgcaagcccagctcaacacgaaacagcttagtgatctgaattacaaagcaaaacatgaaggtgagaagttcaagtgccatataccagcagatgctccacagtttatccaacacagagtcaatgcctataatctgagtgataatgtttataagcaagactgggagaagagcaaagccaagaagtttgacattaaagtggacgccattcccctgttggcagccaaagccaacaccaagaacaccagcgatgtgatgtacaagaaagactatgaaaagagcaaagggaaaatgattggagccctcagcattaatgacgatccaaagatgctgcactccttgaagacagccaaaaaccagagtgatcgcgaatatcgaaaagattatgaaaagtcaaaaactatctacacggcacctcttgatatgctccaagtcactcaagctaagaaatctcaggcaattgccagcgacgttgattataagcacatcttacacagttacagctacccccctgatagcatcaatgtggaccttgccaagaaggcatatgcgctgcagagcgatgttgaatacaaagctgactacaatagctggatgaaaggttgtggctgggtgccttttgggtccttagaaatggaaaaggcaaagcgagcttcagacatcctcaatgagaaaaaatatcgccaacatccagacaccctcaagtttacctcgattgaagatgctccaattacagtacagtctaaaattaaccaggcccagaggagtgatatcgcttacaaagccaaaggagaggaaattattcacaaatacaacctgccaccagacctgccccagttcatccaggctaaagttaatgcctacaatatcagtgagaatatgtacaaagcagacttgaaagacttgagcaagaagggatatgacctgagaactgatgcgattcccatcagagctgccaaagctgccaggcaggcggcgagtgacgttcagtacaaaaaagactatgaaaaggctaaagggaaaatggttggcttccaaagtcttcaagatgaccctaaactggttcattatatgaacgtggccaagatacaatcagatcgggagtataaaaaagactatgagaagacaaagtccaaatacaacacgccccatgatatgttcaatgtcgtggcggctaagaaagcccaggatgtggtcagcaatgtcaactataagcattctctccatcattacacctacttgcctgacgccatggacctggagctgtctaagaacatgatgcagatacagagtgataacgtctacaaggaagactacaacaactggatgaaaggcattggctggattcctattggcagtctcgacgtcgaaaaagttaaaaaggccggtgatgctctgaatgaaaagaagtacaggcaacatccagacaccctcaaatttaccagcattgtggactccccagttatggtccaggcaaaacagaacacgaagcaagtcagtgatatcttatacaaggctaaaggagaagatgtgaaacataaatacaccatgagtcctgatcttcctcagtttctccaggccaagtgcaatgcttacaatataagtgacgtctgttataaacgggattggtatgacttaatagccaagggcaacaatgtgctgggcgatgctattcccatcactgcagccaaggcatcgagaaacattgccagtgattataaatacaaggaagcttatgagaagtcaaagggaaagcatgtgggtttcagaagcctccaggatgatcccaagctggtccactatatgaatgtggcaaagctgcagtctgatcgtgaatacaagaagaactatgagaacaccaaaaccagctaccatacccctggggacatggttagcatcacagctgcaaagatggcccaggatgtcgctaccaatgtcaactacaaacagccattgcatcattacacatacctacctgacgccatgagtcttgagcatacgaggaatgtcaatcaaattcagagtgataatgtgtataaagacgagtataacagcttcttgaagggcatcggatggatccctattggttccctggaggtggagaaggtcaagaaagcaggcgatgcattaaatgagaggaagtatcgacagcacccagataccgtcaagttcacaagtgtgcctgattccatgggcatggtgttggctcagcataacacaaagcagctaagtgatttgaactacaaggtagagggagagaaactgaagcacaagtatactattgaccctgaattgcctcagtttattcaagccaaagtcaacgccctcaacatgagtgatgctcattataaagcagattggaagaaaaccattgccaagggctatgatttgagaccagatgccatcccaattgttgctgcaaaaagttcaaggaatattgctagtgattgcaaatataaggaggcctacgagaaagccaaaggcaagcaagttggatttctcagtcttcaggatgatcctaaactggttcactacatgaatgtggccaaaatccagtctgatcgtgagtacaaaaagggctatgaagccagcaagaccaagtaccacacacctctggatatggtcagtgtgacagctgcaaagaaatctcaggaggttgccaccaacgccaactacagacagtcataccaccactacactctcctgcccgatgccttgaatgtggagcactccaggaatgccatgcagattcagagtgataatctgtacaaatctgacttcaccaattggatgaaagggatcggctgggtgcccatagagtccctggaggtggagaaggcaaagaaagcaggagagattcttagtgagaagaagtatcgccagcaccccgagaagctgaagttcacttacgccatggacacaatggaacaggcacttaacaagagtaacaaactgaacatggacaagaggctctacactgaaaaatggaacaaggacaagaccaccattcatgtcatgcctgacacaccggatattttactctccagagtaaaccaaatcaccatgagtgataaactgtacaaagctggctgggaagaggaaaagaagaaaggatatgacctgaggcctgatgccattgcaataaaggctgcaagagcctctagagacattgccagtgattacaaatacaagaaagcctatgaacaagccaaagggaaacacattggcttccggagcctggaagatgaccccaagctggtgcacttcatgcaagtggccaagatgcagtcagaccgggaatacaagaagggatatgagaaatccaagacctccttccacaccccggtggacatgctcagtgtggtggcagccaagaagtctcaggaagtggccaccaatgccaactacaggaacgtgatccatacctacaacatgcttcctgatgccatgagctttgaattggccaaaaatatgatgcagattcaaagtgataatcagtacaaggctgactatgctgacttcatgaagggcattggatggctccctctgggctccctggaagcagagaaaaacaagaaagccatggagattattagtgaaaagaagtaccgccagcacccagacactttgaagtattccacactcatggactcgatgaacatggttttggcccagaataatgcaaaaattatgaacgaacatctctacaaacaagcatgggaggctgacaaaaccaaagtccacatcatgcctgatatcccccagattattttggcaaaggcaaatgcaattaatatgagtgataaactctacaaactttccttggaagagtctaaaaagaaaggctatgatctcagacctgatgcaattcctatcaaagctgccaaggcttccagagatattgcaagtgattataaatacaagtacaattatgaaaaagggaaggggaaaatggttggtttccgcagtctcgaggatgatcccaaattagtccattccatgcaagtggctaagatgcaatctgatcgggagtacaagaaaaactatgagaacacaaagaccagctaccacacccctgccgacatgctcagtgtcacggctgcaaaggatgcccaagccaacatcaccaacactaactacaagcacctgattcacaagtacatcctccttccagatgcaatgaacattgagctgaccaggaatatgaatcgcatacagagtgataatgaatataagcaagattacaatgaatggtacaaagggcttggctggagtccagcaggttctctggaagtggagaaggccaagaaagcaactgaatatgccagtgatcagaaataccgccagcacccgagcaacttccagtttaagaagctgactgattccatggacatggtgcttgccaagcagaatgcacataccatgaacaagcatttatacaccattgattggaataaagataagaccaagattcatgtgatgcctgatacaccagatattttacaagccaagcagaatcaaacactgtatagtcagaaactctataaacttggatgggaagaagctttgaagaaaggctatgatctcccagttgatgcaatttctgtacagctagctaaagcttcaagagacattgctagtgattataaatacaaacaaggctaccgaaagcaacttggccaccatgttggattccggagtctgcaagatgacccaaaacttgtgttgtccatgaatgtagccaaaatgcagagtgaaagagaatacaagaaggactttgagaagtggaaaactaagttctccagcccagtggacatgttgggagtggtactggccaagaagtgtcaggagttggttagtgacgtggactacaagaactacctgcatcagtggacatgtctgcctgatcagaacgatgttgtgcaagctaagaaagtttatgaactgcaaagtgagaatctatataaatctgaccttgagtggctgagaggcataggatggagtcccttgggttctttagaggcagaaaagaacaagcgggcttcggaaatcatcagtgagaagaaatatcgtcagcctccagacagaaacaagttcaccagcattcctgatgccatggatatagttctggcaaagacaaatgccaaaaataggagtgatagactttatagagaagcttgggacaaagacaagactcagatccacatcatgcctgatacacctgacattgttctggctaaagcaaacttaatcaacacaagtgataaactctaccgaatgggttatgaggagctgaagagaaaaggttacgatcttcctgttgatgccataccaatcaaagcagcaaaagcctcccgggaaattgccagtgaatacaagtacaaggaaggctttcgcaagcagctcggccaccacattggtgcccggaacattgaagatgaccccaagatgatgtggtccatgcatgtggccaagatccagagtgacagggagtacaagaaggactttgagaagtggaagaccaagttcagcagcccagtggacatgctgggggtggtgttggccaagaagtgccagaccttagtcagcgacgtggactacaagaactacctgcaccagtggacatgcctgcccgaccagagcgatgtcatccatgctcggcaggcctatgacctccagagcgataatttgtacaagtcagaccttcagtggctaaaaggcattggctggatgactagtggttctctcgaggatgagaaaaataaacgagccacccagattttgagtgaccatgtttaccgtcagcacccagatcaatttaagttttccagccttatggattccataccaatggttttggcaaaaaacaatgctattaccatgaatcatcgcctctatacagaagcttgggataaagataaaaccactgtccacattatgccagatacccctgaagttttattagctaaacaaaacaaagtaaattacagtgagaaattgtataagcttggcctagaagaagccaagaggaaaggttatgacatgcgggtagatgccattcctatcaaggcagccaaggcctccagagatattgcaagtgaattcaagtacaaagaaggctatcgtaagcagctcggccaccacattggtgcccgagctatacgtgatgaccccaagatgatgtggtccatgcacgtggccaagatccagagtgacagggagtacaagaaggactttgagaagtggaagaccaagttcagcagcccagtggacatgctgggggtggtgctggccaagaagtgccagaccttagtcagcgatgtggactacaagaactacctgcaccagtggacatgcctgcccgaccagagcgacgtcatccatgctcggcaggcctatgacctccagagcgataatatgtacaagtctgatctccagtggatgagaggcattggctgggtgtccattggctctttggatgtggaaaaatgcaaaagggcaactgaaattttgagtgataaaatctatcgccagcctccagacagattcaaatttaccagtgtgactgactctctggaacaagtgctggccaagaacaatgctctcaacatgaataagcgtttatacacagaggcctgggacaaagacaagactcaaattcacataatgcctgatacaccagagattatgttggcaaggcagaacaaaatcaactacagtgagactctatacaaacttgccaatgaagaagcaaaaaagaaaggctacgacttgcgaagtgacgccatccccatcgtggctgccaaggcctccagggacgttatcagtgattacaaatacaaagatggttaccgcaagcagctcggccaccacattggagcccggaacattgaagatgaccccaagatgatgtggtccatgcatgtggccaagatccagagtgacagggagtataagaaggactttgagaagtggaagaccaagttcagcagcccagtggacatgctgggagtggtgttagccaagaagtgccagaccttagtcagcgatgtggactacaagaactacctgcacgagtggacgtgcctgcccgaccagaatgatgtcatccatgctcggcaggcctatgacctccagagcgataacatttacaaatctgatctccagtggctgagaggcattggctgggtccccattgggtctatggatgtggtcaagtgcaagagagctgctgaaatactgagtgataacatctaccgccagcctccggacaagctgaaatttaccagtgtgactgactctctagagcaggtgctggccaagaacaatgctctcaatatgaacaagcgcttatacacagaagcctgggacaaagacaagacccaagtccatattatgcctgatacacctgaaatcatgttggcaagacaaaataaaataaattatagtgagagcctctatcgtcaggccatggaagaagccaagaaagaaggctatgacttgagaagtgatgccattcccattgtggctgccaaggcctctcgggatattgccagtgattacaaatacaaagaagcatatcgtaaacagttgggtcaccacattggcgcccgagcagtacacgatgaccccaagataatgtggtccctccacattgccaaagtgcagagtgaccgtgagtacaagaaagattttgagaaatacaagacaaggtacagcagcccagtggacatgcttggtatcgttttggccaagaagtgtcagaccttggtcagcgatgtggactataaacatcctctgcatgaatggatctgcctgcccgaccagaatgacatcattcatgcacggaaagcctatgacctccagagtgacaatttgtataagtcagaccttgaatggatgaaaggcattggctgggttccgattgattccttggaagttgttagggccaagagagctggagaattacttagtgatactatctaccgtcagcgtccagaaacgctgaaatttaccagtataacggacactccggagcaggtgctggcaaaaaacaatgctttaaacatgaataagcgcttatatactgaagcctgggacaatgacaagaaaactattcatgtcatgcctgatacaccagaaatcatgttagccaaactcaaccgaataaactacagtgataaactctataaacttgctttggaagagtccaagaaggaaggctatgacttgcgtctggatgccattccaatccaagcagccaaggcttcaagagatattgctagtgattacaagtacaaggaaggctaccgcaaacagcttggccaccatattggggcccggaacattaaggatgacccgaagatgatgtggtccatccatgtggccaagatccagagtgacagggagtacaagaaggagtttgagaagtggaagaccaagttcagcagcccagtggacatgctgggggtggtgctggccaagaagtgtcagatccttgtaagcgacatagactacaagcatcccctgcatgaatggacctgcctgcctgatcagaatgacgtcattcaggctcggaaggcctatgacctgcagagtgatgctatttacaaatctgatcttgagtggctgagaggcataggatgggttcccattggctctgtagaggtcgagaaagtgaagagagctggagaaatcctgagtgacaggaagtatcgccagcctgcagaccagctcaaattcacatgcattaccgacactccggaaattgtcctagcaaagaataatgccctgacaatgagcaagcatttatacacagaagcttgggatgctgacaaaacctccatccacgtgatgccagacaccccagatatcctgctggccaagagtaattctgccaatatcagccaaaaactttacaccaagggatgggatgaatcaaagatgaaggactatgatctgagagcagatgctatttccatcaaaagtgccaaggcctccagggacatcgccagtgactacaaatacaaggaagcctatgagaaacagaaaggccaccacattggagcccagagcattgaagatgatcccaagattatgtgtgccatacatgcaggaaaaattcaaagtgaaagggagtacaagaaggaattccaaaagtggaaaaccaagttctctagcccagtggacatgttaagcatcttgctggccaagaaatgtcagactttggtcactgacattgattatcgcaattacctgcatgaatggacatgcatgccggatcaaaacgacattatccaagcaaaaaaggcctatgacctgcagagtgatgccctctacaaggctgacttggagtggttgcgtggcattggctggatgccccaagggtctcctgaagtgttgagagtcaaaaacgcccagaatatcttttgtgacagtgtctatcggacgcctgtggtgaaccttaagtacacaagcattgttgacacacctgaagtggtccttgctaaatcaaatgctgaaaatattagtattccaaagtacagagaggtttgggacaaggataaaacttcaatacacataatgccagatactccagaaattaatctcgctagagcaaatgctcttaatgtgagcaataaactttaccgtgagggctgggatgaaatgaaggcgggctgtgatgtccggctggatgccatccccatccaggctgccaaggcctccagggagattgccagtgactataaatataagcttgaccatgagaagcagaagggacactacgtgggcaccctcacagccagggatgacaacaagatccgctgggccctcatagctgacaagctccagaatgaacgagagtaccggctggactgggccaaatggaaggccaagatccagagccctgtggacatgctttccatcctgcactctaaaaattcccaggctctggtcagtgacatggattaccgcaattacctgcaccagtggacctgcatgcccgaccagaacgatgtgattcaggccaagaaggcctacgaactgcagagcgataatgtttacaaggctgacttggaatggttgcgtggaattgggtggatgccaaatgactccgtgtccgtcaatcatgccaaacatgccgcggacatcttcagtgagaaaaaatatcgcacaaaaatagaaactctcaactttacgcctgtggatgacagagttgattatgtgacagcgaaacaaagtggcgagatcctcgatgatattaaataccggaaagactggaatgccaccaaatcaaagtacaccctcacagaaacccccctgctgcacactgcccaggaggctgctaggatactggaccagtatctctacaaggaaggctgggagagacaaaaagccacaggttacattttgcctccagatgctgtgccatttgttcatgcccatcactgcaatgacgttcagagtgagctgaaatacaaagctgaacatgtgaagcaaaaaggtcattatgttggtgtcccgacgatgagagatgatcctaagctggtttggtttgagcatgcaggccagattcagaatgagagactatacaaagaggactatcacaaaacaaaggccaaaatcaatatacctgctgatatggtgtcagtcttggccgccaagcaggggcagacccttgtcagtgatattgattatcgtaattacttgcaccaatggatgtgtcatcctgaccagaacgatgttattcaggcaagaaaggcctatgacctacagagtgataatgtctacagagctgacctggagtggctccgaggcattggctggatcccactggattctgtggaccatgtaagggttactaagaaccaggaaatgatgagtcagatcaaatataagaaaaatgcccttgaaaactatcctaactttagaagtgtggtggatcctccagagattgttttagccaagattaattctgtcaatcaaagtgatgtaaaatataaagaaacatttaataaagcaaagggcaaatatacgttttcaccagatacaccacatatctcccactccaaagacatgggaaaactctacagtactatactgtataaaggggcgtgggagggcaccaaggcctatggctacaccctggatgagcgctacattcccattgttggagccaagcatgctgatctggtgaacagtgagcttaaatacaaagagacatatgagaagcagaaaggtcactacctggctggaaaagtgatcggtgaattccctggtgtggttcactgtctggatttccaaaagatgaggagtgcgttgaactacagaaaacattatgaggataccaaagcaaatgttcatatccccaatgacatgatgaatcacgtgctggctaaaaggtgccagtacatcctcagtgacctggagtatcgacactatttccaccagtggacgtctcttctggaagaacccaatgttatacgcgtccgaaacgcccaggagatcttgagtgataatgtgtataaagatgacctgaattggttgaaaggcattggttgctacgtttgggatacaccccaaatcctccatgccaagaaatcatacgaccttcagagtcagctacaatatacagcagcaggtaaagaaaatctacaaaactataatctggtcacagacacgcccctctatgtgactgctgttcagagtggcattaatgccagtgaggtaaaatataaagaaaattatcatcagattaaggacaaatacacaacagttctagaaacagtggattatgacagaaccagaaacctgaagaatctttacagcagtaacctgtacaaggaggcctgggatagagtgaaagccaccagctacatcctgccttccagcaccttgtccctgacacacgccaagaaccagaagcatctggccagccatatcaaatatcgggaagaatatgaaaagttcaaagctctttatacgttaccaagaagtgttgacgatgatccgaacacagcacggtgcctccgagttggcaagcttaacatcgatcgcctgtacagatcagtttatgaaaagaacaagatgaaaatccacatcgtgcccgacatggtagagatggttactgccaaggattcccagaagaaagtcagtgagattgattaccgcctgcgcctccacgaatggatttgccaccccgacttgcaagtcaatgatcacgtcaggaaagtcacagatcagatcagcgatattgtatacaaggatgacctcaactggctgaaaggcattggttgctacgtctgggacactcctgaaatcctccatgccaagcatgcttatgatctacgtgatgatatcaagtataaagctcacatgttgaaaacaaggaatgactacaagcttgtcacagatacaccagtctacgtgcaggctgtcaaaagtgggaaacagctaagtgacgctgtctaccactatgactatgtgcacagtgtcagaggcaaagtggctccaactaccaaaaccgtggatctggaccgggcccttcatgcatacaagctccagagttcgaatctatacaaaaccagcctgcgcaccctgcccactggatatagacttccaggtgacactcctcacttcaaacacatcaaggacacccgttacatgagcagttatttcaagtacaaagaagcctatgaacacaccaaggcatatgggtatacacttggccccaaagatgttccatttgtccacgtccggagagtcaacaatgttaccagcgagagactgtatcgggaattgtaccacaaactgaaagacaagatccatacaactcccgatacccctgagatccgccaagtcaagaagacacaagaggctgtcagtgagttgatctacaaatcagacttcttcaagatgcagggccacatgatctctctgccatacacaccccaagtgatccattgccgctatgtgggagacatcaccagtgatattaaatacaaagaggacttgcaggtcctgaagggatttggctgcttcctgtatgacactcctgacatggtccgctcccggcacctgcggaagctctggtctaattacctatacactgataaggcaaggaagatgcgagacaaatacaaagtggtgcttgacactccagaatacagaaaagtgcaagaactgaagacacatctgagtgagctggtctacagagctgcaggcaagaagcagaagtcaatctttacttcagttcctgatactcctgatcttttaagagccaagcgagggcagaagcttcagagtcagtatctgtatgttgaacttgccaccaaagagagaccccatcatcacgctggaaaccagaccacagccttgaagcatgctaaagacgtgaaggacatggtcagtgagaaaaagtacaagattcaatatgaaaagatgaaagacaagtacactccggttccagatacgccaatcctcatcagagccaagagggcttactggaatgccagtgatctacgctacaaagaaacatttcaaaagaccaaagggaaataccacacggtgaaagatgccctagacattgtctatcatcgcaaagtcacagatgacatcagtaaaataaaatacaaggagaactacatgagccagttgggtatctggaggtccattcctgatcgtccagagcatttccaccaccgagcagtcactgacacagtcagtgatgtaaaatataaagaagacttgacttggcttaaaggcattggttgctatgcctatgatacccctgatttcactctggctgaaaagaacaagactctctacagcaagtataagtataaagaagtatttgaaaggacaaagtcagatttcaagtatgttgccgactctccgatcaataggcatttcaagtatgcaactcaattgatgaatgagaaaaaatacagagctgattatgagcagcggaaagataaataccacctggtagtcgatgagcctagacatctgctggctaagaccgcaggcgaccagatcagtcagatcaaatacaggaaaaactatgaaaaatcaaaggacaaatttacctcaattgtggatactccagaacacctgcgtactacaaaagtcaacaaacaaatcagcgatatcctttataaattggaatacaacaaggccaaacccagaggctacaccacaatccacgacacacccatgttgctgcatgtccgcaaggttaaagatgaagtcagtgatctgaaatacaaagaagtataccaaagaaataaatccaactgcaccattgagccagatgctgttcatatcaaagcagccaaggacgcctacaaagtcaacaccaatctggactataagaaacagtacgaagccaacaaagcccactggaagtggactcctgaccgaccggacttcctccaggctgccaagtcatccctgcagcaaagcgattttgaatataagctggaccgggagttcctcaagggttgcaagctttctgtcactgatgacaaaaacacggtgctcgccctcaggaatactttaatagaaagtgatctgaaatacaaagagaaacatgtcaaggaaagaggaacctgccatgccgtacctgacacgcctcagatcctgctggcgaagactgtcagcaacctggtgtctgagaacaagtacaaggaccatgtcaagaagcacttggcacagggctcatacacaacactaccagagacccgggacactgttcacgtcaaggaagtgaccaagcatgtcagtgatacaaattacaaaaagaagtttgtcaaggagaaaggaaaatccaactactccatcatgctggagccaccagaggtgaaacatgctatggaagtggccaagaagcaaagtgatgtcgcttacagaaaagatgccaaagagaacctgcattacaccacagtggctgatcgaccagacatcaagaaggccacacaggcagccaaacaggccagtgaggtggagtacagagccaagcaccgcaaggaaggcagccatggcttaagcatgctcggtcgcccagacatagaaatggccaagaaggcagccaagctgagcagccaggttaaataccgagaaaatttcgataaagaaaagggcaagacaccaaaatacaatccaaaagacagccagctctacaaagtcatgaaagatgctaataatcttgcaagtgaggttaaatacaaggctgacctgaagaaacttcacaaacccgtgactgacatgaaggagtctctgatcatgaatcatgtcctgaatacaagccaacttgccagttcttaccagtacaagaagaagtatgagaagagtaaaggccactaccacaccatacccgataatctggagcagcttcacctaaaagaggccacagaattacagagtatagtgaaatacaaagaaaagtatgaaaaggaacgaggaaaacccatgctggactttgaaacaccaacgtacatcactgccaaagagtctcagcagatgcagagtgggaaagaatataggaaagattatgaagagtccattaaaggcagaaacctgactggcctggaggtcacgccagctttgttacatgtcaaatatgcaactaaaatagcaagcgagaaagagtacaggaaagatctagaggaaagcatccgtgggaagggcctcactgaaatggaagatacacctgacatgctaagagcaaagaatgccactcaaatcctcaatgagaaagaatataagcgagacctggaactggaagtcaaaggaagaggcctgaatgccatggccaatgaaactccggattttatgagggccaggaatgctactgatattgccagtcagattaagtataagcaatcagcagaaatggagaaagccaatttcacttctgtggttgatactccagagatcattcatgcccaacaagtcaagaatctttcaagccagaaaaagtacaaggaagatgctgagaagtccatgtcgtattatgagactgttttggacaccccagagatacagagagtccgggagaaccaaaagaacttcagccttctccaataccagtgtgaccttaaaaacagtaaaggaaaaattacagttgttcaagacacgccagaaatactgcgtgtaaaagaaaatcagaagaatttcagctcggttttatataaagaggatgtctcaccaggaacggctatcggaaagacacctgagatgatgagagtgaaacaaacacaggaccacattagctcggtgaagtataaggaagcaataggacaaggaactccaatccctgacctgcctgaagtgaaacgtgtgaaggagacgcagaagcacattagctcggttatgtacaaagaaaacttgggaacaggcattccaaccactgtgactccagagattgagagagtcaaacgcaatcaagagaactttagctcggttttgtacaaagaaaatttggggaaaggaatcccaacacctatcactccagagatggagagagtcaaacgcaatcaagagaactttagctcggtgttatacaaagaaaacatgggcaagggaactcctttagctgtcactcccgagatggagcgagtcaaacacaatcaagaaaatattagctcggttttgtacaaagaaaatgtggggaaagccaccgcaacccctgtcactcctgagatgcagagagtcaaacgcaatcaagaaaacattagctcggtgttatacaaagagaacctggggaaagcaacccccacaccctttactcctgagatggaaagagtgaaacgcaatcaagaaaactttagctcggtattgtacaaagagaacatgagaaaagcaactccgacacctgttactccagagatggagagagctaagcgcaaccaagaaaacattagctcggttctttattctgatagtttccggaaacaaatacaaggcaaagctgcctatgtattggatacccccgagatgagacgggtgagggagacccaacggcacatctcaacggtgaaatatcatgaagactttgagaaacacaagggttgcttcacaccagtggtgacagatcctatcactgaacgagtaaagaagaacatgcaggacttcagtgacattaactaccgaggtattcagaggaaagtggtagaaatggaacaaaaacggaatgaccaagatcaggagactattacaggtttacgtgtctggcgtactaatcctggttcggtttttgactatgatccagcagaagacaacatccagtcccgaagcttacacatgattaatgtccaagctcagcgccggagccgggagcagtcacgatctgccagtgcactaagcatcagtgggggtgaggagaagtctgagcattcagaagcaccagaccaccacctttcgacttacagcgacgggggtgtctttgcagtctcaacagcttacaaacatgcaaaaaccacagagctcccacaacaacgatcatcttcagttgctacccaacagacaacggtatcttccatcccatctcatccatctactgctggaaaaatcttccgtgccatgtatgactatatggctgctgatgcagatgaggtgtccttcaaggatggagatgccatcataaatgttcaagcaattgatgaaggctggatgtatggcactgtgcagaggactggcaggaccggaatgctcccagccaactacgttgaagctatttaggcatttcaaagcatcacacttgtctgcaggacttacagatcctgcagtcaatgtttcggtttagactctccactgttacctaagttctcaagctgcctatggtttttctgtgtcaatgtgatttatggtagtaccatcctttctcctttgggttttaaaataagttgcagaacagacactttaaaagcttctgcaatattatttctgtgcctagagtctttctccattataaacatgttttaacattatttcttttctaaaacagggattttgaatatgccaaacacattaaaggaaaaatagcagagatgttcaccttttccttgctgattgctaatgcttattatttctaattcagttctgaagttataaacttataatcaatacaaaccagcaactaataaaacctctaattctgcaactc

SEQ ID NO: 19681 - DNA, 26202 bp, Homo sapiens
  source 1..26202: mol_type = unassigned DNA
aggcatcacgctggcttttgcctggggttctcaggaggggagagttgggagaggctttgctgctgaggaaatttatttggtagattgaaggtttgaacgagagctacagaaacgaaagaaaaagtctgtataagccaatggtgttcgggaagaaaataaccccattgccttgagtttgtaggtgccactactactctggaaaaatggcagatgacgaagactatgaggaggtggtggagtactacacagaagaagtggtttacgaagaggtgccgggagagacaataacaaaaatttatgagactacgacaacaaggacatctgactatgagcaatcagaaacttccaaaccagctctggcacagccagcactggcacagccagcatcagcaaagccggtggagaggaggaaggtcatccggaagaaagtggatccttcaaagttcatgaccccctacattgcacacagtcagaaaatgcaggatctttttagcccaaataaatacaaggagaagtttgagaaaacaaaaggacagccatacgccagcacaacagatactccagaacttcgcagaatcaaaaaagtacaagatcaactcagtgaggttaagtatcgaatggatggtgatgttgctaagactatatgtcacgtagatgaaaaagcaaaggatattgaacatgcaaagaaagtgtcgcagcaagtcagtaaggttttatacaagcagaactgggaagacaccaaggataagtacctgcttcctcctgatgcccctgaacttgtccaggccgttaagaacaccgccatgttcagcaagaaactgtacactgaagactgggaagcagacaaaagtttgttttacccctataatgatagcccggaactgaggagagttgcccaggcccagaaagctctcagtgatgttgcctacaaaaaaggtctcgctgaacagcaagctcaattcacgcctctggctgatcctccagatatagaatttgccaagaaagtaaccaatcaagtgagcaagcaaaaatacaaagaagactatgaaaataaaatcaaaggcaaatggagtgagacaccttgctttgaagttgcaaatgccagaatgaatgctgataacattagcacaaggaaataccaggaagattttgaaaacatgaaagaccagatctacttcatgcagaccgaaacaccagagtataaaatgaataaaaaagctggtgtggcagctagcaaggtaaaatacaaagaagactatgaaaagaataaaggaaaagcagattataatgtgcttcctgcttcagagaacccacagcttaggcagctgaaggcagcaggagatgccctaagtgacaaactatacaaggaaaactatgaaaagacaaaagcaaagagcataaattactgcgagacccccaaattcaagctcgatactgttctgcagaacttcagtagtgataaaaaatataaagattcctacttaaaagatattttgggacattatgtaggcagcttcgaggatccataccattcacactgcatgaaagtcacagctcaaaacagtgataaaaactacaaagcagaatacgaagaagacagaggcaaaggcttcttccctcagaccataactcaagaatatgaagcaattaagaaactagatcagtgtaaagaccacacctacaaagtccatccagataagacaaaattcacccaagttacagactctcctgttctgctacaagcccaagtcaattccaaacaactgagtgacttaaattacaaagcaaaacatgaaagtgaaaagttcaagtgccatatcccccctgatactcctgcttttatccagcacaaagtcaatgcctataacttgagtgataatctttataagcaagactgggagaagagcaaagccaaaaagtttgacattaaagtggatgccattcccctgctggcagccaaagccaacaccaagaacaccagcgatgtgatgtacaagaaagactatgaaaaaaacaaagggaaaatgattggagtcctcagcattaatgacgatcccaagatgctgcactccttgaaggtggccaaaaaccagagtgatagattatacaaggaaaactatgagaagacaaaggcaaagagtatgaattactgtgagaccccaaaatatcaacttgatactcagctgaagaacttcagtgaggctagatataaagacttatatgtaaaggatgttttgggacattatgtaggcagcatggaggacccatatcacacacactgcatgaaagttgcagctcaaaacagtgataaaagttacaaagcagaatatgaagaagataaaggaaaatgctatttccctcagacaataacacaagaatatgaagcaatcaagaagctggaccagtgtaaagatcatacctacaaagttcatccagataagaccaaattcacggcagtcactgattctcctgtactgttgcaagcccagctcaacacgaaacagcttagtgatctgaattacaaagcaaaacatgaaggtgagaagttcaagtgccatataccagcagatgctccacagtttatccaacacagagtcaatgcctataatctgagtgataatgtttataagcaagactgggagaagagcaaagccaagaagtttgacattaaagtggacgccattcccctgttggcagccaaagccaacaccaagaacaccagcgatgtgatgtacaagaaagactatgaaaagagcaaagggaaaatgattggagccctcagcattaatgacgatccaaagatgctgcactccttgaagacagccaaaaaccagagtgatcgcgaatatcgaaaagattatgaaaagtcaaaaactatctacacggcacctcttgatatgctccaagtcactcaagctaagaaatctcaggcaattgccagcgacgttgattataagcacatcttacacagttacagctacccccctgatagcatcaatgtggaccttgccaagaaggcatatgcgctgcagagcgatgttgaatacaaagctgactacaatagctggatgaaaggttgtggctgggtgccttttgggtccttagaaatggaaaaggcaaagcgagcttcagacatcctcaatgagaaaaaatatcgccaacatccagacaccctcaagtttacctcgattgaagatgctccaattacagtacagtctaaaattaaccaggcccagaggagtgatatcgcttacaaagccaaaggagaggaaattattcacaaatacaacctgccaccagacctgccccagttcatccaggctaaagttaatgcctacaatatcagtgagaatatgtacaaagcagacttgaaagacttgagcaagaagggatatgacctgagaactgatgcgattcccatcagagctgccaaagctgccaggcaggcggcgagtgacgttcagtacaaaaaagactatgaaaaggctaaagggaaaatggttggcttccaaagtcttcaagatgaccctaaactggttcattatatgaacgtggccaagatacaatcagatcgggagtataaaaaagactatgagaagacaaagtccaaatacaacacgccccatgatatgttcaatgtcgtggcggctaagaaagcccaggatgtggtcagcaatgtcaactataagcattctctccatcattacacctacttgcctgacgccatggacctggagctgtctaagaacatgatgcagatacagagtgataacgtctacaaggaagactacaacaactggatgaaaggcattggctggattcctattggcagtctcgacgtcgaaaaagttaaaaaggccggtgatgctctgaatgaaaagaagtacaggcaacatccagacaccctcaaatttaccagcattgtggactccccagttatggtccaggcaaaacagaacacgaagcaagtcagtgatatcttatacaaggctaaaggagaagatgtgaaacataaatacaccatgagtcctgatcttcctcagtttctccaggccaagtgcaatgcttacaatataagtgacgtctgttataaacgggattggtatgacttaatagccaagggcaacaatgtgctgggcgatgctattcccatcactgcagccaaggcatcgagaaacattgccagtgattataaatacaaggaagcttatgagaagtcaaagggaaagcatgtgggtttcagaagcctccaggatgatcccaagctggtccactatatgaatgtggcaaagctgcagtctgatcgtgaatacaagaagaactatgagaacaccaaaaccagctaccatacccctggggacatggttagcatcacagctgcaaagatggcccaggatgtcgctaccaatgtcaactacaaacagccattgcatcattacacatacctacctgacgccatgagtcttgagcatacgaggaatgtcaatcaaattcagagtgataatgtgtataaagacgagtataacagcttcttgaagggcatcggatggatccctattggttccctggaggtggagaaggtcaagaaagcaggcgatgcattaaatgagaggaagtatcgacagcacccagataccgtcaagttcacaagtgtgcctgattccatgggcatggtgttggctcagcataacacaaagcagctaagtgatttgaactacaaggtagagggagagaaactgaagcacaagtatactattgaccctgaattgcctcagtttattcaagccaaagtcaacgccctcaacatgagtgatgctcattataaagcagattggaagaaaaccattgccaagggctatgatttgagaccagatgccatcccaattgttgctgcaaaaagttcaaggaatattgctagtgattgcaaatataaggaggcctacgagaaagccaaaggcaagcaagttggatttctcagtcttcaggatgatcctaaactggttcactacatgaatgtggccaaaatccagtctgatcgtgagtacaaaaagggctatgaagccagcaagaccaagtaccacacacctctggatatggtcagtgtgacagctgcaaagaaatctcaggaggttgccaccaacgccaactacagacagtcataccaccactacactctcctgcccgatgccttgaatgtggagcactccaggaatgccatgcagattcagagtgataatctgtacaaatctgacttcaccaattggatgaaagggatcggctgggtgcccatagagtccctggaggtggagaaggcaaagaaagcaggagagattcttagtgagaagaagtatcgccagcaccccgagaagctgaagttcacttacgccatggacacaatggaacaggcacttaacaagagtaacaaactgaacatggacaagaggctctacactgaaaaatggaacaaggacaagaccaccattcatgtcatgcctgacacaccggatattttactctccagagtaaaccaaatcaccatgagtgataaactgtacaaagctggctgggaagaggaaaagaagaaaggatatgacctgaggcctgatgccattgcaataaaggctgcaagagcctctagagacattgccagtgattacaaatacaagaaagcctatgaacaagccaaagggaaacacattggcttccggagcctggaagatgaccccaagctggtgcacttcatgcaagtggccaagatgcagtcagaccgggaatacaagaagggatatgagaaatccaagacctccttccacaccccggtggacatgctcagtgtggtggcagccaagaagtctcaggaagtggccaccaatgccaactacaggaacgtgatccatacctacaacatgcttcctgatgccatgagctttgaattggccaaaaatatgatgcagattcaaagtgataatcagtacaaggctgactatgctgacttcatgaagggcattggatggctccctctgggctccctggaagcagagaaaaacaagaaagccatggagattattagtgaaaagaagtaccgccagcacccagacactttgaagtattccacactcatggactcgatgaacatggttttggcccagaataatgcaaaaattatgaacgaacatctctacaaacaagcatgggaggctgacaaaaccaaagtccacatcatgcctgatatcccccagattattttggcaaaggcaaatgcaattaatatgagtgataaactctacaaactttccttggaagagtctaaaaagaaaggctatgatctcagacctgatgcaattcctatcaaagctgccaaggcttccagagatattgcaagtgattataaatacaagtacaattatgaaaaagggaaggggaaaatggttggtttccgcagtctcgaggatgatcccaaattagtccattccatgcaagtggctaagatgcaatctgatcgggagtacaagaaaaactatgagaacacaaagaccagctaccacacccctgccgacatgctcagtgtcacggctgcaaaggatgcccaagccaacatcaccaacactaactacaagcacctgattcacaagtacatcctccttccagatgcaatgaacattgagctgaccaggaatatgaatcgcatacagagtgataatgaatataagcaagattacaatgaatggtacaaagggcttggctggagtccagcaggttctctggaagtggagaaggccaagaaagcaactgaatatgccagtgatcagaaataccgccagcacccgagcaacttccagtttaagaagctgactgattccatggacatggtgcttgccaagcagaatgcacataccatgaacaagcatttatacaccattgattggaataaagataagaccaagattcatgtgatgcctgatacaccagatattttacaagccaagcagaatcaaacactgtatagtcagaaactctataaacttggatgggaagaagctttgaagaaaggctatgatctcccagttgatgcaatttctgtacagctagctaaagcttcaagagacattgctagtgattataaatacaaacaaggctaccgaaagcaacttggccaccatgttggattccggagtctgcaagatgacccaaaacttgtgttgtccatgaatgtagccaaaatgcagagtgaaagagaatacaagaaggactttgagaagtggaaaactaagttctccagcccagtggacatgttgggagtggtactggccaagaagtgtcaggagttggttagtgacgtggactacaagaactacctgcatcagtggacatgtctgcctgatcagaacgatgttgtgcaagctaagaaagtttatgaactgcaaagtgagaatctatataaatctgaccttgagtggctgagaggcataggatggagtcccttgggttctttagaggcagaaaagaacaagcgggcttcggaaatcatcagtgagaagaaatatcgtcagcctccagacagaaacaagttcaccagcattcctgatgccatggatatagttctggcaaagacaaatgccaaaaataggagtgatagactttatagagaagcttgggacaaagacaagactcagatccacatcatgcctgatacacctgacattgttctggctaaagcaaacttaatcaacacaagtgataaactctaccgaatgggttatgaggagctgaagagaaaaggttacgatcttcctgttgatgccataccaatcaaagcagcaaaagcctcccgggaaattgccagtgaatacaagtacaaggaaggctttcgcaagcagctcggccaccacattggtgcccggaacattgaagatgaccccaagatgatgtggtccatgcatgtggccaagatccagagtgacagggagtacaagaaggactttgagaagtggaagaccaagttcagcagcccagtggacatgctgggggtggtgttggccaagaagtgccagaccttagtcagcgacgtggactacaagaactacctgcaccagtggacatgcctgcccgaccagagcgatgtcatccatgctcggcaggcctatgacctccagagcgataatttgtacaagtcagaccttcagtggctaaaaggcattggctggatgactagtggttctctcgaggatgagaaaaataaacgagccacccagattttgagtgaccatgtttaccgtcagcacccagatcaatttaagttttccagccttatggattccataccaatggttttggcaaaaaacaatgctattaccatgaatcatcgcctctatacagaagcttgggataaagataaaaccactgtccacattatgccagatacccctgaagttttattagctaaacaaaacaaagtaaattacagtgagaaattgtataagcttggcctagaagaagccaagaggaaaggttatgacatgcgggtagatgccattcctatcaaggcagccaaggcctccagagatattgcaagtgaattcaagtacaaagaaggctatcgtaagcagctcggccaccacattggtgcccgagctatacgtgatgaccccaagatgatgtggtccatgcacgtggccaagatccagagtgacagggagtacaagaaggactttgagaagtggaagaccaagttcagcagcccagtggacatgctgggggtggtgctggccaagaagtgccagaccttagtcagcgatgtggactacaagaactacctgcaccagtggacatgcctgcccgaccagagcgacgtcatccatgctcggcaggcctatgacctccagagcgataatatgtacaagtctgatctccagtggatgagaggcattggctgggtgtccattggctctttggatgtggaaaaatgcaaaagggcaactgaaattttgagtgataaaatctatcgccagcctccagacagattcaaatttaccagtgtgactgactctctggaacaagtgttggccaaaaataatgccatcactatgaacaagcgtttatacacagaagcctgggacaaagacaagactcagatccacataatgccagacacaccagaaattatgttggcaagaatgaacaaaatcaactacagtgagagtctgtacaaacttgctaatgaagaagcaaagaagaaaggctatgacttgcgaagcgacgccatccccatcgtggcggccaaggcctccagggacatcatcagtgactacaaatataaagatggttactgcaagcaacttggccaccatattggagcccggaacattgaagatgaccccaagatgatgtggtccatgcacgtagccaagatccagagtgacagggagtacaaaaaggactttgagaagtggaagaccaagttcagcagcccagtggacatgctgggggtggtgctggccaagaagtgccagaccttagtcagtgacgtggactataagaactacctgcacgagtggacatgcctgcctgaccagagcgatgtcatccatgctcggcaggcctatgacctccagagtgacaatatttacaagtcagatctccagtggctgagaggcattggctgggtccccattgggtctatggatgtggtcaagtgcaagagagctaccgaaatactgagtgataacatctaccgccagcctccggacaagctgaaatttaccagtgtgactgattctctagagcaggtgctggccaagaacaatgctctcaacatgaataagcgtttatacacagaggcctgggacaaagacaagactcaaattcacataatgcctgatacaccagagattatgttggcaaggcagaacaaaatcaactacagtgagactctatacaaacttgccaatgaagaagcaaaaaagaaaggctacgacttgcgaagtgacgccatccccatcgtggctgccaaggcctccagggacgttatcagtgattacaaatacaaagatggttaccgcaagcagctcggccaccacattggagcccggaacattgaagatgaccccaagatgatgtggtccatgcatgtggccaagatccagagtgacagggagtataagaaggactttgagaagtggaagaccaagttcagcagcccagtggacatgctgggagtggtgttagccaagaagtgccagaccttagtcagcgatgtggactacaagaactacctgcacgagtggacgtgcctgcccgaccagaatgatgtcatccatgctcggcaggcctatgacctccagagcgataacatttacaaatctgatctccagtggctgagaggcattggctgggtccccattgggtctatggatgtggtcaagtgcaagagagctgctgaaatactgagtgataacatctaccgccagcctccggacaagctgaaatttaccagtgtgactgactctctagagcaggtgctggccaagaacaatgctctcaatatgaacaagcgcttatacacagaagcctgggacaaagacaagacccaagtccatattatgcctgatacacctgaaatcatgttggcaagacaaaataaaataaattatagtgagagcctctatcgtcaggccatggaagaagccaagaaagaaggctatgacttgagaagtgatgccattcccattgtggctgccaaggcctctcgggatattgccagtgattacaaatacaaagaagcatatcgtaaacagttgggtcaccacattggcgcccgagcagtacacgatgaccccaagataatgtggtccctccacattgccaaagtgcagagtgaccgtgagtacaagaaagattttgagaaatacaagacaaggtacagcagcccagtggacatgcttggtatcgttttggccaagaagtgtcagaccttggtcagcgatgtggactataaacatcctctgcatgaatggatctgcctgcccgaccagaatgacatcattcatgcacggaaagcctatgacctccagagtgacaatttgtataagtcagaccttgaatggatgaaaggcattggctgggttccgattgattccttggaagttgttagggccaagagagctggagaattacttagtgatactatctaccgtcagcgtccagaaacgctgaaatttaccagtataacggacactccggagcaggtgctggcaaaaaacaatgctttaaacatgaataagcgcttatatactgaagcctgggacaatgacaagaaaactattcatgtcatgcctgatacaccagaaatcatgttagccaaactcaaccgaataaactacagtgataaactctataaacttgctttggaagagtccaagaaggaaggctatgacttgcgtctggatgccattccaatccaagcagccaaggcttcaagagatattgctagtgattacaagtacaaggaaggctaccgcaaacagcttggccaccatattggggcccggaacattaaggatgacccgaagatgatgtggtccatccatgtggccaagatccagagtgacagggagtacaagaaggagtttgagaagtggaagaccaagttcagcagcccagtggacatgctgggggtggtgctggccaagaagtgtcagatccttgtaagcgacatagactacaagcatcccctgcatgaatggacctgcctgcctgatcagaatgacgtcattcaggctcggaaggcctatgacctgcagagtgatgctatttacaaatctgatcttgagtggctgagaggcataggatgggttcccattggctctgtagaggtcgagaaagtgaagagagctggagaaatcctgagtgacaggaagtatcgccagcctgcagaccagctcaaattcacatgcattaccgacactccggaaattgtcctagcaaagaataatgccctgacaatgagcaagcatttatacacagaagcttgggatgctgacaaaacctccatccacgtgatgccagacaccccagatatcctgctggccaagagtaattctgccaatatcagccaaaaactttacaccaagggatgggatgaatcaaagatgaaggactatgatctgagagcagatgctatttccatcaaaagtgccaaggcctccagggacatcgccagtgactacaaatacaaggaagcctatgagaaacagaaaggccaccacattggagcccagagcattgaagatgatcccaagattatgtgtgccatacatgcaggaaaaattcaaagtgaaagggagtacaagaaggaattccaaaagtggaaaaccaagttctctagcccagtggacatgttaagcatcttgctggccaagaaatgtcagactttggtcactgacattgattatcgcaattacctgcatgaatggacatgcatgccggatcaaaacgacattatccaagcaaaaaaggcctatgacctgcagagtgatagtgtgtataaggcagacctggagtggctgcgtggcatcggctggatgccagaaggctcagtggaaatgaacagagtgaaggttgctcaagacctcgtgaatgaaagactctataggacacgtccagaagctttgtcattcaccagcattgtcgacactccagaagttgtcttggcaaaagccaattctctgcaaataagtgagaaactgtatcaggaagcctggaataaagataaaagcaacatcaccattccttctgatactccggagatgctgcaggcccacatcaatgccttgcaaatcagcaataaactctaccaaaaagactggaatgacgccaagcagaaaggctatgacataagggcagatgccattgaaatcaagcacgccaaggcctccagagaaattgccagtgagtacaaatacaaagaaggttaccgtaagcaactgggccaccacatgggtttccgcaccctacaagatgaccccaagtcagtatgggctatacatgctgccaagatccagagtgacagagaatataagaaagcttatgagaagtctaaaggaattcacaacacaccgttggacatgatgtcaattgttcaagccaagaaatgccaggtcctggttagcgacattgattatcgcaattatctgcaccagtggacgtgtctgccagatcagaacgatgtgatccaggccaagaaagcctacgacctgcagagcgataacttgtacaagtcagacctggaatggctgaagggtattggatggctgccagagggttctgtggaagtgatgagagtgaagaatgcccagaatctcttgaatgaaaggctgtatcgtataaagcctgaggccctcaaattcaccagcattgttgacaccccggaagtaatccaggcaaagatcaatgctgtacagatcagtgagccattgtatcgcgatgcctgggagaaagagaaggctaatgtgaacgtgccagctgacactcccctgatgctgcaatccaaaatcaatgccctgcagatcagcaataaacgctatcagcaagcttgggaagatgtcaagatgactggttatgacctgcgagcagatgccattgggatccagcatgccaaggcttccagggatattgccagtgactatctgtacaaaactgcttatgagaaacagaaaggccattacattggctgtcgcagcgccaaggaagaccctaaactggtttgggcagcaaatgtgttgaagatgcagaatgacaggctgtacaaaaaggcctacaacgaccacaaagccaagatctccatccctgtggacatggtgtccatcagcgctgccaaagaaggtcaggcactggcaagtgatgtggactatcgccattacctgcaccactggtcttgctttcccgaccagaatgatgtgatccaagccaggaaagcctacgacctacagagcgacagtgtgtataaggcagacctggagtggctgcgtggcatcggctggatgccagaaggctcagtggaaatgaacagagtgaaggttgctcaagacctcgtgaatgaaagactctataggacacgtccagaagctttgtcattcaccagcattgtcgacactccagaagttgtcttggcaaaagccaattctctgcaaataagtgagaaactgtatcaggaagcctggaataaagataaaagcaacatcaccattccttctgatactccggagatgctgcaggcccacatcaatgccttgcaaatcagcaataaactctaccaaaaagactggaatgacaccaagcagaaaggctatgacataagggcagatgccattgaaatcaagcacgccaaggcctccagagaaattgccagtgagtacaaatacaaagaaggttaccgtaagcaactgggccaccacatgggtttccgcaccctacaagatgaccccaagtcagtatgggctatacatgctgccaagatccagagtgacagagaatataagaaagcttatgagaagtctaaaggaattcacaacacaccgttggacatgatgtcaattgttcaagccaagaaatgccaggtcctggttagcgacattgattatcgcaattatctgcaccagtggacgtgtctgccagatcagaacgatgtgatccaggccaagaaagcctacgacctgcagagcgataacttgtacaagtcagacctggaatggctgaagggtattggatggttgccagagggttctgtggaagtgatgagagtgaagaatgcccagaatctcttgaatgaaaggctgtatcgtataaagcctgaggccctcaaattcaccagcattgttgacaccccggaagtaatccaggcaaagatcaatgctgtacagatcagtgagccattgtatcgcaatgcctgggagaaagagaaggctaatgtgaacgtgccagctgacactcccctgatgctgcaatccaaaatcaatgctctgcagatcagcaataaacgctatcagcaagcttgggaagatgtcaagatgactggttatgacctgcgagcagatgccattgggatccagcatgccaaggcttccagggatattgccagtgattatctgtacaaaactgcttatgagaaacagaaaggccattacattggctgtcgcagcgccaaggaagaccctaaactggtttgggcagcaaatgtgttgaagatgcagaatgacaggctgtacaaaaaggcctacaacgaccacaaagccaagatctccatccctgtggacatggtgtccatcagcgctgccaaagaaggtcaggcactggcaagtgatgtggactatcgccattacctgcaccactggtcttgctttcccgaccagaatgatgtgatccaagccaggaaagcctacgacctacagagcgacagtgtgtataaggcagacctggagtggctgcgtggcatcggctggatgccagaaggctcagtggaaatgaacagagtgaaggttgctcaagacctcgtgaatgaaagactctataggacacgtccagaagctttgtcattcaccagcattgtcgacactccagaagttgtcttggcaaaagccaattctctgcaaataagtgagaaactgtatcaggaagcctggaataaagataaaagcaacatcaccattccttctgatactccggagatgctgcaggcccacatcaatgccttgcaaatcagcaataaactctaccaaaaagactggaatgacaccaagcagaaaggctatgacataagggcagatgccattgaaatcaagcacgccaaggcctccagagaaattgccagtgagtacaaatacaaagaaggttaccgtaagcaactgggccaccacatgggtttccgcaccctacaagatgaccccaagtcagtatgggctatacatgctgccaagatccagagtgacagagaatataagaaagcttatgagaagtctaaaggaattcacaacacaccgttggacatgatgtcaattgttcaagccaagaaatgccaggtcctggttagcgacattgattatcgcaattatctgcaccagtggacgtgtctgccagatcagaacgatgtgatccaggccaagaaagcctacgacctgcagagcgataacttgtacaagtcagacctggaatggctgaagggtattggatggttgccagagggttctgtggaagtgatgagagtgaagaatgcccagaatctcttgaatgaaaggctgtatcgtataaagcctgaggccctcaaattcaccagcattgttgacaccccggaagtaatccaggcaaagatcaatgctgtacagatcagtgagccattgtatcgcgatgcctgggagaaagagaaggctaatgtgaacgtgccagctgacactcccctgatgctgcaatccaaaatcaatgccctgcagatcagcaataaacgctatcagcaagcttgggaagatgtcaagatgactggttatgacctgcgagcagatgccattgggatccagcatgccaaggcttccagggatattgccagtgactatctgtacaaaactgcttatgagaaacagaaaggccattacattggctgtcgcagcgccaaggaagaccctaaactggtttgggcagcaaatgtgttgaagatgcagaatgacaggctgtacaaaaaggcctacaacgaccacaaagccaagatctccatccctgtggacatggtgtccatcagcgctgccaaagaaggtcaggcactggcaagtgatgtggactatcgccattacctgcaccgctggtcttgctttcccgaccagaatgatgtgatccaagccaggaaagcctacgacctacagagcgacgccctctacaaggctgacttggagtggttgcgtggcattggctggatgccccaagggtctcctgaagtgttgagagtcaaaaacgcccagaatatcttttgtgacagtgtctatcggacgcctgtggtgaaccttaagtacacaagcattgttgacacacctgaagtggtccttgctaaatcaaatgctgaaaatattagtattccaaagtacagagaggtttgggacaaggataaaacttcaatacacataatgccagatactccagaaattaatctcgctagagcaaatgctcttaatgtgagcaataaactttaccgtgagggctgggatgaaatgaaggcgggctgtgatgtccggctggatgccatccccatccaggctgccaaggcctccagggagattgccagtgactataaatataagcttgaccatgagaagcagaagggacactacgtgggcaccctcacagccagggatgacaacaagatccgctgggccctcatagctgacaagctccagaatgaacgagagtaccggctggactgggccaaatggaaggccaagatccagagccctgtggacatgctttccatcctgcactctaaaaattcccaggctctggtcagtgacatggattaccgcaattacctgcaccagtggacctgcatgcccgaccagaacgatgtgattcaggccaagaaggcctacgaactgcagagcgataatgtttacaaggctgacttggaatggttgcgtggaattgggtggatgccaaatgactccgtgtccgtcaatcatgccaaacatgccgcggacatcttcagtgagaaaaaatatcgcacaaaaatagaaactctcaactttacgcctgtggatgacagagttgattatgtgacagcgaaacaaagtggcgagatcctcgatgatattaaataccggaaagactggaatgccaccaaatcaaagtacaccctcacagaaacccccctgctgcacactgcccaggaggctgctaggatactggaccagtatctctacaaggaaggctgggagagacaaaaagccacaggttacattttgcctccagatgctgtgccatttgttcatgcccatcactgcaatgacgttcagagtgagctgaaatacaaagctgaacatgtgaagcaaaaaggtcattatgttggtgtcccgacgatgagagatgatcctaagctggtttggtttgagcatgcaggccagattcagaatgagagactatacaaagaggactatcacaaaacaaaggccaaaatcaatatacctgctgatatggtgtcagtcttggccgccaagcaggggcagacccttgtcagtgatattgattatcgtaattacttgcaccaatggatgtgtcatcctgaccagaacgatgttattcaggcaagaaaggcctatgacctacagagtgataatgtctacagagctgacctggagtggctccgaggcattggctggatcccactggattctgtggaccatgtaagggttactaagaaccaggaaatgatgagtcagatcaaatataagaaaaatgcccttgaaaactatcctaactttagaagtgtggtggatcctccagagattgttttagccaagattaattctgtcaatcaaagtgatgtaaaatataaagaaacatttaataaagcaaagggcaaatatacgttttcaccagatacaccacatatctcccactccaaagacatgggaaaactctacagtactatactgtataaaggggcgtgggagggcaccaaggcctatggctacaccctggatgagcgctacattcccattgttggagccaagcatgctgatctggtgaacagtgagcttaaatacaaagagacatatgagaagcagaaaggtcactacctggctggaaaagtgatcggtgaattccctggtgtggttcactgtctggatttccaaaagatgaggagtgcgttgaactacagaaaacattatgaggataccaaagcaaatgttcatatccccaatgacatgatgaatcacgtgctggctaaaaggtgccagtacatcctcagtgacctggagtatcgacactatttccaccagtggacgtctcttctggaagaacccaatgttatacgcgtccgaaacgcccaggagatcttgagtgataatgtgtataaagatgacctgaattggttgaaaggcattggttgctacgtttgggatacaccccaaatcctccatgccaagaaatcatacgaccttcagagtcagctacaatatacagcagcaggtaaagaaaatctacaaaactataatctggtcacagacacgcccctctatgtgactgctgttcagagtggcattaatgccagtgaggtaaaatataaagaaaattatcatcagattaaggacaaatacacaacagttctagaaacagtggattatgacagaaccagaaacctgaagaatctttacagcagtaacctgtacaaggaggcctgggatagagtgaaagccaccagctacatcctgccttccagcaccttgtccctgacacacgccaagaaccagaagcatctggccagccatatcaaatatcgggaagaatatgaaaagttcaaagctctttatacgttaccaagaagtgttgacgatgatccgaacacagcacggtgcctccgagttggcaagcttaacatcgatcgcctgtacagatcagtttatgaaaagaacaagatgaaaatccacatcgtgcccgacatggtagagatggttactgccaaggattcccagaagaaagtcagtgagattgattaccgcctgcgcctccacgaatggatttgccaccccgacttgcaagtcaatgatcacgtcaggaaagtcacagatcagatcagcgatattgtatacaaggatgacctcaactggctgaaaggcattggttgctacgtctgggacactcctgaaatcctccatgccaagcatgcttatgatctacgtgatgatatcaagtataaagctcacatgttgaaaacaaggaatgactacaagcttgtcacagatacaccagtctacgtgcaggctgtcaaaagtgggaaacagctaagtgacgctgtctaccactatgactatgtgcacagtgtcagaggcaaagtggctccaactaccaaaaccgtggatctggaccgggcccttcatgcatacaagctccagagttcgaatctatacaaaaccagcctgcgcaccctgcccactggatatagacttccaggtgacactcctcacttcaaacacatcaaggacacccgttacatgagcagttatttcaagtacaaagaagcctatgaacacaccaaggcatatgggtatacacttggccccaaagatgttccatttgtccacgtccggagagtcaacaatgttaccagcgagagactgtatcgggaattgtaccacaaactgaaagacaagatccatacaactcccgatacccctgagatccgccaagtcaagaagacacaagaggctgtcagtgagttgatctacaaatcagacttcttcaagatgcagggccacatgatctctctgccatacacaccccaagtgatccattgccgctatgtgggagacatcaccagtgatattaaatacaaagaggacttgcaggtcctgaagggatttggctgcttcctgtatgacactcctgacatggtccgctcccggcacctgcggaagctctggtctaattacctatacactgataaggcaaggaagatgcgagacaaatacaaagtggtgcttgacactccagaatacagaaaagtgcaagaactgaagacacatctgagtgagctggtctacagagctgcaggcaagaagcagaagtcaatctttacttcagttcctgatactcctgatcttttaagagccaagcgagggcagaagcttcagagtcagtatctgtatgttgaacttgccaccaaagagagaccccatcatcacgctggaaaccagaccacagccttgaagcatgctaaagacgtgaaggacatggtcagtgagaaaaagtacaagattcaatatgaaaagatgaaagacaagtacactccggttccagatacgccaatcctcatcagagccaagagggcttactggaatgccagtgatctacgctacaaagaaacatttcaaaagaccaaagggaaataccacacggtgaaagatgccctagacattgtctatcatcgcaaagtcacagatgacatcagtaaaataaaatacaaggagaactacatgagccagttgggtatctggaggtccattcctgatcgtccagagcatttccaccaccgagcagtcactgacacagtcagtgatgtaaaatataaagaagacttgacttggcttaaaggcattggttgctatgcctatgatacccctgatttcactctggctgaaaagaacaagactctctacagcaagtataagtataaagaagtatttgaaaggacaaagtcagatttcaagtatgttgccgactctccgatcaataggcatttcaagtatgcaactcaattgatgaatgagaaaaaatacagagctgattatgagcagcggaaagataaataccacctggtagtcgatgagcctagacatctgctggctaagaccgcaggcgaccagatcagtcagatcaaatacaggaaaaactatgaaaaatcaaaggacaaatttacctcaattgtggatactccagaacacctgcgtactacaaaagtcaacaaacaaatcagcgatatcctttataaattggaatacaacaaggccaaacccagaggctacaccacaatccacgacacacccatgttgctgcatgtccgcaaggttaaagatgaagtcagtgatctgaaatacaaagaagtataccaaagaaataaatccaactgcaccattgagccagatgctgttcatatcaaagcagccaaggacgcctacaaagtcaacaccaatctggactataagaaacagtacgaagccaacaaagcccactggaagtggactcctgaccgaccggacttcctccaggctgccaagtcatccctgcagcaaagcgattttgaatataagctggaccgggagttcctcaagggttgcaagctttctgtcactgatgacaaaaacacggtgctcgccctcaggaatactttaatagaaagtgatctgaaatacaaagagaaacatgtcaaggaaagaggaacctgccatgccgtacctgacacgcctcagatcctgctggcgaagactgtcagcaacctggtgtctgagaacaagtacaaggaccatgtcaagaagcacttggcacagggctcatacacaacactaccagagacccgggacactgttcacgtcaaggaagtgaccaagcatgtcagtgatacaaattacaaaaagaagtttgtcaaggagaaaggaaaatccaactactccatcatgctggagccaccagaggtgaaacatgctatggaagtggccaagaagcaaagtgatgtcgcttacagaaaagatgccaaagagaacctgcattacaccacagtggctgatcgaccagacatcaagaaggccacacaggcagccaaacaggccagtgaggtggagtacagagccaagcaccgcaaggaaggcagccatggcttaagcatgctcggtcgcccagacatagaaatggccaagaaggcagccaagctgagcagccaggttaaataccgagaaaatttcgataaagaaaagggcaagacaccaaaatacaatccaaaagacagccagctctacaaagtcatgaaagatgctaataatcttgcaagtgaggttaaatacaaggctgacctgaagaaacttcacaaacccgtgactgacatgaaggagtctctgatcatgaatcatgtcctgaatacaagccaacttgccagttcttaccagtacaagaagaagtatgagaagagtaaaggccactaccacaccatacccgataatctggagcagcttcacctaaaagaggccacagaattacagagtatagtgaaatacaaagaaaagtatgaaaaggaacgaggaaaacccatgctggactttgaaacaccaacgtacatcactgccaaagagtctcagcagatgcagagtgggaaagaatataggaaagattatgaagagtccattaaaggcagaaacctgactggcctggaggtcacgccagctttgttacatgtcaaatatgcaactaaaatagcaagcgagaaagagtacaggaaagatctagaggaaagcatccgtgggaagggcctcactgaaatggaagatacacctgacatgctaagagcaaagaatgccactcaaatcctcaatgagaaagaatataagcgagacctggaactggaagtcaaaggaagaggcctgaatgccatggccaatgaaactccggattttatgagggccaggaatgctactgatattgccagtcagattaagtataagcaatcagcagaaatggagaaagccaatttcacttctgtggttgatactccagagatcattcatgcccaacaagtcaagaatctttcaagccagaaaaagtacaaggaagatgctgagaagtccatgtcgtattatgagactgttttggacaccccagagatacagagagtccgggagaaccaaaagaacttcagccttctccaataccagtgtgaccttaaaaacagtaaaggaaaaattacagttgttcaagacacgccagaaatactgcgtgtaaaagaaaatcagaagaatttcagctcggttttatataaagaggatgtctcaccaggaacggctatcggaaagacacctgagatgatgagagtgaaacaaacacaggaccacattagctcggtgaagtataaggaagcaataggacaaggaactccaatccctgacctgcctgaagtgaaacgtgtgaaggagacgcagaagcacattagctcggttatgtacaaagaaaacttgggaacaggcattccaaccactgtgactccagagattgagagagtcaaacgcaatcaagagaactttagctcggttttgtacaaagaaaatttggggaaaggaatcccaacacctatcactccagagatggagagagtcaaacgcaatcaagagaactttagctcgatattgtacaaagagaacttgagcaaggggactcccctacctgtcactcctgagatggagcgagtcaaactcaatcaagaaaactttagctcggtgttgtataaagaaaacgttggaaaagggattccaatccccatcactccagagatggagagagtcaaacacaatcaagaaaactttagttcggtgctatacaaagaaaacctggggacaggaattccaatccccatcactcctgagatgcagagagtcaaacacaatcaagaaaaccttagctcggtgttatacaaagaaaacatgggcaagggaacccctttacctgtcactcccgagatggaaagagtcaaacacaatcaagaaaatattagctcggtgttatacaaagaaaacatgggcaagggaacccctctacctgtcactcctgagatggagagagtcaaacacaatcaagaaaatattagctcggtgttatacaaagaaaacatgggcaagggaactcctttagctgtcactcccgagatggagcgagtcaaacacaatcaagaaaatattagctcggttttgtacaaagaaaatgtggggaaagccaccgcaacccctgtcactcctgagatgcagagagtcaaacgcaatcaagaaaacattagctcggtgttatacaaagagaacctggggaaagcaacccccacaccctttactcctgagatggaaagagtgaaacgcaatcaagaaaactttagctcggtattgtacaaagagaacatgagaaaagcaactccgacacctgttactccagagatggagagagctaagcgcaaccaagaaaacattagctcggttctttattctgatagtttccggaaacaaatacaaggcaaagctgcctatgtattggatacccccgagatgagacgggtgagggagacccaacggcacatctcaacggtgaaatatcatgaagactttgagaaacacaagggttgcttcacaccagtggtgacagatcctatcactgaacgagtaaagaagaacatgcaggacttcagtgacattaactaccgaggtattcagaggaaagtggtagaaatggaacaaaaacggaatgaccaagatcaggagactattacaggtttacgtgtctggcgtactaatcctggttcggtttttgactatgatccagcagaagacaacatccagtcccgaagcttacacatgattaatgtccaagctcagcgccggagccgggagcagtcacgatctgccagtgcactaagcatcagtgggggtgaggagaagtctgagcattcagaagcaccagaccaccacctttcgacttacagcgacgggggtgtctttgcagtctcaacagcttacaaacatgcaaaaaccacagagctcccacaacaacgatcatcttcagttgctacccaacagacaacggtatcttccatcccatctcatccatctactgctggaaaaatcttccgtgccatgtatgactatatggctgctgatgcagatgaggtgtccttcaaggatggagatgccatcataaatgttcaagcaattgatgaaggctggatgtatggcactgtgcagaggactggcaggaccggaatgctcccagccaactacgttgaagctatttaggcatttcaaagcatcacacttgtctgcaggacttacagatcctgcagtcaatgtttcggtttagactctccactgttacctaagttctcaagctgcctatggtttttctgtgtcaatgtgatttatggtagtaccatcctttctcctttgggttttaaaataagttgcagaacagacactttaaaagcttctgcaatattatttctgtgcctagagtctttctccattataaacatgttttaacattatttcttttctaaaacagggattttgaatatgccaaacacattaaaggaaaaatagcagagatgttcaccttttccttgctgattgctaatgcttattatttctaattcagttctgaagttataaacttataatcaatacaaaccagcaactaataaaacctctaattctgcaa

SEQ ID NO: 19682 - DNA, 1051 bp, Homo sapiens
  source 1..1051: mol_type = unassigned DNA
gcttttgcctggggttctcaggaggggagagttgggagaggctttgctgctgaggaaatttatttggtagattgaaggtttgaacgagagctacagaaacgaaagaaaaagtctgtataagccaatggtgttcgggaagaaaataaccccattgccttgagtttgtaggtgccactactactctggaaaaatggcagatgacgaagactatgaggaggtggtggagtactacacagaagaagtggtttacgaagaggtgccgggagagacaataacaaaaatttatgagactacgacaacaaggacatctgactatgagcaatcagaaacttccaaaccagctctggcacagccagcactggcacagccagcatcagcaaagccggtggagaggaggaaggtcatccggaagaaagtggatccttcaaagttcatgaccccctacattgcacacagtcagaaaatgcaggatctttttagcccaaataaatacaaggagaagtttgagaaaacaaaaggacagccatacgccagcacaacagatactccagaacttcgcagaatcaaaaaagtacaagatcaactcagtgaggttaagtatcgaatggatggtgatgttgctaagactatatgtcacgtagatgaaaaagcaaaggatattgaacatgcaaagaaagtgtcgcagcaagtcagtaaggttttatacaagcagaactgggaagacaccaaggataagtacctgcttcctcctgatgcccctgaacttgtccaggccgttaagaacaccgccatgttcagcaagaaactgtacactgaagactgggaagcagacaaaagtttgttttacccctataatgatagcccggaactgaggagagttgcccaggcccagaaagctctcagtgatgttgcctacaaaaaaggtctcgctgaacagcaagctcaattcacgcctctggctgatcctccagatatagaatttgccaagaaagtaaccaatcaagtgagcaagcaaaaagagaaaaaaagaaaaaaaaaaagaaagaaagtg

SEQ ID NO: 19683 - DNA, 1557 bp, Homo sapiens
  source 1..1557: mol_type = unassigned DNA
aagacacgccagaaatactgcgtgtaaaagaaaatcagaagaatttcagctcggttttatataaagaggatgtctcaccaggaacggctatcggaaagacacctgagatgatgagagtgaaacaaacacaggaccacattagctcggtgaagtataaggaagcaataggacaaggaactccaatccctgacctgcctgaagtgaaacgtgtgaaggagacgcagaagcacattagctcggttatgtacaaagaaaacttgggaacaggcattccaaccactgtgactccagagattgagagagtcaaacgcaatcaagagaactttagctcggtgttatacaaagaaaacatgggcaagggaactcctttagctgtcactcccgagatggagcgagtcaaacacaatcaagaaaatattagctcggttttgtacaaagaaaatgtggggaaagccaccgcaacccctgtcactcctgagatgcagagagtcaaacgcaatcaagaaaacattagctcggtattgtacaaagagaacatgagaaaagcaactccgacacctgttactccagagatggagagagctaagcgcaaccaagaaaacattagctcggttctttattctgatagtttccggaaacaaatacaaggcaaagctgcctatgtattggatacccccgagatgagacgggtgagggagacccaacggcacatctcaacggtgaaatatcatgaagactttgagaaacacaagggttgcttcacaccagtggtgacagatcctatcactgaacgagtaaagaagaacatgcaggacttcagtgacattaactaccgaggtattcagaggaaagtggtagaaatggaacaaaaacggaatgaccaagatcaggagactattacaggtttacgtgtctggcgtactaatcctggttcggtttttgactatgatccagcagaagacaacatccagtcccgaagcttacacatgattaatgtccaagctcagcgccggagccgggagcagtcacgatctgccagtgcactaagcatcagtgggggtgaggagaagtctgagcattcagaagcaccagaccaccacctttcgacttacagcgacgggggtgtctttgcagtctcaacagcttacaaacatgcaaaaaccacagagctcccacaacaacgatcatcttcagttgctacccaacagacaacggtatcttccatcccatctcatccatctactgctggaaaaatcttccgtgccatgtatgactatatggctgctgatgcagatgaggtgtccttcaaggatggagatgccatcataaatgttcaagcaattgatgaaggctggatgtatggcactgtgcagaggactggcaggaccggaatgctcccagccaactacgttgaagctatttaggcatttcaaagcatcacacttgtctgcaggacttacagatcctgcagtcaatgtttcggtttagactctccactgttacctaagttctcaagctgcctatggtttttctgtgtcaatgtgatttatggtagta

SEQ ID NO: 19684 - DNA, 1012 bp, Homo sapiens
  source 1..1012: mol_type = unassigned DNA
gcaaaaatacaaagaagactatgaaaataaaatcaaaggcaaatggagtgagacaccttgctttgaagttgcaaatgccagaatgaatgctgataacattagcacaaggaaataccaggaagattttgaaaacatgaaagaccagatctacttcatgcagaccgaaacaccagagtataaaatgaataaaaaagctggtgtggcagctagcaaggtaaaatacaaagaagactatgaaaagaataaaggaaaagcagattataatgtgcttcctgcttcagagaacccacagcttaggcagctgaaggcagcaggagatgccctaagtgacaaactatacaaggaaaactatgaaaagacaaaagcaaagagcataaattactgcgagacccccaaattcaagctcgatactgttctgcagaacttcagtagtgataaaaaatataaagattcctacttaaaagatattttgggacattatgtaggcagcttcgaggatccataccattcacactgcatgaaagtcacagctcaaaacagtgataaaaactacaaagcagaatacgaagaagacagaggcaaaggcttcttccctcagaccataactcaagaatatgaagcaattaagaaactagatcagtgtaaagaccacacctacaaagtccatccagataagacaaaattcacccaagttacagactctcctgttctgctacaagcccaagtcaattccaaacaactgagtgacttaaattacaaagcaaaacatgaaagtgaaaagttcaagtgccatatcccccctgatactcctgcttttatccagcacaaagtcaatgcctataacttgagtgataatctttataagcaagactgggagaagagcaaagccaaaaagtttgacattaaagtggatgccattcccctgctggcagccaaagccaacaccaagaacaccagcgatgtgatgtacaagaaagactatgaaaaaaacaaagttaaagtgcagcaaaga

SEQ ID NO: 19685 - DNA, 5507 bp, Homo sapiens
  source 1..5507: mol_type = unassigned DNA
aaactagaaggtcagcaaaggaaagtggaagttggattctgaaagatcgaggtgcccacaggaattttatggtcgtcggattttgaagacttgaactagactgggggttctccttgcatttcttgcctgttgcctatctttgtcctctctcttccggcttcgagatgaatgtgcagccctgttctaggtgtgggtatggggtttatcctgccgagaagatcagctgtatagatcagatatggcataaagcctgttttcactgtgaagtttgcaagatgatgctgtctgttaataactttgtgagtcaccagaaaaagccgtactgtcacgcccataaccctaagaacaacactttcaccagtgtctatcacactccattaaatctaaatgtgaggacatttccagaggccatcagtgggatccatgaccaagaagatggtgaacagtgtaaatcagtttttcactgggacatgaaatccaaggataaggaaggtgcacctaacaggcagccactggcaaatgagagagcctattggactggatatggggaagggaatgcttggtgcccaggagctctgccagaccccgaaattgtaaggatggttgaggctcgaaagtctcttggtgaggaatatacagaagactatgagcaacccaggggcaaggggagctttccagccatgatcacacctgcttatcaaagggccaagaaagccaaccagctggccagccaagtggagtataagagagggcatgatgaacgcatctccaggttctccacggtggtggatactcctgagctgctacggagcaaggctggggcacagcttcaaagtgatgtgagatacacagaggactatgaacaacaaagagggaaaggcagtttccctgcgatgatcacacccgcctatcagatagccaaaagagccaatgagctggcaagtgatgtgaggtaccatcaacaatatcaaaaagaaatgaggggaatggctggtccagccattggagctgagggcatcttgacaagggaatgtgcagaccaatatggccagggttacccggaggagtatgaggagcacaggggaaagggcagcttcccagctatgatcactccagcatatcagaacgccaagaaagctcacgaactcgctagtgacataaaatacaggcaggacttcaataagatgaaaggcgctgcacattatcactcgcttccagctcaagacaacttggttctcaaacaggctcagagcgtaaacaaactcgtgagtgaggtggagtataagaaggatctggaaagtagtagaggtcacagtatcaactactgtgaaacacctcaattcaggaacgtgagcaagatctcaaaatttaccagtgataataaatataaagaaaactaccagaaccacatgagaggccgctatgaaggagttggtatggacagacgcactctgcatgctatgaaagttggcagcctggcaagcaacgttgcctacaaagctgattataaacatgatattgtcgactacaactacccagccactctcacgccttcctatcaaacagctatgaaactggtgcccttgaaagatgccaattataggcagagcatcgacaagttgaagtacagctcggtgactgacaccccacagattgttcaagccaaaatcaatgcccagcagctgagtcatgtgaattaccgtgctgactatgagaaaaataagttgaattacacattgccccaggatgttcctcagctggtgaaggccaaaaccaatgccaaactcttcagtgaggttaagtataaagaaggctgggagaagacaaaggggaaaggatttgagatgaagctggatgccatgtctctgctggccgccaaagcctctggggagcttgctagcaatattaaatataaagaagaatatgaaaagacaaaaggcaaagccatgggaacagccgactctaggcttctgcactccctgcagattgctaagatgagcagtgaggttgaatataagaaaggctttgaagagagtaagacccggtttcacctgcccatggatatggtaaacatcaggcatgctaagaaggcccaaactctcgccagtgacctggactacaggaagaaactgcatgaatacactgtgctgcctgaagatatgaagactcagtgggccaagaaggcctatgggctccagagcgagctgcagtacaaggctgacctggcatggatgaagggagttgggtggctgacagaggggagtctcaacttggaacaagccaagaaggctggacagctggtcagcgagaaaaactaccggcagagggtcgatgagctgaagttcaccagcgtgaccgacagctcccagatggagcacgccaagaagagccaggagctacagagcggggtggcctacaaggcaggaaatgagcagtctgtccatcagtataccatcagcaaagacgagcctctcttcctgcaggcccgagccaatgctgcaaatctcagcgagaaactgtataagagcagctgggaaaaccagaaagcaaaagggtttgagctgcgtcttgattccttgaccttcctggcagccaaagccaagagggacctggctagcgaggtgaagtacaaggaggattatgagagatccagagggaagctcattggggcaaaagatgtacagggagattcgcaaatgagccactcactgcaaatgtccaagctgcagagtgagctggagtacaagaagggattcgaggacaccaaatcccaatgccacgtctccctggacatggtccacctcgtgcatgcccgcaaagctcagcatttagccacagacgtaggctacaagacagcggaacatcactttacggctttgcccacagacatgaaggtggaatgggccaagaaggcttatggcttacagagtgataaccaatacagggcagatgtgaagtggatgaaaggcatgggctgggtcgccaccgggtcattaaatgtggagcaggcgaagaaggcaggagaactcattagcgagaagaagtaccgtcagcatccagatgctttgaagtttaccagtattaaagacactccggagatggtccaggccagaattagttatacccaagcagtggatagattatacagggaacaaggagaaaacataaagcatcattacacaccgactgctgacctccctgaagtcctgctggccaagctgaatgccatgaatatcagtgagacgcgttataaggaatcctggagcaaacttcgagatggtggctataaactgaggttggatgcccttccattccaagcagcaaaggcttctggtgaaatcataagtgattacaaatacaaagaggcatttgagaaaatgaaaggacagatgcttggttcccggagcttggaagatgatatcagccttgcacattcagtgtatgcgacctcactgcagagtgatgtgaattacaagaaaggctttgaacactcaaaggcgcagttccatctgccgttggacatggccgccctggtgcatgccaagaaggctcagaccctggccagcaatcaggactacaaacatccactgccccagtacacttccttggcagaagacctgaggctgagctgtgccaagaaagctcacaaattgcagagtgagaatttgtaccggtcagacctgaactttatgcgaggtgttgcatgtgtcattccaggcacgttagagattgaagggaggaagaaagcatcggaactcatcagtgagagtaaatatcggcagcatccccactcattcaagtacacagctgtgacagacactcccaacctccttcatgcgaaattcagcaaccagataacgaatgagcgcctctataaagcagctggagaggatgcaagacacgagtatacaatgaccctgggtctgcccgagttcatccgagcaaaaacgaatgcagccaacctgagtgacgcaagatacaaagagtcctggcgtaatcttcgtgctcaaggctacaagctgacaatagaagcgctccccttccaggctgcccgggcctctggagatatagccagtgattttctctacagacatgactttgtgaaggagcgagggaaactcatagggccccagagtgtaagagacgacccccggatccagcactgccggcgcatgggccagctgcagagcgagcttcagtacaggaggggggcgaccagcagccaagcccagttccatctgcccatggacatggtgcacctggtccatgccaagaatgcccaggctctggccagcgaccacgactacaggacacagtatcacaagttcacagcactgcccgaggacctgaagatggcctgggccaagaaagcccatgccctgcagagtgagttgcgctacaagtcagacctgatcggcatgaagggcataggatggctggcgctgagatccccacagatggagagtgcaaagaaggctggagaactcatcagcgagaccaagtaccgtaaaaaaccagacagtatcaagttcaccacagtggttgactccccagacctggttcatgccaagaacagctatatgcactgcaatgagcgcatgtatagatctggagatgcagaatccctgcacagatacaccctgatccccgaccatcccgatttcacccgagctcgcctcaatgcgctgcatctgagtgacaaagtctacagaaactcctgggagcagacccgggctggcagttatgacttcaggctggatgccatccccttccagactgcccgggcatctagggagatcgccagtgatttccggtacaaagaggctttcctgcgggaccgaggcctgcagatcgggtaccgcagtgtcgacgatgacccaaggatgaagcatttcctcaacgttggcaggctccagagtgacaatgagtacaagaaggactttgccaagagtcggtcccagtttcacagcagcacagaccagcccggcctccttcaggccaagaggagccagcagctggccagtgatgtgcactacaggcagcccctgccccagcccacctgcgacccggagcagctgggcctcaggcatgctcagaaggcccaccagctgcagagtgatgtcaagtataaatcagacttgaacctgaccagaggtgttggctggacccctcctggctcctacaaagtggaaatggctcggcgggctgcggaactggccaacgcaaggggcctgggtctccagggagcttaccggggggcagaagcagtggaggctggagatcatcagagtggggaggtgaacccagatgccactgagattctgcacgtcaaaaagaagaaggccctgctgttgtgagccatgtccaccctgattcctgagaggccagagaggaagtttgttcaccagagacaggcttcagatggctttgatttcggcaagctggaatggcccaccagcccatcccagatcttcctttattaaaataataactctgaaagcagatgg

SEQ ID NO: 19686 - DNA, 5402 bp, Homo sapiens
  source 1..5402: mol_type = unassigned DNA
aaactagaaggtcagcaaaggaaagtggaagttggattctgaaagatcgaggtgcccacaggaattttatggtcgtcggattttgaagacttgaactagactgggggttctccttgcatttcttgcctgttgcctatctttgtcctctctcttccggcttcgagatgaatgtgcagccctgttctaggtgtgggtatggggtttatcctgccgagaagatcagctgtatagatcagatatggcataaagcctgttttcactgtgaagtttgcaagatgatgctgtctgttaataactttgtgagtcaccagaaaaagccgtactgtcacgcccataaccctaagaacaacactttcaccagtgtctatcacactccattaaatctaaatgtgaggacatttccagaggccatcagtgggatccatgaccaagaagatggtgaacagtgtaaatcagtttttcactgggacatgaaatccaaggataaggaaggtgcacctaacaggcagccactggcaaatgagagagcctattggactggatatggggaagggaatgcttggtgcccaggagctctgccagaccccgaaattgtaaggatggttgaggctcgaaagtctcttggtgaggaatatacagaagactatgagcaacccaggggcaaggggagctttccagccatgatcacacctgcttatcaaagggccaagaaagccaaccagctggccagccaagtggagtataagagagggcatgatgaacgcatctccaggttctccacggtggtggatactcctgagctgctacggagcaaggctggggcacagcttcaaagtgatgtgagatacacagaggactatgaacaacaaagagggaaaggcagtttccctgcgatgatcacacccgcctatcagatagccaaaagagccaatgagctggcaagtgatgtgaggtaccatcaacaatatcaaaaagaaatgaggggaatggctggtccagccattggagctgagggcatcttgacaagggaatgtgcagaccaatatggccagggttacccggaggagtatgaggagcacaggggaaagggcagcttcccagctatgatcactccagcatatcagaacgccaagaaagctcacgaactcgctagtgacataaaatacaggcaggacttcaataagatgaaaggcgctgcacattatcactcgcttccagctcaagacaacttggttctcaaacaggctcagagcgtaaacaaactcgtgagtgagaataaatataaagaaaactaccagaaccacatgagaggccgctatgaaggagttggtatggacagacgcactctgcatgctatgaaagttggcagcctggcaagcaacgttgcctacaaagctgattataaacatgatattgtcgactacaactacccagccactctcacgccttcctatcaaacagctatgaaactggtgcccttgaaagatgccaattataggcagagcatcgacaagttgaagtacagctcggtgactgacaccccacagattgttcaagccaaaatcaatgcccagcagctgagtcatgtgaattaccgtgctgactatgagaaaaataagttgaattacacattgccccaggatgttcctcagctggtgaaggccaaaaccaatgccaaactcttcagtgaggttaagtataaagaaggctgggagaagacaaaggggaaaggatttgagatgaagctggatgccatgtctctgctggccgccaaagcctctggggagcttgctagcaatattaaatataaagaagaatatgaaaagacaaaaggcaaagccatgggaacagccgactctaggcttctgcactccctgcagattgctaagatgagcagtgaggttgaatataagaaaggctttgaagagagtaagacccggtttcacctgcccatggatatggtaaacatcaggcatgctaagaaggcccaaactctcgccagtgacctggactacaggaagaaactgcatgaatacactgtgctgcctgaagatatgaagactcagtgggccaagaaggcctatgggctccagagcgagctgcagtacaaggctgacctggcatggatgaagggagttgggtggctgacagaggggagtctcaacttggaacaagccaagaaggctggacagctggtcagcgagaaaaactaccggcagagggtcgatgagctgaagttcaccagcgtgaccgacagctcccagatggagcacgccaagaagagccaggagctacagagcggggtggcctacaaggcaggaaatgagcagtctgtccatcagtataccatcagcaaagacgagcctctcttcctgcaggcccgagccaatgctgcaaatctcagcgagaaactgtataagagcagctgggaaaaccagaaagcaaaagggtttgagctgcgtcttgattccttgaccttcctggcagccaaagccaagagggacctggctagcgaggtgaagtacaaggaggattatgagagatccagagggaagctcattggggcaaaagatgtacagggagattcgcaaatgagccactcactgcaaatgtccaagctgcagagtgagctggagtacaagaagggattcgaggacaccaaatcccaatgccacgtctccctggacatggtccacctcgtgcatgcccgcaaagctcagcatttagccacagacgtaggctacaagacagcggaacatcactttacggctttgcccacagacatgaaggtggaatgggccaagaaggcttatggcttacagagtgataaccaatacagggcagatgtgaagtggatgaaaggcatgggctgggtcgccaccgggtcattaaatgtggagcaggcgaagaaggcaggagaactcattagcgagaagaagtaccgtcagcatccagatgctttgaagtttaccagtattaaagacactccggagatggtccaggccagaattagttatacccaagcagtggatagattatacagggaacaaggagaaaacataaagcatcattacacaccgactgctgacctccctgaagtcctgctggccaagctgaatgccatgaatatcagtgagacgcgttataaggaatcctggagcaaacttcgagatggtggctataaactgaggttggatgcccttccattccaagcagcaaaggcttctggtgaaatcataagtgattacaaatacaaagaggcatttgagaaaatgaaaggacagatgcttggttcccggagcttggaagatgatatcagccttgcacattcagtgtatgcgacctcactgcagagtgatgtgaattacaagaaaggctttgaacactcaaaggcgcagttccatctgccgttggacatggccgccctggtgcatgccaagaaggctcagaccctggccagcaatcaggactacaaacatccactgccccagtacacttccttggcagaagacctgaggctgagctgtgccaagaaagctcacaaattgcagagtgagaatttgtaccggtcagacctgaactttatgcgaggtgttgcatgtgtcattccaggcacgttagagattgaagggaggaagaaagcatcggaactcatcagtgagagtaaatatcggcagcatccccactcattcaagtacacagctgtgacagacactcccaacctccttcatgcgaaattcagcaaccagataacgaatgagcgcctctataaagcagctggagaggatgcaagacacgagtatacaatgaccctgggtctgcccgagttcatccgagcaaaaacgaatgcagccaacctgagtgacgcaagatacaaagagtcctggcgtaatcttcgtgctcaaggctacaagctgacaatagaagcgctccccttccaggctgcccgggcctctggagatatagccagtgattttctctacagacatgactttgtgaaggagcgagggaaactcatagggccccagagtgtaagagacgacccccggatccagcactgccggcgcatgggccagctgcagagcgagcttcagtacaggaggggggcgaccagcagccaagcccagttccatctgcccatggacatggtgcacctggtccatgccaagaatgcccaggctctggccagcgaccacgactacaggacacagtatcacaagttcacagcactgcccgaggacctgaagatggcctgggccaagaaagcccatgccctgcagagtgagttgcgctacaagtcagacctgatcggcatgaagggcataggatggctggcgctgagatccccacagatggagagtgcaaagaaggctggagaactcatcagcgagaccaagtaccgtaaaaaaccagacagtatcaagttcaccacagtggttgactccccagacctggttcatgccaagaacagctatatgcactgcaatgagcgcatgtatagatctggagatgcagaatccctgcacagatacaccctgatccccgaccatcccgatttcacccgagctcgcctcaatgcgctgcatctgagtgacaaagtctacagaaactcctgggagcagacccgggctggcagttatgacttcaggctggatgccatccccttccagactgcccgggcatctagggagatcgccagtgatttccggtacaaagaggctttcctgcgggaccgaggcctgcagatcgggtaccgcagtgtcgacgatgacccaaggatgaagcatttcctcaacgttggcaggctccagagtgacaatgagtacaagaaggactttgccaagagtcggtcccagtttcacagcagcacagaccagcccggcctccttcaggccaagaggagccagcagctggccagtgatgtgcactacaggcagcccctgccccagcccacctgcgacccggagcagctgggcctcaggcatgctcagaaggcccaccagctgcagagtgatgtcaagtataaatcagacttgaacctgaccagaggtgttggctggacccctcctggctcctacaaagtggaaatggctcggcgggctgcggaactggccaacgcaaggggcctgggtctccagggagcttaccggggggcagaagcagtggaggctggagatcatcagagtggggaggtgaacccagatgccactgagattctgcacgtcaaaaagaagaaggccctgctgttgtgagccatgtccaccctgattcctgagaggccagagaggaagtttgttcaccagagacaggcttcagatggctttgatttcggcaagctggaatggcccaccagcccatcccagatcttcctttattaaaataataactctgaaagcagatgg

SEQ ID NO: 19687 - DNA, 2714 bp, Homo sapiens
  source 1..2714: mol_type = unassigned DNA
atcaaaaagaaatgaggggaatggctggtccagccattggagctgagggcatcttgacaagggaatgtgcagaccaatatggccagggttacccggaggagtatgaggagcacaggggaaagggcagcttcccagctatgatcactccagcatatcagaacgccaagaaagctcacgaactcgctagtgacataaaatacaggcaggacttcaataagatgaaaggcgctgcacattatcactcgcttccagctcaagacaacttggttctcaaacaggctcagagcgtaaacaaactcgtgagtgaggtggagtataagaaggatctggaaagtagtagaggtcacagtatcaactactgtgaaacacctcaattcaggaacgtgagcaagatctcaaaatttaccagtgataataaatataaagaaaactaccagaaccacatgagaggccgctatgaaggagttggtatggacagacgcactctgcatgctatgaaagttggcagcctggcaagcaacgttgcctacaaagctgattataaacatgatattgtcgactacaactacccagccactctcacgccttcctatcaaacagctatgaaactggtgcccttgaaagatgccaattataggcagagcatcgacaagttgaagtacagctcggtgactgacaccccacagattgttcaagccaaaatcaatgcccagcagctgagtcatgtgaattaccgtgctgactatgagaaaaataagttgaattacacattgccccaggatgttcctcagctggtgaaggccaaaaccaatgccaaactcttcagtgaggttaagtataaagaaggctgggagaagacaaaggggaaaggatttgagatgaagctggatgccatgtctctgctggccgccaaagcctctggggagcttgctagcaatgtacaccttcttctttctctcaagattaaatataaagaagaatatgaaaagacaaaaggcaaagccatgggaacagccgactctaggcttctgcactccctgcagattgctaagatgagcagtgaggttgaatataagaaaggctttgaagagagtaagacccggtttcacctgcccatggatatgggagttgggtggctgacagaggggagtctcaacttggaacaagccaagaaggctggacagctggtcagcgagaaaaactaccggcagagggtcgatgagctgaagttcaccagcgtgaccgacagctcccagatggagcacgccaagaagagccaggagctacagagcggggtggcctacaaggcaggaaatgagcagtctgtccatcagtataccatcagcaaagacgagcctctcttcctgcaggcccgagccaatgctgcaaatctcagcgagtttctctacagacatgactttgtgaaggagcgagggaaactcatagggccccagagtgtaagagacgacccccggatccagcactgccggcgcatgggccagctgcagagcgagcttcagtacaggaggggggcgaccagcagccaagcccagttccatctgcccatggacatggtgcacctggtccatgccaagaatgcccaggctctggccagcgaccacgactacaggacacagtatcacaagttcacagcactgcccgaggacctgaagatggcctgggccaagaaagcccatgccctgcagagtgagttgcgctacaagtcagacctgatcggcatgaagggcataggatggctggcgctgagatccccacagatggagagtgcaaagaaggctggagaactcatcagcgagaccaagtaccgtaaaaaaccagacagtatcaagttcaccacagtggttgactccccagacctggttcatgccaagaacagctatatgcactgcaatgagcgcatgtatagatctggagatgcagaatccctgcacagatacaccctgatccccgaccatcccgatttcacccgagctcgcctcaatgcgctgcatctgagtgacttccggtacaaagaggctttcctgcgggaccgaggcctgcagatcgggtaccgcagtgtcgacgatgacccaaggatgaagcatttcctcaacgttggcaggctccagagtgacaatgagtacaagaaggactttgccaagagtcggtcccagtttcacagcagcacagaccagcccggcctccttcaggccaagaggagccagcagctggccagtgatgtgcactacaggcagcccctgccccagcccacctgcgacccggagcagctgggcctcaggcatgctcagaaggcccaccagctgcagagtgatgtcaagtataaatcagacttgaacctgaccagaggtgttggctggacccctcctggctcctacaaagtggaaatggctcggcgggctgcggaactggccaacgcaaggggcctgggtctccagggagcttaccggggggcagaagcagtggaggctggagatcatcagagtggggaggtgaacccagatgccactgagattctgcacgtcaaaaagaagaaggccctgctgttgtgagccatgtccaccctgattcctgagaggccagagaggaagtttgttcaccagagacaggcttcagatggctttgatttcggcaagctggaatggcccaccagcccatcccagatcttcctttattaaaataataactctgaaagc

SEQ ID NO: 19688 - DNA, 5629 bp, Homo sapiens
  source 1..5629: mol_type = unassigned DNA
tcagcaaaggaaagtggaagttggattctgaaagatcgaggtgcccacaggaattttatggtcgtcggattttgaagacttgaactagactgggggttctccttgcatttcttgcctgttgcctatctttgtcctctctcttccggcttcgagatgaatgtgcagccctgttctaggtgtgggtatggggtttatcctgccgagaagatcagctgtatagatcagatatggcataaagcctgttttcactgtgaagtttgcaagatgatgctgtctgttaataactttgtgagtcaccagaaaaagccgtactgtcacgcccataaccctaagaacaacactttcaccagtgtctatcacactccattaaatctaaatgtgaggacatttccagaggccatcagtgggatccatgaccaagaagatggtgaacagtgtaaatcagtttttcactgggacatgaaatccaaggataaggaaggtgcacctaacaggcagccactggcaaatgagagagcctattggactggatatggggaagggaatgcttggtgcccaggagctctgccagaccccgaaattgtaaggatggttgaggctcgaaagtctcttggtgaggaatatacagaagactatgagcaacccaggggcaaggggagctttccagccatgatcacacctgcttatcaaagggccaagaaagccaaccagctggccagccaagtggagtataagagagggcatgatgaacgcatctccaggttctccacggtggtggatactcctgagctgctacggagcaaggctggggcacagcttcaaagtgatgtgagatacacagaggactatgaacaacaaagagggaaaggcagtttccctgcgatgatcacacccgcctatcagatagccaaaagagccaatgagctggcaagtgatgtgaggtaccatcaacaatatcaaaaagaaatgaggggaatggctggtccagccattggagctgagggcatcttgacaagggaatgtgcagaccaatatggccagggttacccggaggagtatgaggagcacaggggaaagggcagcttcccagctatgatcactccagcatatcagaacgccaagaaagctcacgaactcgctagtgacataaaatacaggcaggacttcaataagatgaaaggcgctgcacattatcactcgcttccagctcaagacaacttggttctcaaacaggctcagagcgtaaacaaactcgtgagtgaggtggagtataagaaggatctggaaagtagtagaggtcacagtatcaactactgtgaaacacctcaattcaggaacgtgagcaagatctcaaaatttaccagtgataataaatataaagaaaactaccagaaccacatgagaggccgctatgaaggagttggtatggacagacgcactctgcatgctatgaaagttggcagcctggcaagcaacgttgcctacaaagctgattataaacatgatattgtcgactacaactacccagccactctcacgccttcctatcaaacagctatgaaactggtgcccttgaaagatgccaattataggcagagcatcgacaagttgaagtacagctcggtgactgacaccccacagattgttcaagccaaaatcaatgcccagcagctgagtcatgtgaattaccgtgctgactatgagaaaaataagttgaattacacattgccccaggatgttcctcagctggtgaaggccaaaaccaatgccaaactcttcagtgaggttaagtataaagaaggctgggagaagacaaaggggaaaggatttgagatgaagctggatgccatgtctctgctggccgccaaagcctctggggagcttgctagcaatgtacaccttcttctttctctcaagattaaatataaagaagaatatgaaaagacaaaaggcaaagccatgggaacagccgactctaggcttctgcactccctgcagattgctaagatgagcagtgaggttgaatataagaaaggctttgaagagagtaagacccggtttcacctgcccatggatatggtaaacatcaggcatgctaagaaggcccaaactctcgccagtgacctggactacaggaagaaactgcatgaatacactgtgctgcctgaagatatgaagactcagtgggccaagaaggcctatgggctccagagcgagctgcagtacaaggctgacctggcatggatgaagggagttgggtggctgacagaggggagtctcaacttggaacaagccaagaaggctggacagctggtcagcgagaaaaactaccggcagagggtcgatgagctgaagttcaccagcgtgaccgacagctcccagatggagcacgccaagaagagccaggagctacagagcggggtggcctacaaggcaggaaatgagcagtctgtccatcagtataccatcagcaaagacgagcctctcttcctgcaggcccgagccaatgctgcaaatctcagcgagaaactgtataagagcagctgggaaaaccagaaagcaaaagggtttgagctgcgtcttgattccttgaccttcctggcagccaaagccaagagggacctggctagcgaggtgaagtacaaggaggattatgagagatccagagggaagctcattggggcaaaagatgtacagggagattcgcaaatgagccactcactgcaaatgtccaagctgcagagtgagctggagtacaagaagggattcgaggacaccaaatcccaatgccacgtctccctggacatggtccacctcgtgcatgcccgcaaagctcagcatttagccacagacgtaggctacaagacagcggaacatcactttacggctttgcccacagacatgaaggtggaatgggccaagaaggcttatggcttacagagtgataaccaatacagggcagatgtgaagtggatgaaaggcatgggctgggtcgccaccgggtcattaaatgtggagcaggcgaagaaggcaggagaactcattagcgagaagaagtaccgtcagcatccagatgctttgaagtttaccagtattaaagacactccggagatggtccaggccagaattagttatacccaagcagtggatagattatacagggaacaaggagaaaacataaagcatcattacacaccgactgctgacctccctgaagtcctgctggccaagctgaatgccatgaatatcagtgagacgcgttataaggaatcctggagcaaacttcgagatggtggctataaactgaggttggatgcccttccattccaagcagcaaaggcttctggtgaaatcataagtgattacaaatacaaagaggcatttgagaaaatgaaaggacagatgcttggttcccggagcttggaagatgatatcagccttgcacattcagtgtatgcgacctcactgcagagtgatgtgaattacaagaaaggctttgaacactcaaaggcgcagttccatctgccgttggacatggccgccctggtgcatgccaagaaggctcagaccctggccagcaatcaggactacaaacatccactgccccagtacacttccttggcagaagacctgaggctgagctgtgccaagaaagctcacaaattgcagagtgagaatttgtaccggtcagacctgaactttatgcgaggtgttgcatgtgtcattccaggcacgttagagattgaagggaggaagaaagcatcggaactcatcagtgagagtaaatatcggcagcatccccactcattcaagtacacagctgtgacagacactcccaacctccttcatgcgaaattcagcaaccagataacgaatgagcgcctctataaagcagctggagaggatgcaagacacgagtatacaatgaccctgggtctgcccgagttcatccgagcaaaaacgaatgcagccaacctgagtgacgcaagatacaaagagtcctggcgtaatcttcgtgctcaaggctacaagctgacaatagaagcgctccccttccaggctgcccgggcctctggagatatagccagtgattttctctacagacatgactttgtgaaggagcgagggaaactcatagggccccagagtgtaagagacgacccccggatccagcactgccggcgcatgggccagctgcagagcgagcttcagtacaggaggggggcgaccagcagccaagcccagttccatctgcccatggacatggtgcacctggtccatgccaagaatgcccaggctctggccagcgaccacgactacaggacacagtatcacaagttcacagcactgcccgaggacctgaagatggcctgggccaagaaagcccatgccctgcagagtgagttgcgctacaagtcagacctgatcggcatgaagggcataggatggctggcgctgagatccccacagatggagagtgcaaagaaggctggagaactcatcagcgagaccaagtaccgtaaaaaaccagacagtatcaagttcaccacagtggttgactccccagacctggttcatgccaagaacagctatatgcactgcaatgagcgcatgtatagatctggagatgcagaatccctgcacagatacaccctgatccccgaccatcccgatttcacccgagctcgcctcaatgcgctgcatctgagtgacaaagtctacagaaactcctgggagcagacccgggctggcagttatgacttcaggctggatgccatccccttccagactgcccgggcatctagggagatcgccagtgatttccggtacaaagaggctttcctgcgggaccgaggcctgcagatcgggtaccgcagtgtcgacgatgacccaaggatgaagcatttcctcaacgttggcaggctccagagtgacaatgagtacaagaaggactttgccaagagtcggtcccagtttcacagcagcacagaccagcccggcctccttcaggccaagaggagccagcagctggccagtgatgtgcactacaggcagcccctgccccagcccacctgcgacccggagcagctgggcctcaggcatgctcagaaggcccaccagctgcagagtgatgtcaagtataaatcagacttgaacctgaccagaggtgttggctggacccctcctggctcctacaaagtggaaatggctcggcgggctgcggaactggccaacgcaaggggcctgggtctccagggagcttaccggggggcagaagcagtggaggctggagatcatcagagtggggaggtgaacccagatgccactgagattctgcacgtcaaaaagaagaaggccctgctgttgtgagccatgtccaccctgattcctgagaggccagagaggaagtttgttcaccagagacaggcttcagatggctttgatttcggcaagctggaatggcccaccagcccatcccagatcttcctttattaaaataataactctgaaagcagatggagaatgttgtatttgtggtcctctctgatacctagacgtggatggctgattctgttgagtgcctcgagtgtctgggctgaggaataaagatgtgatggtggttcccgct

SEQ ID NO: 19689 - DNA, 5535 bp, Homo sapiens
  source 1..5535: mol_type = unassigned DNA
aaactagaaggtcagcaaaggaaagtggaagttggattctgaaagatcgaggtgcccacaggaattttatggtcgtcggattttgaagacttgaactagactgggggttctccttgcatttcttgcctgttgcctatctttgtcctctctcttccggcttcgagatgaatgtgcagccctgttctaggtgtgggtatggggtttatcctgccgagaagatcagctgtatagatcagatatggcataaagcctgttttcactgtgaagtttgcaagatgatgctgtctgttaataactttgtgagtcaccagaaaaagccgtactgtcacgcccataaccctaagaacaacactttcaccagtgtctatcacactccattaaatctaaatgtgaggacatttccagaggccatcagtgggatccatgaccaagaagatggtgaacagtgtaaatcagtttttcactgggacatgaaatccaaggataaggaaggtgcacctaacaggcagccactggcaaatgagagagcctattggactggatatggggaagggaatgcttggtgcccaggagctctgccagaccccgaaattgtaaggatggttgaggctcgaaagtctcttggtgaggaatatacagaagactatgagcaacccaggggcaaggggagctttccagccatgatcacacctgcttatcaaagggccaagaaagccaaccagctggccagccaagtggagtataagagagggcatgatgaacgcatctccaggttctccacggtggtggatactcctgagctgctacggagcaaggctggggcacagcttcaaagtgatgtgagatacacagaggactatgaacaacaaagagggaaaggcagtttccctgcgatgatcacacccgcctatcagatagccaaaagagccaatgagctggcaagtgatgtgaggtaccatcaacaatatcaaaaagaaatgaggggaatggctggtccagccattggagctgagggcatcttgacaagggaatgtgcagaccaatatggccagggttacccggaggagtatgaggagcacaggggaaagggcagcttcccagctatgatcactccagcatatcagaacgccaagaaagctcacgaactcgctagtgacataaaatacaggcaggacttcaataagatgaaaggcgctgcacattatcactcgcttccagctcaagacaacttggttctcaaacaggctcagagcgtaaacaaactcgtgagtgagaataaatataaagaaaactaccagaaccacatgagaggccgctatgaaggagttggtatggacagacgcactctgcatgctatgaaagttggcagcctggcaagcaacgttgcctacaaagctgattataaacatgatattgtcgactacaactacccagccactctcacgccttcctatcaaacagctatgaaactggtgcccttgaaagatgccaattataggcagagcatcgacaagttgaagtacagctcggtgactgacaccccacagattgttcaagccaaaatcaatgcccagcagctgagtcatgtgaattaccgtgctgactatgagaaaaataagttgaattacacattgccccaggatgttcctcagctggtgaaggccaaaaccaatgccaaactcttcagtgaggttaagtataaagaaggctgggagaagacaaaggggaaaggatttgagatgaagctggatgccatgtctctgctggccgccaaagcctctggggagcttgctagcaatgtacaccttcttctttctctcaagattaaatataaagaagaatatgaaaagacaaaaggcaaagccatgggaacagccgactctaggcttctgcactccctgcagattgctaagatgagcagtgaggttgaatataagaaaggctttgaagagagtaagacccggtttcacctgcccatggatatggtaaacatcaggcatgctaagaaggcccaaactctcgccagtgacctggactacaggaagaaactgcatgaatacactgtgctgcctgaagatatgaagactcagtgggccaagaaggcctatgggctccagagcgagctgcagtacaaggctgacctggcatggatgaagggagttgggtggctgacagaggggagtctcaacttggaacaagccaagaaggctggacagctggtcagcgagaaaaactaccggcagagggtcgatgagctgaagttcaccagcgtgaccgacagctcccagatggagcacgccaagaagagccaggagctacagagcggggtggcctacaaggcaggaaatgagcagtctgtccatcagtataccatcagcaaagacgagcctctcttcctgcaggcccgagccaatgctgcaaatctcagcgagaaactgtataagagcagctgggaaaaccagaaagcaaaagggtttgagctgcgtcttgattccttgaccttcctggcagccaaagccaagagggacctggctagcgaggtgaagtacaaggaggattatgagagatccagagggaagctcattggggcaaaagatgtacagggagattcgcaaatgagccactcactgcaaatgtccaagctgcagagtgagctggagtacaagaagggattcgaggacaccaaatcccaatgccacgtctccctggacatggtccacctcgtgcatgcccgcaaagctcagcatttagccacagacgtaggctacaagacagcggaacatcactttacggctttgcccacagacatgaaggtggaatgggccaagaaggcttatggcttacagagtgataaccaatacagggcagatgtgaagtggatgaaaggcatgggctgggtcgccaccgggtcattaaatgtggagcaggcgaagaaggcaggagaactcattagcgagaagaagtaccgtcagcatccagatgctttgaagtttaccagtattaaagacactccggagatggtccaggccagaattagttatacccaagcagtggatagattatacagggaacaaggagaaaacataaagcatcattacacaccgactgctgacctccctgaagtcctgctggccaagctgaatgccatgaatatcagtgagacgcgttataaggaatcctggagcaaacttcgagatggtggctataaactgaggttggatgcccttccattccaagcagcaaaggcttctggtgaaatcataagtgattacaaatacaaagaggcatttgagaaaatgaaaggacagatgcttggttcccggagcttggaagatgatatcagccttgcacattcagtgtatgcgacctcactgcagagtgatgtgaattacaagaaaggctttgaacactcaaaggcgcagttccatctgccgttggacatggccgccctggtgcatgccaagaaggctcagaccctggccagcaatcaggactacaaacatccactgccccagtacacttccttggcagaagacctgaggctgagctgtgccaagaaagctcacaaattgcagagtgagaatttgtaccggtcagacctgaactttatgcgaggtgttgcatgtgtcattccaggcacgttagagattgaagggaggaagaaagcatcggaactcatcagtgagagtaaatatcggcagcatccccactcattcaagtacacagctgtgacagacactcccaacctccttcatgcgaaattcagcaaccagataacgaatgagcgcctctataaagcagctggagaggatgcaagacacgagtatacaatgaccctgggtctgcccgagttcatccgagcaaaaacgaatgcagccaacctgagtgacgcaagatacaaagagtcctggcgtaatcttcgtgctcaaggctacaagctgacaatagaagcgctccccttccaggctgcccgggcctctggagatatagccagtgattttctctacagacatgactttgtgaaggagcgagggaaactcatagggccccagagtgtaagagacgacccccggatccagcactgccggcgcatgggccagctgcagagcgagcttcagtacaggaggggggcgaccagcagccaagcccagttccatctgcccatggacatggtgcacctggtccatgccaagaatgcccaggctctggccagcgaccacgactacaggacacagtatcacaagttcacagcactgcccgaggacctgaagatggcctgggccaagaaagcccatgccctgcagagtgagttgcgctacaagtcagacctgatcggcatgaagggcataggatggctggcgctgagatccccacagatggagagtgcaaagaaggctggagaactcatcagcgagaccaagtaccgtaaaaaaccagacagtatcaagttcaccacagtggttgactccccagacctggttcatgccaagaacagctatatgcactgcaatgagcgcatgtatagatctggagatgcagaatccctgcacagatacaccctgatccccgaccatcccgatttcacccgagctcgcctcaatgcgctgcatctgagtgacaaagtctacagaaactcctgggagcagacccgggctggcagttatgacttcaggctggatgccatccccttccagactgcccgggcatctagggagatcgccagtgatttccggtacaaagaggctttcctgcgggaccgaggcctgcagatcgggtaccgcagtgtcgacgatgacccaaggatgaagcatttcctcaacgttggcaggctccagagtgacaatgagtacaagaaggactttgccaagagtcggtcccagtttcacagcagcacagaccagcccggcctccttcaggccaagaggagccagcagctggccagtgatgtgcactacaggcagcccctgccccagcccacctgcgacccggagcagctgggcctcaggcatgctcagaaggcccaccagctgcagagtgatgtcaagtataaatcagacttgaacctgaccagaggtgttggctggacccctcctggctcctacaaagtggaaatggctcggcgggctgcggaactggccaacgcaaggggcctgggtctccagggagcttaccggggggcagaagcagtggaggctggagatcatcagagtggggaggtgaacccagatgccactgagattctgcacgtcaaaaagaagaaggccctgctgttgtgagccatgtccaccctgattcctgagaggccagagaggaagtttgttcaccagagacaggcttcagatggctttgatttcggcaagctggaatggcccaccagcccatcccagatcttcctttattaaaataataactctgaaagcagatggagaatgttgtatttgtggtcctctctgatacctagacgtggatggctgattctgttgagtgcctcgagtgtctgggctgaggaataaagatgtgatggtggttcccgct

SEQ ID NO: 19690 - DNA, 2587 bp, Homo sapiens
  source 1..2587: mol_type = unassigned DNA
gcgctttgcatctccgcctcccgtgctccgcctccggtcttacgtttcgcccccggcagcgccgacagcggacccaagatggcgaccgagttggagtacgagtctgtgctgtgtgtgaagccagacgtcagcgtctaccggattccgccccgggcctccaaccgcggttacagggcctctgactggaaattagaccagcctgattggactggtcgcctccgaatcacttcaaaagggaagactgcctatatcaaactcgaggataaagtttcaggggagctctttgctcaggcaccagtagaacaatatcctggtattgctgtggagacggtgacagattctagccgctactttgtaatccggatccaggatggtactgggcgcagtgctttcattggcattggcttcacagatcggggagatgccttcgactttaatgtctccttgcaggatcacttcaagtgggtaaagcaggaatctgagatttccaaggaatctcaagaaatggatgctcgtcctaagttggatctgggcttcaaggaaggacaaaccatcaagttgtgtatcgggaacattacaaacaagaaaggaggtgcttctaagcccaggactgcaaggggtgggggtctgagcttactcccacccccgccaggaggcaaagtcactattcccccaccatcctcctcagttgccatcagcaatcatgtcaccccaccacccattccgaaatctaaccatggaggcagtgatgcagatatccttttagatttggattctcctgctcctgtcacgacaccagcaccaactccagtttctgtaagcaatgacttgtggggagacttcagcactgcctccagctctgttccaaaccaggcaccacagccatccaactgggtccagttctgaatggcattggcaggacattaaggacagacttgaggaataaaaatgaccttgagggcaccaatctgtgagggaagttaggaacccatttcctccccagaaccagaatgactggacaatctttttcatagcttctccatcacattcaagctggtttatgtcactcccctgtgttgttacttgtacagccaagaaagtatctgttatctcctgcgtagtaccaaggtaggggactagtggatcttatcatagttttggctgactatgcagggcttaaaaggccagcgtctgtttgagggggaatgacctctaacatctgtaaaatttgtctcatcttttaatttctttaacttatttcaaaatcatctcatgacccttgtgtgcctctttgtgaagccctatttagcaatttcaggggagtcaaaaaccttgcaacttccttctccactaacccaggactaaaaatggacaggctgacctcagtgtttacaaattcagaattttgataggggtagatatggagaaagacctatttcctgggtctctgctgtgtagtctccttcaggcttattgtgctcagtgaacatccagtgctgggtgcagctccatcaccctcttgtgtgtttacatgtctctttctatgataagagggttgtgttggtggcacctccactactcttttctgtttgttgagtttgaattgtgttaacatctttgatcagtgggtgtatctgtaatgaaggaggttcaagaggctgtgctttccaagtgatagtctataggagtgtttaatttcttgcagctccatctggttgctgcatttgaagcatggcattaatttgtatttgccctgttctttgacctaaagttgaagggtttagagtttttaacctgatctgtagagcagagaggttgaaagcacttaactcttgtttagtatcctcattgccttgctgcctgggtatctggcccctttccataaacatttcttttcagttcatgtagttctttaatagaaagctgctattatgtatattgtcatttgtgaaggaagttggagagtcacagctttactgtgacaggttttgcccaaggctttgatacctgtcacccagggtatcttaaaagcaagttgttctcccactactttcctttccctctgccctgccattcctattacaatgctgtgaaaaaagttctgcttcttaggtgaatgggtactttctattttgtttctaaacgagcaattttgaggatgaaatgggaagatatcattgcttcctttttgcacctattgggtatgtacactctggccgaagggagtccttatgtttagtttcaaaatatattactttcctggattctcttcttcactttttctgactttgggtccattttcttttcattgcctccttttccaggcagctctattcttgcagagccatagcaggacatgttaaaattccaatagaaaacactaaaaggaaagtctgtggaatcactagtgactaaatactgggaacctattttctcaatcttcctccatgttgtgttctttgtattcttgagatgataatatattatgtatttgaattcctgaaaaatggaaaatgtttaagatatatgtatataaagtgtatgctgtattggtgcaataatggtaattaaaaatatgaaaaaagtg

SEQ ID NO: 19691 - DNA, 1015 bp, Homo sapiens
  source 1..1015: mol_type = unassigned DNA
aagatggcgaccgagttggagtacgagtctgtgctgtgtgtgaagccagacgtcagcgtctaccggattccgccccgggcctccaaccgcggttacagggcctctgactggaaattagaccagcctgattggactggtcgcctccgaatcacttcaaaagggaagactgcctatatcaaactcgaggataaagtttcaggggagctctttgctcaggcaccagtagaacaatatcctggtattgctgtggagacggtgacagattctagccgctactttgtaatccggatccaggatggtactggtgggtaaagcaggaatctgagatttccaaggaatctcaagaaatggatgctcgtcctaagttggatctgggcttcaaggaaggacaaaccatcaagttgtgtatcgggaacattacaaacaagaaaggaggtgcttctaagcccaggactgcaaggggtgggggtctgagcttactcccacccccgccaggaggcaaagtcactattcccccaccatcctcctcagttgccatcagcaatcatgtcaccccaccacccattccgaaatctaaccatggaggcagtgatgcagatatccttttagatttggattctcctgctcctgtcacgacaccagcaccaactccagtttctgtaagcaatgacttgtggggagacttcagcactgcctccagctctgttccaaaccaggcaccacagccatccaactgggtccagttctgaatggcattggcaggacattaaggacagacttgaggaataaaaatgaccttgagggcaccaatctgtgagggaagttaggaacccatttcctccccagaaccagaatgactggacaatctttttcatagcttctccatcacattcaagctggtttatgtcactcccctgtgttgttacttgtacagccaagaaagtatctgttatctcctgcgtagtaccaaggtaggggactagtggatcttatcatagttttggctgactatgca

SEQ ID NO: 19692 - DNA, 2545 bp, Homo sapiens
  source 1..2545: mol_type = unassigned DNA
aaaaaaaaaaaaaaaaaaaaaaaaaaaaaaaaaaaaaaaaaaaaaaaaaaaaagatggcgaccgagttggagtacgagtctgtgctgtgtgtgaagccagacgtcagcgtctaccggattccgccccgggcctccaaccgcggttacagggcctctgactggaaattagaccagcctgattggactggtcgcctccgaatcacttcaaaagggaagactgcctatatcaaactcgaggataaagtttcaggggagctctttgctcaggcaccagtagaacaatatcctggtattgctgtggagacggtgacagattctagccgctactttgtaatccggatccaggatggtactgggcgcagtgctttcattggcattggcttcacagatcggggagatgccttcgactttaatgtctccttgcaggatcacttcaagtgggtaaagcaggaatctgagatttccaaggaatctcaagaaatggatgctcgtcctaagttggatctgggcttcaaggaaggacaaaccatcaagttgtgtatcgggaacattacaaacaagaaaggaggtgcttctaagcccaggactgcaaggggtgggggtctgagcttactcccacccccgccaggaggcaaagtcactattcccccaccatcctcctcagttgccatcagcaatcatgtcaccccaccacccattccgaaatctaaccatggaggcagtgatgcagatatccttttagatttggattctcctgctcctgtcacgacaccagcaccaactccagtttctgtaagcaatgacttgtggggagacttcagcactgcctccagctctgttccaaaccaggcaccacagccatccaactgggtccagttctgaatggcattggcaggacattaaggacagacttgaggaataaaaatgaccttgagggcaccaatctgtgagggaagttaggaacccatttcctccccagaaccagaatgactggacaatctttttcatagcttctccatcacattcaagctggtttatgtcactcccctgtgttgttacttgtacagccaagaaagtatctgttatctcctgcgtagtaccaaggtaggggactagtggatcttatcatagttttggctgactatgcagggcttaaaaggccagcgtctgtttgagggggaatgacctctaacatctgtaaaatttgtctcatcttttaatttctttaacttatttcaaaatcatctcatgacccttgtgtgcctctttgtgaagccctatttagcaatttcaggggagtcaaaaaccttgcaacttccttctccactaacccaggactaaaaatggacaggctgacctcagtgtttacaaattcagaattttgataggggtagatatggagaaagacctatttcctgggtctctgctgtgtagtctccttcaggcttattgtgctcagtgaacatccagtgctgggtgcagctccatcaccctcttgtgtgtttacatgtctctttctatgataagagggttgtgttggtggcacctccactactcttttctgtttgttgagtttgaattgtgttaacatctttgatcagtgggtgtatctgtaatgaaggaggttcaagaggctgtgctttccaagtgatagtctataggagtgtttaatttcttgcagctccatctggttgctgcatttgaagcatggcattaatttgtatttgccctgttctttgacctaaagttgaagggtttagagtttttaacctgatctgtagagcagagaggttgaaagcacttaactcttgtttagtatcctcattgccttgctgcctgggtatctggcccctttccataaacatttcttttcagttcatgtagttctttaatagaaagctgctattatgtatattgtcatttgtgaaggaagttggagagtcacagctttactgtgacaggttttgcccaaggctttgatacctgtcacccagggtatcttaaaagcaagttgttctcccactactttcctttccctctgccctgccattcctattacaatgctgtgaaaaaagttctgcttcttaggtgaatgggtactttctattttgtttctaaacgagcaattttgaggatgaaatgggaagatatcattgcttcctttttgcacctattgggtatgtacactctggccgaagggagtccttatgtttagtttcaaaatatattactttcctggattctcttcttcactttttctgactttgggtccattttcttttcattgcctccttttccaggcagctctattcttgcagagccatagcaggacatgttaaaattccaatagaaaacactaaaaggaaagtctgtggaatcactagtgactaaatactgggaacctattttctcaatcttcctccatgttgtgttctttgtattcttgagatgataatatattatgtatttgaattcctgaaaaatggaaaatgtttaagatatatgtatataaagtgtatgctgtattggtgcaataatggtaatt

SEQ ID NO: 19693 - DNA, 1634 bp, Homo sapiens
  source 1..1634: mol_type = unassigned DNA
aagtcgccggaagttcggtgggctccaggcgtcgcgatggaggagagcgggtacgagtcggtgctctgtgtcaagcctgacgtccacgtctaccgcatccctccgcgggctaccaaccgtggctacagggctgcggagtggcagctggaccagccatcatggagtggccggctgaggatcactgcaaagggacagatggcctacatcaagctggaggacaggacgtcaggggagctctttgctcaggccccggtggatcagtttcctggcacagctgtggagagtgtgacggattccagcaggtacttcgtgatccgcatcgaagatggaaatgggcgacgggcgtttattggaattggcttcggggaccgaggtgatgcctttgacttcaatgttgcattgcaggaccatttcaagtgggtgaaacagcagtgtgaatttgcaaaacaagcccagaacccagaccaaggccctaaactggacctgggcttcaaggagggccagaccatcaagctcaacatcgcagtcggactcgggaacatcaataggaggtgctcctgtaccctggccacagcccaatcctgccactgctgacatctggggagactttaccaaatctacaggatcaacttccagccagacccagccaggcacaggctgggtccagttctgacctgagcacggtttttcctcatgtgacttctgggaaggcgctccctcatctgggccaaaggaaggaggacgaagccctcctcagctggcctgtgtttggggcatgaatctctcctctcctccttgtctggctctgttgacaaaccgggcatgtttggcagtaaattggcaccgtgtcacactgtttcctgggattcaagtatgcaaccagaacacaggagaagaaaagctccaggatccctgtccccatctgtcctcttgatgtgagagagactctgagacttcttccatcgcaatgacctgtattaaacacaagccccccaagcaaaagaagaggttgagtttgctgccaggattcagatcagcccttcccagggtctgcaggtgtcacatgatcacagttcagcgggaggctttccgtacccacactggctgtagccacttcagtccatctgccctccagaggaggggtttcttcctgatttttagcaggtttagaggctgcagcttgagctacaatcaggagggaaattggaaggattagcagcttttaaaaatgtttaaatattttgctttgctaatgtgctgatccgcactaactcatctttgcaaaaggaactgctccctcggcgtgccccagctggggcctctgaagggattcctcactgtgggcagctgccctgagcttcaggcagcagtgtttatctctggccagttgtctggtttccatgtattctaggccaggtaggcaacacagagccaaggcgggtgctggaagccagacggaacagtgttggggcaggaaggtggatgctgttgtcatggagctgtgggagttggcactctgtctgctggtggccctctcggctcacatgttcacagtgcagctcctggcagacttgggttttctctttggtggtttctaaagtgccttatctgcaaacaacttcttttctccttca

SEQ ID NO: 19694 - DNA, 2070 bp, Homo sapiens
  source 1..2070: mol_type = unassigned DNA
gaaacctggtcagagagtcgcaccgcttccgtccgtcggacagaggaacggtggaagtcgccggaagttcggtgggctccaggcgtcgcgatggaggagagcgggtacgagtcggtgctctgtgtcaagcctgacgtccacgtctaccgcatccctccgcgggctaccaaccgtggctacagggctgcggagtggcagctggaccagccatcatggagtggccggctgaggatcactgcaaagggacagatggcctacatcaagctggaggacaggacgtcaggggagctctttgctcaggccccggtggatcagtttcctggcacagctgtggagagtgtgacggattccagcaggtacttcgtgatccgcatcgaagatggaaatgggcgacgggcgtttattggaattggcttcggggaccgaggtgatgcctttgacttcaatgttgcattgcaggaccatttcaagtgggtgaaacagcagtgtgaatttgcaaaacaagcccagaacccagaccaaggccctaaactggacctgggcttcaaggagggccagaccatcaagctcaacatcgcaaacatgaagaagaaggaaggagcagctgggaatccccgagtccggcctgccagcacaggagggctgagcctgcttccccctcccccaggggggaaaacctccaccctgatccctccccctggggagcagttggctgtggggggatccctcgtccagccagcagttgctcccagttcaggaggtgctcctgtaccctggccacagcccaatcctgccactgctgacatctggggagactttaccaaatctacaggatcaacttccagccagacccagccaggcacaggctgggtccagttctgacctgagcacggtttttcctcatgtgacttctgggaaggcgctccctcatctgggccaaaggaaggaggacgaagccctcctcagctggcctgtgtttggggcatgaatctctcctctcctccttgtctggctctgttgacaaaccgggcatgtttggcagtaaattggcaccgtgtcacactgtttcctgggattcaagtatgcaaccagaacacaggagaagaaaagctccaggatccctgtccccatctgtcctcttgatgtgagagagactctgagacttcttccatcgcaatgacctgtattaaacacaagccccccaagcaaaagaagaggttgagtttgctgccaggattcagatcagcccttcccagggtctgcaggtgtcacatgatcacagttcagcgggaggctttccgtacccacactggctgtagccacttcagtccatctgccctccagaggaggggtttcttcctgatttttagcaggtttagaggctgcagcttgagctacaatcaggagggaaattggaaggattagcagcttttaaaaatgtttaaatattttgctttgctaatgtgctgatccgcactaactcatctttgcaaaaggaactgctccctcggcgtgccccagctggggcctctgaagggattcctcactgtgggcagctgccctgagcttcaggcagcagtgtttatctctggccagttgtctggtttccatgtattctaggccaggtaggcaacacagagccaaggcgggtgctggaagccagacggaacagtgttggggcaggaaggtggatgctgttgtcatggagctgtgggagttggcactctgtctgctggtggccctctcggctcacatgttcacagtgcagctcctggcagacttgggttttctctttggtggtttctaaagtgccttatctgcaaacaacttcttttctccttcaggaactgtgaatggctagaagaaggagctcagtaaactagaagtccagggttgcttggtttactggtttataagaaatctgaaagcacctctgacattccttttattaactcacctctcagttgaaagatttcttctttgaaaggtcaagaccgtgaactgaaaaaagtgttggcctttttgcgggaccagatttttaagataaaataaatatttttacttctgtca

SEQ ID NO: 19695 - DNA, 1291 bp, Homo sapiens
  source 1..1291: mol_type = unassigned DNA
ggaagtcgccggaagttcggtgggctccaggcgtcgcgatggaggagagcgggtacgagtcggtgctctgtgtcaagcctgacgtccacgtctaccgcatccctccgcgggctaccaaccgtggctacagggctgcggagtggcagctggaccagccatcatggagtggccggctgaggatcactgcaaagggacagatggcctacatcaagctggaggacaggacgtcaggggagctctttgctcaggccccggtggatcagtttcctggcacagctgtggagagtgtgacggattccagcaggtacttcgtgatccgcatcgaagatggaaatgggcgacgggcgtttattggaattggcttcggggaccgaggtgatgcctttgacttcaatgttgcattgcaggaccatttcaagtgggtgaaacagcagtgtgaatttgcaaaacaagcccagaacccagaccaaggccctaaactggacctgggcttcaaggagggccagaccatcaagctcaacatcgcaaacatgaagaagaaggaaggagcagctgggaatccccgagtccggcctgccagcacaggagggctgagcctgcttccccctcccccaggggggaaaacctccaccctgatccctccccctggggagcagttggctgtggggggatccctcgtccagccagcagttgctcccagttcaggaggtgctcctgtaccctggccacagcccaatcctgccactgctgacatctggggagactttaccaaatctacaggatcaacttccagccagacccagccaggcacaggctgggtccagttctgacctgagcacggtttttcctcatgtgacttctgggaaggcgctccctcatctgggccaaaggaaggaggacgaagccctcctcagctggcctgtgtttggggcatgaatctctcctctcctccttgtctggctctgttgacaaaccgggcatgtttggcagctcctggcagacttgggttttctctttggtggtttctaaagtgccttatctgcaaacaacttcttttctccttcaggaactgtgaatggctagaagaaggagctcagtaaactagaagtccagggttgcttggtttactggtttataagaaatctgaaagcacctctgacattccttttattaactcacctctcagttgaaagatttcttctttgaaaggtcaagaccgtgaactgaaaaaagtgttggcctttttgcgggaccagatttttaagataaaataaatatttttacttctgtc

SEQ ID NO: 19696 - DNA, 1929 bp, Homo sapiens
  source 1..1929: mol_type = unassigned DNA
aagttcggtgggctccaggcgtcgcgatggaggagagcgggtacgagtcggtgctctgtgtcaagcctgacgtccacgtctaccgcatccctccgcgggctaccaaccgtggctacagggctgcggagtggcagctggaccagccatcatggagtggccggctgaggatcactgcaaagggacagatggcctacatcaagctggaggacaggacgtcaggggagctctttgctcaggccccggtggatcagtttcctggcacagctgtggagagtgtgacggattccagcaggtacttcgtgatccgcatcgaagatggaaatgggcgacgggcgtttattggaattggcttcggggaccgaggtgatgcctttgacttcaatgttgcattgcaggaccatttcaagtgggtgaaacagcagtgtgaatttgcaaaacaagcccagaacccagaccaaggccctaaactggacctgggcttcaaggagggccagaccatcaagctcaacatcgcaaacatgaagaagaaggaaggagcagctgggaatccccgagtccggcctgccagcacaggagggctgagcctgcttccccctcccccaggggggaaaacctccaccctgatccctccccctggggagcagttggctgtggggggatccctcgtccagccagcagttgctcccagttcagatcaacttccagccagacccagccaggcacaggctgggtccagttctgacctgagcacggtttttcctcatgtgacttctgggaaggcgctccctcatctgggccaaaggaaggaggacgaagccctcctcagctggcctgtgtttggggcatgaatctctcctctcctccttgtctggctctgttgacaaaccgggcatgtttggcagtaaattggcaccgtgtcacactgtttcctgggattcaagtatgcaaccagaacacaggagaagaaaagctccaggatccctgtccccatctgtcctcttgatgtgagagagactctgagacttcttccatcgcaatgacctgtattaaacacaagccccccaagcaaaagaagaggttgagtttgctgccaggattcagatcagcccttcccagggtctgcaggtgtcacatgatcacagttcagcgggaggctttccgtacccacactggctgtagccacttcagtccatctgccctccagaggaggggtttcttcctgatttttagcaggtttagaggctgcagcttgagctacaatcaggagggaaattggaaggattagcagcttttaaaaatgtttaaatattttgctttgctaatgtgctgatccgcactaactcatctttgcaaaaggaactgctccctcggcgtgccccagctggggcctctgaagggattcctcactgtgggcagctgccctgagcttcaggcagcagtgtttatctctggccagttgtctggtttccatgtattctaggccaggtaggcaacacagagccaaggcgggtgctggaagccagacggaacagtgttggggcaggaaggtggatgctgttgtcatggagctgtgggagttggcactctgtctgctggtggccctctcggctcacatgttcacagtgcagctcctggcagacttgggttttctctttggtggtttctaaagtgccttatctgcaaacaacttcttttctccttcaggaactgtgaatggctagaagaaggagctcagtaaactagaagtccagggttgcttggtttactggtttataagaaatctgaaagcacctctgacattccttttattaactcacctctcagttgaaagatttcttctttgaaaggtcaagaccgtgaactgaaaaaagtgttggcctttttgcgggaccagatttttaagataaaataaatatttttacttctgtc

SEQ ID NO: 19697 - DNA, 935 bp, Homo sapiens
  source 1..935: mol_type = unassigned DNA
ggaagtcgccggaagttcggtgggctccaggcgtcgcgatggaggagagcggggctgcggagtggcagctggaccagccatcatggagtggccggctgaggatcactgcaaagggacagatggcctacatcaagctggaggacaggacgtcaggggagctctttgctcaggccccggtggatcagtttcctggcacagctgtggagagtgtgacggattccagcaggtacttcgtgatccgcatcgaagatggaaatgggcgacgggcgtttattggaattggcttcggggaccgaggtgatgcctttgacttcaatgttgcattgcaggaccatttcaagtgggtgaaacagcagtgtgaatttgcaaaacaagcccagaacccagaccaaggccctaaactggacctgggcttcaaggagggccagaccatcaagctcaacatcgcaaacatgaagaagaaggaaggagcagctgggaatccccgagtccggcctgccagcacaggagggctgagcctgcttccccctcccccaggggggaaaacctccaccctgatccctccccctggggagcagttggctgtggggggatccctcgtccagccagcagttgctcccagttcaggaggtgctcctgtaccctggccacagcccaatcctgccactgctgacatctggggagactttaccaaatctacaggatcaacttccagccagacccagccaggcacaggctgggtccagttctgacctgagcacggtttttcctcatgtgacttctgggaaggcgctccctcatctgggccaaaggaaggaggacgaagccctcctcagctggcctgtgtttggggcatgaatctctcctctcctccttgtctggctctgttgacaaaccgggcatgtttggcagtaaattggcaccgtgtcacactg

SEQ ID NO: 19698 - DNA, 1787 bp, Homo sapiens
  source 1..1787: mol_type = unassigned DNA
gtgggctccaggcgtcgcgatggaggagagcgggtacgagtcggtgctctgtgtcaagcctgacgtccacgtctaccgcatccctccgcgggctaccaaccgtggctacagggctgcggagtggcagctggaccagccatcatggagtggccggctgaggatcactgcaaagggacagatggcctacatcaagctggaggacaggacgtcaggggagctctttgctcaggccccggtggatcagtttcctggcacagctgtggagagtgtgacggattccagcaggtacttcgtgatccgcatcgaagatggaaatgggcgacgggcgtttattggaattggcttcggggaccgaggtgatgcctttgacttcaatgttgcattgcaggaccatttcaagtgggtgaaacagcagtgtgaatttgcaaaacaagcccagaacccagaccaaggccctaaactggacctgggcttcaaggagggccagaccatcaagctcaacatcgcaaacatgaagaagaaggaaggagcagctgggaatccccgagtccggcctgccagcacaggagggctgagcctgcttccccctcccccaggggggaaaacctccaccctgatccctccccctggggagcagttggctgtggggggatccctcgtccagccagcagttgctcccagttcaggaggtgctcctgtaccctggccacagcccaatcctgccactgctgacatctggggagactttaccaaatctacaggatcaacttccagccagacccagccaggcacaggctgggtccagttctgacctgagcacggtttttcctcatgtgacttctgggaaggcgctccctcatctgggccaaaggaaggaggacgaagccctcctcagctggcctgtgtttggggcatgaatctctcctctcctccttgtctggctctgttgacaaaccgggcatgtttggcagtaaattggcaccgtgtcacatgatcacagttcagcgggaggctttccgtacccacactggctgtagccacttcagtccatctgccctccagaggaggggtttcttcctgatttttagcaggtttagaggctgcagcttgagctacaatcaggagggaaattggaaggattagcagcttttaaaaatgtttaaatattttgctttgctaatgtgctgatccgcactaactcatctttgcaaaaggaactgctccctcggcgtgccccagctggggcctctgaagggattcctcactgtgggcagctgccctgagcttcaggcagcagtgtttatctctggccagttgtctggtttccatgtattctaggccaggtaggcaacacagagccaaggcgggtgctggaagccagacggaacagtgttggggcaggaaggtggatgctgttgtcatggagctgtgggagttggcactctgtctgctggtggccctctcggctcacatgttcacagtgcagctcctggcagacttgggttttctctttggtggtttctaaagtgccttatctgcaaacaacttcttttctccttcaggaactgtgaatggctagaagaaggagctcagtaaactagaagtccagggttgcttggtttactggtttataagaaatctgaaagcacctctgacattccttttattaactcacctctcagttgaaagatttcttctttgaaaggtcaagaccgtgaactgaaaaaagtgttggcctttttgcgggaccagatttttaagataaaataaatatttttacttctgtc

SEQ ID NO: 19699 - DNA, 1886 bp, Homo sapiens
  source 1..1886: mol_type = unassigned DNA
acttcctctccaggaatccgcggagggagcgcaggctcgaagagctcctggacgcagaggccctgcccttgccagacggcgcagacatgtcagaacaaagtaaggatctgagcgaccctaactttgcagccgaggcccccaactccgaggtgcacagcagccctggggtttcggagggggttcctccgtccgcgaccctggcagagccgcagagccctcctctaggcccgacggccgctccgcaggccgcgccgcctccccaggccccgaacgacgagggcgacccgaaggccctgcagcaggctgcggaggagggccgcgcccaccaggccccgagcgcggcccagccgggcccggcaccgccagccccggcgcagctggtgcagaaggcgcacgagctcatgtggtacgtgctggtcaaggaccagaagaagatgatcatctggtttccagacatggtgaaagatgtcatcggcagctacaagaagtggtgcaggagcatcctccggcgcaccagcctcatcctcgcccgggtgttcgggctgcacctgaggctaaccagcctgcacaccatggagtttgcgctggtcaaagcgctggagcccgaggagctggacagggtggcgctgagcaaccgcatgcccatgacaggcctcctgctcatgatcctgagcctcatctacgtgaagggccgcggcgccagagagagcgccgtctggaacgtgctgcgcatcctggggctgcggccctggaagaagcactccaccttcggggacgtgcggaagctcatcactgaggagttcgtccaaatgaattacctgaagtaccagcgcgtcccatacgtggagccgcccgaatacgagttcttttggggctcccgggccagccgcgaaatcaccaagatgcaaatcatggagttcctggccagggtctttaagaaagacccccaggcctggccctcccgatacagagaagctctggaggaggccagagctctgcgggaggctaatcccactgcccactaccctcgcagcagtgtctctgaggactagcaaagtctggaggcagatgaatggtttctgaccctcaccagggctgtggaagggtgggggtgggtcattatagtattcaggatttacagtgcagtattcacgtgtaacttttaagttttcagtacagtgcttttatacctttaatgcaatgttgtattcatttgggtactattgtgtagtatttaggatgtatgcatgtttgtttatatgtaagcttggttggtgctttcgcttttgtgctacctttcttggatttttgtaccagagatgtgctaaactgatgaaatacattgagaaagtttccatcttattcttttatatgggactgatgatgtgtgttggggtagactgctcctgcagagtttggaagaagtcaccagcaaagccggcctaaccaagaaaagtcaaggcccttcatgaccttgctgggcacagaaaacaccctcgtggagtacactaatttgaactggactggtctcagtgtgagcacttggcacactttactaaacacatatacaaccccaccgtgagtcaactttaaagtaaacattaaagattcttgtgatacaatcatttttggaaaagtgtactttatcattttaacaaagcagtatggttgggaatgagacaattctctattttacagtgtatacagatacaactatttcccctaatagggtgggaaaaatcgctactcatgattactcctaaatttgtgaagtttatagttctattgtctttaaatgtaactcatgtttatttcaaaaacattcacaaatatagaaaagtatacaaaacaaaacagtaagattgtctgtaatcacatcatatggg

SEQ ID NO: 19700 - DNA, 1681 bp, Homo sapiens
  source 1..1681: mol_type = unassigned DNA
agcacgcagtctcagccgacactgcgcgcgcctccaggcaccggcgttagcgggtcgccgacccgcaatccccgccgcggctgcttgcctaccggagtgtgcgccggcacctgccgccggagacatgttgcaaaaaccgaggaaccggggccgctctggcggccaggccgagagggacagagactggagccatagcggaaaccccggggcttcgcgggccggggaagacgcccgggttctcagagacggctttgccgaggaggccccgagcacgtcccgcgggccgggcggctcgcaggggtcgcagggcccctcgcctcagggcgcccgccgggcccaggccgcccccgccgtggggcccaggagccagaagcagctggagctgaaagtgtccgagctggtgcagttcttgctgattaaagaccagaagaagattccgatcaagcgggccgacatactgaagcacgtcatcggggactacaaggacatcttccccgacctcttcaaacgggccgccgagcgcctccagtacgtcttcgggtataagctggtggaacttgaacccaagagcaacacttacatcctcatcaacaccctggagcctgtggaggaggatgccgagatgaggggtgaccaaggcacgcccactacgggcctcctgatgatcgtcttagggctcatctttatgaagggcaacaccatcaaggaaactgaagcctgggactttctgcggcgcttaggggtctaccccaccaagaagcatttaattttcggagatccaaagaaactcattactgaggactttgtgcgacagcgttacctggaataccggcggataccccacaccgaccccgtcgactacgaattccagtggggcccgcgaaccaacctggaaaccagcaagatgaaagttcttaagtttgtggccaaggtccataatcaagaccccaaggactggccagcgcagtactgtgaggctttggcagatgaggagaacagggccagacctcagcctagtggcccagctccatcctcttgaaaggtggattcagagggacccccgggacaagggtctgagacccaaaggcacagtttagaggattgggggaagggagaacgaacccagggagcatattgctgtaaacgcttcaatgtgtgtagctttaggatgtgtttgcaaagttttgtttttttaatgttgtgttattttgctccagattttcatctataaacaaaggagcatttgttttgattttactctttttggtataaaaaattttgctagcttagtaaaacgaattggaaaacttgactatgatctggaacagataatgcaagaaggaacacataagtaagttgctttggtgccaagaaaataaaaaagctattatcaggtctcctaactaccccagtttgtaaggaaaaataaaagtttttataaaattaaaaaaaataattgcctatatccttattatgttaacctattttatttttctatatttcgtacatatataagtattattcatggttccaagcaatgagtgtaatgtattttctcccaatagtaattgtttatattcataattattcagctctgctgctaaacacgtagttccacttcgtttttttcttcttgctactgtagttattacaataaatactgtatttttgaagcacttaa

SEQ ID NO: 19701 - DNA, 3851 bp, Homo sapiens
  source 1..3851: mol_type = unassigned DNA
gggcacgtaggtgaagctcagtgcttggcacgaggtgctcatcagcagcatcgcccttgctttgggctggcctgttagtaattcgtttttagtggaatcgaatacaacacttgagcctcggaggctcaggtcgtcggagcaactacaccagggccggtgcacctcggggcggcggcgcaggactaggctaggccgggccgggccgggcagggcggcgcgagtcgggggtggggcggcggcgcagcgccgtcgtcgtagtccccgcctcttccccaggggccgcgtcggagcctcggcggcggcggcggtgcttacagcctgagaagagcgtctcgcccgggagcggcggcggccatcgagacccacccaaggcgcgtccccctcggcctcccagcgctcccaagccgcagcggccgcgccccttcagctagctcgctcgctcgctctgcttccctgctgccggctgcgccatggcgttggcgttggcggcgctggcggcggtcgagccggcctgcggcagccggtaccagcagttgcagaatgaagaagagtctggagaacctgaacaggctgcaggtgatgctcctccaccttacagcagcatttctgcagagagcgcagcatattttgactacaaggatgagtctgggtttccaaagcccccatcttacaatgtagctacaacactgcccagttatgatgaagcggagaggaccaaggctgaagctactatccctttggttcctgggagagatgaggattttgtgggtcgggatgattttgatgatgctgaccagctgaggataggaaatgatgggattttcatgttaacttttttcatggcattcctctttaactggattgggtttttcctgtctttttgcctgaccacttcagctgcaggaaggtatggggccatttcaggatttggtctctctctaattaaatggatcctgattgtcaggttttccacctatttccctggatattttgatggtcagtactggctctggtgggtgttccttgttttaggctttctcctgtttctcagaggatttatcaattatgcaaaagttcggaagatgccagaaactttctcaaatctccccaggaccagagttctctttatttattaaagatgttttctggcaaaggccttcctgcatttatgaattctctctcaagaagcaagagaacacctgcaggaagtgaatcaagatgcagaacacagaggaataatcacctgctttaaaaaaataaagtactgttgaaaagatcatttctctctatttgttcctaggtgtaaaattttaatagttaatgcagaattctgtaatcattgaatcattagtggttaatgtttgaaaaagctcttgcaatcaagtctgtgatgtattaataatgccttatatattgtttgtagtcattttaagtagcatgagccatgtccctgtagtcggtagggggcagtcttgctttattcatcctccatctcaaaatgaacttggaattaaatattgtaagatatgtataatgctggccattttaaaggggttttctcaaaagttaaacttttgctatgactgtgtttttgcacataatccatatttgctgttcaagttaatctagaaatttattcaattctgtatgaacacctggaagcaaaatcatagtgcaaaaatacatttaaggtgtggtcaaaaataagtctttaattggtaaataataagcattaattttttatagcctgtattcacaattctgcggtaccttattgtacctaagggattctaaaggtgttgtcactgtataaaacagaaagcactaggatacaaatgaagcttaattactaaaatgtaattcttgacactctttctataattagcgttcttcacccccacccccacccccaccccccttattttccttttgtctcctggtgattaggccaaagtctgggagtaaggagaggattaggtacttaggagcaaagaaagaagtagcttggaacttttgagatgatccctaacatactgtactacttgcttttacaatgtgttagcagaaaccagtgggttataatgtagaatgatgtgctttctgcccaagtggtaattcatcttggtttgctatgttaaaactgtaaatacaacagaacattaataaatatctcttgtgtagcaccttttactgtagattagtgcttaatttcttggcttgcatttgttgattgctaaggcaattttttctaatcttagggaatcattcagtagatgcgattaaaaaactaatgttgggtcaatttttttcttcattttcagcacaagaagtcctcttatatcctactaaatacattcctaaaaatgtatttgaacattggttctgtaaaagataatggactaaaaaagtagagaggagttgtagagatcttaaatcattctggaattcctaattatgcttcaatttttagacataattttagataatttatttccagtgttttctgcatgttctcatttgttctttttctcagttgaatgcaccaactggtttgagtcctgtgagcattcagtcagttgaaattaaagattcctcatttctcctgatttctattcttgtctcaatcttaaatttagagaccagttgtttttatgatatcagccatttgatttttttcattttctatttaagaaatatgaagaaaaaatacaccaagatggtcaaattactacacaaatcagcaccagcacagtctgatagctgcaaatgtccattcatctgctgtgtatgtatatccagaatcagcataggaagtcgttcaggatatcagtatataatgcacagaagtgtgggttgtttgaaagccaaacaggaaaattaggagcctcctggattgacatttcaatgatccctctaaccagtttatggattattatgaataatagtgtagtgtgttctttttcagaagttatatttgataatagagaagggagttttatggaagtttctttgaagatttttttttttccatttcgaatcagattatagcaacaatggagtttggaagtttgtatggcctataatgttctaagttccagaatgaaaagatctgtaacaatctgaatagatgtggacacatatagcagagagaactatgtaaattatcttgcagaacaaaatagaagggtcctaaatcacgttaactcaaacattgtagactagctttgtgtttattcttcaggtccttgcgccttatttggttttgtatattcaacgaactgaaatatttggaattcctatttctacgtatttggtggtccataagactttgtcaaatgtaaacctacagtttgatacgctttaaaatacctagttaagaggatgatttctctttaatcgtttaaatgttctgaaaattaaaatcttttgaggcacatgaagtgggcaccatatatcatctagagtccttactggtattcaggatgaaaatgttcacgctgcattaattgtcatttttctctcccatgttctttctcactttgatacgttaatactgataatggataaagagtgagtttttataataaatggttttggaaaggtattcataggaaccgcggttatttacttaaggttatggagtaaactagcttggaccttgggctgcaggacgactaggattcacccataacgacacagtgccctatgtttcttaacttcttgttgccatttgaaactctgtactcttatgtttaaagggttctgtatagccattttttttttcagaaagttacattgctttgtatagaaataaaaggcattattaaaatttgcttgttaaaaaatgataa

SEQ ID NO: 19702 - DNA, 625 bp, Homo sapiens
  source 1..625: mol_type = unassigned DNA
gtgcttacagcctgagaagagcgtctcgcccgggagcggcggcggccatcgagacccacccaaggcgcgtccccctcggcctcccagcgctcccaagccgcagcggccgcgccccttcagctagctcgctcgctcgctctgcttccctgctgccggctgcgccatggcgttggcgttggcggcgctggcggcggtcgagccggcctgcggcagccggtaccagcagttgcagaatgaagaagagtctggagaacctgaacaggctgcaggtgatgctcctccaccttacagcagcatttctgcagagagcgcagcatattttgactacaaggatgagtctgggtttccaaagcccccatcttacaatgtagctacaacactgcccagttgtttttatgatatcagccatttgatttttttcattttctatttaagaaatatgaagaaaaaatacaccaagatggtcaaattactacacaaatcagcaccagcacagtctgatagctgcaaatgtccattcatctgctgtgtatgtatatccagaatcagcataggaagtcgttcaggatatcagtatataatgcacagaagtgtgggttgtttgaaagccaaacaggaaaattag

SEQ ID NO: 19703 - DNA, 4625 bp, Homo sapiens
  source 1..4625: mol_type = unassigned DNA
cttacttttccatctcctcccacccagctataccctcccactggcggcgcggatggcacgccggcggagccagcgagtctgcgcgagcggtccgagcatgctcaatagcgcgcgcggcgccccggagcttctccgcggaaccgcgaccaacgcggaggtctcggcggccgctgcgggagccacaggaagtgaagagcttccgccgggagaccgcggctgcaggaacggaggcggaaggggccctgcggcgacgacgtcgtcgacgggggtggccgtgggagctgagcacggagaagactccctctctcggaagccggatcccgagccgggcaggatggatcaccaccagccggggactgggcgctaccaggtgcttcttaatgaagaggataactcagaatcatcggctatagagcagccacctacttcaaacccagcaccgcagattgtgcaggctgcgtcttcagcaccagcacttgaaactgactcttcccctccaccatatagtagtattactgtggaagtacctacaacttcagatacagaagtttacggtgagttttatcccgtgccacctccctatagcgttgctacctctcttcctacatacgatgaagctgagaaggctaaagctgctgcaatggcagctgcagcagcagaaacatctcaaagaattcaggaggaagagtgtccaccaagagatgacttcagtgatgcagaccagctcagagtggggaatgatggcattttcatgctggcatttttcatggcatttattttcaactggcttggattttgtttatccttctgtatcaccaataccatagctggaaggtatggtgctatctgcggatttggcctttccttgatcaaatggatccttattgtcaggttttctgattattttactggatatttcaatggacagtattggctttggtggatatttcttgtacttggcctgctccttttcttcagaggatttgttaattatctaaaagtcagaaacatgtctgaaagtatggcagctgctcatagaacaaggtatttcttcttattgtagagactgcatcaacccgacattcctttcttataccaatgtgaaatttccagatcatctgtaaacctacaactttaatagaagactactaataacagaagacaaattagtgaagaaaagacggagtttcgaaattgaatggcagggtggtttttgcttacaagccatttctgttcattctttaagtatctatatttcatttgttttgcacatatgcatatgtgcccatttaagatatttgcatatacttgatagaaaccataaagttgtagcagttaagtccagtcacatttggttaatcagtgtttgatataattgaaagagttgagtggataaacagtcttccagcttgtaaatgccattgacttctgacctgacatttagtataataaaaatgaaattcttaaccatgtcaaatgatttagtttctggctcttagactcatctggcagttctacacatgaaacatcttttgttatataaggtgtattgaaacctgcagtgctgattattagaaaggatttgtcagatttttgaacatgatatttacattattatttaggaaaactcttcctgtaaataaccatgcataacttactttctgcaatgttttcttagaaattgtgtccagatagctttcactaattttaaattaagtgaactaaatatatatgtgtatatgtatacacatatatatacacacacacatatatatatttagaaacgtgagtgttaaagatagaatttgttttaggacaaattttaagaaaatgtgggaataccaaatgtcctttataagaaaaataaattttattttaagggacatactagttttagggattttcagatgggaagctgcatttttaggattgcccatcttaagagatcttgcaggaagagattgtattagatattatatttatttcatttaagataattttcaaagttaattttctaaataagataattctcatttgtgtttgtcttttaaaaggccaataaaatatctttcagtatcattgtaataattttttagagtttaatttgtaaagcttagcaaataaaatcttgtactatgaatagcttcttgctttatgactttaggattaacttgtaaaaaacatatcctgaactgagatatgcaaaatactcattttcaagttatggaaatgtgtttgtggcatataggactgtggggtctgtgtgtgtagtgagagtgtgtagccactattataactggaatttaatttacattcataaactactatatttcccatcttgcaaatcattttatgtctcatctgtttttcctttcggttatatctttggttttgaataccaacatttaaaatgatggtattttatcttttaaacttaaaaattatttaatacagctatatggaccttataaaattgatttcttatttattattagacattactactaaaaggtacatctaactattcagggacatttttccatttccaaaaaataaaatttattatgctttataacctcttctgtattttctaattttttcattgtctttgataaataaaacagttttgttttgctaatatagcctattttttgttttgtctcattcagtttactttcctgcgtagaatttttattgttatattaaaatttttattgttgtattaaagtacctgtgttacaccccttgaagtaagacagtagcatggggtaaagaaaaaatatttagtttagttgcctaatttggaagttaattaaaattaaactgtactaataacatattcaaactcatgctggatctctttcatattaatttcttatagacctgtactttattctttcaataatttttaaatgaaattaagctttgctacatggtaattaaataattactaggaagcttagctatcaaacatcgacttactaaaatttcattttagcttttatggtatatgtgcttgttttctgaatatggatacatgttacttttgatccagcatcaaaacttcactttttgttttgacttttccccccaaatctgtaaggttcaagtatacatattactgaatcctctataattggcataattcaatggtagccttaaatctcatcatgtaagcaggggaatcagaatgttattttcaagaacttaatgttcccttcagatatataaaatcctgcatacttcatttcctgtgagcttgaacagctgctgttgtgttttggggatgcttgatcatctttgcactctgccttaaagattgaaaaatcaaaactcttgttagggtatctaaacatttttgagtgtgaactggggattggaagttaatacaaaaaaatttcaaattatttctattgtaaatgaataagctagtcatggctaggataatccattttcatgtatttatgcaataaactgaattttaaggcaaaaacaacacttttctatatagtgtatgcaggacagattttagaaacttagattaaaatacaaatcccattacatttggttaaaatgaaaatctctgcttaatggaaaaaatactaatctttagcctattttgagtctataagatatatttcattttagacatgccttctaagttgttcacagatttttacctgctaaaacaatattatttccagtaaaacctctcctaacaggaaaagtggagttcaaaatatccaattggagaaaaattcagagttccttcattaaatataatttttttcatctagtatgtactatttcaagaagtgcaaaaagtaatgatagtgaatgtgataccatacttaactaaggtaatatatatccttagtttgctcaaaagagtcctggttattcctgttttctcagcttaatagtgcctcatcgtactctcaaaagtgttctaatttggaggataagttatatgatcatcctgtgtataattgtagactgtaccaagaagcaactaccttagctccactgccctttgagggatggaactggggtaagggcaggagccagttattattgccacagtgttttctaatgaaccatttggcctgtagaagaggaatagtattttttttaatagttgtatttgaatgattccagcttatcgtaaatactaaactgaatggcttttatatttttaactgctgttaaatgttattttagcatttattagttgtttattatttaattcttcaaatagtcatatgaaaacatatatttgataaaggtcaattgttagatgataatgtgccattcattatcataggaatgtccttgcccatatataaaacatgctggcatgtattttacttgttaataaagttgtatagatgtggaagtgtgaacctgtgatgcatccttttcaaaatcagtttaagattcgcatattatcatgactgtgacctcactaaactgtttatgtgacaaacctttcaagattggagatgaaaacaacacttgtgaaattaggttggggttgcaacatcttttaacttctcagttatttgtatgtcaggagacagattgtggtttaattttaataaacaaaatatcatctttttgaaaat

SEQ ID NO: 19704 - DNA, 1837 bp, Homo sapiens
  source 1..1837: mol_type = unassigned DNA
ggtagcggcgaaggggcgctcagtgcgcctgcgcgcttgtggagctggtggcggcgctccgcaggggctcggctgttttccgcgcggcaggcgcggccatggcgcagctgggaaagctgctcaaggagcagaagtacgaccggcagctgaggttgtggggtgatcatgggcaagaggctttagaatctgctcatgtttgcctaataaatgcaacagccacaggaactgaaattcttaaaaacttggtactaccaggtattggttcgtttacaattattgatggaaatcaggtcagcggagaagatgctggaaacaatttcttccttcaaagaagcagtatcggcaagaaccgagctgaagctgccatggaattcttacaagaattaaatagcgatgtctctggaagttttgtggaagagagtccagaaaaccttctagacaatgatccctcatttttctgtaggtttactgttgtagttgcaactcagcttcctgaaagcacttcactacgcttagcagatgtcctctggaattcccagattcctcttttgatctgtaggacatatggactagttggttatatgaggatcattataaaagaacatccagtaatagaatctcatccagataatgcattagaggatctacgactagataagccatttcctgaactgagagaacattttcagtcctatgatttggatcatatggaaaaaaaggaccacagtcatactccatggattgtgatcatagctaaatatttagcacagtggtatagtgaaacaaatggacgaatacctaaaacgtataaagaaaaagaggacttcagagatttgattagacaaggaattctaaaaaatgaaaatggggctccagaagatgaagagaattttgaagaagctattaaaaatgtgaacacagcactaaatacaactcagatcccaagcagtattgaagatatatttaatgatgatcgctgcataaatatcaccaaacagactccatcattttggattttagctcgtgccttaaaggaatttgtggccaaagagggtcaaggaaatttacctgttcgaggcacaattcctgatatgattgcagattcaggcaaatatataaaactgcaaaacgtttaccgtgaaaaagcaaagaaagatgctgccgctgtgggtaatcatgttgccaaattgctgcagtccattggccaggcaccagagtccatttcagagaaagaattaaaattactctgcagcaattctgcatttcttcgagtggtaagatgtcgatccttagctgaagaatatggtttggatacaattaacaaggatgaaattatttctagcatggacaatccagataatgaaatagtgttgtacttaatgttacgggctgttgatagatttcataaacaacagggtagatatccaggagtatctaactatcaagttgaagaagatataggaaagttgaagtcttgtctcactggcttccttcaggaatatggtttatctgtaatggtgaaagatgattatgtccacgaattttgccgatatggagctgctgagccacataccattgctgcattcttggggggagctgctgctcaagaggtcatcaaaataatcaccaaacaatttgtaatttttaataatacttacatttacagtggcatgtcacaaacttcagcaactttccagttgtagagtaagcaagcaccttaagtagtgtgttaatgattgaaactgtaattgccttcgggttgtgctttagtctgtaaaattctaaaggagagctgctaaattgttttcttaataaacatttttctcatttgtaataa

SEQ ID NO: 19705 - DNA, 1909 bp, Homo sapiens
  source 1..1909: mol_type = unassigned DNA
agtgcgcctgcgcgcttgtggagctggtggcggcgctccgcaggggctcggctgttttccgcgcggcaggcgcggccatggcgcagctgggaaagctgctcaaggagcagaagtacgaccggcagctgaggcgattcctccatacatttgacagctgtctgggcccttatggagcatacagtggagtggaaagatggatgctcagcaaacaaaaacaaatgaagccaggttgtggggtgatcatgggcaagaggctttagaatctgctcatgtttgcctaataaatgcaacagccacaggaactgaaattcttaaaaacttggtactaccaggtattggttcgtttacaattattgatggaaatcaggtcagcggagaagatgctggaaacaatttcttccttcaaagaagcagtatcggcaagaaccgagctgaagctgccatggaattcttacaagaattaaatagcgatgtctctggaagttttgtggaagagagtccagaaaaccttctagacaatgatccctcatttttctgtaggtttactgttgtagttgcaactcagcttcctgaaagcacttcactacgcttagcagatgtcctctggaattcccagattcctcttttgatctgtaggacatatggactagttggttatatgaggatcattataaaagaacatccagtaatagaatctcatccagataatgcattagaggatctacgactagataagccatttcctgaactgagagaacattttcagtcctatgatttggatcatatggaaaaaaaggaccacagtcatactccatggattgtgatcatagctaaatatttagcacagtggtatagtgaaacaaatggacgaatacctaaaacgtataaagaaaaagaggacttcagagatttgattagacaaggaattctaaaaaatgaaaatggggctccagaagatgaagagaattttgaagaagctattaaaaatgtgaacacagcactaaatacaactcagatcccaagcagtattgaagatatatttaatgatgatcgctgcataaatatcaccaaacagactccatcattttggattttagctcgtgccttaaaggaatttgtggccaaagagggtcaaggaaatttacctgttcgaggcacaattcctgatatgattgcagattcaggcaaatatataaaactgcaaaacgtttaccgtgaaaaagcaaagaaagatgctgccgctgtgggtaatcatgttgccaaattgctgcagtccattggccaggcaccagagtccatttcagagaaagaattaaaattactctgcagcaattctgcatttcttcgagtggtaagatgtcgatccttagctgaagaatatggtttggatacaattaacaaggatgaaattatttctagcatggacaatccagataatgaaatagtgttgtacttaatgttacgggctgttgatagatttcataaacaacagggtagatatccaggagtatctaactatcaagttgaagaagatataggaaagttgaagtcttgtctcactggcttccttcaggaatatggtttatctgtaatggtgaaagatgattatgtccacgaattttgccgatatggagctgctgagccacataccattgctgcattcttggggggagctgctgctcaagaggtcatcaaaataatcaccaaacaatttgtaatttttaataatacttacatttacagtggcatgtcacaaacttcagcaactttccagttgtagagtaagcaagcaccttaagtagtgtgttaatgattgaaactgtaattgccttcgggttgtgctttagtctgtaaaattctaaaggagagctgctaaattgttttcttaataaacatttttctcatttgt

SEQ ID NO: 19706 - DNA, 1707 bp, Homo sapiens
  source 1..1707: mol_type = unassigned DNA
agtgcgcctgcgcgcttgtggagctggtggcggcgctccgcaggggctcggctgttttccgcgcggcaggcgcggccatggcgcagctgggaaagctgctcaaggagcagaagtacgaccggcagctgaggtattggttcgtttacaattattgatggaaatcaggtcagcggagaagatgctggaaacaatttcttccttcaaagaagcagtatcggcaagaaccgagctgaagctgccatggaattcttacaagaattaaatagcgatgtctctggaagttttgtggaagagagtccagaaaaccttctagacaatgatccctcatttttctgtaggtttactgttgtagttgcaactcagcttcctgaaagcacttcactacgcttagcagatgtcctctggaattcccagattcctcttttgatctgtaggacatatggactagttggttatatgaggatcattataaaagaacatccagtaatagaatctcatccagataatgcattagaggatctacgactagataagccatttcctgaactgagagaacattttcagtcctatgatttggatcatatggaaaaaaaggaccacagtcatactccatggattgtgatcatagctaaatatttagcacagtggtatagtgaaacaaatggacgaatacctaaaacgtataaagaaaaagaggacttcagagatttgattagacaaggaattctaaaaaatgaaaatggggctccagaagatgaagagaattttgaagaagctattaaaaatgtgaacacagcactaaatacaactcagatcccaagcagtattgaagatatatttaatgatgatcgctgcataaatatcaccaaacagactccatcattttggattttagctcgtgccttaaaggaatttgtggccaaagagggtcaaggaaatttacctgttcgaggcacaattcctgatatgattgcagattcaggcaaatatataaaactgcaaaacgtttaccgtgaaaaagcaaagaaagatgctgccgctgtgggtaatcatgttgccaaattgctgcagtccattggccaggcaccagagtccatttcagagaaagaattaaaattactctgcagcaattctgcatttcttcgagtggtaagatgtcgatccttagctgaagaatatggtttggatacaattaacaaggatgaaattatttctagcatggacaatccagataatgaaatagtgttgtacttaatgttacgggctgttgatagatttcataaacaacagggtagatatccaggagtatctaactatcaagttgaagaagatataggaaagttgaagtcttgtctcactggcttccttcaggaatatggtttatctgtaatggtgaaagatgattatgtccacgaattttgccgatatggagctgctgagccacataccattgctgcattcttggggggagctgctgctcaagaggtcatcaaaataatcaccaaacaatttgtaatttttaataatacttacatttacagtggcatgtcacaaacttcagcaactttccagttgtagagtaagcaagcaccttaagtagtgtgttaatgattgaaactgtaattgccttcgggttgtgctttagtctgtaaaattctaaaggagagctgctaaattgttttcttaataaacatttttctcatttgt

SEQ ID NO: 19707 - DNA, 4597 bp, Homo sapiens
  source 1..4597: mol_type = unassigned DNA
ggatagcggcagagccggtagcggacggtccttgcattggcctccggcaggcgccccccgggggcgggaagctgcctcacagcatggaaccacaggttactctaaatgtgacttttaaaaatgaaattcaaagctttctggtttctgatccagaaaatacaacttgggctgatatcgaagctatggtaaaagtttcatttgatctgaatactattcaaataaaatacctggatgaggaaaatgaagaggtatccatcaacagtcaaggagaatatgaagaagcgcttaagatggcagttaaacagggaaaccaactgcagatgcaagtccacgaagggcaccatgtcgttgatgaagccccacccccagttgtaggagcaaaacgactagctgccagggcagggaagaagccacttgcacattactcttcactggtgagagtcttgggatcagacatgaagaccccagaggatcctgcagtgcagtcgtttccacttgttccatgtgacacagaccagcctcaagacaagcccccagactggttcacaagctacctggagacgttcagagaacaagtggttaacgaaacggttgagaagcttgaacagaaattacatgaaaagcttgtcctccagaacccatccttgggttcttgtccctcagaagtctcaatgcctacttcagaagaaacattgtttttgccagaaaaccagttcagctggcatattgcttgcaacaactgccaaagaaggattgttggtgtccgctaccagtgtagcctatgcccatcctacaatatctgtgaagattgtgaagcagggccatatggccatgacactaaccacgtcctgctgaagttgcggagacctgttgtgggctcctctgaaccgttctgtcactcaaagtactctactcctcgtcttcctgctgctctggaacaagtcaggctccagaaacaggttgataagaactttcttaaagcagaaaagcaaaggttgcgagctgagaagaaacaacgtaaagcagaggtcaaggaacttaaaaagcagcttaaactccataggaaaattcacctgtggaattcaatccatggactccagagccccaagtctcctttaggccgacctgagagcttgctccagtctaataccctgatgctccctttgcagccctgtacctccgttatgccaatgctcagtgcagcatttgtggatgagaatttgcctgatgggactcaccttcagccaggaaccaagtttatcaaacactggaggatgaaaaatacaggaaatgtaaagtggagtgcagacacaaagctcaagttcatgtggggaaacctgactttggcttccacagaaaagaaggatgttttggttccctgcctcaaggccggccatgtgggagttgtatctgtggagttcattgccccagccttggagggaacgtatacttcccattggcgtctttctcacaaaggccagcaatttgggcctcgggtctggtgcagtatcatagtagatcctttcccctccgaagagagccctgataacattgaaaagggcatgatcagctcaagcaaaactgatgatctcacctgccagcaagaggaaacttttcttctggctaaagaagaaagacagcttggtgaagtgactgagcagacagaagggacagcagcctgcatcccacagaaggcaaaaaatgttgccagtgagagggagctctacatcccatctgtggatcttctgactgcccaggacctgctgtcctttgagctgttggatataaacattgttcaagagttggagagagtgccccacaacacccctgtggatgtgactccctgcatgtctcctctgccacatgacagtcctttaatagagaagccaggcttggggcagatagaggaagagaatgaaggggcaggatttaaagcacttcctgattctatggtgtcagtaaagaggaaggctgagaacattgcttctgtggaggaagcagaagaagacctgagtgggacccagtttgtgtgtgagacagtaatccgatcccttaccttggatgctgccccagaccacaaccctccttgcagacagaagtccttgcagatgacatttgccttgcctgaaggaccacttggaaatgagaaggaggagattatccatatcgctgaggaagaagctgtcatggaggaggaggaggatgaggaggatgaggaggaggaggatgagctcaaagatgaagttcaaagtcagtcctctgcttcctcagaggattacatcatcatcctgcctgagtgctttgataccagccgccccctgggggattctatgtacagctctgcgctctcacagccaggcctggagcgaggtgctgaaggcaagcctggggttgaggctgggcaggaaccagctgaggctggggaaagactccctggaggggagaaccagccacaggagcacagcataagtgacatcctcacgacctcacagactctggaaacagtgcccctaatcccagaggtagtggagcttccaccgtcactgcccaggagctctccttgtgtacatcatcatggttccccaggagtggatttaccagttaccataccagaagtttcttcagtccctgatcagatcagaggagagcccagaggctcatcaggacttgtaaacagcagacagaagagctatgaccactcaaggcaccatcatgggagcagcattgctggaggactggtgaagggggctttgtctgttgctgcctctgcatacaaggccctgtttgctgggccaccagtcactgcacagccaataatttctgaagatcagacagcagccctgatggcccatctctttgaaatgggattctgtgacaggcagctgaacctacggctgctgaagaaacacaattacaatatcctgcaggttgtgacagaacttcttcagttaaacaacaacgactggtacagccaacgctattgaggagtgaccttgtattaaataactgcctgctgctcagagatgatctttattctgtcattggggtatgggatagaagcccttgcttatttttaatctgatgaatctgtatagagcccatcgttgagttaccaagacaatacctgctacagtattttggggagcaaactaaagaccagaacttaaattttcactttagacattggatgaatagtatgaagacagtttttcagttgatttggataaaactattttagtgcattgacaagtgtaacttcaacttcatatagaaccatttttctttctgcttttattgaaactgagtatttttctttggctaatgtggattttttatggggatatctgttaattttcaggttttgaaagacattaacctcggaagttgtttttaagaattattctcataattcttattctcataatttctgtaatccacctcaagcttcatagttatttggcattgaaataacacccagagcatgatagaaatgttgttactcttcctctctcaaggagaaagtaattttcctgcaatacttaataattggcaccgttgctttctaaagactccatggtgcattcaagagtatccaacttcaagggaatctccgcatttcaatgaaaggaggaagagtgtgctgataaacctaccagcacctattgagcaatgtctattatagtaattttgcatacatttttatttaagggaaaaaatataggtattgtgaaatattttgctaatcttatagaaaaggaaaaaatcccgttatttaaagggaaaagtaaatttaacagttgccttttttcttaatgtcagggcagatcttattttacagtacagtgggggaaatagaaacatgtgaaaggcaaaaggcaggctcctaaattaatgtcagtgaagttcagggtgggcaaatgagtgtgtgtgaggtataggaaatgctgatgacttctttaatgcttgaagtccgttcacaggtatctagccctagaatgcctagaacaggaagaggcagctggtgttctgcaaaacttggacaggggcaaagttgctgaaaaagttttggtttaacccgaagataagtggaaaagagcttgtccatgaacccaggttctcactctgtttacagaagtgtgttgagtacagttggtgaaggaagaggtaacaaaaaatgctaaatattttatccatgaaaatgacttccagaaaaggaagaatatgaaccccagaccgaaggggaaaagatagttaatagtattatctaacctggttggtatttgtaatgaatggtgattttaattagtcattagccataatgatgtttatttacagtataactcctgaatgctacttaaataaaccaggattcaaactgcaagccagccaggccgttcattatttaaaacgttttaatcggggcttccgggtagaaggtggagcggcagggtgtaattgggttgatgggtgggacctgtcttgaccatcggagttttataatcgagggccaggagggcccgggttgctctcctggttatgtatgtacttgtacataaccacctaaagaatggtgaaataaatgttcttggaaattcct

SEQ ID NO: 19708 - DNA, 2897 bp, Homo sapiens
  source 1..2897: mol_type = unassigned DNA
ggatagcggcagagccggtagcggacggtccttgcattggcctccggcaggcgccccccgggggcgggaagctgcctcacagcatggaaccacaggttactctaaatgtgacttttaaaaatgaaattcaaagctttctggtttctgatccagaaaatacaacttgggctgatatcgaagctatggtaaaagtttcatttgatctgaatactattcaaataaaatacctggatgaggaaaatgaagaggtaaaaatagttcttttaggagaatatgaagaagcgcttaagatggcagttaaacagggaaaccaactgcagatgcaagtccacgaagggcaccatgtcgttgatgaagccccacccccagttgtaggagcaaaacgactagctgccagggcagggaagaagccacttgcacattactcttcactggtgagagtcttgggatcagacatgaagaccccagaggatcctgcagtgcagtcgtttccacttgttccatgtgacacagaccagcctcaagacaagcccccagactggttcacaagctacctggagacgttcagagaacaagtggttaacgaaacggttgagaagcttgaacagaaattacatgaaaagcttgtcctccagaacccatccttgggttcttgtccctcagaagtctcaatgcctacttcagaagaaacattgtttttgccagaaaaccagttcagctggcatattgcttgcaacaactgccaaagaaggattgttggtgtccgctaccagtgtagcctatgcccatcctacaatatctgtgaagattgtgaagcagggccatatggccatgacactaaccacgtcctgctgaagttgcggagacctgttgtgggctcctctgaaccgttctgtcactcaaagtactctactcctcgtcttcctgctgctctggaacaagtcaggctccagaaacaggttgataagaactttcttaaagcagaaaagcaaaggttgcgagctgagaagaaacaacgtaaagcagaggtcaaggaacttaaaaagcagcttaaactccataggaaaattcacctgtggaattcaatccatggactccagagccccaagtctcctttaggccgacctgagagcttgctccagtctaataccctgatgctccctttgcagccctgtacctccgttatgccaatgctcagtgcagcatttgtggatgagaatttgcctgatgggactcaccttcagccaggaaccaagtttatcaaacactggaggatgaaaaatacaggaaatgtaaagtggagtgcagacacaaagctcaagttcatgtggggaaacctgactttggcttccacagaaaagaaggatgttttggttccctgcctcaaggccggccatgtgggagttgtatctgtggagttcattgccccagccttggagggaacgtatacttcccattggcgtctttctcacaaaggccagcaatttgggcctcgggtctggtgcagtatcatagtagatcctttcccctccgaagagagccctgataacattgaaaagggcatgatcagctcaagcaaaactgatgatctcacctgccagcaagaggaaacttttcttctggctaaagaagaaagacagcttggtgaagtgactgagcagacagaagggacagcagcctgcatcccacagaaggcaaaaaatgttgccagtgagagggagctctacatcccatctgtggatcttctgactgcccaggacctgctgtcctttgagctgttggatataaacattgttcaagagttggagagagtgccccacaacacccctgtggatgtgactccctgcatgtctcctctgccacatgacagtcctttaatagagaagccaggcttggggcagatagaggaagagaatgaaggggcaggatttaaagcacttcctgattctatggtgtcagtaaagaggaaggctgagaacattgcttctgtggaggaagcagaagaagacctgagtgggacccagtttgtgtgtgagacagtaatccgatcccttaccttggatgctgccccagaccacaaccctccttgcagacagaagtccttgcagatgacatttgccttgcctgaaggaccacttggaaatgagaaggaggagattatccatatcgctgaggaagaagctgtcatggaggaggaggaggatgaggaggatgaggaggaggaggatgagctcaaagatgaagttcaaagtcagtcctctgcttcctcagaggattacatcatcatcctgcctgagtgctttgataccagccgccccctgggggattctatgtacagctctgcgctctcacagccaggcctggagcgaggtgctgaaggcaagcctggggttgaggctgggcaggaaccagctgaggctggggaaagactccctggaggggagaaccagccacaggagcacagcataagtgacatcctcacgacctcacagactctggaaacagtgcccctaatcccagaggtagtggagcttccaccgtcactgcccaggagctctccttgtgtacatcatcatggttccccaggagtggatttaccagttaccataccagaagtttcttcagtccctgatcagatcagaggagagcccagaggctcatcaggacttgtaaacagcagacagaagagctatgaccactcaaggcaccatcatgggagcagcattgctggaggactggtgaagggggctttgtctgttgctgcctctgcatacaaggccctgtttgctgggccaccagtcactgcacagggtctctggggcttgctgtcattccttcatctggccaaaaaatgcttcttcctgaaagccccgagtgaagcattctcctggttctaa

SEQ ID NO: 19709 - DNA, 4597 bp, Homo sapiens
  source 1..4597: mol_type = unassigned DNA
ggatagcggcagagccggtagcggacggtccttgcattggcctccggcaggcgccccccgggggcgggaagctgcctcacagcatggaaccacaggttactctaaatgtgacttttaaaaatgaaattcaaagctttctggtttctgatccagaaaatacaacttgggctgatatcgaagctatggtaaaagtttcatttgatctgaatactattcaaataaaatacctggatgaggaaaatgaagaggtaaaaatagttcttttaggagaatatgaagaagcgcttaagatggcagttaaacagggaaaccaactgcagatgcaagtccacgaagggcaccatgtcgttgatgaagccccacccccagttgtaggagcaaaacgactagctgccagggcagggaagaagccacttgcacattactcttcactggtgagagtcttgggatcagacatgaagaccccagaggatcctgcagtgcagtcgtttccacttgttccatgtgacacagaccagcctcaagacaagcccccagactggttcacaagctacctggagacgttcagagaacaagtggttaacgaaacggttgagaagcttgaacagaaattacatgaaaagcttgtcctccagaacccatccttgggttcttgtccctcagaagtctcaatgcctacttcagaagaaacattgtttttgccagaaaaccagttcagctggcatattgcttgcaacaactgccaaagaaggattgttggtgtccgctaccagtgtagcctatgcccatcctacaatatctgtgaagattgtgaagcagggccatatggccatgacactaaccacgtcctgctgaagttgcggagacctgttgtgggctcctctgaaccgttctgtcactcaaagtactctactcctcgtcttcctgctgctctggaacaagtcaggctccagaaacaggttgataagaactttcttaaagcagaaaagcaaaggttgcgagctgagaagaaacaacgtaaagcagaggtcaaggaacttaaaaagcagcttaaactccataggaaaattcacctgtggaattcaatccatggactccagagccccaagtctcctttaggccgacctgagagcttgctccagtctaataccctgatgctccctttgcagccctgtacctccgttatgccaatgctcagtgcagcatttgtggatgagaatttgcctgatgggactcaccttcagccaggaaccaagtttatcaaacactggaggatgaaaaatacaggaaatgtaaagtggagtgcagacacaaagctcaagttcatgtggggaaacctgactttggcttccacagaaaagaaggatgttttggttccctgcctcaaggccggccatgtgggagttgtatctgtggagttcattgccccagccttggagggaacgtatacttcccattggcgtctttctcacaaaggccagcaatttgggcctcgggtctggtgcagtatcatagtagatcctttcccctccgaagagagccctgataacattgaaaagggcatgatcagctcaagcaaaactgatgatctcacctgccagcaagaggaaacttttcttctggctaaagaagaaagacagcttggtgaagtgactgagcagacagaagggacagcagcctgcatcccacagaaggcaaaaaatgttgccagtgagagggagctctacatcccatctgtggatcttctgactgcccaggacctgctgtcctttgagctgttggatataaacattgttcaagagttggagagagtgccccacaacacccctgtggatgtgactccctgcatgtctcctctgccacatgacagtcctttaatagagaagccaggcttggggcagatagaggaagagaatgaaggggcaggatttaaagcacttcctgattctatggtgtcagtaaagaggaaggctgagaacattgcttctgtggaggaagcagaagaagacctgagtgggacccagtttgtgtgtgagacagtaatccgatcccttaccttggatgctgccccagaccacaaccctccttgcagacagaagtccttgcagatgacatttgccttgcctgaaggaccacttggaaatgagaaggaggagattatccatatcgctgaggaagaagctgtcatggaggaggaggaggatgaggaggatgaggaggaggaggatgagctcaaagatgaagttcaaagtcagtcctctgcttcctcagaggattacatcatcatcctgcctgagtgctttgataccagccgccccctgggggattctatgtacagctctgcgctctcacagccaggcctggagcgaggtgctgaaggcaagcctggggttgaggctgggcaggaaccagctgaggctggggaaagactccctggaggggagaaccagccacaggagcacagcataagtgacatcctcacgacctcacagactctggaaacagtgcccctaatcccagaggtagtggagcttccaccgtcactgcccaggagctctccttgtgtacatcatcatggttccccaggagtggatttaccagttaccataccagaagtttcttcagtccctgatcagatcagaggagagcccagaggctcatcaggacttgtaaacagcagacagaagagctatgaccactcaaggcaccatcatgggagcagcattgctggaggactggtgaagggggctttgtctgttgctgcctctgcatacaaggccctgtttgctgggccaccagtcactgcacagccaataatttctgaagatcagacagcagccctgatggcccatctctttgaaatgggattctgtgacaggcagctgaacctacggctgctgaagaaacacaattacaatatcctgcaggttgtgacagaacttcttcagttaaacaacaacgactggtacagccaacgctattgaggagtgaccttgtattaaataactgcctgctgctcagagatgatctttattctgtcattggggtatgggatagaagcccttgcttatttttaatctgatgaatctgtatagagcccatcgttgagttaccaagacaatacctgctacagtattttggggagcaaactaaagaccagaacttaaattttcactttagacattggatgaatagtatgaagacagtttttcagttgatttggataaaactattttagtgcattgacaagtgtaacttcaacttcatatagaaccatttttctttctgcttttattgaaactgagtatttttctttggctaatgtggattttttatggggatatctgttaattttcaggttttgaaagacattaacctcggaagttgtttttaagaattattctcataattcttattctcataatttctgtaatccacctcaagcttcatagttatttggcattgaaataacacccagagcatgatagaaatgttgttactcttcctctctcaaggagaaagtaattttcctgcaatacttaataattggcaccgttgctttctaaagactccatggtgcattcaagagtatccaacttcaagggaatctccgcatttcaatgaaaggaggaagagtgtgctgataaacctaccagcacctattgagcaatgtctattatagtaattttgcatacatttttatttaagggaaaaaatataggtattgtgaaatattttgctaatcttatagaaaaggaaaaaatcccgttatttaaagggaaaagtaaatttaacagttgccttttttcttaatgtcagggcagatcttattttacagtacagtgggggaaatagaaacatgtgaaaggcaaaaggcaggctcctaaattaatgtcagtgaagttcagggtgggcaaatgagtgtgtgtgaggtataggaaatgctgatgacttctttaatgcttgaagtccgttcacaggtatctagccctagaatgcctagaacaggaagaggcagctggtgttctgcaaaacttggacaggggcaaagttgctgaaaaagttttggtttaacccgaagataagtggaaaagagcttgtccatgaacccaggttctcactctgtttacagaagtgtgttgagtacagttggtgaaggaagaggtaacaaaaaatgctaaatattttatccatgaaaatgacttccagaaaaggaagaatatgaaccccagaccgaaggggaaaagatagttaatagtattatctaacctggttggtatttgtaatgaatggtgattttaattagtcattagccataatgatgtttatttacagtataactcctgaatgctacttaaataaaccaggattcaaactgcaagccagccaggccgttcattatttaaaacgttttaatcggggcttccgggtagaaggtggagcggcagggtgtaattgggttgatgggtgggacctgtcttgaccatcggagttttataatcgagggccaggagggcccgggttgctctcctggttatgtatgtacttgtacataaccacctaaagaatggtgaaataaatgttcttggaaattcct

SEQ ID NO: 19710 - DNA, 4973 bp, Homo sapiens
  source 1..4973: mol_type = unassigned DNA
ccaaggtcagaatcgccacctgaggcctgaatatcagcgtaagatagtgtccaaagcagtcttaagaagaggtcccattaccccactctttccgccctaatggaggtctccagtttaggtaaataaaaggattgttgggaggtggagggaaagaactactatttccaacatgcattgcggaacgaaaggccttggccacactgttccttggaaactgtagtcttatggagaggaacatccaataccaaagcgggcacaattctcacggaaatccagtggatagattggagacctccgcgggcttatacatgtcaacagtaatggattggagtgttgttatgttctcctatcttgagagcagagactaggccaaaaaaagatacctacaactcctaggaagactacgattcccatccagccccacgagtctcgggcaagtagtcctctaagcctcacagcatggaaccacaggttactctaaatgtgacttttaaaaatgaaattcaaagctttctggtttctgatccagaaaatacaacttgggctgatatcgaagctatggtaaaagtttcatttgatctgaatactattcaaataaaatacctggatgaggaaaatgaagaggtatccatcaacagtcaaggagaatatgaagaagcgcttaagatggcagttaaacagggaaaccaactgcagatgcaagtccacgaagggcaccatgtcgttgatgaagccccacccccagttgtaggagcaaaacgactagctgccagggcagggaagaagccacttgcacattactcttcactggtgagagtcttgggatcagacatgaagaccccagaggatcctgcagtgcagtcgtttccacttgttccatgtgacacagaccagcctcaagacaagcccccagactggttcacaagctacctggagacgttcagagaacaagtggttaacgaaacggttgagaagcttgaacagaaattacatgaaaagcttgtcctccagaacccatccttgggttcttgtccctcagaagtctcaatgcctacttcagaagaaacattgtttttgccagaaaaccagttcagctggcatattgcttgcaacaactgccaaagaaggattgttggtgtccgctaccagtgtagcctatgcccatcctacaatatctgtgaagattgtgaagcagggccatatggccatgacactaaccacgtcctgctgaagttgcggagacctgttgtgggctcctctgaaccgttctgtcactcaaagtactctactcctcgtcttcctgctgctctggaacaagtcaggctccagaaacaggttgataagaactttcttaaagcagaaaagcaaaggttgcgagctgagaagaaacaacgtaaagcagaggtcaaggaacttaaaaagcagcttaaactccataggaaaattcacctgtggaattcaatccatggactccagagccccaagtctcctttaggccgacctgagagcttgctccagtctaataccctgatgctccctttgcagccctgtacctccgttatgccaatgctcagtgcagcatttgtggatgagaatttgcctgatgggactcaccttcagccaggaaccaagtttatcaaacactggaggatgaaaaatacaggaaatgtaaagtggagtgcagacacaaagctcaagttcatgtggggaaacctgactttggcttccacagaaaagaaggatgttttggttccctgcctcaaggccggccatgtgggagttgtatctgtggagttcattgccccagccttggagggaacgtatacttcccattggcgtctttctcacaaaggccagcaatttgggcctcgggtctggtgcagtatcatagtagatcctttcccctccgaagagagccctgataacattgaaaagggcatgatcagctcaagcaaaactgatgatctcacctgccagcaagaggaaacttttcttctggctaaagaagaaagacagcttggtgaagtgactgagcagacagaagggacagcagcctgcatcccacagaaggcaaaaaatgttgccagtgagagggagctctacatcccatctgtggatcttctgactgcccaggacctgctgtcctttgagctgttggatataaacattgttcaagagttggagagagtgccccacaacacccctgtggatgtgactccctgcatgtctcctctgccacatgacagtcctttaatagagaagccaggcttggggcagatagaggaagagaatgaaggggcaggatttaaagcacttcctgattctatggtgtcagtaaagaggaaggctgagaacattgcttctgtggaggaagcagaagaagacctgagtgggacccagtttgtgtgtgagacagtaatccgatcccttaccttggatgctgccccagaccacaaccctccttgcagacagaagtccttgcagatgacatttgccttgcctgaaggaccacttggaaatgagaaggaggagattatccatatcgctgaggaagaagctgtcatggaggaggaggaggatgaggaggatgaggaggaggaggatgagctcaaagatgaagttcaaagtcagtcctctgcttcctcagaggattacatcatcatcctgcctgagtgctttgataccagccgccccctgggggattctatgtacagctctgcgctctcacagccaggcctggagcgaggtgctgaaggcaagcctggggttgaggctgggcaggaaccagctgaggctggggaaagactccctggaggggagaaccagccacaggagcacagcataagtgacatcctcacgacctcacagactctggaaacagtgcccctaatcccagaggtagtggagcttccaccgtcactgcccaggagctctccttgtgtacatcatcatggttccccaggagtggatttaccagttaccataccagaagtttcttcagtccctgatcagatcagaggagagcccagaggctcatcaggacttgtaaacagcagacagaagagctatgaccactcaaggcaccatcatgggagcagcattgctggaggactggtgaagggggctttgtctgttgctgcctctgcatacaaggccctgtttgctgggccaccagtcactgcacagccaataatttctgaagatcagacagcagccctgatggcccatctctttgaaatgggattctgtgacaggcagctgaacctacggctgctgaagaaacacaattacaatatcctgcaggttgtgacagaacttcttcagttaaacaacaacgactggtacagccaacgctattgaggagtgaccttgtattaaataactgcctgctgctcagagatgatctttattctgtcattggggtatgggatagaagcccttgcttatttttaatctgatgaatctgtatagagcccatcgttgagttaccaagacaatacctgctacagtattttggggagcaaactaaagaccagaacttaaattttcactttagacattggatgaatagtatgaagacagtttttcagttgatttggataaaactattttagtgcattgacaagtgtaacttcaacttcatatagaaccatttttctttctgcttttattgaaactgagtatttttctttggctaatgtggattttttatggggatatctgttaattttcaggttttgaaagacattaacctcggaagttgtttttaagaattattctcataattcttattctcataatttctgtaatccacctcaagcttcatagttatttggcattgaaataacacccagagcatgatagaaatgttgttactcttcctctctcaaggagaaagtaattttcctgcaatacttaataattggcaccgttgctttctaaagactccatggtgcattcaagagtatccaacttcaagggaatctccgcatttcaatgaaaggaggaagagtgtgctgataaacctaccagcacctattgagcaatgtctattatagtaattttgcatacatttttatttaagggaaaaaatataggtattgtgaaatattttgctaatcttatagaaaaggaaaaaatcccgttatttaaagggaaaagtaaatttaacagttgccttttttcttaatgtcagggcagatcttattttacagtacagtgggggaaatagaaacatgtgaaaggcaaaaggcaggctcctaaattaatgtcagtgaagttcagggtgggcaaatgagtgtgtgtgaggtataggaaatgctgatgacttctttaatgcttgaagtccgttcacaggtatctagccctagaatgcctagaacaggaagaggcagctggtgttctgcaaaacttggacaggggcaaagttgctgaaaaagttttggtttaacccgaagataagtggaaaagagcttgtccatgaacccaggttctcactctgtttacagaagtgtgttgagtacagttggtgaaggaagaggtaacaaaaaatgctaaatattttatccatgaaaatgacttccagaaaaggaagaatatgaaccccagaccgaaggggaaaagatagttaatagtattatctaacctggttggtatttgtaatgaatggtgattttaattagtcattagccataatgatgtttatttacagtataactcctgaatgctacttaaataaaccaggattcaaactgcaagccagccaggccgttcattatttaaaacgttttaatcggggcttccgggtagaaggtggagcggcagggtgtaattgggttgatgggtgggacctgtcttgaccatcggagttttataatcgagggccaggagggcccgggttgctctcctggttatgtatgtacttgtacataaccacctaaagaatggtgaaataaatgttcttggaaattcct

SEQ ID NO: 19711 - DNA, 1318 bp, Homo sapiens
  source 1..1318: mol_type = unassigned DNA
acagggatagcggcagagccggtagcggacggtccttgcattggcctccggcaggcgccccccgggggcgggaagctgcctcacagcatggaaccacaggttactctaaatgtgacttttaaaaatgaaattcaaagctttctggtttctgatccagaaaatacaacttgggctgatatcgaagctatggtaaaagtttcatttgatctgaatactattcaaataaaatacctggatgaggaaaatgaagaggtatccatcaacagtcaaggagaatatgaagaagcgcttaagatggcagttaaacagggaaaccaactgcagatgcaagtccacgaagggcaccatgtcgttgatgaagccccacccccagttgtaggagcaaaacgactagctgccagggcagggaagaagccacttgcacattactcttcactggtgagagtcttgggattctatgtacagctctgcgctctcacagccaggcctggagcgaggtgctgaaggcaagcctggggttgaggctgggcaggaaccagctgaggctggggaaagactccctggaggggagaaccagccacaggagcacagcataagtgacatcctcacgacctcacagactctggaaacagtgcccctaatcccagaggtagtggagcttccaccgtcactgcccaggagctctccttgtgtacatcatcatggttccccaggagtggatttaccagttaccataccagaagtttcttcagtccctgatcagatcagaggagagcccagaggctcatcaggacttgtaaacagcagacagaagagctatgaccactcaaggcaccatcatgggagcagcattgctggaggactggtgaagggggctttgtctgttgctgcctctgcatacaaggccctgtttgctgggccaccagtcactgcacagccaataatttctgaagatcagacagcagccctgatggcccatctctttgaaatgggattctgtgacaggcagctgaacctacggctgctgaagaaacacaattacaatatcctgcaggttgtgacagaacttcttcagttaaacaacaacgactggtacagccaacgctattgaggagtgaccttgtattaaataactgcctgctgctcagagatgatctttattctgtcattggggtatgggatagaagcccttgcttatttttaatctgatgaatctgtatagagcccatcgttgagttaccaagacaatacctgctacagtattttggggagcaaactaaagaccagaacttaaattttcactttagacattggatga

SEQ ID NO: 19712 - DNA, 2703 bp, Homo sapiens
  source 1..2703: mol_type = unassigned DNA
atccgccatgttagattcaccccacagggatagcggcagagccggtagcggacggtccttgcattggcctccggcaggcgccccccgggggcgggaagctgcctcacagcatggaaccacaggttactctaaatgtgacttttaaaaatgaaattcaaagctttctggtttctgatccagaaaatacaacttgggctgatatcgaagctatggtatccatcaacagtcaaggagaatatgaagaagcgcttaagatggcagttaaacagggaaaccaactgcagatgcaagtccacgaagggcaccatgtcgttgatgaagccccacccccagttgtaggagcaaaacgactagctgccagggcagggaagaagccacttgcacattactcttcactggtgagagtcttgggatcagacatgaagaccccagaggatcctgcagtgcagtcgtttccacttgttccatgtgacacagaccagcctcaagacaagcccccagactggttcacaagctacctggagacgttcagagaacaagtggttaacgaaacggttgagaagcttgaacagaaattacatgaaaagcttgtcctccagaacccatccttgggttcttgtccctcagaagtctcaatgcctacttcagaagaaacattgtttttgccagaaaaccagttcagctggcatattgcttgcaacaactgccaaagaaggattgttggtgtccgctaccagtgtagcctatgcccatcctacaatatctgtgaagattgtgaagcagggccatatggccatgacactaaccacgtcctgctgaagttgcggagacctgttgtgggctcctctgaaccgttctgtcactcaaagtactctactcctcgtcttcctgctgctctggaacaagtcaggctccagaaacaggttgataagaactttcttaaagcagaaaagcaaaggttgcgagctgagaagaaacaacgtaaagcagaggtcaaggaacttaaaaagcagcttaaactccataggaaaattcacctgtggaattcaatccatggactccagagccccaagtctcctttaggccgacctgagagcttgctccagtctaataccctgatgctccctttgcagccctgtacctccgttatgccaatgctcagtgcagcatttgtggatgagaatttgcctgatgggactcaccttcagccaggaaccaagtttatcaaacactggaggatgaaaaatacaggaaatgtaaagtggagtgcagacacaaagctcaagttcatgtggggaaacctgactttggcttccacagaaaagaaggatgttttggttccctgcctcaaggccggccatgtgggagttgtatctgtggagttcattgccccagccttggagggaacgtatacttcccattggcgtctttctcacaaaggccagcaatttgggcctcgggtctggtgcagtatcatagtagatcctttcccctccgaagagagccctgataacattgaaaagggcatgatcagctcaagcaaaactgatgatctcacctgccagcaagaggaaacttttcttctggctaaagaagaaagacagcttggtgaagtgactgagcagacagaagggacagcagcctgcatcccacagaaggcaaaaaatgttgccagtgagagggagctctacatcccatctgtggatcttctgactgcccaggacctgctgtcctttgagctgttggatataaacattgttcaagagttggagagagtgccccacaacacccctgtggatgtgactccctgcatgtctcctctgccacatgacagtcctttaatagagaagccaggcttggggcagatagaggaagagaatgaaggggcaggatttaaagcacttcctgattctatggtgtcagtaaagaggaaggctgagaacattgcttctgtggaggaagcagaagaagacctgagtgggacccagtttgtgtgtgagacagtaatccgatcccttaccttggatgctgccccagaccacaaccctccttgcagacagaagtccttgcagatgacatttgccttgcctgaaggaccacttggaaatgagaaggaggagattatccatatcgctgaggaagaagctgtcatggaggaggaggaggatgaggaggatgaggaggaggaggatgagctcaaagatgaagttcaaagtcagtcctctgcttcctcagaggattacatcatcatcctgcctgagtgctttgataccagccgccccctgggggattctatgtacagctctgcgctctcacagccaggcctggagcgaggtgctgaaggcaagcctggggttgaggctgggcaggaaccagctgaggctggggaaagactccctggaggggagaaccagccacaggagcacagcataagtgacatcctcacgacctcacagactctggaaacagtgcccctaatcccagaggtagtggagcttccaccgtcactgcccaggagctctccttgtgtacatcatcatggttccccaggagtggatttaccagttaccataccagaagtttcttcagtccctgatcagatcagaggagccaataatttctgaagatcagacagcagccctgatggcccatctctttgaaatgggattctgtgacaggcagctgaacctacggctgctgaag

SEQ ID NO: 19713 - DNA, 2712 bp, Homo sapiens
  source 1..2712: mol_type = unassigned DNA
agcacccggcgctgccgagccacctcccccgccgcccgctagcaagtttggcggctccaagccaggcgcgcctcaggatccaggctcatttgcttccacctagcttcggtgccccctgctaggcggggaccctcgagagcgatgccgatggatttgattttagttgtgtggttctgtgtgtgcactgccaggacagtggtgggctttgggatggaccctgaccttcagatggatatcgtcaccgagcttgaccttgtgaacaccacccttggagttgctcaggtgtctggaatgcacaatgccagcaaagcatttttatttcaagacatagaaagagagatccatgcagctcctcatgtgagtgagaaattaattcagctgttccggaacaagagtgaattcaccattttggccactgtacagcagaagccatccacttcaggagtgatactgtccattcgagaactggagcacaggatttatgagcgtgtgatagaccctccagataccaaccttcccccaggaatcaatttatggcttggccagcgcaaccaaaagcatggcttattcaaagggatcatccaagatgggaagatcatctttatgccgaatggatatataacacagtgtccaaatctaaatcacacttgcccaacctgcagtgatttcttaagcctggtgcaaggaataatggatttacaagagcttttggccaagatgactgcaaaactaaattatgcagagacaagacttagtcaattggaaaactgtcattgtgagaagacttgtcaagtgagtggactgctctatcgagatcaagactcttgggtagatggtgaccattgcaggaactgcacttgcaaaagtggtgccgtggaatgccgaaggatgtcctgtccccctctcaattgctccccagactccctcccagtgcacattgctggccagtgctgtaaggtctgccgaccaaaatgtatctatggaggaaaagttcttgcagaaggccagcggattttaaccaagagctgtcgggaatgccgaggtggagttttagtaaaaattacagaaatgtgtcctcctttgaactgctcagaaaaggatcacattcttcctgagaatcagtgctgccgtgtctgtagaggtcataacttttgtgcagaaggacctaaatgtggtgaaaactcagagtgcaaaaactggaatacaaaagctacttgtgagtgcaagagtggttacatctctgtccagggagactctgcctactgtgaagatattgatgagtgtgcagctaagatgcattactgtcatgccaatactgtgtgtgtcaaccttcctgggttatatcgctgtgactgtgtcccaggatacattcgtgtggatgacttctcttgtacagaacacgatgaatgtggcagcggccagcacaactgtgatgagaatgccatctgcaccaacactgtccagggacacagctgcacctgcaaaccgggctacgtggggaacgggaccatctgcagagctttctgtgaagagggctgcagatacggtggaacgtgtgtggctcccaacaaatgtgtctgtccatctggattcacaggaagccactgcgagaaagatattgatgaatgttcagagggaatcattgagtgccacaaccattcccgctgcgttaacctgccagggtggtaccactgtgagtgcagaagcggtttccatgacgatgggacctattcactgtccggggagtcctgtattgacattgatgaatgtgccttaagaactcacacctgttggaacgattctgcctgcatcaacctggcagggggctttgactgtctctgcccctctgggccctcctgctctggtgactgtcctcatgaaggggggctgaagcacaatggccaggtgtggaccttgaaagaagacaggtgttctgtctgctcctgcaaggatggcaagatattctgccgacggacagcttgtgattgccagaatccaagtgctgacctattctgttgcccagaatgtgacaccagagtcacaagtcaatgtttagaccaaaatggtcacaagctgtatcgaagtggagacaattggacccatagctgtcagcagtgtcggtgtctggaaggagaggtagattgctggccactcacttgccccaacttgagctgtgagtatacagctatcttagaaggggaatgttgtccccgctgtgtcagtgacccctgcctagctgataacatcacctatgacatcagaaaaacttgcctggacagctatggtgtttcacggcttagtggctcagtgtggacgatggctggatctccctgcacaacctgtaaatgcaagaatggaagagtctgttgttctgtggattttgagtgtcttcaaaataattgaagtatttacagtggactcaacgcagaagaatggacgaaatgaccatccaacgtgattaaggataggaatcggtagtttggtttttttgtttgttttgtttttttaaccacagataattgccaaagtttccacctgaggacggtgtttggaggttgccttttggacctaccactttgctcattcttgctaacctagtctaggtgacctacagtgccgtgcatttaagtcaatggttgttaaaagaagtttcccgtgttgtaaatcatgtttcccttatcagatcatttgcaaatacatttaaatgatctc

SEQ ID NO: 19714 - DNA, 3022 bp, Homo sapiens
  source 1..3022: mol_type = unassigned DNA
tatgcgagcgcagcacccggcgctgccgagccacctcccccgccgcccgctagcaagtttggcggctccaagccaggcgcgcctcaggatccaggctcatttgcttccacctagcttcggtgccccctgctaggcggggaccctcgagagcgatgccgatggatttgattttagttgtgtggttctgtgtgtgcactgccaggacagtggtgggctttgggatggaccctgaccttcagatggatatcgtcaccgagcttgaccttgtgaacaccacccttggagttgctcaggtgtctggaatgcacaatgccagcaaagcatttttatttcaagacatagaaagagagatccatgcagctcctcatgtgagtgagaaattaattcagctgttccggaacaagagtgaattcaccattttggccactgtacagcagaagccatccacttcaggagtgatactgtccattcgagaactggagcacagctattttgaactggagagcagtggcctgagggatgagattcggtatcactacatacacaatgggaagccaaggacagaggcacttccttaccgcatggcagatggacaatggcacaaggttgcactgtcagttagcgcctctcatctcctgctccatgtcgactgtaacaggatttatgagcgtgtgatagaccctccagataccaaccttcccccaggaatcaatttatggcttggccagcgcaaccaaaagcatggcttattcaaagggatcatccaagatgggaagatcatctttatgccgaatggatatataacacagtgtccaaatctaaatcacacttgcccaacctgcagtgatttcttaagcctggtgcaaggaataatggatttacaagagcttttggccaagatgactgcaaaactaaattatgcagagacaagacttagtcaattggaaaactgtcattgtgagaagacttgtcaagtgagtggactgctctatcgagatcaagactcttgggtagatggtgaccattgcaggaactgcacttgcaaaagtggtgccgtggaatgccgaaggatgtcctgtccccctctcaattgctccccagactccctcccagtgcacattgctggccagtgctgtaaggtctgccgaccaaaatgtatctatggaggaaaagttcttgcagaaggccagcggattttaaccaagagctgtcgggaatgccgaggtggagttttagtaaaaattacagaaatgtgtcctcctttgaactgctcagaaaaggatcacattcttcctgagaatcagtgctgccgtgtctgtagaggtcataacttttgtgcagaaggacctaaatgtggtgaaaactcagagtgcaaaaactggaatacaaaagctacttgtgagtgcaagagtggttacatctctgtccagggagactctgcctactgtgaagatattgatgagtgtgcagctaagatgcattactgtcatgccaatactgtgtgtgtcaaccttcctgggttatatcgctgtgactgtgtcccaggatacattcgtgtggatgacttctcttgtacagaacacgatgaatgtggcagcggccagcacaactgtgatgagaatgccatctgcaccaacactgtccagggacacagctgcacctgcaaaccgggctacgtggggaacgggaccatctgcagagctttctgtgaagagggctgcagatacggtggaacgtgtgtggctcccaacaaatgtgtctgtccatctggattcacaggaagccactgcgagaaagatattgatgaatgttcagagggaatcattgagtgccacaaccattcccgctgcgttaacctgccagggtggtaccactgtgagtgcagaagcggtttccatgacgatgggacctattcactgtccggggagtcctgtattgacattgatgaatgtgccttaagaactcacacctgttggaacgattctgcctgcatcaacctggcagggggctttgactgtctctgcccctctgggccctcctgctctggtgactgtcctcatgaaggggggctgaagcacaatggccaggtgtggaccttgaaagaagacaggtgttctgtctgctcctgcaaggatggcaagatattctgccgacggacagcttgtgattgccagaatccaagtgctgacctattctgttgcccagaatgtgacaccagagtcacaagtcaatgtttagaccaaaatggtcacaagctgtatcgaagtggagacaattggacccatagctgtcagcagtgtcggtgtctggaaggagaggtagattgctggccactcacttgccccaacttgagctgtgagtatacagctatcttagaaggggaatgttgtccccgctgtgtcagtgacccctgcctagctgataacatcacctatgacatcagaaaaacttgcctggacagctatggtgtttcacggcttagtggctcagtgtggacgatggctggatctccctgcacaacctgtaaatgcaagaatggaagagtctgttgttctgtggattttgagtgtcttcaaaataattgaagtatttacagtggactcaacgcagaagaatggacgaaatgaccatccaacgtgattaaggataggaatcggtagtttggtttttttgtttgttttgtttttttaaccacagataattgccaaagtttccacctgaggacggtgtttggaggttgccttttggacctaccactttgctcattcttgctaacctagtctaggtgacctacagtgccgtgcatttaagtcaatggttgttaaaagaagtttcccgtgttgtaaatcatgtttcccttatcagatcatttgcaaatacatttaaatgatctcatggtaaatgttgatgtattttttggtttattttgtgtactaacataatagagagagactcagctccttttatttattttgttgatttatggatcaaattctaaaataaagttgcctgttgtgacttt

SEQ ID NO: 19715 - DNA, 2400 bp, Homo sapiens
  source 1..2400: mol_type = unassigned DNA
tccaggctcatttgcttccacctagcttcggtgccccctgctaggcggggaccctcgagagcgatgccgatggatttgattttagttgtgtggttctgtgtgtgcactgccaggacagtggtgggctttgggatggaccctgaccttcagatggatatcgtcaccgagcttgaccttgtgaacaccacccttggagttgctcaggtgtctggaatgcacaatgccagcaaagcatttttatttcaagacatagaaagagagatccatgcagctcctcatgtgagtgagaaattaattcagctgttccggaacaagagtgaattcaccattttggccactgtacagcagaagccatccacttcaggagtgatactgtccattcgagaactggagcacagctattttgaactggagagcagtggcctgagggatgagattcggtatcactacatacacaatgggaagccaaggacagaggcacttccttaccgcatggcagatggacaatggcacaaggttgcactgtcagttagcgcctctcatctcctgctccatgtcgactgtaacaggatttatgagcgtgtgatagaccctccagataccaaccttcccccaggaatcaatttatggcttggccagcgcaaccaaaagcatggcttattcaaagggatcatccaagatgggaagatcatctttatgccgaatggatatataacacagtgtccaaatctaaatcacacttgcccaacctgcagtgatttcttaagcctggtgcaaggaataatggatttacaagagcttttggccaagatgactgcaaaactaaattatgcagagacaagacttagtcaattggaaaactgtcattgtgagaagacttgtcaagtgagtggactgctctatcgagatcaagactcttgggtagatggtgaccattgcaggaactgcacttgcaaaagtggtgccgtggaatgccgaaggatgtcctgtccccctctcaattgctccccagactccctcccagtgcacattgctggccagtgctgtaaggtctgccgaccaaaatgtatctatggaggaaaagttcttgcagaaggccagcggattttaaccaagagctgtcgggaatgccgaggtggagttttagtaaaaattacagaaatgtgtcctcctttgaactgctcagaaaaggatcacattcttcctgagaatcagtgctgccgtgtctgtagaggtcataacttttgtgcagaaggacctaaatgtggtgaaaactcagagtgcaaaaactggaatacaaaagctacttgtgagtgcaagagtggttacatctctgtccagggagactctgcctactgtgaagatattgatgagtgtgcagctaagatgcattactgtcatgccaatactgtgtgtgtcaaccttcctgggttatatcgctgtgactgtgtcccaggatacattcgtgtggatgacttctcttgtacagaacacgatgaatgtggcagcggccagcacaactgtgatgagaatgccatctgcaccaacactgtccagggacacagctgcacctgcaaaccgggctacgtggggaacgggaccatctgcagagctttctgtgaagagggctgcagatacggtggaacgtgtgtggctcccaacaaatgtgtctgtccatctggattcacaggaagccactgcgagaaagacattgatgaatgtgccttaagaactcacacctgttggaacgattctgcctgcatcaacctggcagggggctttgactgtctctgcccctctgggccctcctgctctggtgactgtcctcatgaaggggggctgaagcacaatggccaggtgtggaccttgaaagaagacaggtgttctgtctgctcctgcaaggatggcaagatattctgccgacggacagcttgtgattgccagaatccaagtgctgacctattctgttgcccagaatgtgacaccagagtcacaagtcaatgtttagaccaaaatggtcacaagctgtatcgaagtggagacaattggacccatagctgtcagcagtgtcggtgtctggaaggagaggtagattgctggccactcacttgccccaacttgagctgtgagtatacagctatcttagaaggggaatgttgtccccgctgtgtcagtgacccctgcctagctgataacatcacctatgacatcagaaaaacttgcctggacagctatggtgtttcacggcttagtggctcagtgtggacgatggctggatctccctgcacaacctgtaaatgcaagaatggaagagtctgttgttctgtggattttgagtgtcttcaaaataattgaagtatttacagtggactcaacgcagaagaatggacgaaatgacca

SEQ ID NO: 19716 - DNA, 2943 bp, Homo sapiens
  source 1..2943: mol_type = unassigned DNA
agaaggatccatctaacatttactgaaataaggaagatgctttattcaatctaaaagtgaaaaaagaaccttttagacattattattataaaatgtctataagaagacttctcattttaatcctcaaaatagggagacgatggactgagctgatccgcaccatggagtctcgggtcttactgagaacattctgtttgatcttcggtctcggagcagtttgggggcttggtgtggacccttccctacagattgacgtcttaacagagttagaacttggggagtccacgaccggagtgcgtcaggtcccggggctgcataatgggacgaaagcctttctctttcaagatactcccagaagcataaaagcatccactgctacagctgaacagttttttcagaagctgagaaataaacatgaatttactattttggtgaccctaaaacagacccacttaaattcaggagttattctctcaattcaccacttggatcacaggtacctggaactggaaagtagtggccatcggaatgaagtcagactgcattaccgctcaggcagtcaccgccctcacacagaagtgtttccttacattttggctgatgacaagtggcacaagctctccttagccatcagtgcttcccatttgattttacacattgactgcaataaaatttatgaaagggtagtagaaaagccctccacagacttgcctctaggcacaacattttggctaggacagagaaataatgcgcatggatattttaagggtataatgcaagatgtccaattacttgtcatgccccagggatttattgctcagtgcccagatcttaatcgcacctgtccaacttgcaatgacttccatggacttgtgcagaaaatcatggagctacaggatattttagccaaaacatcagccaagctgtctcgagctgaacagcgaatgaatagattggatcagtgctattgtgaaaggacttgcaccatgaagggaaccacctaccgagaatttgagtcctggatagacggctgtaagaactgcacatgcctgaatggaaccatccagtgtgaaactctaatctgcccaaatcctgactgcccacttaagtcggctcttgcgtatgtggatggcaaatgctgtaaggaatgcaaatcgatatgccaatttcaaggacgaacctactttgaaggagaaagaaatacagtctattcctcttctggagtatgtgttctctatgagtgcaaggaccagaccatgaaacttgttgagagttcaggctgtccagctttggattgtccagagtctcatcagataaccttgtctcacagctgttgcaaagtttgtaaaggttatgacttttgttctgaaaggcataactgcatggagaattccatctgcagaaatctgaatgacagggctgtttgtagctgtcgagatggttttagggctcttcgagaggataatgcctactgtgaagacatcgatgagtgtgctgaagggcgccattactgtcgtgaaaatacaatgtgtgtcaacaccccgggttcttttatgtgcatctgcaaaactggatacatcagaattgatgattattcatgtacagaacatgatgagtgtatcacaaatcagcacaactgtgatgaaaatgctttatgcttcaacactgttggaggacacaactgtgtttgcaagccgggctatacagggaatggaacgacatgcaaagcattttgcaaagatggctgtaggaatggaggagcctgtattgccgctaatgtgtgtgcctgcccacaaggcttcactggacccagctgtgaaacggacattgatgaatgctctgatggttttgttcaatgtgacagtcgtgctaattgcattaacctgcctggatggtaccactgtgagtgcagagatggctaccatgacaatgggatgttttcaccaagtggagaatcgtgtgaagatattgatgagtgtgggaccgggaggcacagctgtgccaatgataccatttgcttcaatttggatggcggatatgattgtcgatgtcctcatggaaagaattgcacaggggactgcatccatgatggaaaagttaagcacaatggtcagatttgggtgttggaaaatgacaggtgctctgtgtgctcatgtcagaatggattcgttatgtgtcgacggatggtctgtgactgtgagaatcccacagttgatcttttttgctgccctgaatgtgacccaaggcttagtagtcagtgcctccatcaaaatggggaaactttgtataacagtggtgacacctgggtccagaattgtcaacagtgccgctgcttgcaaggggaagttgattgttggcccctgccttgcccagatgtggagtgtgaattcagcattctcccagagaatgagtgctgcccgcgctgtgtcacagacccttgccaggctgacaccatccgcaatgacatcaccaagacttgcctggacgaaatgaatgtggttcgcttcaccgggtcctcttggatcaaacatggcactgagtgtactctctgccagtgcaagaatggccacatctgttgctcagtggatccacagtgccttcaggaactgtgaagttaactgtctcatgggagatttctgttaaaagaatgttctttcattaaaagaccaaaaagaagttaaaacttaaattgggtgatttgtgggcagctaaatgcagctttgttaatagctgagtgaactttcaattatgaaatttgtggagcttgacaaaatcacaaaaggaaaattactggggcaaaattagacctcaagtctgcctctactgtgtctcacatcaccatgtagaagaatgggcgtacagtatataccgtgacatcctgaaccctggatagaaagcctgagcccattggatctgtgaaagcctctagcttcactggtgcag

SEQ ID NO: 19717 - DNA, 3203 bp, Homo sapiens
  source 1..3203: mol_type = unassigned DNA
gtgcttgccttggagaccgcgaggcggatcacgcccctagtccagggtcggagggctgagggggaactttgcagagagaagggtttaaaggaggtcatggaaacgggactgggtgctccgctatttaaagcttggctgctgatctcagtttgggggcttggtgtggacccttccctacagattgacgtcttaacagagttagaacttggggagtccacgaccggagtgcgtcaggtcccggggctgcataatgggacgaaagcctttctctttcaagatactcccagaagcataaaagcatccactgctacagctgaacagttttttcagaagctgagaaataaacatgaatttactattttggtgaccctaaaacagacccacttaaattcaggagttattctctcaattcaccacttggatcacaggtacctggaactggaaagtagtggccatcggaatgaagtcagactgcattaccgctcaggcagtcaccgccctcacacagaagtgtttccttacattttggctgatgacaagtggcacaagctctccttagccatcagtgcttcccatttgattttacacattgactgcaataaaatttatgaaagggtagtagaaaagccctccacagacttgcctctaggcacaacattttggctaggacagagaaataatgcgcatggatattttaagggtataatgcaagatgtccaattacttgtcatgccccagggatttattgctcagtgcccagatcttaatcgcacctgtccaacttgcaatgacttccatggacttgtgcagaaaatcatggagctacaggatattttagccaaaacatcagccaagctgtctcgagctgaacagcgaatgaatagattggatcagtgctattgtgaaaggacttgcaccatgaagggaaccacctaccgagaatttgagtcctggatagacggctgtaagaactgcacatgcctgaatggaaccatccagtgtgaaactctaatctgcccaaatcctgactgcccacttaagtcggctcttgcgtatgtggatggcaaatgctgtaaggaatgcaaatcgatatgccaatttcaaggacgaacctactttgaaggagaaagaaatacagtctattcctcttctggagtatgtgttctctatgagtgcaaggaccagaccatgaaacttgttgagagttcaggctgtccagctttggattgtccagagtctcatcagataaccttgtctcacagctgttgcaaagtttgtaaaggttatgacttttgttctgaaaggcataactgcatggagaattccatctgcagaaatctgaatgacagggctgtttgtagctgtcgagatggttttagggctcttcgagaggataatgcctactgtgaagacatcgatgagtgtgctgaagggcgccattactgtcgtgaaaatacaatgtgtgtcaacaccccgggttcttttatgtgcatctgcaaaactggatacatcagaattgatgattattcatgtacagaacatgatgagtgtatcacaaatcagcacaactgtgatgaaaatgctttatgcttcaacactgttggaggacacaactgtgtttgcaagccgggctatacagggaatggaacgacatgcaaagcattttgcaaagatggctgtaggaatggaggagcctgtattgccgctaatgtgtgtgcctgcccacaaggcttcactggacccagctgtgaaacggacattgatgaatgctctgatggttttgttcaatgtgacagtcgtgctaattgcattaacctgcctggatggtaccactgtgagtgcagagatggctaccatgacaatgggatgttttcaccaagtggagaatcgtgtgaagatattgatgagtgtgggaccgggaggcacagctgtgccaatgataccatttgcttcaatttggatggcggatatgattgtcgatgtcctcatggaaagaattgcacaggggactgcatccatgatggaaaagttaagcacaatggtcagatttgggtgttggaaaatgacaggtgctctgtgtgctcatgtcagaatggattcgttatgtgtcgacggatggtctgtgactgtgagaatcccacagttgatcttttttgctgccctgaatgtgacccaaggcttagtagtcagtgcctccatcaaaatggggaaactttgtataacagtggtgacacctgggtccagaattgtcaacagtgccgctgcttgcaaggggaagttgattgttggcccctgccttgcccagatgtggagtgtgaattcagcattctcccagagaatgagtgctgcccgcgctgtgtcacagacccttgccaggctgacaccatccgcaatgacatcaccaagacttgcctggacgaaatgaatgtggttcgcttcaccgggtcctcttggatcaaacatggcactgagtgtactctctgccagtgcaagaatggccacatctgttgctcagtggatccacagtgccttcaggaactgtgaagttaactgtctcatgggagatttctgttaaaagaatgttctttcattaaaagaccaaaaagaagttaaaacttaaattgggtgatttgtgggcagctaaatgcagctttgttaatagctgagtgaactttcaattatgaaatttgtggagcttgacaaaatcacaaaaggaaaattactggggcaaaattagacctcaagtctgcctctactgtgtctcacatcaccatgtagaagaatgggcgtacagtatataccgtgacatcctgaaccctggatagaaagcctgagcccattggatctgtgaaagcctctagcttcactggtgcagaaaattttcctctagatcagaatcttcaagaatcagttaggttcctcactgcaagaaataaaatgtcaggcagtgaatgaattatattttcagaagtaaagcaaagaagctataacatgttatgtacagtacactctgaaaagaaatctgaaacaagttattgtaatgataaaaataatgcacaggcatggttacttaatattttctaacaggaaaagtcatccctatttccttgttttactgcacttaatattatttggttgaatttgttcagtataagctcgttcttgtgcaaaattaaataaatatttctcttaccttataacac

SEQ ID NO: 19718 - DNA, 3612 bp, Homo sapiens
  source 1..3612: mol_type = unassigned DNA
ggcccgcccctccctccccggaggagcagtctctccgcgcgtctcccggagctttctccattgtctctgcctttacaacaggttcgggcggcggggaagacgggggggtgcggggccgccccagcccgggctttcttggggccgccccccttctaccgggtgtgcgagtctttggctgcttttattcggctcgggagctaattccccgacggagccgcgccggggcgagtccgacccctccctccgggccccctccgggccgcgctgccgcctcggccctgcgtgtgggaatgatgtgcgcattggagggtctaagttcttcacgcgcctggggaggcctcccttttctttcttaggcaaccaaagcgtattaatcctactgatcagtaaatccgaggcagcagcaggagagacaaacgttattttcccgcttgattccaagaacctcttcgatttttatttttatttttaaagagggagacgatggactgagctgatccgcaccatggagtctcgggtcttactgagaacattctgtttgatcttcggtctcggagcagtttgggggcttggtgtggacccttccctacagattgacgtcttaacagagttagaacttggggagtccacgaccggagtgcgtcaggtcccggggctgcataatgggacgaaagcctttctctttcaagatactcccagaagcataaaagcatccactgctacagctgaacagttttttcagaagctgagaaataaacatgaatttactattttggtgaccctaaaacagacccacttaaattcaggagttattctctcaattcaccacttggatcacaggtacctggaactggaaagtagtggccatcggaatgaagtcagactgcattaccgctcaggcagtcaccgccctcacacagaagtgtttccttacattttggctgatgacaagtggcacaagctctccttagccatcagtgcttcccatttgattttacacattgactgcaataaaatttatgaaagggtagtagaaaagccctccacagacttgcctctaggcacaacattttggctaggacagagaaataatgcgcatggatattttaagggtataatgcaagatgtccaattacttgtcatgccccagggatttattgctcagtgcccagatcttaatcgcacctgtccaacttgcaatgacttccatggacttgtgcagaaaatcatggagctacaggatattttagccaaaacatcagccaagctgtctcgagctgaacagcgaatgaatagattggatcagtgctattgtgaaaggacttgcaccatgaagggaaccacctaccgagaatttgagtcctggatagacggctgtaagaactgcacatgcctgaatggaaccatccagtgtgaaactctaatctgcccaaatcctgactgcccacttaagtcggctcttgcgtatgtggatggcaaatgctgtaaggaatgcaaatcgatatgccaatttcaaggacgaacctactttgaaggagaaagaaatacagtctattcctcttctggagtatgtgttctctatgagtgcaaggaccagaccatgaaacttgttgagagttcaggctgtccagctttggattgtccagagtctcatcagataaccttgtctcacagctgttgcaaagtttgtaaaggttatgacttttgttctgaaaggcataactgcatggagaattccatctgcagaaatctgaatgacagggctgtttgtagctgtcgagatggttttagggctcttcgagaggataatgcctactgtgaagacatcgatgagtgtgctgaagggcgccattactgtcgtgaaaatacaatgtgtgtcaacaccccgggttcttttatgtgcatctgcaaaactggatacatcagaattgatgattattcatgtacagaacatgatgagtgtatcacaaatcagcacaactgtgatgaaaatgctttatgcttcaacactgttggaggacacaactgtgtttgcaagccgggctatacagggaatggaacgacatgcaaagcattttgcaaagatggctgtaggaatggaggagcctgtattgccgctaatgtgtgtgcctgcccacaaggcttcactggacccagctgtgaaacggacattgatgaatgctctgatggttttgttcaatgtgacagtcgtgctaattgcattaacctgcctggatggtaccactgtgagtgcagagatggctaccatgacaatgggatgttttcaccaagtggagaatcgtgtgaagatattgatgagtgtgggaccgggaggcacagctgtgccaatgataccatttgcttcaatttggatggcggatatgattgtcgatgtcctcatggaaagaattgcacaggggactgcatccatgatggaaaagttaagcacaatggtcagatttgggtgttggaaaatgacaggtgctctgtgtgctcatgtcagaatggattcgttatgtgtcgacggatggtctgtgactgtgagaatcccacagttgatcttttttgctgccctgaatgtgacccaaggcttagtagtcagtgcctccatcaaaatggggaaactttgtataacagtggtgacacctgggtccagaattgtcaacagtgccgctgcttgcaaggggaagttgattgttggcccctgccttgcccagatgtggagtgtgaattcagcattctcccagagaatgagtgctgcccgcgctgtgtcacagacccttgccaggctgacaccatccgcaatgacatcaccaagacttgcctggacgaaatgaatgtggttcgcttcaccgggtcctcttggatcaaacatggcactgagtgtactctctgccagtgcaagaatggccacatctgttgctcagtggatccacagtgccttcaggaactgtgaagttaactgtctcatgggagatttctgttaaaagaatgttctttcattaaaagaccaaaaagaagttaaaacttaaattgggtgatttgtgggcagctaaatgcagctttgttaatagctgagtgaactttcaattatgaaatttgtggagcttgacaaaatcacaaaaggaaaattactggggcaaaattagacctcaagtctgcctctactgtgtctcacatcaccatgtagaagaatgggcgtacagtatataccgtgacatcctgaaccctggatagaaagcctgagcccattggatctgtgaaagcctctagcttcactggtgcagaaaattttcctctagatcagaatcttcaagaatcagttaggttcctcactgcaagaaataaaatgtcaggcagtgaatgaattatattttcagaagtaaagcaaagaagctataacatgttatgtacagtacactctgaaaagaaatctgaaacaagttattgtaatgataaaaataatgcacaggcatggttacttaatattttctaacaggaaaagtcatccctatttccttgttttactgcacttaatattatttggttgaatttgttcagtataagctcgttcttgtgcaaaattaaataaatatttctcttaccttataa

SEQ ID NO: 19719 - DNA, 3279 bp, Homo sapiens
  source 1..3279: mol_type = unassigned DNA
gctcagttccccttgccttctgctgtatgctggtcccagagagcccgagtccgggtctccacgctttatttggcagggggcgcgcgggttccggagctgtccagcacctcctggccaagttctctgcgctctccgcgcccgggaagctctccgcgccggggaagctctccagcgccccgcccccggcagggaacctctccaccaggacacccggggcttcccaggctcgccatccgtccccaccagtctctacctactttgcccagctccacctcggcagtgcagcgtgttttggtggccttcctccgcacgccctggagggggagtgccctgcaccccggggctgctccggagcccagtgcacgagtgcacatgggcttccctcctttgcttaaagggcaggcgagcgctactcgctccagccttgcctcctgcagctgggtggtcttttttctctcctgtctttcaagacacgcgcccgaaatcgagggagggagacgatggactgagctgatccgcaccatggagtctcgggtcttactgagaacattctgtttgatcttcggtctcggagcagtttgggggcttggtgtggacccttccctacagattgacgtcttaacagagttagaacttggggagtccacgaccggagtgcgtcaggtcccggggctgcataatgggacgaaagcctttctctttcaagatactcccagaagcataaaagcatccactgctacagctgaacagttttttcagaagctgagaaataaacatgaatttactattttggtgaccctaaaacagacccacttaaattcaggagttattctctcaattcaccacttggatcacaggtacctggaactggaaagtagtggccatcggaatgaagtcagactgcattaccgctcaggcagtcaccgccctcacacagaagtgtttccttacattttggctgatgacaagtggcacaagctctccttagccatcagtgcttcccatttgattttacacattgactgcaataaaatttatgaaagggtagtagaaaagccctccacagacttgcctctaggcacaacattttggctaggacagagaaataatgcgcatggatattttaagggtataatgcaagatgtccaattacttgtcatgccccagggatttattgctcagtgcccagatcttaatcgcacctgtccaacttgcaatgacttccatggacttgtgcagaaaatcatggagctacaggatattttagccaaaacatcagccaagctgtctcgagctgaacagcgaatgaatagattggatcagtgctattgtgaaaggacttgcaccatgaagggaaccacctaccgagaatttgagtcctggatagacggctgtaagaactgcacatgcctgaatggaaccatccagtgtgaaactctaatctgcccaaatcctgactgcccacttaagtcggctcttgcgtatgtggatggcaaatgctgtaaggaatgcaaatcgatatgccaatttcaaggacgaacctactttgaaggagaaagaaatacagtctattcctcttctggagtatgtgttctctatgagtgcaaggaccagaccatgaaacttgttgagagttcaggctgtccagctttggattgtccagagtctcatcagataaccttgtctcacagctgttgcaaagtttgtaaaggttatgacttttgttctgaaaggcataactgcatggagaattccatctgcagaaatctgaatgacagggctgtttgtagctgtcgagatggttttagggctcttcgagaggataatgcctactgtgaagacatcgatgagtgtgctgaagggcgccattactgtcgtgaaaatacaatgtgtgtcaacaccccgggttcttttatgtgcatctgcaaaactggatacatcagaattgatgattattcatgtacagaacatgatgagtgtatcacaaatcagcacaactgtgatgaaaatgctttatgcttcaacactgttggaggacacaactgtgtttgcaagccgggctatacagggaatggaacgacatgcaaagcattttgcaaagatggctgtaggaatggaggagcctgtattgccgctaatgtgtgtgcctgcccacaaggcttcactggacccagctgtgaaacggacattgatgaatgctctgatggttttgttcaatgtgacagtcgtgctaattgcattaacctgcctggatggtaccactgtgagtgcagagatggctaccatgacaatgggatgttttcaccaagtggagaatcgtgtgaagatattgatgagtgtgggaccgggaggcacagctgtgccaatgataccatttgcttcaatttggatggcggatatgattgtcgatgtcctcatggaaagaattgcacaggggactgcatccatgatggaaaagttaagcacaatggtcagatttgggtgttggaaaatgacaggtgctctgtgtgctcatgtcagaatggattcgttatgtgtcgacggatggtctgtgactgtgagaatcccacagttgatcttttttgctgccctgaatgtgacccaaggcttagtagtcagtgcctccatcaaaatggggaaactttgtataacagtggtgacacctgggtccagaattgtcaacagtgccgctgcttgcaaggggaagttgattgttggcccctgccttgcccagatgtggagtgtgaattcagcattctcccagagaatgagtgctgcccgcgctgtgtcacagacccttgccaggctgacaccatccgcaatgacatcaccaagacttgcctggacgaaatgaatgtggttcgcttcaccgggtcctcttggatcaaacatggcactgagtgtactctctgccagtgcaagaatggccacatctgttgctcagtggatccacagtgccttcaggaactgtgaagttaactgtctcatgggagatttctgttaaaagaatgttctttcattaaaagaccaaaaagaagttaaaacttaaattgggtgatttgtgggcagctaaatgcagctttgttaatagctgagtgaactttcaattatgaaatttgtggagcttgacaaaatcacaaaaggaaaattactggggcaaaattagacctcaagtctgcctctactgtgtctcacatcaccatgtagaagaatgggcgtacagtatataccgtgacatcctgaaccctggatagaaagcctgagcccattggatctgtg

SEQ ID NO: 19720 - DNA, 3196 bp, Homo sapiens
  source 1..3196: mol_type = unassigned DNA
ggaggagcagtctctccgcgcgtctcccggagctttctccattgtctctgcctttacaacagagggagacgatggactgagctgatccgcaccatggagtctcgggtcttactgagaacattctgtttgatcttcggtctcggagcagtttgggggcttggtgtggacccttccctacagattgacgtcttaacagagttagaacttggggagtccacgaccggagtgcgtcaggtcccggggctgcataatgggacgaaagcctttctctttcaagatactcccagaagcataaaagcatccactgctacagctgaacagttttttcagaagctgagaaataaacatgaatttactattttggtgaccctaaaacagacccacttaaattcaggagttattctctcaattcaccacttggatcacaggtacctggaactggaaagtagtggccatcggaatgaagtcagactgcattaccgctcaggcagtcaccgccctcacacagaagtgtttccttacattttggctgatgacaagtggcacaagctctccttagccatcagtgcttcccatttgattttacacattgactgcaataaaatttatgaaagggtagtagaaaagccctccacagacttgcctctaggcacaacattttggctaggacagagaaataatgcgcatggatattttaagggtataatgcaagatgtccaattacttgtcatgccccagggatttattgctcagtgcccagatcttaatcgcacctgtccaacttgcaatgacttccatggacttgtgcagaaaatcatggagctacaggatattttagccaaaacatcagccaagctgtctcgagctgaacagcgaatgaatagattggatcagtgctattgtgaaaggacttgcaccatgaagggaaccacctaccgagaatttgagtcctggatagacggctgtaagaactgcacatgcctgaatggaaccatccagtgtgaaactctaatctgcccaaatcctgactgcccacttaagtcggctcttgcgtatgtggatggcaaatgctgtaaggaatgcaaatcgatatgccaatttcaaggacgaacctactttgaaggagaaagaaatacagtctattcctcttctggagtatgtgttctctatgagtgcaaggaccagaccatgaaacttgttgagagttcaggctgtccagctttggattgtccagagtctcatcagataaccttgtctcacagctgttgcaaagtttgtaaaggttatgacttttgttctgaaaggcataactgcatggagaattccatctgcagaaatctgaatgacagggctgtttgtagctgtcgagatggttttagggctcttcgagaggataatgcctactgtgaagacatcgatgagtgtgctgaagggcgccattactgtcgtgaaaatacaatgtgtgtcaacaccccgggttcttttatgtgcatctgcaaaactggatacatcagaattgatgattattcatgtacagaacatgatgagtgtatcacaaatcagcacaactgtgatgaaaatgctttatgcttcaacactgttggaggacacaactgtgtttgcaagccgggctatacagggaatggaacgacatgcaaagcattttgcaaagatggctgtaggaatggaggagcctgtattgccgctaatgtgtgtgcctgcccacaaggcttcactggacccagctgtgaaacggacattgatgaatgctctgatggttttgttcaatgtgacagtcgtgctaattgcattaacctgcctggatggtaccactgtgagtgcagagatggctaccatgacaatgggatgttttcaccaagtggagaatcgtgtgaagatattgatgagtgtgggaccgggaggcacagctgtgccaatgataccatttgcttcaatttggatggcggatatgattgtcgatgtcctcatggaaagaattgcacaggggactgcatccatgatggaaaagttaagcacaatggtcagatttgggtgttggaaaatgacaggtgctctgtgtgctcatgtcagaatggattcgttatgtgtcgacggatggtctgtgactgtgagaatcccacagttgatcttttttgctgccctgaatgtgacccaaggcttagtagtcagtgcctccatcaaaatggggaaactttgtataacagtggtgacacctgggtccagaattgtcaacagtgccgctgcttgcaaggggaagttgattgttggcccctgccttgcccagatgtggagtgtgaattcagcattctcccagagaatgagtgctgcccgcgctgtgtcacagacccttgccaggctgacaccatccgcaatgacatcaccaagacttgcctggacgaaatgaatgtggttcgcttcaccgggtcctcttggatcaaacatggcactgagtgtactctctgccagtgcaagaatggccacatctgttgctcagtggatccacagtgccttcaggaactgtgaagttaactgtctcatgggagatttctgttaaaagaatgttctttcattaaaagaccaaaaagaagttaaaacttaaattgggtgatttgtgggcagctaaatgcagctttgttaatagctgagtgaactttcaattatgaaatttgtggagcttgacaaaatcacaaaaggaaaattactggggcaaaattagacctcaagtctgcctctactgtgtctcacatcaccatgtagaagaatgggcgtacagtatataccgtgacatcctgaaccctggatagaaagcctgagcccattggatctgtgaaagcctctagcttcactggtgcagaaaattttcctctagatcagaatcttcaagaatcagttaggttcctcactgcaagaaataaaatgtcaggcagtgaatgaattatattttcagaagtaaagcaaagaagctataacatgttatgtacagtacactctgaaaagaaatctgaaacaagttattgtaatgataaaaataatgcacaggcatggttacttaatattttctaacaggaaaagtcatccctatttccttgttttactgcacttaatattatttggttgaatttgttcagtataagctcgttcttgtgcaaaattaaataaatatttctcttacctt

SEQ ID NO: 19721 - DNA, 2321 bp, Homo sapiens
  source 1..2321: mol_type = unassigned DNA
attgtctctgcctttacaacagagggagacgatggactgagctgatccgcaccatggagtctcgggtcttactgagaacattctgtttgatcttcggtctcggagcagaccgcgaggcggatcacgcccctagtccagggtcggagggctgagggggaactttgcagagagaagggtttaaaggaggtcatggaaacgggactgggtgctccgctatttaaagcttggctgctgatctcagtttgggggcttggtgtggacccttccctacagattgacgtcttaacagagttagaacttggggagtccacgaccggagtgcgtcaggtcccggggctgcataatgggacgaaagcctttctctttcaagatactcccagaagcataaaagcatccactgctacagctgaacagttttttcagaagctgagaaataaacatgaatttactattttggtgaccctaaaacagacccacttaaattcaggagttattctctcaattcaccacttggatcacaggtacctggaactggaaagtagtggccatcggaatgaagtcagactgcattaccgctcaggcagtcaccgccctcacacagaagtgtttccttacattttggctgatgacaagtggcacaagctctccttagccatcagtgcttcccatttgattttacacattgactgcaataaaatttatgaaagggtagtagaaaagccctccacagacttgcctctaggcacaacattttggctaggacagagaaataatgcgcatggatattttaagggtataatgcaagatgtccaattacttgtcatgccccagggatttattgctcagtgcccagatcttaatcgcacctgtccaacttgcaatgacttccatggacttgtgcagaaaatcatggagctacaggatattttagccaaaacatcagccaagctgtctcgagctgaacagcgaatgaatagattggatcagtgctattgtgaaaggacttgcaccatgaagggaaccacctaccgagaatttgagtcctggatagacggctgtaagaactgcacatgcctgaatggaaccatccagtgtgaaactctaatctgcccaaatcctgactgcccacttaagtcggctcttgcgtatgtggatggcaaatgctgtaaggaatgcaaatcgatatgccaatttcaaggacgaacctactttgaaggagaaagaaatacagtctattcctcttctggagtatgtgttctctatgagtgcaaggaccagaccatgaaacttgttgagagttcaggctgtccagctttggattgtccagagtctcatcagataaccttgtctcacagctgttgcaaagtttgtaaaggttatgacttttgttctgaaaggcataactgcatggagaattccatctgcagaaatctgaatgacagggctgtttgtagctgtcgagatggttttagggctcttcgagaggataatgcctactgtgaagacatcgatgagtgtgctgaagggcgccattactgtcgtgaaaatacaatgtgtgtcaacaccccgggttcttttatgtgcatctgcaaaactggatacatcagaattgatgattattcatgtacagaacatgatgagtgtatcacaaatcagcacaactgtgatgaaaatgctttatgcttcaacactgttggaggacacaactgtgtttgcaagccgggctatacagggaatggaacgacatgcaaagcattttgcaaagatggctgtaggaatggaggagcctgtattgccgctaatgtgtgtgcctgcccacaaggcttcactggacccagctgtgaaacggacattgatgaatgctctgatggttttgttcaatgtgacagtcgtgctaattgcatttgcctggtaccactgtgagtgcagagatggctaccatgacaatgggatgttttcaccaagtggagaatcgtgtgaagatattgatgagtgtgggaccgggaggcacagctgtgccaatgataccatttgcttcaatttggatggcggatatgattgtcgatgtcctcatggaaagaattgcacaggggactgcatccatgatggaaaagttaagcacaatggtcagatttgggtgttggaaaatgacaggtgctctgtgtgctcatgtcagaatggattcgttatgtgtcgacggatggtctgtgactgtgagaatcccacagttgatcttttttgctgccctgaatgtgacccaaggcttagtagtcagtgcctccatcaaaatggggaaactttgtataacagtggtgacacct

SEQ ID NO: 19722 - DNA, 586 bp, Homo sapiens
  source 1..586: mol_type = unassigned DNA
gagtggccgcagagctggggctggggaaagggatggctcccgcctcggggcagcatgggctggctggggaagcctcgcttttcccggacccaaagtaggtctggagtgggaagcttggagtaagggggcgggtttggatatggattttttttttttctgtgcttgccttggagaccgcgaggcggatcacgcccctagtccagggtcggagggctgagggggaactttgcagagagaagggtttaaaggaggtcatggaaacgggactgggtgctccgctatttaaagcttggctgctgatctcagtttgggggcttggtgtggacccttccctacagattgacgtcttaacagagttagaacttggggagtccacgaccggagtgcgtcaggtcccggggctgcataatgggacgaaagcctttctctttcaagatactcccagaagcataaaagcatccactgctacagctgaacagttttttcagaagctgagaaataaacatgaatttactattttggtgaccctaaaacagacccacttaaattcaggagttattctctcaattcaccacttggatcacag

SEQ ID NO: 19723 - DNA, 3036 bp, Homo sapiens
  source 1..3036: mol_type = unassigned DNA
attgtctctgcctttacaacagagggagacgatggactgagctgatccgcaccatggagtctcgggtcttactgagaacattctgtttgatcttcggtctcggagcagaccgcgaggcggatcacgcccctagtccagggtcggagggctgagggggaactttgcagagagaagggtttaaaggaggtcatggaaacgggactgggtgctccgctatttaaagcttggctgctgatctcagtttgggggcttggtgtggacccttccctacagattgacgtcttaacagagttagaacttggggagtccacgaccggagtgcgtcaggtcccggggctgcataatgggacgaaagcctttctctttcaagatactcccagaagcataaaagcatccactgctacagctgaacagttttttcagaagctgagaaataaacatgaatttactattttggtgaccctaaaacagacccacttaaattcaggagttattctctcaattcaccacttggatcacaggtacctggaactggaaagtagtggccatcggaatgaagtcagactgcattaccgctcaggcagtcaccgccctcacacagaagtgtttccttacattttggctgatgacaagtggcacaagctctccttagccatcagtgcttcccatttgattttacacattgactgcaataaaatttatgaaagggtagtagaaaagccctccacagacttgcctctaggcacaacattttggctaggacagagaaataatgcgcatggatattttaagggtataatgcaagatgtccaattacttgtcatgccccagggatttattgctcagtgcccagatcttaatcgcacctgtccaacttgcaatgacttccatggacttgtgcagaaaatcatggagctacaggatattttagccaaaacatcagccaagctgtctcgagctgaacagcgaatgaatagattggatcagtgctattgtgaaaggacttgcaccatgaagggaaccacctaccgagaatttgagtcctggatagacggctgtaagaactgcacatgcctgaatggaaccatccagtgtgaaactctaatctgcccaaatcctgactgcccacttaagtcggctcttgcgtatgtggatggcaaatgctgtaaggaatgcaaatcgatatgccaatttcaaggacgaacctactttgaaggagaaagaaatacagtctattcctcttctggagtatgtgttctctatgagtgcaaggaccagaccatgaaacttgttgagagttcaggctgtccagctttggattgtccagagtctcatcagataaccttgtctcacagctgttgcaaagtttgtaaaggttatgacttttgttctgaaaggcataactgcatggagaattccatctgcagaaatctgaatgacagggctgtttgtagctgtcgagatggttttagggctcttcgagaggataatgcctactgtgaagacatcgatgagtgtgctgaagggcgccattactgtcgtgaaaatacaatgtgtgtcaacaccccgggttcttttatgtgcatctgcaaaactggatacatcagaattgatgattattcatgtacagaacatgatgagtgtatcacaaatcagcacaactgtgatgaaaatgctttatgcttcaacactgttggaggacacaactgtgtttgcaagccgggctatacagggaatggaacgacatgcaaagcattttgcaaagatggctgtaggaatggaggagcctgtattgccgctaatgtgtgtgcctgcccacaaggcttcactggacccagctgtgaaacggacattgatgaatgctctgatggttttgttcaatgtgacagtcgtgctaattgcattaacctgcctggatggtaccactgtgagtgcagagatggctaccatgacaatgggatgttttcaccaagtggagaatcgtgtgaagatattgatgagtgtgggaccgggaggcacagctgtgccaatgataccatttgcttcaatttggatggcggatatgattgtcgatgtcctcatggaaagaattgcacaggggactgcatccatgatggaaaagttaagcacaatggtcagatttgggtgttggaaaatgacaggtgctctgtgtgctcatgtcagaatggattcgttatgtgtcgacggatggtctgtgactgtgagaatcccacagttgatcttttttgctgccctgaatgtgacccaaggcttagtagtcagtgcctccatcaaaatggggaaactttgtataacagtggtgacacctgggtccagaattgtcaacagtgccgctgcttgcaaggggaagttgattgttggcccctgccttgcccagatgtggagtgtgaattcagcattctcccagagaatgagtgctgcccgcgctgtgtcacagacccttgccaggctgacaccatccgcaatgacatcaccaagacttgcctggacgaaatgaatgtggttcgcttcaccgggtcctcttggatcaaacatggcactgagtgtactctctgccagtgcaagaatggccacatctgttgctcagtggatccacagtgccttcaggaactgtgaagttaactgtctcatgggagatttctgttaaaagaatgttctttcattaaaagaccaaaaagaagttaaaacttaaattgggtgatttgtgggcagctaaatgcagctttgttaatagctgagtgaactttcaattatgaaatttgtggagcttgacaaaatcacaaaaggaaaattactggggcaaaattagacctcaagtctgcctctactgtgtctcacatcaccatgtagaagaatgggcgtacagtatataccgtgacatcctgaaccctggatagaaagcctgagcccattggatctgtgaaagcctctagcttcactggtgcagaaaattttcctctagatcagaatcttcaagaatcagttaggttcctcactgcaagaaataaaatgtca

SEQ ID NO: 19724 - DNA, 500 bp, Homo sapiens
  source 1..500: mol_type = unassigned DNA
acttctttggatgctattttgaggatagactgaagggaatgatgatagcagggagaccagttaggatgatgacttagaccatggcagttgtgggtggagatggtaactgccagattctgtctatatattgagaagtagcaggcaggatgtactgagcaattggatgtgggatgtgagagaaatgactccaaggtttttggcctgagcaatcagaaggatccatctaacatttactgaaataaggaagatgctttattcaatctaaaagtgaaaaaagaaccttttagacattattattataaaatgtctataagaagacttctcattttaatcctcaaaatcactctggttatggattcctataagtgtatcctgttgaagtttgctgagctccttgaatctagggagacgatggactgagctgatccgcaccatggagtctcgggtcttactgagaacattctgtttgatcttcggtctcggagcagtttgggggcttg

SEQ ID NO: 19725 - DNA, 1053 bp, Homo sapiens
  source 1..1053: mol_type = unassigned DNA
aaaccacatgtgaactgaagctgtcaggttccacaaaggcagaagtactctctgaaaagagggagacgatggactgagctgatccgcaccatggagtctcgggtcttactgagaacattctgtttgatcttcggtctcggagcagtttgggggcttggtgtggacccttccctacagattgacgtcttaacagagttagaacttggggagtccacgaccggagtgcgtcaggtcccggggctgcataatgggacgaaagcctttctctttcaagatactcccagaagcataaaagcatccactgctacagctgaacagttttttcagaagctgagaaataaacatgaatttactattttggtgaccctaaaacagacccacttaaattcaggagttattctctcaattcaccacttggatcacaggtacctggaactggaaagtagtggccatcggaatgaagtcagactgcattaccgctcaggcagtcaccgccctcacacagaagtgtttccttacattttggctgatgacaagtggcacaagctctccttagccatcagtgcttcccatttgattttacacattgactgcaataaaatttatgaaagggtagtagaaaagccctccacagacttgcctctaggcacaacattttggctaggacagagaaataatgcgcatggatattttaagggtataatgcaagatgtccaattacttgtcatgccccagggatttattgctcagtgcccagatcttaatcgcacctgtccaacttgcaatgacttccatggacttgtgcagaaaatcatggagctacaggatattttagccaaaacatcagccaagctgtctcgagctgaacagcgaatgaatagattggatcagtgctattgtgaaaggacttgcaccatgaagggaaccacctaccgagaatttgagtcctggatagacggctgtaagaactgcacatgcctgaatggaaccatccagtgtgaaactctaatctgcccaaatcctgactgcccacttaagtcggctcttgcgtat

SEQ ID NO: 19726 - DNA, 7088 bp, Homo sapiens
  source 1..7088: mol_type = unassigned DNA
gagggaggcgccctggagtctcccctccagcgagaggggctgcgcgggccgggccgggccgggctgggctggagcagcggcggccgcgggagccgagcttgcagcgagggaccggctgaggcgcgcgggagggaaggaggcaagggctccgcggcgctgtcgccgccgctgccgctcactctcggggaagagatggcggcggagcggggagcccggcgactcctcagcaccccctccttctggctctactgcctgctgctgctcgggcgccgggcgccgggcgccgcggccgccaggagcggctccgcgccgcagtccccaggagccagcattcgaacgttcactccattttattttctggtggagccggtggatacactctcagttagaggctcttctgttatattaaactgttcagcatattctgagccttctccaaaaattgaatggaaaaaagatggaacttttttaaacttagtatcagatgatcgacgccagcttctcccggatggatctttatttatcagcaatgtggtgcattccaaacacaataaacctgatgaaggttattatcagtgtgtggccactgttgagagtcttggaactattatcagtagaacagcgaagctcatagtagcaggtcttccaagatttaccagccaaccagaaccttcctcagtttatgctgggaacaatgcaattctgaattgtgaagttaatgcagatttggtcccatttgtgaggtgggaacagaacagacaaccccttcttctggatgatagagttatcaaacttccaagtggaatgctggttatcagcaatgcaactgaaggagatggcgggctttatcgctgcgtagtggaaagtggtgggccaccaaagtatagtgatgaagttgaattgaaggttcttccagatcctgaggtgatatcagacttggtatttttgaaacagccttctcccttagtcagagtcattggtcaggatgtagtgttgccatgtgttgcttcaggacttcctactccaaccattaaatggatgaaaaatgaggaggcacttgacacagaaagctctgaaagattggtattgctggcaggtggtagcctggagatcagtgatgttactgaggatgatgctgggacttatttttgtatagctgataatggaaatgagacaattgaagctcaagcagagcttacagtgcaagctcaacctgaattcctgaagcagcctactaatatatatgctcacgaatctatggatattgtatttgaatgtgaagtgactggaaaaccaactccaactgtgaagtgggtcaaaaatggggatatggttatcccaagtgattattttaagattgtaaaggaacataatcttcaagttttgggtctggtgaaatcagatgaagggttctatcagtgcattgctgaaaatgatgttggaaatgcacaagctggagcccaactgataatccttgaacatgcaccagccacaacgggaccactgccttcagctcctcgggatgtcgtggcctccctggtctctacccgcttcatcaaattgacgtggcggacacctgcatcagatcctcacggagacaaccttacctactctgtgttctacaccaaggaagggattgctagggaacgtgttgagaataccagtcacccaggagagatgcaagtaaccattcaaaacctaatgccagcgaccgtgtacatctttagagttatggctcaaaataagcatggctcaggagagagttcagctccactgcgagtagaaacacaacctgaggttcagctccctggcccagcacctaaccttcgtgcatatgcagcttcgcctacctccatcactgttacgtgggaaacaccagtgtctggcaatggggaaattcagaattataaattgtactacatggaaaaggggactgataaagaacaggatgttgatgtttcaagtcactcttacaccattaatgggttgaaaaaatatacagagtatagtttccgagtggtggcctacaataaacatggtcctggagtttccacaccagatgttgctgttcgaacattgtcagatgttcccagtgctgctcctcagaatctgtccttggaagtgagaaattcaaagagtattatgattcactggcagccacctgctccagccacacaaaatgggcagattactggctacaagattcgctaccgaaaggcctcccgaaagagtgatgtcactgagaccttggtaagcgggacacagctgtctcagctgattgaaggtcttgatcgggggactgagtataatttccgagtggctgctctaacaatcaatggtacaggcccggcaactgactggctgtctgctgaaacttttgaaagtgacctagatgaaactcgtgttcctgaagtgcctagctctcttcacgtacgcccgctcgttactagcatcgtagtgagctggactcctccagagaatcagaacattgtggtcagaggttacgccattggttatggcattggcagccctcatgcccagaccatcaaagtggactataaacagcgctattacaccattgaaaatctggatcccagctctcactatgtgattaccctgaaagcatttaataacgtgggtgaaggcatccccctgtatgagagtgctgtgaccaggcctcacacagacacttctgaagttgatttatttgttattaatgctccatacactccagtgccagatcccactcccatgatgccaccagtgggagttcaggcttccattctgagtcatgacaccatcaggattacgtgggcagacaactcgctgcccaagcaccagaagattacagactcccgatactacaccgtccgatggaaaaccaacatcccagcaaacaccaagtacaagaatgcaaatgcaaccactttgagttatttggtgactggtttaaagccgaatacactctatgaattctctgtgatggtgaccaaaggtcgaagatcaagtacatggagtatgacagcccatgggaccacctttgaattagttccgacttctccacccaaggatgtgactgttgtgagtaaagaggggaaacctaagaccataattgtgaattggcagcctccctccgaagccaatggcaaaattacaggttacatcatatattacagtacagatgtgaatgcagagatacatgactgggttattgagcctgttgtgggaaacagactgactcaccagatacaagagttaactcttgacacaccatactacttcaaaatccaggcacggaactcaaagggcatgggacccatgtctgaagctgtccaattcagaacacctaaagcggactcctctgataaaatgcctaatgatcaagcctcagggtctggagggaaaggaagccggctgccagacctaggatccgactacaaacctccaatgagcggcagtaacagccctcatgggagccccacctctcctctggacagtaatatgctgctggtcataattgtttctgttggcgtcatcaccatcgtggtggttgtgattatcgctgtcttttgtacccgtcgtaccacctctcaccagaaaaagaaacgagctgcctgcaaatcagtgaatggctctcataagtacaaagggaattccaaagatgtgaaacctccagatctctggatccatcatgagagactggagctgaaacccattgataagtctccagacccaaaccccatcatgactgatactccaattcctcgcaactctcaagatatcacaccagttgacaactccatggacagcaatatccatcaaaggcgaaattcatacagagggcatgagtcagaggacagcatgtctacactggctggaaggcgaggaatgagaccaaaaatgatgatgccctttgactcccagccaccccagcctgtgattagtgcccatcccatccattccctcgataaccctcaccatcatttccactccagcagcctcgcttctccagctcgcagtcatctctaccacccgggcagcccatggcccattggcacatccatgtccctttcagacagggccaattccacagaatccgttcgaaatacccccagcactgacaccatgccagcctcttcgtctcaaacatgctgcactgatcaccaggaccctgaaggtgctaccagctcctcttacttggccagctcccaagaggaagattcaggccagagtcttcccactgcccatgttcgcccttcccacccattgaagagcttcgccgtgccagcaatcccgcctccaggacctcccacctatgatcctgcattgccaagcacaccattactgtcccagcaagctctgaaccatcacattcactcagtgaagacagcctccatcgggactctaggaaggagccggcctcctatgccagtggttgttcccagtgcccctgaagtgcaggagaccacaaggatgttggaagactccgagagtagctatgaaccagatgagctgaccaaagagatggcccacctggaaggactaatgaaggacctaaacgctatcacaacagcatgacgaccttcaccaggacctgacttcaaacctgagtctggaagtcttggaacttacccttgaaaacaaggaattgtacagagtacgagaggacagcacttgagaacacagaatgagccagcagactggccagcgcctctgtgtagggctggctccaggcatggccacctgccttcccctggtcagcctggaagaagcctgtgtcgaggcagcttccctttgcctgctgatattctgcaggactgggcaccatgggccaaaattttgtgtccagggaagaggcgagaagtgcaacctgcatttcactttgtggtcaggccgtgtctttgtgctgtgactgcatcacctttatggagtgtagacattggcatttatgtacaattttatttgtgtcttattttattttaccttcaaaaacaaaaacgccatccaaaaccaaggaagtccttggtgttctccacaagtggttgacatttgactgcttgttccaattatgtatggaaagtctttgacagtgtgggtcgttcctggggttggcttgttttttggtttcatttttattttttaattctgagtcattgcatcctctaccagctgttaatccatcactctgagggggaggaaatgttgcattgctgtttgtaagctttttttattatttttttattataattattaaaggcctgactctttcctctcatcactgtgagattacagatctatttgaattgaatgaaatgtaacattgaaaagacttgtttgttgctttctgtgcagtttcagtattggggcgggtggggggctgggggttggtaataggaaatggaggggctgctgaggtcctgtgaatgtttctgtcattgtactttcttccagaagcctgcagagaatggaagcatcttctttattgtcctttcctggcatgtccatccttattgtcactacgttgcaactggagtttgatttggatctggttttaaaattcttctgtgcaatagatgggtttgaggatttagcggccctgatgtcttggtcatagcctggtaagaatgtccatgctgaggagccagatgttgtatttctaactgcctgagtcacacagaatagggtaagagcctgaccccattctgtaaatcagaaagcaaggatggagaccctttcctgctgctattattggctctctttgaggaagttggaggttaaggaaggaacttgtttgtttccgtatacgactccttcttctctctagttcagtcttcagccagtccagcgctctcttccacacttcagagccccttcagagaaagcattagcaggaatgagacaaggcagagctgcagtgccccctgaggcttccacacatctttctgaatattatttttcaagtaacaagggcagggacagcggaaacagctgcccaccccccccatcccagcagctcagctaagccctgatgagaatgaagccacaggagttgtctgaggtgaacccagccgctcagccacacatggaagccattgcctttgcacatagttcttgggttctttttcctaaaaaggtaaggagctgaggtgtgtggttttttaatattaagaatatataatggaaaacacacgactgacgctcaggcatcttcccctactccccaacagatccccagaagacagcgtggaaggcagtgtagacagtaaatcgggcttcagttctatagccaagaagagatcagctgctgaaaccaccagtgggtaccccaggccacctgcctttgaacttggggatttgccatgtttgatcttgtcacatacttgcttttttacaagatgaactctttgtatttatgatttggggggcaatgaaaggtgcaatgcaggaactgctgctgccgagctcgctggtcacatgggggtgccaggcgggattctggaaaaccagtgcacttaaactgatcctgaagagagctgtcccagcactctggccaccaggagggccagattccccagaaactaccttttgcccaaagaacatgctcagtatttggggcatttcctcccacaaaccctgactgcttctgttacctcagggccttggtacctggatactgccacagaattggggcgggtgggggaggggcctatttttaaataaaataactgttcaaagttgggggttttttaaaaaattaagaaaaaggaaagctattctgtattgcaccttttcacaatttaatacattttcttacattttcctgtgattttcgaaactaaaccattgtgtgtcctgtagtgtcctggttgagctgccgctcagcagcttcctcggggggatttggaacacctgtgtctgtcgccgcactgcctgtgggaggggcccagagggctgctgggactggcgtctgtacacacttgtttggccttttctgtagttgatgctgtaaactctatggctttttaaaaacgatttcatgtttttatttagtattggaaatccaatacacttttttaatccaatcaaac

SEQ ID NO: 19727 - DNA, 7342 bp, Homo sapiens
  source 1..7342: mol_type = unassigned DNA
ggtcagcggctgcgcggccggccccctcccacgggagccgcgccagggcccagcaagagtcgggcgggatcgctattgtttttggcgagcacataaatccccgggccgacccactgcgcacccaggtttcctcccggaggcctttcggtttcctctgaggccctatatagaggctccaggcccggactgtgcagaggtgcgcgcccacgccggcctcccggaccagcctgagctcggagcgcctctcgccctcaggagggaggcgccctggagtctcccctccagcgagaggggctgcgcgggccgggccgggccgggctgggctggagcagcggcggccgcgggagccgagcttgcagcgagggaccggctgaggcgcgcgggagggaaggaggcaagggctccgcggcgctgtcgccgccgctgccgctcactctcggggaagagatggcggcggagcggggagcccggcgactcctcagcaccccctccttctggctctactgcctgctgctgctcgggcgccgggcgccgggcgccgcggccgccaggagcggctccgcgccgcagtccccaggagccagcattcgaacgttcactccattttattttctggtggagccggtggatacactctcagttagaggctcttctgttatattaaactgttcagcatattctgagccttctccaaaaattgaatggaaaaaagatggaacttttttaaacttagtatcagatgatcgacgccagcttctcccggatggatctttatttatcagcaatgtggtgcattccaaacacaataaacctgatgaaggttattatcagtgtgtggccactgttgagagtcttggaactattatcagtagaacagcgaagctcatagtagcaggtcttccaagatttaccagccaaccagaaccttcctcagtttatgctgggaacaatgcaattctgaattgtgaagttaatgcagatttggtcccatttgtgaggtgggaacagaacagacaaccccttcttctggatgatagagttatcaaacttccaagtggaatgctggttatcagcaatgcaactgaaggagatggcgggctttatcgctgcgtagtggaaagtggtgggccaccaaagtatagtgatgaagttgaattgaaggttcttccagatcctgaggtgatatcagacttggtatttttgaaacagccttctcccttagtcagagtcattggtcaggatgtagtgttgccatgtgttgcttcaggacttcctactccaaccattaaatggatgaaaaatgaggaggcacttgacacagaaagctctgaaagattggtattgctggcaggtggtagcctggagatcagtgatgttactgaggatgatgctgggacttatttttgtatagctgataatggaaatgagacaattgaagctcaagcagagcttacagtgcaagctcaacctgaattcctgaagcagcctactaatatatatgctcacgaatctatggatattgtatttgaatgtgaagtgactggaaaaccaactccaactgtgaagtgggtcaaaaatggggatatggttatcccaagtgattattttaagattgtaaaggaacataatcttcaagttttgggtctggtgaaatcagatgaagggttctatcagtgcattgctgaaaatgatgttggaaatgcacaagctggagcccaactgataatccttgaacatgcaccagccacaacgggaccactgccttcagctcctcgggatgtcgtggcctccctggtctctacccgcttcatcaaattgacgtggcggacacctgcatcagatcctcacggagacaaccttacctactctgtgttctacaccaaggaagggattgctagggaacgtgttgagaataccagtcacccaggagagatgcaagtaaccattcaaaacctaatgccagcgaccgtgtacatctttagagttatggctcaaaataagcatggctcaggagagagttcagctccactgcgagtagaaacacaacctgaggttcagctccctggcccagcacctaaccttcgtgcatatgcagcttcgcctacctccatcactgttacgtgggaaacaccagtgtctggcaatggggaaattcagaattataaattgtactacatggaaaaggggactgataaagaacaggatgttgatgtttcaagtcactcttacaccattaatgggttgaaaaaatatacagagtatagtttccgagtggtggcctacaataaacatggtcctggagtttccacaccagatgttgctgttcgaacattgtcagatgttcccagtgctgctcctcagaatctgtccttggaagtgagaaattcaaagagtattatgattcactggcagccacctgctccagccacacaaaatgggcagattactggctacaagattcgctaccgaaaggcctcccgaaagagtgatgtcactgagaccttggtaagcgggacacagctgtctcagctgattgaaggtcttgatcgggggactgagtataatttccgagtggctgctctaacaatcaatggtacaggcccggcaactgactggctgtctgctgaaacttttgaaagtgacctagatgaaactcgtgttcctgaagtgcctagctctcttcacgtacgcccgctcgttactagcatcgtagtgagctggactcctccagagaatcagaacattgtggtcagaggttacgccattggttatggcattggcagccctcatgcccagaccatcaaagtggactataaacagcgctattacaccattgaaaatctggatcccagctctcactatgtgattaccctgaaagcatttaataacgtgggtgaaggcatccccctgtatgagagtgctgtgaccaggcctcacacagacacttctgaagttgatttatttgttattaatgctccatacactccagtgccagatcccactcccatgatgccaccagtgggagttcaggcttccattctgagtcatgacaccatcaggattacgtgggcagacaactcgctgcccaagcaccagaagattacagactcccgatactacaccgtccgatggaaaaccaacatcccagcaaacaccaagtacaagaatgcaaatgcaaccactttgagttatttggtgactggtttaaagccgaatacactctatgaattctctgtgatggtgaccaaaggtcgaagatcaagtacatggagtatgacagcccatgggaccacctttgaattagttccgacttctccacccaaggatgtgactgttgtgagtaaagaggggaaacctaagaccataattgtgaattggcagcctccctccgaagccaatggcaaaattacaggttacatcatatattacagtacagatgtgaatgcagagatacatgactgggttattgagcctgttgtgggaaacagactgactcaccagatacaagagttaactcttgacacaccatactacttcaaaatccaggcacggaactcaaagggcatgggacccatgtctgaagctgtccaattcagaacacctaaagcggactcctctgataaaatgcctaatgatcaagcctcagggtctggagggaaaggaagccggctgccagacctaggatccgactacaaacctccaatgagcggcagtaacagccctcatgggagccccacctctcctctggacagtaatatgctgctggtcataattgtttctgttggcgtcatcaccatcgtggtggttgtgattatcgctgtcttttgtacccgtcgtaccacctctcaccagaaaaagaaacgagctgcctgcaaatcagtgaatggctctcataagtacaaagggaattccaaagatgtgaaacctccagatctctggatccatcatgagagactggagctgaaacccattgataagtctccagacccaaaccccatcatgactgatactccaattcctcgcaactctcaagatatcacaccagttgacaactccatggacagcaatatccatcaaaggcgaaattcatacagagggcatgagtcagaggacagcatgtctacactggctggaaggcgaggaatgagaccaaaaatgatgatgccctttgactcccagccaccccagcctgtgattagtgcccatcccatccattccctcgataaccctcaccatcatttccactccagcagcctcgcttctccagctcgcagtcatctctaccacccgggcagcccatggcccattggcacatccatgtccctttcagacagggccaattccacagaatccgttcgaaatacccccagcactgacaccatgccagcctcttcgtctcaaacatgctgcactgatcaccaggaccctgaaggtgctaccagctcctcttacttggccagctcccaagaggaagattcaggccagagtcttcccactgcccatgttcgcccttcccacccattgaagagcttcgccgtgccagcaatcccgcctccaggacctcccacctatgatcctgcattgccaagcacaccattactgtcccagcaagctctgaaccatcacattcactcagtgaagacagcctccatcgggactctaggaaggagccggcctcctatgccagtggttgttcccagtgcccctgaagtgcaggagaccacaaggatgttggaagactccgagagtagctatgaaccagatgagctgaccaaagagatggcccacctggaaggactaatgaaggacctaaacgctatcacaacagcatgacgaccttcaccaggacctgacttcaaacctgagtctggaagtcttggaacttacccttgaaaacaaggaattgtacagagtacgagaggacagcacttgagaacacagaatgagccagcagactggccagcgcctctgtgtagggctggctccaggcatggccacctgccttcccctggtcagcctggaagaagcctgtgtcgaggcagcttccctttgcctgctgatattctgcaggactgggcaccatgggccaaaattttgtgtccagggaagaggcgagaagtgcaacctgcatttcactttgtggtcaggccgtgtctttgtgctgtgactgcatcacctttatggagtgtagacattggcatttatgtacaattttatttgtgtcttattttattttaccttcaaaaacaaaaacgccatccaaaaccaaggaagtccttggtgttctccacaagtggttgacatttgactgcttgttccaattatgtatggaaagtctttgacagtgtgggtcgttcctggggttggcttgttttttggtttcatttttattttttaattctgagtcattgcatcctctaccagctgttaatccatcactctgagggggaggaaatgttgcattgctgtttgtaagctttttttattatttttttattataattattaaaggcctgactctttcctctcatcactgtgagattacagatctatttgaattgaatgaaatgtaacattgaaaagacttgtttgttgctttctgtgcagtttcagtattggggcgggtggggggctgggggttggtaataggaaatggaggggctgctgaggtcctgtgaatgtttctgtcattgtactttcttccagaagcctgcagagaatggaagcatcttctttattgtcctttcctggcatgtccatccttattgtcactacgttgcaactggagtttgatttggatctggttttaaaattcttctgtgcaatagatgggtttgaggatttagcggccctgatgtcttggtcatagcctggtaagaatgtccatgctgaggagccagatgttgtatttctaactgcctgagtcacacagaatagggtaagagcctgaccccattctgtaaatcagaaagcaaggatggagaccctttcctgctgctattattggctctctttgaggaagttggaggttaaggaaggaacttgtttgtttccgtatacgactccttcttctctctagttcagtcttcagccagtccagcgctctcttccacacttcagagccccttcagagaaagcattagcaggaatgagacaaggcagagctgcagtgccccctgaggcttccacacatctttctgaatattatttttcaagtaacaagggcagggacagcggaaacagctgcccaccccccccatcccagcagctcagctaagccctgatgagaatgaagccacaggagttgtctgaggtgaacccagccgctcagccacacatggaagccattgcctttgcacatagttcttgggttctttttcctaaaaaggtaaggagctgaggtgtgtggttttttaatattaagaatatataatggaaaacacacgactgacgctcaggcatcttcccctactccccaacagatccccagaagacagcgtggaaggcagtgtagacagtaaatcgggcttcagttctatagccaagaagagatcagctgctgaaaccaccagtgggtaccccaggccacctgcctttgaacttggggatttgccatgtttgatcttgtcacatacttgcttttttacaagatgaactctttgtatttatgatttggggggcaatgaaaggtgcaatgcaggaactgctgctgccgagctcgctggtcacatgggggtgccaggcgggattctggaaaaccagtgcacttaaactgatcctgaagagagctgtcccagcactctggccaccaggagggccagattccccagaaactaccttttgcccaaagaacatgctcagtatttggggcatttcctcccacaaaccctgactgcttctgttacctcagggccttggtacctggatactgccacagaattggggcgggtgggggaggggcctatttttaaataaaataactgttcaaagttgggggttttttaaaaaattaagaaaaaggaaagctattctgtattgcaccttttcacaatttaatacattttcttacattttcctgtgattttcgaaactaaaccattgtgtgtcctgtagtgtcctggttgagctgccgctcagcagcttcctcggggggatttggaacacctgtgtctgtcgccgcactgcctgtgggaggggcccagagggctgctgggactggcgtctgtacacacttgtttggccttttctgtagttgatgctgtaaactctatggctttttaaaaacgatttcatgtttttatttagtattggaaatccaatacacttttttaatccaatcaaa

SEQ ID NO: 19728 - DNA, 7067 bp, Homo sapiens
  source 1..7067: mol_type = unassigned DNA
gagggaggcgccctggagtctcccctccagcgagaggggctgcgcgggccgggccgggccgggctgggctggagcagcggcggccgcgggagccgagcttgcagcgagggaccggctgaggcgcgcgggagggaaggaggcaagggctccgcggcgctgtcgccgccgctgccgctcactctcggggaagagatggcggcggagcggggagcccggcgactcctcagcaccccctccttctggctctactgcctgctgctgctcgggcgccgggcgccgggcgccgcggccgccaggagcggctccgcgccgcagtccccaggagccagcattcgaacgttcactccattttattttctggtggagccggtggatacactctcagttagaggctcttctgttatattaaactgttcagcatattctgagccttctccaaaaattgaatggaaaaaagatggaacttttttaaacttagtatcagatgatcgacgccagcttctcccggatggatctttatttatcagcaatgtggtgcattccaaacacaataaacctgatgaaggttattatcagtgtgtggccactgttgagagtcttggaactattatcagtagaacagcgaagctcatagtagcaggtcttccaagatttaccagccaaccagaaccttcctcagtttatgctgggaacaatgcaattctgaattgtgaagttaatgcagatttggtcccatttgtgaggtgggaacagaacagacaaccccttcttctggatgatagagttatcaaacttccaagtggaatgctggttatcagcaatgcaactgaaggagatggcgggctttatcgctgcgtagtggaaagtggtgggccaccaaagtatagtgatgaagttgaattgaaggttcttccagatcctgaggtgatatcagacttggtatttttgaaacagccttctcccttagtcagagtcattggtcaggatgtagtgttgccatgtgttgcttcaggacttcctactccaaccattaaatggatgaaaaatgaggaggcacttgacacagaaagctctgaaagattggtattgctggcaggtggtagcctggagatcagtgatgttactgaggatgatgctgggacttatttttgtatagctgataatggaaatgagacaattgaagctcaagcagagcttacagtgcaagctcaacctgaattcctgaagcagcctactaatatatatgctcacgaatctatggatattgtatttgaatgtgaagtgactggaaaaccaactccaactgtgaagtgggtcaaaaatggggatatggttatcccaagtgattattttaagattgtaaaggaacataatcttcaagttttgggtctggtgaaatcagatgaagggttctatcagtgcattgctgaaaatgatgttggaaatgcacaagctggagcccaactgataatccttgaacatgatgttgccatcccaacattacctcccacttcactgaccagtgccactactgaccatctagcaccagccacaacgggaccactgccttcagctcctcgggatgtcgtggcctccctggtctctacccgcttcatcaaattgacgtggcggacacctgcatcagatcctcacggagacaaccttacctactctgtgttctacaccaaggaagggattgctagggaacgtgttgagaataccagtcacccaggagagatgcaagtaaccattcaaaacctaatgccagcgaccgtgtacatctttagagttatggctcaaaataagcatggctcaggagagagttcagctccactgcgagtagaaacacaacctgaggttcagctccctggcccagcacctaaccttcgtgcatatgcagcttcgcctacctccatcactgttacgtgggaaacaccagtgtctggcaatggggaaattcagaattataaattgtactacatggaaaaggggactgataaagaacaggatgttgatgtttcaagtcactcttacaccattaatgggttgaaaaaatatacagagtatagtttccgagtggtggcctacaataaacatggtcctggagtttccacaccagatgttgctgttcgaacattgtcagatgttcccagtgctgctcctcagaatctgtccttggaagtgagaaattcaaagagtattatgattcactggcagccacctgctccagccacacaaaatgggcagattactggctacaagattcgctaccgaaaggcctcccgaaagagtgatgtcactgagaccttggtaagcgggacacagctgtctcagctgattgaaggtcttgatcgggggactgagtataatttccgagtggctgctctaacaatcaatggtacaggcccggcaactgactggctgtctgctgaaacttttgaaagtgacctagatgaaactcgtgttcctgaagtgcctagctctcttcacgtacgcccgctcgttactagcatcgtagtgagctggactcctccagagaatcagaacattgtggtcagaggttacgccattggttatggcattggcagccctcatgcccagaccatcaaagtggactataaacagcgctattacaccattgaaaatctggatcccagctctcactatgtgattaccctgaaagcatttaataacgtgggtgaaggcatccccctgtatgagagtgctgtgaccaggcctcacacagtgccagatcccactcccatgatgccaccagtgggagttcaggcttccattctgagtcatgacaccatcaggattacgtgggcagacaactcgctgcccaagcaccagaagattacagactcccgatactacaccgtccgatggaaaaccaacatcccagcaaacaccaagtacaagaatgcaaatgcaaccactttgagttatttggtgactggtttaaagccgaatacactctatgaattctctgtgatggtgaccaaaggtcgaagatcaagtacatggagtatgacagcccatgggaccacctttgaattagttccgacttctccacccaaggatgtgactgttgtgagtaaagaggggaaacctaagaccataattgtgaattggcagcctccctccgaagccaatggcaaaattacaggttacatcatatattacagtacagatgtgaatgcagagatacatgactgggttattgagcctgttgtgggaaacagactgactcaccagatacaagagttaactcttgacacaccatactacttcaaaatccaggcacggaactcaaagggcatgggacccatgtctgaagctgtccaattcagaacacctaaagcctcagggtctggagggaaaggaagccggctgccagacctaggatccgactacaaacctccaatgagcggcagtaacagccctcatgggagccccacctctcctctggacagtaatatgctgctggtcataattgtttctgttggcgtcatcaccatcgtggtggttgtgattatcgctgtcttttgtacccgtcgtaccacctctcaccagaaaaagaaacgagctgcctgcaaatcagtgaatggctctcataagtacaaagggaattccaaagatgtgaaacctccagatctctggatccatcatgagagactggagctgaaacccattgataagtctccagacccaaaccccatcatgactgatactccaattcctcgcaactctcaagatatcacaccagttgacaactccatggacagcaatatccatcaaaggcgaaattcatacagagggcatgagtcagaggacagcatgtctacactggctggaaggcgaggaatgagaccaaaaatgatgatgccctttgactcccagccaccccagcctgtgattagtgcccatcccatccattccctcgataaccctcaccatcatttccactccagcagcctcgcttctccagctcgcagtcatctctaccacccgggcagcccatggcccattggcacatccatgtccctttcagacagggccaattccacagaatccgttcgaaatacccccagcactgacaccatgccagcctcttcgtctcaaacatgctgcactgatcaccaggaccctgaaggtgctaccagctcctcttacttggccagctcccaagaggaagattcaggccagagtcttcccactgcccatgttcgcccttcccacccattgaagagcttcgccgtgccagcaatcccgcctccaggacctcccacctatgatcctgcattgccaagcacaccattactgtcccagcaagctctgaaccatcacattcactcagtgaagacagcctccatcgggactctaggaaggagccggcctcctatgccagtggttgttcccagtgcccctgaagtgcaggagaccacaaggatgttggaagactccgagagtagctatgaaccagatgagctgaccaaagagatggcccacctggaaggactaatgaaggacctaaacgctatcacaacagcatgacgaccttcaccaggacctgacttcaaacctgagtctggaagtcttggaacttacccttgaaaacaaggaattgtacagagtacgagaggacagcacttgagaacacagaatgagccagcagactggccagcgcctctgtgtagggctggctccaggcatggccacctgccttcccctggtcagcctggaagaagcctgtgtcgaggcagcttccctttgcctgctgatattctgcaggactgggcaccatgggccaaaattttgtgtccagggaagaggcgagaagtgcaacctgcatttcactttgtggtcaggccgtgtctttgtgctgtgactgcatcacctttatggagtgtagacattggcatttatgtacaattttatttgtgtcttattttattttaccttcaaaaacaaaaacgccatccaaaaccaaggaagtccttggtgttctccacaagtggttgacatttgactgcttgttccaattatgtatggaaagtctttgacagtgtgggtcgttcctggggttggcttgttttttggtttcatttttattttttaattctgagtcattgcatcctctaccagctgttaatccatcactctgagggggaggaaatgttgcattgctgtttgtaagctttttttattatttttttattataattattaaaggcctgactctttcctctcatcactgtgagattacagatctatttgaattgaatgaaatgtaacattgaaaagacttgtttgttgctttctgtgcagtttcagtattggggcgggtggggggctgggggttggtaataggaaatggaggggctgctgaggtcctgtgaatgtttctgtcattgtactttcttccagaagcctgcagagaatggaagcatcttctttattgtcctttcctggcatgtccatccttattgtcactacgttgcaactggagtttgatttggatctggttttaaaattcttctgtgcaatagatgggtttgaggatttagcggccctgatgtcttggtcatagcctggtaagaatgtccatgctgaggagccagatgttgtatttctaactgcctgagtcacacagaatagggtaagagcctgaccccattctgtaaatcagaaagcaaggatggagaccctttcctgctgctattattggctctctttgaggaagttggaggttaaggaaggaacttgtttgtttccgtatacgactccttcttctctctagttcagtcttcagccagtccagcgctctcttccacacttcagagccccttcagagaaagcattagcaggaatgagacaaggcagagctgcagtgccccctgaggcttccacacatctttctgaatattatttttcaagtaacaagggcagggacagcggaaacagctgcccaccccccccatcccagcagctcagctaagccctgatgagaatgaagccacaggagttgtctgaggtgaacccagccgctcagccacacatggaagccattgcctttgcacatagttcttgggttctttttcctaaaaaggtaaggagctgaggtgtgtggttttttaatattaagaatatataatggaaaacacacgactgacgctcaggcatcttcccctactccccaacagatccccagaagacagcgtggaaggcagtgtagacagtaaatcgggcttcagttctatagccaagaagagatcagctgctgaaaccaccagtgggtaccccaggccacctgcctttgaacttggggatttgccatgtttgatcttgtcacatacttgcttttttacaagatgaactctttgtatttatgatttggggggcaatgaaaggtgcaatgcaggaactgctgctgccgagctcgctggtcacatgggggtgccaggcgggattctggaaaaccagtgcacttaaactgatcctgaagagagctgtcccagcactctggccaccaggagggccagattccccagaaactaccttttgcccaaagaacatgctcagtatttggggcatttcctcccacaaaccctgactgcttctgttacctcagggccttggtacctggatactgccacagaattggggcgggtgggggaggggcctatttttaaataaaataactgttcaaagttgggggttttttaaaaaattaagaaaaaggaaagctattctgtattgcaccttttcacaatttaatacattttcttacattttcctgtgattttcgaaactaaaccattgtgtgtcctgtagtgtcctggttgagctgccgctcagcagcttcctcggggggatttggaacacctgtgtctgtcgccgcactgcctgtgggaggggcccagagggctgctgggactggcgtctgtacacacttgtttggccttttctgtagttgatgctgtaaactctatggctttttaaaaacgatttcatgtttttatttagtattggaaatccaatacacttttttaatccaatcaaac

SEQ ID NO: 19729 - DNA, 4441 bp, Homo sapiens
  source 1..4441: mol_type = unassigned DNA
gggagggaaggaggcaagggctccgcggcgctgtcgccgccgctgccgctcactctcggggaagagatggcggcggagcggggagcccggcgactcctcagcaccccctccttctggctctactgcctgctgctgctcgggcgccgggcgccgggcgccgcggccgccaggagcggctccgcgccgcagtccccaggagccagcattcgaacgttcactccattttattttctggtggagccggtggatacactctcagttagaggctcttctgttatattaaactgttcagcatattctgagccttctccaaaaattgaatggaaaaaagatggaacttttttaaacttagtatcagatgatcgacgccagcttctcccggatggatctttatttatcagcaatgtggtgcattccaaacacaataaacctgatgaaggttattatcagtgtgtggccactgttgagagtcttggaactattatcagtagaacagcgaagctcatagtagcaggtcttccaagatttaccagccaaccagaaccttcctcagtttatgctgggaacaatgcaattctgaattgtgaagttaatgcagatttggtcccatttgtgaggtgggaacagaacagacaaccccttcttctggatgatagagttatcaaacttccaagtggaatgctggttatcagcaatgcaactgaaggagatggcgggctttatcgctgcgtagtggaaagtggtgggccaccaaagtatagtgatgaagttgaattgaaggttcttccagatcctgaggtgatatcagacttggtatttttgaaacagccttctcccttagtcagagtcattggtcaggatgtagtgttgccatgtgttgcttcaggacttcctactccaaccattaaatggatgaaaaatgaggaggcacttgacacagaaagctctgaaagattggtattgctggcaggtggtagcctggagatcagtgatgttactgaggatgatgctgggacttatttttgtatagctgataatggaaatgagacaattgaagctcaagcagagcttacagtgcaagctcaacctgaattcctgaagcagcctactaatatatatgctcacgaatctatggatattgtatttgaatgtgaagtgactggaaaaccaactccaactgtgaagtgggtcaaaaatggggatatggttatcccaagtgattattttaagattgtaaaggaacataatcttcaagttttgggtctggtgaaatcagatgaagggttctatcagtgcattgctgaaaatgatgttggaaatgcacaagctggagcccaactgataatccttgaacatgcaccagccacaacgggaccactgccttcagctcctcgggatgtcgtggcctccctggtctctacccgcttcatcaaattgacgtggcggacacctgcatcagatcctcacggagacaaccttacctactctgtgttctacaccaaggaagggattgctagggaacgtgttgagaataccagtcacccaggagagatgcaagtaaccattcaaaacctaatgccagcgaccgtgtacatctttagagttatggctcaaaataagcatggctcaggagagagttcagctccactgcgagtagaaacacaacctgaggttcagctccctggcccagcacctaaccttcgtgcatatgcagcttcgcctacctccatcactgttacgtgggaaacaccagtgtctggcaatggggaaattcagaattataaattgtactacatggaaaaggggactgataaagaacaggatgttgatgtttcaagtcactcttacaccattaatgggttgaaaaaatatacagagtatagtttccgagtggtggcctacaataaacatggtcctggagtttccacaccagatgttgctgttcgaacattgtcagatgttcccagtgctgctcctcagaatctgtccttggaagtgagaaattcaaagagtattatgattcactggcagccacctgctccagccacacaaaatgggcagattactggctacaagattcgctaccgaaaggcctcccgaaagagtgatgtcactgagaccttggtaagcgggacacagctgtctcagctgattgaaggtcttgatcgggggactgagtataatttccgagtggctgctctaacaatcaatggtacaggcccggcaactgactggctgtctgctgaaacttttgaaagtgacctagatgaaactcgtgttcctgaagtgcctagctctcttcacgtacgcccgctcgttactagcatcgtagtgagctggactcctccagagaatcagaacattgtggtcagaggttacgccattggttatggcattggcagccctcatgcccagaccatcaaagtggactataaacagcgctattacaccattgaaaatctggatcccagctctcactatgtgattaccctgaaagcatttaataacgtgggtgaaggcatccccctgtatgagagtgctgtgaccaggcctcacacagacacttctgaagttgatttatttgttattaatgctccatacactccagtgccagatcccactcccatgatgccaccagtgggagttcaggcttccattctgagtcatgacaccatcaggattacgtgggcagacaactcgctgcccaagcaccagaagattacagactcccgatactacaccgtccgatggaaaaccaacatcccagcaaacaccaagtacaagaatgcaaatgcaaccactttgagttatttggtgactggtttaaagccgaatacactctatgaattctctgtgatggtgaccaaaggtcgaagatcaagtacatggagtatgacagcccatgggaccacctttgaattagttccgacttctccacccaaggatgtgactgttgtgagtaaagaggggaaacctaagaccataattgtgaattggcagcctccctccgaagccaatggcaaaattacaggttacatcatatattacagtacagatgtgaatgcagagatacatgactgggttattgagcctgttgtgggaaacagactgactcaccagatacaagagttaactcttgacacaccatactacttcaaaatccaggcacggaactcaaagggcatgggacccatgtctgaagctgtccaattcagaacacctaaagcctcagggtctggagggaaaggaagccggctgccagacctaggatccgactacaaacctccaatgagcggcagtaacagccctcatgggagccccacctctcctctggacagtaatatgctgctggtcataattgtttctgttggcgtcatcaccatcgtggtggttgtgattatcgctgtcttttgtacccgtcgtaccacctctcaccagaaaaagaaacgagctgcctgcaaatcagtgaatggctctcataagtacaaagggaattccaaagatgtgaaacctccagatctctggatccatcatgagagactggagctgaaacccattgataagtctccagacccaaaccccatcatgactgatactccaattcctcgcaactctcaagatatcacaccagttgacaactccatggacagcaatatccatcaaaggcgaaattcatacagagggcatgagtcagaggacagcatgtctacactggctggaaggcgaggaatgagaccaaaaatgatgatgccctttgactcccagccaccccagcctgtgattagtgcccatcccatccattccctcgataaccctcaccatcatttccactccagcagcctcgcttctccagctcgcagtcatctctaccacccgggcagcccatggcccattggcacatccatgtccctttcagacagggccaattccacagaatccgttcgaaatacccccagcactgacaccatgccagcctcttcgtctcaaacatgctgcactgatcaccaggaccctgaaggtgctaccagctcctcttacttggccagctcccaagaggaagattcaggccagagtcttcccactgcccatgttcgcccttcccacccattgaagagcttcgccgtgccagcaatcccgcctccaggacctcccacctatgatcctgcattgccaagcacaccattactgtcccagcaagctctgaaccatcacattcactcagtgaagacagcctccatcgggactctaggaaggagccggcctcctatgccagtggttgttcccagtgcccctgaagtgcaggagaccacaaggatgttggaagactccgagagtagctatgaaccagatgagctgaccaaagagatggcccacctggaaggactaatgaaggacctaaacgctatcacaacagcatgacgaccttcaccaggacctgact

SEQ ID NO: 19730 - DNA, 4315 bp, Homo sapiens
  source 1..4315: mol_type = unassigned DNA
gggagggaaggaggcaagggctccgcggcgctgtcgccgccgctgccgctcactctcggggaagagatggcggcggagcggggagcccggcgactcctcagcaccccctccttctggctctactgcctgctgctgctcgggcgccgggcgccgggcgccgcggccgccaggagcggctccgcgccgcagtccccaggagccagcattcgaacgttcactccattttattttctggtggagccggtggatacactctcagttagaggctcttctgttatattaaactgttcagcatattctgagccttctccaaaaattgaatggaaaaaagatggaacttttttaaacttagtatcagatgatcgacgccagcttctcccggatggatctttatttatcagcaatgtggtgcattccaaacacaataaacctgatgaaggttattatcagtgtgtggccactgttgagagtcttggaactattatcagtagaacagcgaagctcatagtagcaggtcttccaagatttaccagccaaccagaaccttcctcagtttatgctgggaacaatgcaattctgaattgtgaagttaatgcagatttggtcccatttgtgaggtgggaacagaacagacaaccccttcttctggatgatagagttatcaaacttccaagtggaatgctggttatcagcaatgcaactgaaggagatggcgggctttatcgctgcgtagtggaaagtggtgggccaccaaagtatagtgatgaagttgaattgaaggttcttccagatcctgaggtgatatcagacttggtatttttgaaacagccttctcccttagtcagagtcattggtcaggatgtagtgttgccatgtgttgcttcaggacttcctactccaaccattaaatggatgaaaaatgaggaggcacttgacacagaaagctctgaaagattggtattgctggcaggtggtagcctggagatcagtgatgttactgaggatgatgctgggacttatttttgtatagctgataatggaaatgagacaattgaagctcaagcagagcttacagtgcaagctcaacctgaattcctgaagcagcctactaatatatatgctcacgaatctatggatattgtatttgaatgtgaagtgactggaaaaccaactccaactgtgaagtgggtcaaaaatggggatatggttatcccaagtgattattttaagattgtaaaggaacataatcttcaagttttgggtctggtgaaatcagatgaagggttctatcagtgcattgctgaaaatgatgttggaaatgcacaagctggagcccaactgataatccttgaacatgcaccagccacaacgggaccactgccttcagctcctcgggatgtcgtggcctccctggtctctacccgcttcatcaaattgacgtggcggacacctgcatcagatcctcacggagacaaccttacctactctgtgttctacaccaaggaagggattgctagggaacgtgttgagaataccagtcacccaggagagatgcaagtaaccattcaaaacctaatgccagcgaccgtgtacatctttagagttatggctcaaaataagcatggctcaggagagagttcagctccactgcgagtagaaacacaacctgaggttcagctccctggcccagcacctaaccttcgtgcatatgcagcttcgcctacctccatcactgttacgtgggaaacaccagtgtctggcaatggggaaattcagaattataaattgtactacatggaaaaggggactgataaagaacaggatgttgatgtttcaagtcactcttacaccattaatgggttgaaaaaatatacagagtatagtttccgagtggtggcctacaataaacatggtcctggagtttccacaccagatgttgctgttcgaacattgtcagatgttcccagtgctgctcctcagaatctgtccttggaagtgagaaattcaaagagtattatgattcactggcagccacctgctccagccacacaaaatgggcagattactggctacaagattcgctaccgaaaggcctcccgaaagagtgatgtcactgagaccttggtaagcgggacacagctgtctcagctgattgaaggtcttgatcgggggactgagtataatttccgagtggctgctctaacaatcaatggtacaggcccggcaactgactggctgtctgctgaaacttttgaaagtgacctagatgaaactcgtgttcctgaagtgcctagctctcttcacgtacgcccgctcgttactagcatcgtagtgagctggactcctccagagaatcagaacattgtggtcagaggttacgccattggttatggcattggcagccctcatgcccagaccatcaaagtggactataaacagcgctattacaccattgaaaatctggatcccagctctcactatgtgattaccctgaaagcatttaataacgtgggtgaaggcatccccctgtatgagagtgctgtgaccaggcctcacacagacacttctgaagttgatttatttgttattaatgctccatacactccagtgccagatcccactcccatgatgccaccagtgggagttcaggcttccattctgagtcatgacaccatcaggattacgtgggcagacaactcgctgcccaagcaccagaagattacagactcccgatactacaccgtccgatggaaaaccaacatcccagcaaacaccaagtacaagaatgcaaatgcaaccactttgagttatttggtgactggtttaaagccgaatacactctatgaattctctgtgatggtgaccaaaggtcgaagatcaagtacatggagtatgacagcccatgggaccacctttgaattagttccgacttctccacccaaggatgtgactgttgtgagtaaagaggggaaacctaagaccataattgtgaattggcagcctccctccgaagccaatggcaaaattacaggttacatcatatattacagtacagatgtgaatgcagagatacatgactgggttattgagcctgttgtgggaaacagactgactcaccagatacaagagttaactcttgacacaccatactacttcaaaatccaggcacggaactcaaagggcatgggacccatgtctgaagctgtccaattcagaacacctaaagcggactcctctgataaaatgcctaatgatcaagcctcagggtctggagggaaaggaagccggctgccagacctaggatccgactacaaacctccaatgagcggcagtaacagccctcatgggagccccacctctcctctggacagtaatatgctgctggtcataattgtttctgttggcgtcatcaccatcgtggtggttgtgattatcgctgtcttttgtacccgtcgtaccacctctcaccagaaaaagaaacgagctgcctgcaaatcagtgaatggctctcataagtacaaagggaattccaaagatgtgaaacctccagatctctggatccatcatgagagactggagctgaaacccattgataagtctccagacccaaaccccatcatgactgatactccaattcctcgcaactctcaagatatcacaccagttgacaactccatggacagcaatatccatcaaaggcgaaattcatacagagggcatgagtcagaggacagcatgtctacactggctggaaggcgaggaatgagaccaaaaatgatgatgccctttgactcccagccaccccagcaatccgttcgaaatacccccagcactgacaccatgccagcctcttcgtctcaaacatgctgcactgatcaccaggaccctgaaggtgctaccagctcctcttacttggccagctcccaagaggaagattcaggccagagtcttcccactgcccatgttcgcccttcccacccattgaagagcttcgccgtgccagcaatcccgcctccaggacctcccacctatgatcctgcattgccaagcacaccattactgtcccagcaagctctgaaccatcacattcactcagtgaagacagcctccatcgggactctaggaaggagccggcctcctatgccagtggttgttcccagtgcccctgaagtgcaggagaccacaaggatgttggaagactccgagagtagctatgaaccagatgagctgaccaaagagatggcccacctggaaggactaatgaaggacctaaacgctatcacaacagcatgacgaccttcaccaggacctgact

SEQ ID NO: 19731 - DNA, 2522 bp, Homo sapiens
  source 1..2522: mol_type = unassigned DNA
acagccaattgccatggcaaccccggggttcgttccacttccccacccagccgatctcccccctcctccctgcactgcagccaaccggcttgtgcgcgtcccaggagcgcgctataaaacctgtgctgggcgtgatcggcaagcaccggaccagggggaaggcgagcagtgccaatctacagcgaagaaagtctcgtttggtaaaagcgagaggggaaagcctgagcatgcagagtgtgcagagcacgagcttttgtctccgaaagcagtgcctttgcctgaccttcctgcttctccatctcctgggacaggtcgctgcgactcagcgctgccctccccagtgcccgggccggtgccctgcgacgccgccgacctgcgcccccggggtgcgcgcggtgctggacggctgctcatgctgtctggtgtgtgcccgccagcgtggcgagagctgctcagatctggagccatgcgacgagagcagtggcctctactgtgatcgcagcgcggaccccagcaaccagactggcatctgcacggcggtagagggagataactgtgtgttcgatggggtcatctaccgcagtggagagaaatttcagccaagctgcaaattccagtgcacctgcagagatgggcagattggctgtgtgccccgctgtcagctggatgtgctactgcctgagcctaactgcccagctccaagaaaagttgaggtgcctggagagtgctgtgaaaagtggatctgtggcccagatgaggaggattcactgggaggccttacccttgcagcttacaggccagaagccaccctaggagtagaagtctctgactcaagtgtcaactgcattgaacagaccacagagtggacagcatgctccaagagctgtggtatggggttctccacccgggtcaccaataggaaccgtcaatgtgagatgctgaaacagactcggctctgcatggtgcggccctgtgaacaagagccagagcagccaacagataagaaaggaaaaaagtgtctccgcaccaagaagtcactcaaagccatccacctgcagttcaagaactgcaccagcctgcacacctacaagcccaggttctgtggggtctgcagtgatggccgctgctgcactccccacaataccaaaaccatccaggcagagtttcagtgctccccagggcaaatagtcaagaagccagtgatggtcattgggacctgcacctgtcacaccaactgtcctaagaacaatgaggccttcctccaggagctggagctgaagactaccagagggaaaatgtaacctgtcactcaagaagcacacctacagagcacctgtagctgctgcgccacccaccatcaaaggaatataagaaaagtaatgaagaatcacgatttcatccttgaatcctatgtattttcctaatgtgatcatatgaggacctttatatctgtcttttatttaacaaaaaatgtaattaactgtaaacttggaatcaaggtaagctcaggatatggcttaggaatgacttactttcctgtggttttattacaaatgcaaatttctataaatttaagaaaacaagtatataatttactttgtagactgtttcacattgcactcatcatattttgttgtgcactagtgcaattccaagaaaatatcactgtaatgagtcagtgaagtctagaatcatacttaacatttcattgtacaagtattacaaccatatattgaggttcattgggaagattctctattggctccctttttgggtaaaccagctctgaacttccaagctccaaatccaaggaaacatgcagctcttcaacatgacatccagagatgactattacttttctgtttagttttacactaggaaacgtgttgtatctacagtaatgaaatgtttactaagtggactggtgtcataaactttctccatttaagacacattgactcctttccaatagaaagaaactaaacagaaaactcccaatacaaagatgactggtccctcatagccctcagacatttatatattggaagctgctgaggcccccaagttttttaattaagcagaaacagcatattagcagggattctctcatctaactgatgagtaaactgaggcccaaagcacttgcttacatcctctgatagctgtttcaaatgtgcattttgtggaattttgagaaaaatagagcaaaatcaacatgactggtggtgagagaccacacattttatgagagtttggaattattgtagacatgcccaaaacttatccttgggccataattatgaaaactcatgatcaagatatatgtgtatacatacatgtatctggtttgtcaggctacaaggtaggctgcaaaattaaatctagacattcttttaatgccaccacacgtgttccgcttctctcttttaaagtatttataaaaatataaattgtacattttgtaaaatattatgtttgatttctctacttgtcatatcactaaataaacacgattttattgc

SEQ ID NO: 19732 - DNA, 3756 bp, Homo sapiens
  source 1..3756: mol_type = unassigned DNA
gatggcgtcaccttctggcgccgccggttggtttccctggcaactggagcaatcagagcaccgcagccagggagatgctggcgagacgacagcgagatcctctccaggccctgcggcgccgcaatcaggagctgaagcaacaggttgatagtttgctttctgagagccaactgaaagaagctctagaacccaataaaagacaacatatttatcaaagatgtatccagttaaagcaggcaatagatgaaaataaaaatgctcttcaaaaattaagcaaagctgatgaatctgcacctgttgcaaactataatcagagaaaagaagaggagcatactcttttggacaagcttacccaacaactgcagggccttgctgtgacaataagcagagaaaatataactgaagttggggcacctactgaagaagaggaagaaagtgaaagtgaagatagtgaagacagtggtggggaggaagaagatgcagaggaggaagaggaagagaaagaggaaaatgaatctcacaaatggtcaaccggtgaagaatacatcgctgttggagattttactgctcagcaagttggagatcttacatttaagaaaggggaaattctccttgtaattgaaaaaaaacctgatggttggtggatagctaaggatgccaaaggaaatgaaggtcttgttcccagaacctacctagagccttatagtgaagaagaagaaggccaagagtcaagtgaagagggcagtgaagaagatgtagaggcggtggatgaaacagcagatggagcagaagttaagcaaagaactgatccccactggagtgctgttcagaaagcgatttcagaggcgggcatcttctgtcttgttaatcatgtctcgttttgctacctaatagttctgatgcgaaataggatggagactgtggaagacaccaatggatctgaaacagggttcagggcatggaatgtacagagcagaggacgtatatttctggtttctaagcctgtgctccaacagataaacactgttgatgtgttaactacgatgggagctattcctgcagggttcaggccttccacgctctcacagcttctggaggaagggaatcaatttcgagcaaattacttcttacaaccagagctcatgccttcacaactggccttcagagatctgatgtgggatgctacagaaggcactattaggtcgagaccaagtcgtatttcattgattctgacattatggagctgtaaaatgattcctcttccaggaatgagcatacaggttctcagcagacatgtacgcctctgtctatttgatggtaataaggttctgagcaacattcatacagtcagagccacatggcaacctaaaaagcccaaaacatggaccttttctccccaggttactcgcatcttaccatgtttgcttgatggtgattgctttatcaggtctaattctgcatctccagatcttggaatattatttgaacttggaatttcttatattcgcaattcaactggtgaaagaggagagttaagctgtggctgggtgtttcttaaactttttgatgccagtggagttcctattccagcaaaaacttatgagcttttcttgaatggtggtactccttatgaaaaaggtattgaagtggacccttcaatatccagaagagcacacggcagtgttttctaccagattatgacaatgagaaggcagcctcaacttctagtgaaactgagatccttgaacagaagatcaagaaatgtactaagtctactgccagaaacattaattggaaatatgtgttctattcacttgttgatattttatcgacaaattcttggagatgtgctcctgaaagacaggatgagcttgcaaagtactgatttaattagccatcccatgctggccaccttccccatgctcttggagcagcctgatgtgatggatgctctcaggagttcgtgggctggaaaagaaagcacattaaaaagatcagagaagagagacaaagagttcctgaagtccacgtttctcctggtttaccatgactgcgtgctcccacttctccactccacacgcctacccccattcaggtgggcagaagaagagactgagactgcacggtggaaagttatcactgacttccttaagcaaaaccaagaaaaccagggcgccctccaagctctgctgtcaccagacggagttcatgaaccttttgacctttcagagcagacctatgacttcttgggtgaaatgagaaagaatgcagtgtgacagtggcagcctctagccctcagcttcccacggaatcagatggatcctccacgattacgtgaataaaatgatggaaccaaaaatcactgtcactttacaacttaggttttactcttttctttctacagaccatatttttaaagaaatgtttatacaataatttaaatattttttaaaaccataaaataaatttttataaggaatactgttatatctaaatttaaacagtatttattttttcaaaaacagctacttaagttaatggtatagatttctataaaagcaagattttgtcaaaaactaaatttatgattattcaagaaagtgaaaaaaacaacctacagaatgggaaaacatatttgcaaatcatctaactgataaaggtctagtatccaaaatatttaaatttatgagtgttaataaaatttatcttgttcaatgaagaggaagttaaagtgatccatttgagaaagttgtatcacttaattcagtctgatacttgaatgtgatttacccctaattaagtacaaaaacagagtcgcttttgccttttcaaatcaagaaaataagtgctctgtcaaaagcacaaaaagaaactttcaggcactggagagtggagtcgactcaccctttcaggccttgttgcatctcagataaacctgtgactgctggtaaaataatgtcccaagcctttccttttagtgataaacagtagcagcctgcgttaattgagcacctactgtgtgtctgagcatttctcattagcccagttaatcctcacacctactgtaggagataggtactgttgttttttattaccgccgaagaaacaggccagataagtgaagtaatttgcctaaggtcacagctaataagtggcacagctaatattcccagtaaagataccatgtataattttctacaacctaagatgttctgccttatcggggcgaaccttttaggattccatgtgaaaataaaatatgaggaaaagtttaacctaaataattagaatcccattagaggtacttttttttgatggcatgctgccttaaaagagccatttatttttagagatctgtcatattatgaaagttctgggctatcttagctaacttatcctaaacccttaacctaaatttaacttgagccccagtctcagaaattaacatggtatgaaggtgtttccaggccaggcgcggtggctcacgcctgtaatcccaacactttgggaggccgaggtgggtggatcacctgaggtcaggagtttgagaccagcctggccaacactatctgtactaaaaacacaaaattagctgggcgtggtagtgcgtgcctgtaatcccagctacttgggaggctgaggtagaagaattgtttgaacctgggaggtggaggttgcagtgagccaagatcgtgccattgcactccagcctaggcaacaagagtgaaactccatctcaaaaaaaaaaaaaaaaaa

SEQ ID NO: 19733 - DNA, 1932 bp, Homo sapiens
  source 1..1932: mol_type = unassigned DNA
ggagatgctggcgagacgacagcgagatcctctccaggccctgcggcgccgcaatcaggagctgaagcaacaggttgatagtttgctttctgagagccaactgaaagaagctctagaacccaataaaagacaacatatttatcaaagagttggggcacctactgaagaagaggaagaaagtgaaagtgaagatagtgaagacagtggtggggaggaagaagatgcagaggaggaagaggaagagaaagaggaaaatgaatctcacaaatggtcaaccggtgaagaatacatcgctgttggagattttactgctcagcaagttggagatcttacatttaagaaaggggaaattctccttgtaattgaaaaaaaacctgatggttggtggatagctaaggatgccaaaggaaatgaaggtcttgttcccagaacctacctagagccttatagtgaagaagaagaaggccaagagtcaagtgaagagggcagtgaagaagatgtagaggcggtggatgaaacagcagatggagcagaagttaagcaaagaactgatccccactggagtgctgttcagaaagcgatttcagagataaacactgttgatgtgttaactacgatgggagctattcctgcagggttcaggccttccacgctctcacagcttctggaggaagggaatcaatttcgagcaaattacttcttacaaccagagctcatgccttcacaactggccttcagagatctgatgtgggatgctacagaaggcactattaggtcgagaccaagtcgtatttcattgattctgacattatggagctgtaaaatgattcctcttccaggaatgagcatacaggttctcagcagacatgtacgcctctgtctatttgatggtaataaggttctgagcaacattcatacagtcagagccacatggcaacctaaaaagcccaaaacatggaccttttctccccaggttactcgcatcttaccatgtttgcttgatggtgattgctttatcaggtctaattctgcatctccagatcttggaatattatttgaacttggaatttcttatattcgcaattcaactggtgaaagaggagagttaagctgtggctgggtgtttcttaaactttttgatgccagtggagttcctattccagcaaaaacttatgagcttttcttgaatggtggtactccttatgaaaaaggtattgaagtggacccttcaatatccagaagagcacacggcagtgttttctaccagattatgacaatgagaaggcagcctcaacttctagtgaaactgagatccttgaacagaagatcaagaaatgtactaagtctactgccagaaacattaattggaaatatgtgttctattcacttgttgatattttatcgacaaattcttggagatgtgctcctgaaagacaggatgagcttgcaaagtactgatttaattagccatcccatgctggccaccttccccatgctcttggagcagcctgatgtgatggatgctctcaggagttcgtgggctggaaaagaaagcacattaaaaagatcagagaagagagacaaagagttcctgaagtccacgtttctcctggtttaccatgactgcgtgctcccacttctccactccacacgcctacccccattcaggtgggcagaagaagagactgagactgcacggtggaaagttatcactgacttccttaagcaaaaccaagaaaaccagggcgccctccaagctctgctgtcaccagacggagttcatgaaccttttgacctttcagagcagacctatgacttcttgggtgaaatgagaaagaatgcagtgtgacagtggcagcctctagccctcagcttcccacggaatcagatggatcctccacgattacgtgaataaaatgatggaaccaaaaa

SEQ ID NO: 19734 - DNA, 2752 bp, Homo sapiens
  source 1..2752: mol_type = unassigned DNA
ggggctgggaggcgggcgcacatcgatggcgtcaccttctggcgccgccggttggtttccctggcaactggagcaatcagagcaccgcagccagggagatgctggcgagacgacagcgagatcctctccaggccctgcggcgccgcaatcaggagctgaagcaacaggttgatagtttgctttctgagagccaactgaaagaagctctagaacccaataaaagacaacatatttatcaaagatgtatccagttaaagcaggcaatagatgaaaataaaaatgctcttcaaaaattaagcaaagctgatgaatctgcacctgttgcaaactataatcagagaaaagaagaggagcatactcttttggacaagcttacccaacaactgcagggccttgctgtgacaataagcagagaaaatataactgaagttggggcacctactgaagaagaggaagaaagtgaaagtgaagatagtgaagacagtggtggggaggaagaagatgcagaggaggaagaggaagagaaagaggaaaatgaatctcacaaatggtcaaccggtgaagaatacatcgctgttggagattttactgctcagcaagttggagatcttacatttaagaaaggggaaattctccttgtaattgaaaaaaaacctgatggttggtggatagctaaggatgccaaaggaaatgaaggtcttgttcccagaacctacctagagccttatagtgaagaagaagaaggccaagagtcaagtgaagagggcagtgaagaagatgtagaggcggtggatgaaacagcagatggagcagaagttaagcaaagaactgatccccactggagtgctgttcagaaagcgatttcagaggcgggcatcttctgtcttgttaatcatgtctcgttttgctacctaatagttctgatgcgaaataggatggagactgtggaagacaccaatggatctgaaacagggttcagggcatggaatgtacagagcagaggacgtatatttctggtttctaagcctgtgctccaaataaacactgttgatgtgttaactacgatgggagctattcctgcagggttcaggccttccacgctctcacagcttctggaggaagggaatcaatttcgagcaaattacttcttacaaccagagctcatgccttcacaactggccttcagagatctgatgtgggatgctacagaaggcactattaggtcgagaccaagtcgtatttcattgattctgacattatggagctgtaaaatgattcctcttccaggaatgagcatacaggttctcagcagacatgtacgcctctgtctatttgatggtaataaggttctgagcaacattcatacagtcagagccacatggcaacctaaaaagcccaaaacatggaccttttctccccaggttactcgcatcttaccatgtttgcttgatggtgattgctttatcaggtctaattctgcatctccagatcttggaatattatttgaacttggaatttcttatattcgcaattcaactggtgaaagaggagagttaagctgtggctgggtgtttcttaaactttttgatgccagtggagttcctattccagcaaaaacttatgagcttttcttgaatggtggtactccttatgaaaaaggtattgaagtggacccttcaatatccagaagagcacacggcagtgttttctaccagattatgacaatgagaaggcagcctcaacttctagtgaaactgagatccttgaacagaagatcaagaaatgtactaagtctactgccagaaacattaattggaaatatgtgttctattcacttgttgatattttatcgacaaattcttggagatgtgctcctgaaagacaggatgagcttgcaaagtactgatttaattagccatcccatgctggccaccttccccatgctcttggagcagcctgatgtgatggatgctctcaggagttcgtgggctggaaaagaaagcacattaaaaagatcagagaagagagacaaagagttcctgaagtccacgtttctcctggtttaccatgactgcgtgctcccacttctccactccacacgcctacccccattcaggtgggcagaagaagagactgagactgcacggtggaaagttatcactgacttccttaagcaaaaccaagaaaaccagggcgccctccaagctctgctgtcaccagacggagttcatgaaccttttgacctttcagagcagacctatgacttcttgggtgaaatgagaaagaatgcagtgtgacagtggcagcctctagccctcagcttcccacggaatcagatggatcctccacgattacgtgaataaaatgatggaaccaaaaatcactgtcactttacaacttaggttttactcttttctttctacagaccatatttttaaagaaatgtttatacaataatttaaatattttttaaaaccataaaataaatttttataaggaatactgttatatctaaatttaaacagtatttattttttcaaaaacagctacttaagttaatggtatagatttctataaaagcaagattttgtcaaaaactaaatttatgattattcaagaaagtgaaaaaaacaacctacagaatgggaaaacatatttgcaaatcatctaactgataaaggtctagtatccaaaatatttaaatttatgagtgttaataaaatttatcttgttcaatgaagaggaagttaaa

SEQ ID NO: 19735 - DNA, 2513 bp, Homo sapiens
  source 1..2513: mol_type = unassigned DNA
aatcagagcaccgcagccagggagatgctggcgagacgacagcgagatcctctccaggccctgcggcgccgcaatcaggagctgaagcaacaggttgatagtttgctttctgagagccaactgaaagaagctctagaacccaataaaagacaacatatttatcaaagatgtatccagttaaagcaggcaatagatgaaaataaaaatgctcttcaaaaattaagcaaagctgatgaatctgcacctgttgcaaactataatcagagaaaagaagaggagcatactcttttggacaagcttacccaacaactgcagggccttgctgtgacaataagcagagaaaatataactgaagttggggcacctactgaagaagaggaagaaagtgaaagtgaagatagtgaagacagtggtggggaggaagaagatgcagaggaggaagaggaagagaaagaggaaaatgaatctcacaaatggtcaaccggtgaagaatacatcgctgttggagattttactgctcagcaagttggagatcttacatttaagaaaggggaaattctccttgtaattgaaaaaaaacctgatggttggtggatagctaaggatgccaaaggaaatgaaggtcttgttcccagaacctacctagagccttatagtgaagaagaagaaggccaagagtcaagtgaagagggcagtgaagaagatgtagaggcggtggatgaaacagcagatggagcagaagttaagcaaagaactgatccccactggagtgctgttcagaaagcgatttcagagcagataaacactgttgatgtgttaactacgatgggagctattcctgcagggttcaggccttccacgctctcacagcttctggaggaagggaatcaatttcgagcaaattacttcttacaaccagagctcatgccttcacaactggccttcagagatctgatgtgggatgctacagaaggcactattaggtcgagaccaagtcgtatttcattgattctgacattatggagctgtaaaatgattcctcttccaggaatgagcatacaggttctcagcagacatgtacgcctctgtctatttgatggtaataaggttctgagcaacattcatacagtcagagccacatggcaacctaaaaagcccaaaacatggaccttttctccccaggttactcgcatcttaccatgtttgcttgatggtgattgctttatcaggtctaattctgcatctccagatcttggaatattatttgaacttggaatttcttatattcgcaattcaactggtgaaagaggagagttaagctgtggctgggtgtttcttaaactttttgatgccagtggagttcctattccagcaaaaacttatgagcttttcttgaatggtggtactccttatgaaaaaggtattgaagtggacccttcaatatccagaagagcacacggcagtgttttctaccagattatgacaatgagaaggcagcctcaacttctagtgaaactgagatccttgaacagaagatcaagaaatgtactaagtctactgccagaaacattaattggaaatatgtgttctattcacttgttgatattttatcgacaaattcttggagatgtgctcctgaaagacaggatgagcttgcaaagtactgatttaattagccatcccatgctggccaccttccccatgctcttggagcagcctgatgtgatggatgctctcaggagttcgtgggctggaaaagaaagcacattaaaaagatcagagaagagagacaaagagttcctgaagtccacgtttctcctggtttaccatgactgcgtgctcccacttctccactccacacgcctacccccattcaggtgggcagaagaagagactgagactgcacggtggaaagttatcactgacttccttaagcaaaaccaagaaaaccagggcgccctccaagctctgctgtcaccagacggagttcatgaaccttttgacctttcagagcagacctatgacttcttgggtgaaatgagaaagaatgcagtgtgacagtggcagcctctagccctcagcttcccacggaatcagatggatcctccacgattacgtgaataaaatgatggaaccaaaaatcactgtcactttacaacttaggttttactcttttctttctacagaccatatttttaaagaaatgtttatacaataatttaaatattttttaaaaccataaaataaatttttataaggaatactgttatatctaaatttaaacagtatttattttttcaaaaacagctacttaagttaatggtatagatttctataaaagcaagattttgtcaaaaactaaatttatgattattcaagaaagtgaaaaaaacaacctacagaatgggaaaacatatttgcaaatcatctaactgataaaggtctagtatccaaaatatttaaatttatgagtgttaataaaatttatcttgttcaatgaagaggaagttaaa

SEQ ID NO: 19736 - DNA, 5287 bp, Homo sapiens
  source 1..5287: mol_type = unassigned DNA
tctgccccaccccgtcccgttccgttccgctgcccagtcctgctggtactcactaggtagtagcggcaacggacgccatggggaccgcctcgtcgctcgtgagccccgcgggcggggaagtgatcgaggacacgtacggggcgggcggcggcgaggcctgcgagatcccggtggaggtgaagcccaaggcccgcctgctgcgcaactcgttccgccgaggcgcgggggcggcagcaggggccgggcccgggtcgctgccccgcggggtgggcgcgggcgggctgctgggggccagcttcaagtccactggctcgtcggtgccagagctggagtacgcggcggccgagtacgagcggctcaggaaggagtacgagatctttcgcgtcagcaagaaccaggagttgttgtccatgggccgccgcgaggccaagctggacacggagaacaagcggctgcgggccgaactgcaggcacttcaaaaaacgtatcagaagatacttcgagaaaaagaaagtgctttagaagcgaaataccaagcaatggagagagcagcaacatttgaacatgacagagataaagttaaaaggcaattcaagatttttagggagaccaaagaaaatgaaattcaggacttactgagggccaagagggagttggagagcaaacttcagaggctacaggctcagggtatccaagtatttgatcctggggagtctgattcagatgacaactgtacagatgtcactgctgctggaacccaatgtgaatattggactggcggagccttgggaagtgaaccttccataggaagcatgatccagcttcagcagtccttcagaggccctgagtttgcccatagttctatagatgtggaaggaccctttgcaaatgttaatagagatgactgggatattgctgtagctagtttattacaagttactcctctgttttcacattctctgtggagtaacactgtcagatgttacctcatttatacagatgaaacccagcctgagatggatcttttccttaaggactattcacctaaacttaagagaatgtgcgagacaatgggatattttttccatgctgtttattttccaatagatgttgaaaatcaatacctcactgtaagaaaatgggaaattgagaaaagttctttagttattttatttattcacttaacattaccaagccttttattggaagactgtgaagaagcttttctgaaaaaccctgaaggaaaacctcgattaatctttcatcgtttggaagatggaaaagtcagttctgactctgtccagcaattgattgatcaagtttctaatctaaacaagaccagcaaagccaagatcattgatcactcaggagatcctgcagaaggagtatataaaacttatatttgtgtagaaaagattattaaacaggacatactgggttttgagaacacagacttggagactaaggatttgggcagtgaggattccattccagaagaagatgattttggtgatgttctgtgggacatacatgatgaacaagagcaaatggaaacttttcagcaggcttctaattcagcccatgagttgggatttgagaaatattaccaacgccttaatgatctagtggcagcaccagccccgattccacctcttctcgtgtctggaggaccaggttctgggaagtctcttcttttatcaaagtggattcaattacaacagaagaattcccccaacacactgattctttcccattttgtgggaaggcccatgtcaaccagctcagagtcctccttgattattaaacgactaactctaaagttgatgcagcactcttggtcagtctctgctctgacactggatcctgctaagcttctggaagaatttccacgttggctggaaaaactctctgctcgtcatcaaggcagcatcatcatcgttattgattctatagatcaagttcagcaagttgaaaaacacatgaaatggctgatagatccactgccagtgaatgtaagagtaattgtttctgtgaatgtagaaacatgccctccagcatggaggttgtggcctacacttcatcttgatcccttaagtccaaaagatgcaaaatctattataattgcagaatgccactctgtagacattaaattgagtaaagagcagtgctgggagagcaggcaatttagataaaatccttcatcagtgtttccagtgtcaagatactctttcattatatagacttgttctgcactctatccgggagtccatggcaaatgatgtggataaagagctaatgaagcagatcctctgccttgtcaatgttagtcacaatggtgtgagtgaatcagaactgatggaactctatcctgagatgtcctggactttcttgacctcccttattcacagtttatacaaaatgtgtttgttgacttatggatgtggcttgcttaggtttcaacatctgcaggcttgggaaacagtgagattggagtacctggaaggccccactgttacttcttcatacaggcaaaagctaatcaactatttcaccttgcagctaagtcaggacagagtgacttggagaagtgcagatgaactcccgtggctttttcagcagcagggaagtaaacagaagctgcatgattgccttcttaatctctttgtgtctcaaaacctttataaaaggggacactttgctgagttgctgagttattggcagtttgttggcaaagacaaaagtgcaatggcaacagaatacttcgattcattgaagcagtatgagaaaaactgcgaaggcgaggacaacatgagttgcttagctgatctttatgaaaccttggggcgatttctcaaggatctaggccttctcagtcaggccatagtacctttgcagaggtctttagagattcgagaaacagctttagatcccgatcacccaagagtagcccagtccctccaccaactagcaagtgtatacgtgcagtggaagaagtttggcaatgcagaacaactgtataaacaggcgttggaaatctcagaaaatgcttatggtgcggaccatccatatactgctcgtgaacttgaagcacttgcaactttgtaccagaaacaaaataaatatgaacaagctgaacattttaggaaaaaatcctttaaaattcatcagaaagctataaagaaaaaaggcaacttgtacggatttgcccttttacgtagacgggctttacagttagaagagcttacattaggtaaggacacacctgataatgctcggaccctcaatgaactgggtgttctctactatcttcaaaataacctggaaacagctgaccagtttctgaagcgttccttagaaatgagggagcgagttctaggaccagatcaccctgactgtgctcagtctttgaataatctggcagctctatgcaatgaaaagaaacagtatgataaagcagaagaactttatgaaagagctttagatattcggagacgtgcattagctcctgatcacccttctttggcatatacggtgaagcatcttgccatcttgtataagaaaatggggaaacttgacaaagctgtacctttgtatgaattggctgttgaaattcgacagaaatcttttggcccaaagcaccctagtgtagctactgccttggtgaacttagctgttctttatagccaaatgaaaaaacacgttgaagctttgccattatatgaaagagcattaaagatttatgaagatagcctgggtcggatgcatcctcgagttggagaaacactgaaaaatttagctgtgcttagctatgaaggaggagattttgaaaaagctgctgaattatacaaaagggcaatggaaataaaagaagcagaaacatcactcttgggtggaaaagctccttcacgccattcatcaagtggagacacgtttagcttaaaaacagctcattctcctaatgttttccttcagcaaggacaaaggtaatagcagcagttagaattctttgcaaatgtaccttaagacaaaataattaaacatttggaacatttgaatttgaaactttaaaaaaatgttgtacgaaattttactacgtgtgatttaactgctatttgtatgaagttgtattggattacattaagttggaattgtgattatgtctgttttagttgtttaaaagaattttcctattatatggtatccaaggatgtagacacattagaattataagaagacatgaggagcaaatcatgaagagcggattggtctttgttcaacaagagctggcagagtagttaagacaaggagttcaaaaattccatgaatcttggccaggcatggtggctcatgcctgtaatcccaccactttgggagggtgatgcaggaggatcacttgaggccaggagttggagaccagcctggccaacatggtgaaaccctgtctctactaaaaatacaaaaaaaaattagctggacctggtggcgcatgcctgtaatcctagctactcaggaggctgaggcatgagaatcgcttgaactcagcaagtggaggttgctatgagctgagattgtgccagttcattccaccctgggcaacagggtgagactctgtctcaaaaaaaaaaaaaaaaaaaaaaagaattccatgattcttttgagctctcaagagctactttagccttgccattcctcttgcttttcagcagtagtctggcccaattctctacctcaaaggaaagtttcaaggattaaagggttaatgtttatgaacgattcaaattgtcttcagtgaaacacattagtcacaagaatccctgattgctgcactttaaaaaattctttaccttttccttgagcagattggtccagtccctctgctttctgttctgtctacattgtgtattatttattactatatagtatatgtatctgcataatgtctgaagtcattaatgcagtaacaggtcaagctctttagcattctttgacttttcccaaaatatagatatgacattctcctttatcttccttcttagatggcctaaatctgtctcttcatttacctcaaactcaaattagtatgccattttcatactgaaaattaaatatttttatggattttataaatattgcaacattttagatattgttttggaccatttgtgtatttatatataataaaatcatcaatttaatacttgtaagatcctaacatgtattgattgtaaaagtgaaatatgtaatagccacacttcactgttttaaaataaaagtgcaatttcaagtt

SEQ ID NO: 19737 - DNA, 4362 bp, Homo sapiens
  source 1..4362: mol_type = unassigned DNA
gttccgttcctctgccccaccccgtcccgttccgttccgctgcccagtcctgctggtactcactaggtagtagcggcaacggacgccatggggaccgcctcgtcgctcgtgagccccgcgggcggggaagtgatcgaggacacgtacggggcgggcggcggcgaggcctgcgagatcccggtggaggtgaagcccaaggcccgcctgctgcgcaactcgttccgccgaggcgcgggggcggcagcaggggccgggcccgggtcgctgccccgcggggtgggcgcgggcgggctgctgggggccagcttcaagtccactggctcgtcggtgccagagctggagtacgcggcggccgagtacgagcggctcaggaaggagtacgagatctttcgcgtcagcaagaaccaggagttgttgtccatgggccgccgcgaggccaagctggacacggagaacaagcggctgcgggccgaactgcaggcacttcaaaaaacgtatcagaagatacttcgagaaaaagaaagtgctttagaagcgaaataccaagcaatggagagagcagcaacatttgaacatgacagagataaagttaaaaggcaattcaagatttttagggagaccaaagaaaatgaaattcaggacttactgagggccaagagggagttggagagcaaacttcagaggctacaggctcagggtatccaagtatttgatcctggggagtctgattcagatgacaactgtacagatgtcactgctgctggaacccaatgtgaatattggactggcggagccttgggaagtgaaccttccataggaagcatgatccagcttcagcagtccttcagaggccctgagtttgcccatagttctatagatgtggaaggaccctttgcaaatgttaatagagatgactgggatattgctgtagctagtttattacaagttactcctctgttttcacattctctgtggagtaacactgtcagatgttacctcatttatacagatgaaacccagcctgagatggatcttttccttaaggactattcacctaaacttaagagaatgtgcgagacaatgggatattttttccatgctgtttattttccaatagatgttgaaaatcaatacctcactgtaagaaaatgggaaattgagaaaagttctttagttattttatttattcacttaacattaccaagccttttattggaagactgtgaagaagcttttctgaaaaaccctgaaggaaaacctcgattaatctttcatcgtttggaagatggaaaagtcagttctgactctgtccagcaattgattgatcaagtttctaatctaaacaagaccagcaaagccaagatcattgatcactcaggagatcctgcagaaggagtatataaaacttatatttgtgtagaaaagattattaaacaggacatactgggttttgagaacacagacttggagactaaggatttgggcagtgaggattccattccagaagaagatgattttggtgatgttctgtgggacatacatgatgaacaagagcaaatggaaacttttcagcaggcttctaattcagcccatgagttgggatttgagaaatattaccaacgccttaatgatctagtggcagcaccagccccgattccacctcttctcgtgtctggaggaccaggttctgggaagtctcttcttttatcaaagtggattcaattacaacagaagaattcccccaacacactgattctttcccattttgtgggaaggcccatgtcaaccagctcagagtcctccttgattattaaacgactaactctaaagttgatgcagcactcttggtcagtctctgctctgacactggatcctgctaagcttctggaagaatttccacgttggctggaaaaactctctgctcgtcatcaaggcagcatcatcatcgttattgattctatagatcaagttcagcaagttgaaaaacacatgaaatggctgatagatccactgccagtgaatgtaagagtaattgtttctgtgaatgtagaaacatgccctccagcatggaggttgtggcctacacttcatcttgatcccttaagtccaaaagatgcaaaatctattataattgcagaatgccactctgtagacattaaattgagtaaagagcaggagaagaagctagaacgacactgtcgttctgctacaacctgcaatgccctttatgtcacccttttcggcaaaatgatcgcgcgtgctgggagagcaggcaatttagataaaatccttcatcagtgtttccagtgtcaagatactctttcattatatagacttgttctgcactctatccgggagtccatggcaaatgatgtggataaagagctaatgaagcagatcctctgccttgtcaatgttagtcacaatggtgtgagtgaatcagaactgatggaactctatcctgagatgtcctggactttcttgacctcccttattcacagtttatacaaaatgtgtttgttgacttatggatgtggcttgcttaggtttcaacatctgcaggcttgggaaacagtgagattggagtacctggaaggccccactgttacttcttcatacaggcaaaagctaatcaactatttcaccttgcagctaagtcaggacagagtgacttggagaagtgcagatgaactcccgtggctttttcagcagcagggaagtaaacagaagctgcatgattgccttcttaatctctttgtgtctcaaaacctttataaaaggggacactttgctgagttgctgagttattggcagtttgttggcaaagacaaaagtgcaatggcaacagaatacttcgattcattgaagcagtatgagaaaaactgcgaaggcgaggacaacatgagttgcttagctgatctttatgaaaccttggggcgatttctcaaggatctaggccttctcagtcaggccatagtacctttgcagaggtctttagagattcgagaaacagctttagatcccgatcacccaagagtagcccagtccctccaccaactagcaagtgtatacgtgcagtggaagaagtttggcaatgcagaacaactgtataaacaggcgttggaaatctcagaaaatgcttatggtgcggaccatccatatactgctcgtgaacttgaagcacttgcaactttgtaccagaaacaaaataaatatgaacaagctgaacattttaggaaaaaatcctttaaaattcatcagaaagctataaagaaaaaaggcaacttgtacggatttgcccttttacgtagacgggctttacagttagaagagcttacattaggtaaggacacacctgataatgctcggaccctcaatgaactgggtgttctctactatcttcaaaataacctggaaacagctgaccagtttctgaagcgttccttagaaatgagggagcgagttctaggaccagatcaccctgactgtgctcagtctttgaataatctggcagctctatgcaatgaaaagaaacagtatgataaagcagaagaactttatgaaagagctttagatattcggagacgtgcattagctcctgatcacccttctttggcatatacggtgaagcatcttgccatcttgtataagaaaatggggaaacttgacaaagctgtacctttgtatgaattggctgttgaaattcgacagaaatcttttggcccaaagcaccctagtgtagctactgccttggtgaacttagctgttctttatagccaaatgaaaaaacacgttgaagctttgccattatatgaaagagcattaaagatttatgaagatagcctgggtcggatgcatcctcgagttggagaaacactgaaaaatttagctgtgcttagctatgaaggaggagattttgaaaaagctgctgaattatacaaaagggcaatggaaataaaagaagcagaaacatcactcttgggtggaaaagctccttcacgccattcatcaagtggagacacgtttagcttaaaaacagctcattctcctaatgttttccttcagcaaggacaaaggtaatagcagcagttagaattctttgcaaatgtaccttaagacaaaataattaaacatttggaacatttgaatttgaaactttaaaaaaatgttgtacgaaattttactacgtgtgatttaactgctatttgtatgaagttgtattggattacattaagttggaattgtgattatgtctgttttagttgtttaaaagaattttcctattatatggtatccaaggatgtagacacattagaattataagaagacatgaggagcaaatcatgaagagcggattggtct

SEQ ID NO: 19738 - DNA, 797 bp, Homo sapiens
  source 1..797: mol_type = unassigned DNA
tctgccccaccccgtcccgttccgttccgctgcccagtcctgctggtactcactaggtagtagcggcaacggacgccatggggaccgcctcgtcgctcgtgagccccgcgggcggggaagtgatcgaggacacgtacggggcgggcggcggcgaggcctgcgagatcccggtggaggtgaagcccaaggcccgcctgctgcgcaactcgttccgccgaggcgcgggggcggcagcaggggccgggcccgggtcgctgccccgcggggtgggcgcgggcgggctgctgggggccagcttcaagtccactggctcgtcggtgccagagctggagtacgcggcggccgagtacgagcggctcaggaaggagtacgagatctttcgcgtcagcaagaaccaggagttgttgtccatgggccgccgcgaggccaagctggacacggagaacaagcggctgcgggccgaactgcaggcacttcaaaaaacgtatcagaagatacttcgagaaaaagaaagtgctttagaagcgaaataccaagcaatggagagagcagcaacatttgaacatgacagagataaagttaaaaggcaattcaagatttttagggagaccaaagaaaatgaaattcaggacttactgagggccaagagggagttggagagcaaacttcagaggctacaggctcagggtatccaagtatttgatcctggggagtctgattcagatgacaactgtacagatgtcactgtatcattggaatctgaccaacatcctggaatttttattgctaacttttaa

SEQ ID NO: 19739 - DNA, 486 bp, Homo sapiens
  source 1..486: mol_type = unassigned DNA
ggtactcactaggtagtagcggcaacggacgccatggggaccgcctcgtcgctcgtgagccccgcgggcggggaagtgatcgaggacacgtacggggcgggcggcggcgaggcctgcgagatcccggtggaggtgaagcccaaggcccgcctgctgcgcaactcgttccgccgaggcgcgggggcggcagcaggggccgggcccgggtcgctgccccgcggggtgggcgcgggcgggctgctgggggccagcttcaagtccactggctcgtcggtgccagagctggagtacgcggcggccgagtacgagcggctcaggaaggagtacgagatctttcgcgtcagcaagaaccaggagttgttgtccatgggccgccgcgaggccaagctggacacggagaacaagcggctgcgggccgaactgcagggtctcgctgcggtggcacgatcgcggctcactgcaacctggaactcctgggctcaatga

SEQ ID NO: 19740 - DNA, 2186 bp, Homo sapiens
  source 1..2186: mol_type = unassigned DNA
ataatagcaaatgctgggagagcaggcaatttagataaaatccttcatcagtgtttccagtgtcaagatactctttcattatatagacttgttctgcactctatccgggagtccatggcaaatgatgtggataaagagctaatgaagcagatcctctgccttgtcaatgttagtcacaatggtgtgagtgaatcagaactgatggaactctatcctgagatgtcctggactttcttgacctcccttattcacagtttatacaaaatgtgtttgttgacttatggatgtggcttgcttaggtttcaacatctgcaggcttgggaaacagtgagattggagtacctggaaggccccactgttacttcttcatacaggcaaaagctaatcaactatttcaccttgcagctaagtcaggacagagtgacttggagaagtgcagatgaactcccgtggctttttcagcagcagggaagtaaacagaagctgcatgattgccttcttaatctctttgtgtctcaaaacctttataaaaggggacactttgctgagttgctgagttattggcagtttgttggcaaagacaaaagtgcaatggcaacagaatacttcgattcattgaagcagtatgagaaaaactgcgaaggcgaggacaacatgagttgcttagctgatctttatgaaaccttggggcgatttctcaaggatctaggccttctcagtcaggccatagtacctttgcagaggtctttagagattcgagaaacagctttagatcccgatcacccaagagtagcccagtccctccaccaactagcaagtgtatacgtgcagtggaagaagtttggcaatgcagaacaactgtataaacaggcgttggaaatctcagaaaatgcttatggtgcggaccatccatatactgctcgtgaacttgaagcacttgcaactttgtaccagaaacaaaataaatatgaacaagctgaacattttaggaaaaaatcctttaaaattcatcagaaagctataaagaaaaaaggcaacttgtacggatttgcccttttacgtagacgggctttacagttagaagagcttacattaggtaaggacacacctgataatgctcggaccctcaatgaactgggtgttctctactatcttcaaaataacctggaaacagctgaccagtttctgaagcgttccttagaaatgagggagcgagttctaggaccagatcaccctgactgtgctcagtctttgaataatctggcagctctatgcaatgaaaagaaacagtatgataaagcagaagaactttatgaaagagctttagatattcggagacgtgcattagctcctgatcacccttctttggcatatacggtgaagcatcttgccatcttgtataagaaaatggggaaacttgacaaagctgtacctttgtatgaattggctgttgaaattcgacagaaatcttttggcccaaagcaccctagtgtagctactgccttggtgaacttagctgttctttatagccaaatgaaaaaacacgttgaagctttgccattatatgaaagagcattaaagatttatgaagatagcctgggtcggatgcatcctcgagttggagaaacactgaaaaatttagctgtgcttagctatgaaggaggagattttgaaaaagctgctgaattatacaaaagggcaatggaaataaaagaagcagaaacatcactcttgggtggaaaagctccttcacgccattcatcaagtggagacacgtttagcttaaaaacagctcattctcctaatgttttccttcagcaaggacaaaggaaagtccaatccaaccttttatctccagaagggctttcaaacatatgtgctcaggaaaaaaccaccaggttcacttcttcctaaagcacatcagattgatagagaatttaaagtccagaaagccttgttttcaattggattccccgttcccaagcctatactgtactgcagtgatacttctgtcattggaacagaattttacgtaatggaacatgtgcagggtcgaatcttccgtgatttaacaattcctggacttagcccagcagaacgttcagccatatatgtggccacggtagaaacattggctcagttacgttccttgaatatacagtcactgcagctggaaggatatggta

SEQ ID NO: 19741 - DNA, 4124 bp, Homo sapiens
  source 1..4124: mol_type = unassigned DNA
tctgccccaccccgtcccgttccgttccgctgcccagtcctgctggtactcactaggtagtagcggcaacggacgccatggggaccgcctcgtcgctcgtgagccccgcgggcggggaagtgatcgaggacacgtacggggcgggcggcggcgaggcctgcgagatcccggtggaggtgaagcccaaggcccgcctgctgcgcaactcgttccgccgaggcgcgggggcggcagcaggggccgggcccgggtcgctgccccgcggggtgggcgcgggcgggctgctgggggccagcttcaagtccactggctcgtcggtgccagagctggagtacgcggcggccgagtacgagcggctcaggaaggagtacgagatctttcgcgtcagcaagaaccaggagttgttgtccatgggccgccgcgaggccaagctggacacggagaacaagcggctgcgggccgaactgcaggcacttcaaaaaacgtatcagaagatacttcgagaaaaagaaagtgctttagaagcgaaataccaagcaatggagagagcagcaacatttgaacatgacagagataaagttaaaaggcaattcaagatttttagggagaccaaagaaaatgaaattcaggacttactgagggccaagagggagttggagagcaaacttcagaggctacaggctcagggtatccaagtatttgatcctggggagtctgattcagatgacaactgtacagatgtcactgctgctggaacccaatgtgaatattggactggcggagccttgggaagtgaaccttccataggaagcatgatccagcttcagcagtccttcagaggccctgagtttgcccatagttctatagatgtggaaggaccctttgcaaatgttaatagagatgactgggatattgctgtagctagtttattacaagttactcctctgttttcacattctctgtggagtaacactgtcagatgttacctcatttatacagatgaaacccagcctgagatggatcttttccttaaggactattcacctaaacttaagagaatgtgcgagacaatgggatattttttccatgctgtttattttccaatagatgttgaaaatcaatacctcactgtaagaaaatgggaaattgagaaaagttctttagttattttatttattcacttaacattaccaagccttttattggaagactgtgaagaagcttttctgaaaaaccctgaaggaaaacctcgattaatctttcatcgtttggaagatggaaaagtcagttctgactctgtccagcaattgattgatcaagtttctaatctaaacaagaccagcaaagccaagatcattgatcactcaggagatcctgcagaaggagtatataaaacttatatttgtgtagaaaagattattaaacaggacatactgggttttgagaacacagacttggagactaaggatttgggcagtgaggattccattccagaagaagatgattttggtgatgttctgtgggacatacatgatgaacaagagcaaatggaaacttttcagcaggcttctaattcagcccatgagttgggatttgagaaatattaccaacgccttaatgatctagtggcagcaccagccccgattccacctcttctcgtgtctggaggaccaggttctgggaagtctcttcttttatcaaagtggattcaattacaacagaagaattcccccaacacactgattctttcccattttgtgggaaggcccatgtcaaccagctcagagtcctccttgattattaaacgactaactctaaagttgatgcagcactcttggtcagtctctgctctgacactggatcctgctaagcttctggaagaatttccacgttggctggaaaaactctctgctcgtcatcaaggcagcatcatcatcgttattgattctatagatcaagttcagcaagttgaaaaacacatgaaatggctgatagatccactgccagtgaatgtaagagtaattgtttctgtgaatgtagaaacatgccctccagcatggaggttgtggcctacacttcatcttgatcccttaagtccaaaagatgcaaaatctattataattgcagaatgccactctgtagacattaaattgagtaaagagcaggagaagaagctagaacgacactgtcgttctgctacaacctgcaatgccctttatgtcacccttttcggcaaaatgatcgcgcgtgctgggagagcaggcaatttagataaaatccttcatcagtgtttccagtgtcaagatactctttcattatatagacttgttctgcactctatccgggagtccatggcaaatgatgtggataaagagctaatgaagcagatcctctgccttgtcaatgttagtcacaatggtgtgagtgaatcagaactgatggaactctatcctgagatgtcctggactttcttgacctcccttattcacagtttatacaaaatgtgtttgttgacttatggatgtggcttgcttaggtttcaacatctgcaggcttgggaaacagtgagattggagtacctggaaggccccactgttacttcttcatacaggcaaaagctaatcaactatttcaccttgcagctaagtcaggacagagtgacttggagaagtgcagatgaactcccgtggctttttcagcagcagggaagtaaacagaagctgcatgattgccttcttaatctctttgtgtctcaaaacctttataaaaggggacactttgctgagttgctgagttattggcagtttgttggcaaagacaaaagtgcaatggcaacagaatacttcgattcattgaagcagtatgagaaaaactgcgaaggcgaggacaacatgagttgcttagctgatctttatgaaaccttggggcgatttctcaaggatctaggccttctcagtcaggccatagtacctttgcagaggtctttagagattcgagaaacagctttagatcccgatcacccaagagtagcccagtccctccaccaactagcaagtgtatacgtgcagtggaagaagtttggcaatgcagaacaactgtataaacaggcgttggaaatctcagaaaatgcttatggtgcggaccatccatatactgctcgtgaacttgaagcacttgcaactttgtaccagaaacaaaataaatatgaacaagctgaacattttaggaaaaaatcctttaaaattcatcagaaagctataaagaaaaaaggcaacttgtacggatttgcccttttacgtagacgggctttacagttagaagagcttacattaggtaaggacacacctgataatgctcggaccctcaatgaactgggtgttctctactatcttcaaaataacctggaaacagctgaccagtttctgaagcgttccttagaaatgagggagcgagttctaggaccagatcaccctgactgtgctcagtctttgaataatctggcagctctatgcaatgaaaagaaacagtatgataaagcagaagaactttatgaaagagctttagatattcggagacgtgcattagctcctgatcacccttctttggcatatacggtgaagcatcttgccatcttgtataagaaaatggggaaacttgacaaagctgtacctttgtatgaattggctgttgaaattcgacagaaatcttttggcccaaagcaccctagtgtagctactgccttggtgaacttagctgttctttatagccaaatgaaaaaacacgttgaagctttgccattatatgaaagagcattaaagatttatgaagatagcctgggtcggatgcatcctcgagttggagaaacactgaaaaatttagctgtgcttagctatgaaggaggagattttgaaaaagctgctgaattatacaaaagggcaatggaaataaaagaagcagaaacatcactcttgggtggaaaagctccttcacgccattcatcaagtggagacacgtttagcttaaaaacagctcattctcctaatgttttccttcagcaaggacaaagagcaggaaagtccaatccaaccttttatctccagaagggctttcaaacatatgtgctc

SEQ ID NO: 19742 - DNA, 4994 bp, Homo sapiens
  source 1..4994: mol_type = unassigned DNA
gacgcgaggcgggttcttggactgagtgtgcggcgcggtgcgccgccttccgaggctcctcccgcgggtggcagcggacggggcgcgcccctcggccagtcctcggtcctcaggcttgtggctccgttgagcaccggccgccgggcctctgggtccgtcgagtggagactctctgaaaagcgtgggctccgtggcctccggcgcggccgcggcgggtcggtctcctagatcatccgggaagcccacgggaccctcaggcgggcaggatgaacgactggcacaggatcttcacccaaaacgtgcttgtccctccccacccacagagagcgcgccagccttggaaggaatccacggcattccagtgtgtcctcaagtggctggacggaccggtaattaggcagggcgtgctggaggtactgtcagaggttgaatgccatctgcgagtgtctttctttgatgtcacctaccggcacttctttgggaggacgtggaaaaccacagtgaagccgacgaagagaccgccgtccaggatcgtctttaatgagcccttgtattttcacacatccctaaaccaccctcatatcgtggctgtggtggaagtggtcgctgagggcaagaaacgggatgggagcctccagacattgtcctgtgggtttggaattcttcggatcttcagcaaccagccggactctcctatctctgcttcccaggacaaaaggttgcggctgtaccatggcacccccagagccctcctgcacccgcttctccaggaccccgcagagcaaaacagacacatgaccctcattgagaactgcagcctgcagtacacgctgaagccacacccggccctggagcctgcgttccaccttcttcctgagaaccttctggtgtctggtctgcagcagatacctggcctgcttccagctcatggagaatccggcgacgctctccgaaagcctcgcctccagaagcccatcacggggcacttggatgacttattcttcaccctgtacccctccctggagaagtttgaggaagagctgctggagctccacgtccaggaccacttccaggagggatgtggcccactggacggtggtgccctggagatcctggagcggcgcctgcgtgtgggcgtgcacaatggtctgggcttcgtgcagaggccgcaggtcgttgtactggtgcctgagatggatgtggccttgacgcgctcagctagcttcagcaggaaagtggtctcctcttccaagaccagctccgggagccaagctctggttttgagaagccgcctccgcctcccagagatggtcggccaccctgcatttgcggtcatcttccagctggagtacgtgttcagcagccctgcaggagtggacggcaatgcagcttcggtcacctctctgtccaacctggcatgcatgcacatggtccgctgggctgtttggaaccccttgctggaagctgattctggaagggtgaccctgcctctgcagggtgggatccagcccaacccctcgcactgtctggtctacaaggtaccctcagccagcatgagctctgaagaggtgaagcaggtggagtcgggtacactccggttccagttctcgctgggctcagaagaacacctggatgcacccacggagcctgtcagtggccccaaagtggagcggcggccttccaggaaaccacccacgtccccttcgagcccgccagcgccagtacctcgagttctcgctgccccgcagaactcacctgtgggaccagggttgtcaatttcccagctggcggcctccccgcggtccccgactcagcactgcttggccaggcctacttcacagctaccccatggctctcaggcctccccggcccaggcacaggagttcccgttggaggccggtatctcccacctggaagccgacctgagccagacctccctggtcctggaaacatccattgccgaacagttacaggagctgccgttcacgcctttgcatgcccctattgttgtgggaacccagaccaggagctctgcagggcagccctcgagagcctccatggtgctcctgcagtcctccggctttcccgagattctggatgccaataaacagccagccgaggctgtcagcgctacagaacctgtgacgtttaaccctcagaaggaagaatcagattgtctacaaagcaacgagatggtgctacagtttcttgcctttagcagagtggcccaggactgccgaggaacatcatggccaaagactgtgtatttcaccttccagttctaccgcttcccacccgcaacgacgccacgactgcagctggtccagctggatgaggccggccagcccagctctggcgccctgacccacatcctcgtgcctgtgagcagagatggcacctttgatgctgggtctcctggcttccagctgaggtacatggtgggccctgggttcctgaagccaggtgagcggcgctgctttgcccgctacctggccgtgcagaccctgcagattgacgtctgggacggagactccctgctgctcatcggatctgctgccgtccagatgaagcatctcctccgccaaggccggccggctgtgcaggcctcccacgagcttgaggtcgtggcaactgaatacgagcaggacaacatggtggtgagtggagacatgctggggtttggccgcgtcaagcccatcggcgtccactcggtggtgaagggccggctgcacctgactttggccaacgtgggtcacccgtgtgaacagaaagtgagaggttgtagcacattgccaccgtccagatctcgggtcatctcaaacgatggagccagccgcttctctggaggcagcctcctcacgactggaagctcaaggcgaaaacacgtggtgcaagcacagaagctggcggacgtggacagtgagctggctgccatgctactgacccatgcccggcagggcaaggggccccaggacgtcagccgcgagtcggatgccacccgcaggcgtaagctggagcggatgaggtctgtgcgcctgcaggaggccgggggagacttgggccggcgcgggacgagcgtgttggcgcagcagagcgtccgcacacagcacttgcgggacctacaggtcatcgccgcctaccgggaacgcacgaaggccgagagcatcgccagcctgctgagcctggccatcaccacggagcacacgctccacgccacgctgggggtcgccgagttctttgagtttgtgcttaagaacccccacaacacacagcacacggtgactgtggagatcgacaaccccgagctcagcgtcatcgtggacagtcaggagtggagggacttcaagggtgctgctggcctgcacacaccggtggaggaggacatgttccacctgcgtggcagcctggccccccagctctacctgcgcccccacgagaccgcccacgtccccttcaagttccagagcttctctgcagggcagctggccatggtgcaggcctctcctgggttgagcaacgagaagggcatggacgccgtgtcaccttggaagtccagcgcagtgcccactaaacacgccaaggtcttgttccgagcgagtggtggcaagcccatcgccgtgctctgcctgactgtggagctgcagccccacgtggtggaccaggtcttccgcttctatcacccggagctctccttcctgaagaaggccatccgcctgccgccctggcacacatttccaggtgctccggtgggaatgcttggtgaggaccccccagtccatgttcgctgcagcgacccgaacgtcatctgtgagacccagaatgtgggccccggggaaccacgggacatatttctgaaggtggccagtggtccaagcccggagatcaaagacttctttgtcatcatttactcggatcgctggctggcgacacccacacagacgtggcaggtctacctccactccctgcagcgcgtggatgtctcctgcgtcgcaggccagctgacccgcctgtcccttgtccttcgggggacacagacagtgaggaaagtgagagctttcacctctcatccccaggagctgaagacagaccccaaaggtgtcttcgtgctgccgcctcgtggggtgcaggacctgcatgttggcgtgaggccccttagggccggcagccgctttgtccatctcaacctggtggacgtggattgccaccagctggtggcctcctggctcgtgtgcctctgctgccgccagccgctcatctccaaggcctttgagatcatgttggctgcgggcgaagggaagggtgtcaacaagaggatcacctacaccaacccctacccctcccggaggacattccacctgcacagcgaccacccggagctgctgcggttcagagaggactccttccaggtcgggggtggagagacctacaccatcggcttgcagtttgcgcctagtcagagagtgggtgaggaggagatcctgatctacatcaatgaccatgaggacaaaaacgaagaggcattttgcgtgaaggtcatctaccagtgagggcttgagggtgacgtccttcctgcggcacccagctggggcctgtctgtgcccctcctgccctgcaggctgtcctccccgcctctctgcagcctttcacttcagtgcccacctggctgacctgtgcacttggctgaggaagcagagaccgagcgctggtcattttgtagtacctgcatccagcttagctgctgctgacacccagcaggcctgggttccgtgagcgcgaactccgtggtggtgggtctggctctggtgctgccatctacgcatgtgggaccctcgttatcgctgttgctcaaaatgtattttatgaatcatcctaaatgagaaaattatgtttttcttactggattttgtacaaacataatctattatttgctatgcaatattttatgctggtattatatctgttttttaaattgttgaacaaaatactaaactttt

SEQ ID NO: 19743 - DNA, 1705 bp, Homo sapiens
  source 1..1705: mol_type = unassigned DNA
gcagcagatacctggcctgcttccagctcatggagaatccggcgacgctctccgaaagcctcgcctccagaagcccatcacggggcacttggatgacttattcttcaccctgtacccctccctggagaagtttgaggaagagctgctggagctccacgtccaggaccacttccaggagggatgtggcccactggacggtggtgccctggagatcctggagcggcgcctgcgtgtgggcgtgcacaatggtctgggcttcgtgcagaggccgcaggtcgttgtactggtgcctgagatggatgtggccttgacgcgctcagctagcttcagcaggaaagtggtctcctcttccaagaccagctccgggagccaagctctggttttgagaagccgcctccgcctcccagagatggtcggccaccctgcatttgcggtcatcttccagctggagtacgtgttcagcagccctgcaggagtggacggcaatgcagcttcggtcacctctctgtccaacctggcatgcatgcacatggtccgctgggctgtttggaaccccttgctggaagctgattctggaagggtgaccctgcctctgcagggtgggatccagcccaacccctcgcactgtctggtctacaaggtaccctcagccagcatgagctctgaagaggtgaagcaggtggagtcgggtacactccggttccagttctcgctgggctcagaagaacacctggatgcacccacggagcctgtcagtggccccaaagtggagcggcggccttccaggaaaccacccacgtccccttcgagcccgccagcgccagtacctcgagttctcgctgccccgcagaactcacctgtgggaccagggttgtcaatttcccagctggcggcctccccgcggtccccgactcagcactgcttggccaggcctacttcacagctaccccatggctctcaggcctccccggcccaggcacaggagttcccgttggaggccggtatctcccacctggaagccgacctgagccagacctccctggtcctggaaacatccattgccgaacagttacaggagctgccgttcacgcctttgcatgcccctattgttgtgggaacccagaccaggagctctgcagggcagccctcgagagcctccatggtgctcctgcagtcctccggctttcccgagattctggatgccaataaacagccagccgaggctgtcagcgctacagaacctgtgacgtttaaccctcagaaggaagaatcagattgtctacaaagcaacgagatggtgctacagtttcttgcctttagcagagtggcccaggactgccgaggaacatcatggccaaagactgtgtatttcaccttccagttctaccgcttcccacccgcaacgacgccacgactgcagctggtccagctggatgaggccggccagcccagctctggcgccctgacccacatcctcgtgcctgtgagcagagatggcacctttgatgctgggtctcctggcttccagctgaggtacatggtgggccctgggttcctgaagccaggtgagcggcgctgctttgcccgctacctggccgtgcagaccctgcagattgacgtctgggacggagactccctgctgctcatcggatctgctgccgtccagatgaaggagacttctcatatcttctcagtctcccagtga

SEQ ID NO: 19744 - DNA, 4895 bp, Homo sapiens
  source 1..4895: mol_type = unassigned DNA
aggggaagaggaaaacgagaaagggaggagagtaacggaaagagataaaaaagaaaagcaggtggcagagacacacagagagggacccagagaaagccagacagacgcaggtggctggcagcgggcgctgtgggggtcacagtagggggacctgtgatggccctggggacgacgctcagggcttctctcctgctcctggggctgctgactgaaggcctggcgcagttggcgattcctgcctccgttccccggggcttctgggccctgcctgaaaacctgacggtggtggagggggcctcagtggagctgcgttgtggggtcagcacccctggcagtgcggtgcaatgggccaaagatgggctgctcctgggccccgaccccaggatcccaggcttcccgaggtaccgcctggaaggggaccctgctagaggtgaattccacctgcacatcgaggcctgtgacctcagcgatgacgcggagtatgagtgccaggtcggccgctctgagatggggcccgagctcgtgtctcccagagtgatcctctccatcctggttcctcccaagctgctcctgctgaccccagaggcaggcaccatggtcacctgggtagctgggcaggagtacgtggtcaactgtgtgtctggggacgcgaagccagcacctgacatcaccattctcctgagtggacagacaatatctgacatctctgcaaacgtgaacgagggctcccagcagaaactcttcactgtggaggccacagccagggtgacaccccggagctcagataataggcagttgctggtctgtgaggcgtctagcccagcactggaggcccccatcaaggcctcattcaccgtgaatgttctgttccctccaggaccccctgtcatcgagtggccaggcctggatgaggggcacgtgcgggcaggacagagcttggagctgccgtgcgtggcccgagggggtaatcccttagccacactgcagtggctgaagaatggccagccggtgtccacagcgtggggcacagagcacacccaggcggtggcccgcagtgtgctggtgatgaccgtgaggccagaagaccatggagcgcagctcagctgcgaggcccacaacagcgtgtctgcagggacccaggagcacggcatcacactgcaggtcacctttccccctagtgccattattatcttgggatctgcatcccagactgagaacaagaacgtgacactctcctgtgtcagcaagtccagtcgcccgcgggttctgctacgatggtggctgggctggcggcagctgctgcccatggaggagacagtcatggatggactgcatggcggtcacatctccatgtccaacctgacattcctggcgcggcgggaggacaacggtctgaccctcacatgtgaggccttcagtgaagccttcaccaaggagaccttcaagaagtcgctcatcctgaacgtaaaatatcccgcccagaaactgtggattgagggtcccccagagggccagaagctccgggctgggacccgggtgaggctggtgtgtttggctatcgggggcaacccagagccctccctcatgtggtacaaggactcgcgcaccgtgaccgagtcgcggctgccgcaggagtcgcggcgcgtgcatctcggcagcgtggagaaatctgggagcaccttctcccgagagctggtgctggtcacagggccgtcggacaaccaggccaagttcacgtgcaaggctggacagctcagcgcgtccacgcagctggcggtgcagtttcccccaactaacgtgacgatcctggccaacgcatccgcactgcgcccgggagacgccttaaacttgacatgcgtcagcgtcagcagcaatccgccggtcaacttgtcctgggacaaggaaggggagaggctggagggcgtggccgccccaccccggagagccccattcaaaggctccgccgccgccaggagcgtccttctgcaagtgtcatcccgcgatcatggccagcgcgtgacctgccgcgcccacagcgccgagctccgcgaaaccgtgagctccttctatcgcctcaacgtactgtaccgtccagagttcctgggggagcaggtgctggtggtgaccgcggtggagcagggcgaggcgttgctgcccgtgtccgtgtccgctaaccccgcccccgaggccttcaactggaccttccgcggctatcgcctcagtccagcgggcggcccccggcatcgcatcctgtccagcggggctctgcatctgtggaatgtgacccgcgcggacgacggcctctatcagctgcactgccagaactctgagggcaccgcggaagcgcggctgcggctggacgtgcactatgctcccaccatccgtgccctccaggaccccactgaggtgaacgtcgggggttctgtggacatagtctgcactgtcgatgccaatcccatcctcccgggcatgttcaactgggagagactgggagaagatgaggaggaccagagcctggatgacatggagaagatatccaggggaccaacggggcgcctgcggattcaccatgccaaactggcccaggctggcgcttaccagtgcattgtggacaatggggtggcgcctccagcacgacggctgctccgtcttgttgtcagatttgccccccaggtggagcaccccactcccctaactaaggtggctgcagctggagacagcaccagttctgccaccctccactgccgtgcccgaggtgtccccaacatcgttttcacttggacaaaaaacggggtccctctggatctccaagatcccaggtacacggagcacacataccaccagggtggtgtccacagcagcctcctgaccattgccaacgtgtctgccgcccaggattacgccctcttcacatgtacagccaccaacgcccttggctcggaccaaaccaacattcaacttgtcagcatcagccgccctgaccctccatcaggattaaaggttgtgagtctgaccccacactccgtggggctggagtggaagcctggctttgatgggggcctgccacagaggttctgcatcaggtatgaggccctggggactccagggttccactatgtggatgtcgtaccaccccaggccaccaccttcacgctgactggtctacagccttctacaagatacagggtctggctgctggccagtaatgccttgggggacagtggactggctgacaaagggacccagcttcccatcactaccccaggtctccaccagccttctggagaacctgaagaccagctgcccacagagccaccttcaggcatctcagagaagacagaggcagggtcggaagaggaccgagtcaggaacgaatatgaggagagccagtggacaggagagcgggacactcagagctccacggtcagcacaacagaggcagagccgtattaccgctccctgagggacttcagcccccagctgcccccgacgcaggaggaggtgtcttattcccgaggtttcacaggtgaagatgaggatatggccttccctgggcacttgtatgatgaggtagaaagaacgtaccccccgtctggagcctggggacccctctacgatgaagtgcagatgggaccctgggacctccactggcctgaagacacatatcaggatccaagaggaatctatgaccaggtggccggagacttggacactctggaacccgattctctgcccttcgagctgaggggacatctggtgtaagagccctctcaaccccattgtcctgcacctgcaggaatttacactccactggtctctctcattacagcctgggccgagctggttaggtgagctccataaaacccaaagggacttggtgtcaggagaggacatggagggggctgagtgacagagatggttcagctggtaccagagtagaaacaaggtgcatcctggggttggctttagaaactaaacttctccaaaaggacagggcagattgtaaacgtcgtctcaaaaatgaaatgctgccgggtgcggtgactcacgcctataatcccagcactttgggaggctgaggcgggtggatcacctgaggtcaggagttcgagaccagcctggccaacatggtaaaactccatttctactaaaaatataaaaaattagccaggagtagtggcgcatgcctgtagtcccagctacttgggaggctgatgcatgagaattgcttgaacccaggaggcggaggttgcagtgagctgagatcacgccactgcactccagcctgggcgacagagcgagattctgtctcaaaaaataaaaataaaataaaaataaaaaataaaatgctattctgagggtccctaagtgcttcatgaagtaaagttttcagaagtggggaaagacatatgaaaaactctgttcattttgcattccatgacgtctgaaatagctaataataagtggaatttatgaatccatgttgcatcctacctattattttattatttccgacagttatctaacacaggaggcataaactatgacacatgtaaacataagtatgctccataagcattaaaataaacagacaatcaaaagaagctagaggaaaagaatatgtactgtgtgtgtgctttcgtttatagaaattctaaaataggcaaaactaatctacggtggcagagagcacagcagaggtttcctggggccatgagaggagggttgactgcaaaaaggcatgggagaactttctgaggtgttggaaatattctatataacgattgtggtggtggttgcacgggtgcacagatttgtcaaaactcattgaactttacacttaagatgggtgcatttttattgtacataaatgatatctcaataaaagtgatttt

SEQ ID NO: 19745 - DNA, 5015 bp, Homo sapiens
  source 1..5015: mol_type = unassigned DNA
aggggaagaggaaaacgagaaagggaggagagtaacggaaagagataaaaaagaaaagcaggtggcagagacacacagagagggacccagagaaagccagacagacgcaggtggctggcagcgggcgctgtgggggtcacagtagggggacctgtgatggccctggggacgacgctcagggcttctctcctgctcctggggctgctgactgaaggcctggcgcagttggcgattcctgcctccgttccccggggcttctgggccctgcctgaaaacctgacggtggtggagggggcctcagtggagctgcgttgtggggtcagcacccctggcagtgcggtgcaatgggccaaagatgggctgctcctgggccccgaccccaggatcccaggcttcccgaggtaccgcctggaaggggaccctgctagaggtgaattccacctgcacatcgaggcctgtgacctcagcgatgacgcggagtatgagtgccaggtcggccgctctgagatggggcccgagctcgtgtctcccagagtgatcctctccatcctggttcctcccaagctgctcctgctgaccccagaggcaggcaccatggtcacctgggtagctgggcaggagtacgtggtcaactgtgtgtctggggacgcgaagccagcacctgacatcaccattctcctgagtggacagacaatatctgacatctctgcaaacgtgaacgagggctcccagcagaaactcttcactgtggaggccacagccagggtgacaccccggagctcagataataggcagttgctggtctgtgaggcgtctagcccagcactggaggcccccatcaaggcctcattcaccgtgaatgttctgttccctccaggaccccctgtcatcgagtggccaggcctggatgaggggcacgtgcgggcaggacagagcttggagctgccgtgcgtggcccgagggggtaatcccttagccacactgcagtggctgaagaatggccagccggtgtccacagcgtggggcacagagcacacccaggcggtggcccgcagtgtgctggtgatgaccgtgaggccagaagaccatggagcgcagctcagctgcgaggcccacaacagcgtgtctgcagggacccaggagcacggcatcacactgcaggtcacctttccccctagtgccattattatcttgggatctgcatcccagactgagaacaagaacgtgacactctcctgtgtcagcaagtccagtcgcccgcgggttctgctacgatggtggctgggctggcggcagctgctgcccatggaggagacagtcatggatggactgcatggcggtcacatctccatgtccaacctgacattcctggcgcggcgggaggacaacggtctgaccctcacatgtgaggccttcagtgaagccttcaccaaggagaccttcaagaagtcgctcatcctgaacgtaaaatatcccgcccagaaactgtggattgagggtcccccagagggccagaagctccgggctgggacccgggtgaggctggtgtgtttggctatcgggggcaacccagagccctccctcatgtggtacaaggactcgcgcaccgtgaccgagtcgcggctgccgcaggagtcgcggcgcgtgcatctcggcagcgtggagaaatctgggagcaccttctcccgagagctggtgctggtcacagggccgtcggacaaccaggccaagttcacgtgcaaggctggacagctcagcgcgtccacgcagctggcggtgcagtttcccccaactaacgtgacgatcctggccaacgcatccgcactgcgcccgggagacgccttaaacttgacatgcgtcagcgtcagcagcaatccgccggtcaacttgtcctgggacaaggaaggggagaggctggagggcgtggccgccccaccccggagagccccattcaaaggctccgccgccgccaggagcgtccttctgcaagtgtcatcccgcgatcatggccagcgcgtgacctgccgcgcccacagcgccgagctccgcgaaaccgtgagctccttctatcgcctcaacgtactgtaccgtccagagttcctgggggagcaggtgctggtggtgaccgcggtggagcagggcgaggcgttgctgcccgtgtccgtgtccgctaaccccgcccccgaggccttcaactggaccttccgcggctatcgcctcagtccagcgggcggcccccggcatcgcatcctgtccagcggggctctgcatctgtggaatgtgacccgcgcggacgacggcctctatcagctgcactgccagaactctgagggcaccgcggaagcgcggctgcggctggacgtgcactatgctcccaccatccgtgccctccaggaccccactgaggtgaacgtcgggggttctgtggacatagtctgcactgtcgatgccaatcccatcctcccgggcatgttcaactgggagagactgggagaagatgaggaggaccagagcctggatgacatggagaagatatccaggggaccaacggggcgcctgcggattcaccatgccaaactggcccaggctggcgcttaccagtgcattgtggacaatggggtggcgcctccagcacgacggctgctccgtcttgttgtcagatttgccccccaggtggagcaccccactcccctaactaaggtggctgcagctggagacagcaccagttctgccaccctccactgccgtgcccgaggtgtccccaacatcgttttcacttggacaaaaaacggggtccctctggatctccaagatcccaggtacacggagcacacataccaccagggtggtgtccacagcagcctcctgaccattgccaacgtgtctgccgcccaggattacgccctcttcacatgtacagccaccaacgcccttggctcggaccaaaccaacattcaacttgtcagcatcagccgccctgaccctccatcaggattaaaggttgtgagtctgaccccacactccgtggggctggagtggaagcctggctttgatgggggcctgccacagaggttctgcatcaggtatgaggccctggggactccagggttccactatgtggatgtcgtaccaccccaggccaccaccttcacgctgactggtctacagccttctacaagatacagggtctggctgctggccagtaatgccttgggggacagtggactggctgacaaagggacccagcttcccatcactaccccaggtctccaccagccttctggagaacctgaagaccagctgcccacagagccaccttcaggaccctcggggctgcccctgctgcctgtgctgttcgctcttggggggcttctgctcctctccaatgcctcctgtgtcgggggggtcctctggcagcggagactcaggcgtcttgctgagggcatctcagagaagacagaggcagggtcggaagaggaccgagtcaggaacgaatatgaggagagccagtggacaggagagcgggacactcagagctccacggtcagcacaacagaggcagagccgtattaccgctccctgagggacttcagcccccagctgcccccgacgcaggaggaggtgtcttattcccgaggtttcacaggtgaagatgaggatatggccttccctgggcacttgtatgatgaggtagaaagaacgtaccccccgtctggagcctggggacccctctacgatgaagtgcagatgggaccctgggacctccactggcctgaagacacatatcaggatccaagaggaatctatgaccaggtggccggagacttggacactctggaacccgattctctgcccttcgagctgaggggacatctggtgtaagagccctctcaaccccattgtcctgcacctgcaggaatttacactccactggtctctctcattacagcctgggccgagctggttaggtgagctccataaaacccaaagggacttggtgtcaggagaggacatggagggggctgagtgacagagatggttcagctggtaccagagtagaaacaaggtgcatcctggggttggctttagaaactaaacttctccaaaaggacagggcagattgtaaacgtcgtctcaaaaatgaaatgctgccgggtgcggtgactcacgcctataatcccagcactttgggaggctgaggcgggtggatcacctgaggtcaggagttcgagaccagcctggccaacatggtaaaactccatttctactaaaaatataaaaaattagccaggagtagtggcgcatgcctgtagtcccagctacttgggaggctgatgcatgagaattgcttgaacccaggaggcggaggttgcagtgagctgagatcacgccactgcactccagcctgggcgacagagcgagattctgtctcaaaaaataaaaataaaataaaaataaaaaataaaatgctattctgagggtccctaagtgcttcatgaagtaaagttttcagaagtggggaaagacatatgaaaaactctgttcattttgcattccatgacgtctgaaatagctaataataagtggaatttatgaatccatgttgcatcctacctattattttattatttccgacagttatctaacacaggaggcataaactatgacacatgtaaacataagtatgctccataagcattaaaataaacagacaatcaaaagaagctagaggaaaagaatatgtactgtgtgtgtgctttcgtttatagaaattctaaaataggcaaaactaatctacggtggcagagagcacagcagaggtttcctggggccatgagaggagggttgactgcaaaaaggcatgggagaactttctgaggtgttggaaatattctatataacgattgtggtggtggttgcacgggtgcacagatttgtcaaaactcattgaactttacacttaagatgggtgcatttttattgtacataaatgatatctcaataaaagtgatttt

SEQ ID NO: 19746 - DNA, 1855 bp, Homo sapiens
  source 1..1855: mol_type = unassigned DNA
cacagggactgcgctcccgtgcccctagcgctcccgcgctgctgctccagccgcccggcagctctgaggatggagaggagggcgcggagctcctccagggagtcccgcgggcgaggcggcaggactccgcacaaggagaacaagagggcaaaggccgagaggagcggcggaggccgcgggcgccaggaggctgggcccgagccgtcgggctccggacgggcggggaccccgggggagccccgagcgcccgccgccacggtggtggacgtggatgaggtccgaggctccggcgaggagggcaccgaggtggtggcgctgttggagagcgagcggcccgaggaaggtaccaaatcctccggcttaggggcctgtgagtggcttcttgtcctcatttccctgctcttcatcatcatgaccttccctttttccatctggttctgcgtaaaggttgtacaagagtatgaaagagtaattatattccgactgggacatctgcttcctggaagagccaaaggccctggtcttttcttttttttgccctgcctggatacctaccacaaggttgaccttcgtctccaaactctggagataccttttcatgagatcgtgaccaaagacatgtttataatggagatagatgccatttgctactaccgaatggaaaatgcctctcttctcctaagcagtcttgctcatgtatctaaagctgtgcaattccttgtgcaaaccactatgaagcgtctcctagcacatcgatccctcactgaaattcttctagagaggaagagcatcgcccaagatgcaaaggttgccttggattcagtgacctgtatttggggaatcaaagtggagagaatagaaattaaagatgtgaggttgccagctgggcttcagcactcactggctgtggaggctgaagcgcaaagacaagccaaagtgcggatgattgctgcagaagcggaaaaggctgcttctgagtccctgaggatggcagctgagattctgtcaggcacccctgctgccgttcagcttcgatacctccacacccttcagtctctgtccacagagaagccttccactgtggttttacctttgccatttgacctactgaattgcctgtcttctcccagcaacagaactcagggaagcctccccttcccaagtccttccaaacctgttgagccactaaatcctaaaaagaaagactctcccatgttataggaaggatggggcataatgtgactgtaaaggggcctgccatagaaaagtcacatgcctgagggagacactctgtcctcattccctgcccttcctttggttgccatatggaatggccatggaatgcacgaagtcacaatgcaccatccatgagaagacggtgaaatgatgtaatgacagagaaggcagacaacatgtttccgtgactcatctagtcagagcaattatgggaaacagctttggtcaacattctactttggaaagaattttgagtctagatgtggttaaattttgacttctgggaacttggttcagatgtccctttcactgtatgtcctctgacccctttggcaaggttgccacagctcccacagcccttcctacaagcacctatcattgggcttgtcacactctattgctcttctgtcccaaagatgcagtcttctctccaatgatactaccaagtcttagttttcctcaaccacactcaatctttttgctccaccctgaattcctcacacctaaccctgatagttacctaaagtgacacttaaatgtttcagagtgaatgcaaaaaagagagatgtacttggagtcggatatacaatttatccctaattaaagcatttaaaaggaa

SEQ ID NO: 19747 - DNA, 1670 bp, Homo sapiens
  source 1..1670: mol_type = unassigned DNA
cgcggacccgcagcgactccacagggactgcgctcccgtgcccctagcgctcccgcgctgctgctccagccgcccggcagctctgaggatggagaggagggcgcggagctcctccagggagtcccgcgggcgaggcggcaggactccgcacaaggagaacaagagggcaaaggccgagaggagcggcggaggccgcgggcgccaggaggctgggcccgagccgtcgggctccggacgggcggggaccccgggggagccccgagcgcccgccgccacggtggtggacgtggatgaggtccgaggctccggcgaggagggcaccgaggtggtggcgctgttggagagcgagcggcccgaggaaggtaccaaatcctccggcttaggggcctgtgagtggcttcttgtcctcatttccctgctcttcatcatcatgaccttccctttttccatctggttctgcgtaaaggttgtacaagagtatgaaagagtaattatattccgactgggacatctgcttcctggaagagccaaaggccctggtcttttcttttttttgccctgcctggatacctaccacaaggttgaccttcgtctccaaactctggagataccttttcatgaggttgccttggattcagtgacctgtatttggggaatcaaagtggagagaatagaaattaaagatgtgaggttgccagctgggcttcagcactcactggctgtggaggctgaagcgcaaagacaagccaaagtgcggatgattgctgcagaagcggaaaaggctgcttctgagtccctgaggatggcagctgagattctgtcaggcacccctgctgccgttcagcttcgatacctccacacccttcagtctctgtccacagagaagccttccactgtggttttacctttgccatttgacctactgaattgcctgtcttctcccagcaacagaactcagggaagcctccccttcccaagtccttccaaacctgttgagccactaaatcctaaaaagaaagactctcccatgttataggaaggatggggcataatgtgactgtaaaggggcctgccatagaaaagtcacatgcctgagggagacactctgtcctcattccctgcccttcctttggttgccatatggaatggccatggaatgcacgaagtcacaatgcaccatccatgagaagacggtgaaatgatgtaatgacagagaaggcagacaacatgtttccgtgactcatctagtcagagcaattatgggaaacagctttggtcaacattctactttggaaagaattttgagtctagatgtggttaaattttgacttctgggaacttggttcagatgtccctttcactgtatgtcctctgacccctttggcaaggttgccacagctcccacagcccttcctacaagcacctatcattgggcttgtcacactctattgctcttctgtcccaaagatgcagtcttctctccaatgatactaccaagtcttagttttcctcaaccacactcaatctttttgctccaccctgaattcctcacacctaaccctgatagttacctaaagtgacacttaaatgtttcagagtgaatgcaaaaaagagagatgtacttggagtcggatatacaatttatccctaattaaagcatttaaaaggaa

SEQ ID NO: 19748 - DNA, 3417 bp, Homo sapiens
  source 1..3417: mol_type = unassigned DNA
agagcgagccgagccgcggccagctccggcgggcagggggggcgctggagcgcagcgcagcgcagccccatcagtccgcaaagcggaccgagctggaagtcgagcgctgccgcgggaggcgggcgatgggggcaggtgccaccggccgcgccatggacgggccgcgcctgctgctgttgctgcttctgggggtgtcccttggaggtgccaaggaggcatgccccacaggcctgtacacacacagcggtgagtgctgcaaagcctgcaacctgggcgagggtgtggcccagccttgtggagccaaccagaccgtgtgtgagccctgcctggacagcgtgacgttctccgacgtggtgagcgcgaccgagccgtgcaagccgtgcaccgagtgcgtggggctccagagcatgtcggcgccgtgcgtggaggccgacgacgccgtgtgccgctgcgcctacggctactaccaggatgagacgactgggcgctgcgaggcgtgccgcgtgtgcgaggcgggctcgggcctcgtgttctcctgccaggacaagcagaacaccgtgtgcgaggagtgccccgacggcacgtattccgacgaggccaaccacgtggacccgtgcctgccctgcaccgtgtgcgaggacaccgagcgccagctccgcgagtgcacacgctgggccgacgccgagtgcgaggagatccctggccgttggattacacggtccacacccccagagggctcggacagcacagcccccagcacccaggagcctgaggcacctccagaacaagacctcatagccagcacggtggcaggtgtggtgaccacagtgatgggcagctcccagcccgtggtgacccgaggcaccaccgacaacctcatccctgtctattgctccatcctggctgctgtggttgtgggccttgtggcctacatagccttcaagaggtggaacagctgcaagcagaacaagcaaggagccaacagccggccagtgaaccagacgcccccaccagagggagaaaaactccacagcgacagtggcatctccgtggacagccagagcctgcatgaccagcagccccacacgcagacagcctcgggccaggccctcaagggtgacggaggcctctacagcagcctgcccccagccaagcgggaggaggtggagaagcttctcaacggctctgcgggggacacctggcggcacctggcgggcgagctgggctaccagcccgagcacatagactcctttacccatgaggcctgccccgttcgcgccctgcttgcaagctgggccacccaggacagcgccacactggacgccctcctggccgccctgcgccgcatccagcgagccgacctcgtggagagtctgtgcagtgagtccactgccacatccccggtgtgagcccaaccggggagcccccgccccgccccacattccgacaaccgatgctccagccaacccctgtggagcccgcacccccaccctttggggggggcccgcctggcagaactgagctcctctgggcaggacctcagagtccaggccccaaaaccacagccctgtcagtgcagcccgtgtggccccttcacttctgaccacacttcctgtccagagagagaagtgcccctgctgcctccccaaccctgcccctgccccgtcaccatctcaggccacctgcccccttctcccacactgctaggtgggccagcccctcccaccacagcaggtgtcatatatggggggccaacaccagggatggtactagggggaagtgacaaggccccagagactcagagggaggaatcgaggaaccagagccatggactctacactgtgaacttggggaacaagggtggcatcccagtggcctcaaccctccctcagcccctcttgccccccaccccagcctaagatgaagaggatcggaggcttgtcagagctgggaggggttttcgaagctcagcccacccccctcattttggatataggtcagtgaggcccagggagaggccatgattcgcccaaagccagacagcaacggggaggccaagtgcaggctggcaccgccttctctaaatgaggggcctcaggtttgcctgagggcgaggggagggtggcaggtgaccttctgggaaatggcttgaagccaagtcagctttgccttccacgctgtctccagacccccaccccttccccactgcctgcccacccgtggagatgggatgcttgcctagggcctggtccatgatggagtcaggtttggggttcgtggaaagggtgctgcttccctctgcctgtccctctcaggcatgcctgtgtgacatcagtggcatggctccagtctgctgccctccatcccgacatggacccggagctaacactggcccctagaatcagcctaggggtcagggaccaaggacccctcaccttgcaacacacagacacacgcacacacacacacaggaggagaaatctcacttttctccatgagttttttctcttgggctgagactggatactgcccggggcagctgccagagaagcatcggagggaattgaggtctgctcggccgtcttcactcgcccccgggtttggcgggccaaggactgccgaccgaggctggagctggcgtctgtcttcaagggcttacacgtggaggaatgctcccccatcctccccttccctgcaaacatggggttggctgggcccagaaggttgtgatgaagaaaagtgggccagtgtgggaatgcggcaagaaggaattgacttcgactgtgacctgtggggatttctcccagctctagacaaccctgcaaaggactgttttttcctgagcttggccagaagggggccatgaggcctcagtggactttccaccccctccctggcctgttctgttttgcctgaagttggagtgagtgtggctcccctctatttagcatgacaagccccaggcaggctgtgcgctgacaaccaccgctccccagcccagggttcccccagccctgtggaagggactaggagcactgtagtaaatggcaattctttgacctcaacctgtgatgaggggaggaaactcacctgctggcccctcacctgggcacctggggagtgggacagagtctgggtgtatttattttcctccccagcaggtggggagggggtttgggggcttgcaagtatgttttagcatgtgtttggttctggggcccctttttactccccttgagctgagatggaacccttttggcccccgagctgggggccatgagctccagacccccagcaaccctcctatcacctcccctccttgcctcctgtgtaatcatttcttgggccctcctgaaacttacacacaaaacgttaagtgatgaacattaaatagcaaagaaagaaaaatagtacaaa

SEQ ID NO: 19749 - DNA, 1840 bp, Homo sapiens
  source 1..1840: mol_type = unassigned DNA
gtagaccaggagagcggggaggagggaccggatcccagaggggcaacgacttgggctccgggtctgggcaagagcgagggtccccgcgcgaagacccaaggaaggaggggagctgggcgtggaggacctgggcgcttgggaaggtgtaccccgacaggaacctgccgtctgcagcccctgcggctcccgcctccgcctcggcgcgcggctgctcggtctgggatggctgtgcgcggtccgagtttcttcctgggccgcggtgtcccttggaggtgccaaggaggcatgccccacaggcctgtacacacacagcggtgagtgctgcaaagcctgcaacctgggcgagggtgtggcccagccttgtggagccaaccagaccgtgtgtgagccctgcctggacagcgtgacgttctccgacgtggtgagcgcgaccgagccgtgcaagccgtgcaccgagtgcgtggggctccagagcatgtcggcgccgtgcgtggaggccgacgacgccgtgtgccgctgcgcctacggctactaccaggatgagacgactgggcgctgcgaggcgtgccgcgtgtgcgaggcgggctcgggcctcgtgttctcctgccaggacaagcagaacaccgtgtgcgaggagtgccccgacggcacgtattccgacgaggccaaccacgtggacccgtgcctgccctgcaccgtgtgcgaggacaccgagcgccagctccgcgagtgcacacgctgggccgacgccgagtgcgaggagatccctggccgttggattacacggtccacacccccagagggctcggacagcacagcccccagcacccaggagcctgaggcacctccagaacaagacctcatagccagcacggtggcaggtgtggtgaccacagtgatgggcagctcccagcccgtggtgacccgaggcaccaccgacaacctcatccctgtctattgctccatcctggctgctgtggttgtgggccttgtggcctacatagccttcaagaggtggaacagctgcaagcagaacaagcaaggagccaacagccggccagtgaaccagacgcccccaccagagggagaaaaactccacagcgacagtggcatctccgtggacagccagagcctgcatgaccagcagccccacacgcagacagcctcgggccaggccctcaagggtgacggaggcctctacagcagcctgcccccagccaagcgggaggaggtggagaagcttctcaacggctctgcgggggacacctggcggcacctggcgggcgagctgggctaccagcccgagcacatagactcctttacccatgaggcctgccccgttcgcgccctgcttgcaagctgggccacccaggacagcgccacactggacgccctcctggccgccctgcgccgcatccagcgagccgacctcgtggagagtctgtgcagtgagtccactgccacatccccggtgtgagcccaaccggggagcccccgccccgccccacattccgacaaccgatgctccagccaacccctgtggagcccgcacccccaccctttggggggggcccgcctggcagaactgagctcctctgggcaggacctcagagtccaggccccaaaaccacagccctgtcagtgcagcccgtgtggccccttcacttctgaccacacttcctgtccagagagagaagtgcccctgctgcctccccaaccctgcccctgccccgtcaccatctcaggccacctgcccccttctcccacactgctaggtgggccagcccctcccaccacagcaggtgtcatatatggggggccaacaccagggatggtacta

SEQ ID NO: 19750 - DNA, 884 bp, Homo sapiens
  source 1..884: mol_type = unassigned DNA
accccatcccccactcctataccggtcctccattttggtgcctgcaaagctctgggaaagaatcccgggaaacgaaaaatggtgggtttgggggaagggaggtaaggggagaaagctggagggaggggctttaattggaggccccgtagaggacgcgcggaacttctaaggtgggaaaaaacgaaattaaaaaatcctttgatatcagggctctgaatcctgctggtcagagcaccaagcattcagtctctctccttgcctttgtcttacttgtgttcaaagaaaaacaaccagaaaaaaaaaatctcatcatggcaaatattcaccaggaaaacgaagagatggagcagcctatgcagaatggagaggaagaccgccctttgggaggaggtgaaggccaccagcctgcaggaaatcgacggggacaggctcgccgacttgcccctaattttcgatgggccatacccaataggcagatcaatgatgggatgggtggagatggagatgatatggaaatattcatggaggagatgagagaaatcagaagaaaacttagggagctgcagttgaggaattgtctgcgtatccttatgggggagctctctaatcaccatgaccatcatgatgaattttgccttatgccttgactcctgccatttatcatgagattaatactgtgattcccgctgttttctttttccttgcattttcctaatatgcctttactgatccgtttgctgtgaaccctatgttatttccatgtgtcaagtgggtcttgtgttgccagcttctatttgaagattgcctttgcactcagtgtaagtttctgtcagcagtagtttcacccatttgcatggaaaaatttaaagctaataaagcaattt

SEQ ID NO: 19751 - DNA, 921 bp, Homo sapiens
  source 1..921: mol_type = unassigned DNA
ggctgtgcgctctggggcacctcatgcagacgggagtagggaggctgttttttgcgcgtgcatatggcggtggcgggtggggggaagggggagatcctgctgcactggccgcccaagttggggggcgagctcggtggtgacgcgcggccctcacgtgacccagagctgcagagcgacgcagccttcggtgcagtcgtcactcgcgtctggctaccagctccccgctgccctgagctcggcgggctggcattcggcccggggaaaagcggagcaggtctgcgaggctaagtgtctccgcggcgcacctcgcggcgagaatccggaggagaaggagactgcaaggataggcccaggaaaacgaagagatggagcagcctatgcagaatggagaggaagaccgccctttgggaggaggtgaaggccaccagcctgcaggaaatcgacggggacaggctcgccgacttgcccctaattttcgatgggccatacccaataggcagatcaatgatgggatgggtggagatggagatgatatggaaatattcatggaggagatgagagaaatcagaagaaaacttagggagctgcagttgaggaattgtctgcgtatccttatgggggagctctctaatcaccatgaccatcatgatgaattttgccttatgccttgactcctgccatttatcatgagattaatactgtgattcccgctgttttctttttccttgcattttcctaatatgcctttactgatccgtttgctgtgaaccctatgttatttccatgtgtcaagtgggtcttgtgttgccagcttctatttgaagattgcctttgcactcagtgtaagtttctgtcagcagtagtttcacccatttgcatggaaaaatttaaagctaataaagcaatttaaaaagcaatcta

SEQ ID NO: 19752 - DNA, 753 bp, Homo sapiens
  source 1..753: mol_type = unassigned DNA
gaggggagcccgggctcggagcacggaaagggccgggcggcggcgggtcttcgctagcgttccgctgcagcagcccccaccccccacaacccccaccccggctcgactgcaggtctgcgaggctaagtgtctccgcggcgcacctcgcggcgagaatccggaggagaaggagactgcaaggataggcccaggaaaacgaagagatggagcagcctatgcagaatggagaggaagaccgccctttgggaggaggtgaaggccaccagcctgcaggaaatcgacggggacaggctcgccgacttgcccctaattttcgatgggccatacccaataggcagatcaatgatgggatgggtggagatggagatgatatggaaatattcatggaggagatgagagaaatcagaagaaaacttagggagctgcagttgaggaattgtctgcgtatccttatgggggagctctctaatcaccatgaccatcatgatgaattttgccttatgccttgactcctgccatttatcatgagattaatactgtgattcccgctgttttctttttccttgcattttcctaatatgcctttactgatccgtttgctgtgaaccctatgttatttccatgtgtcaagtgggtcttgtgttgccagcttctatttgaagattgcctttgcactcagtgtaagtttctgtcagcagtagtttcacccatttgcatggaaaaatttaaagctaataaagcaatttaaaaagc

SEQ ID NO: 19753 - DNA, 805 bp, Homo sapiens
  source 1..805: mol_type = unassigned DNA
cggtggcgggtggggggaagggggagatcctgctgcactggccgcccaagttggggggcgagctcggtggtgacgcgcggccctcacgtgacccagagctgcagagcgacgcagccttcggtgcagtcgtcactcgcgtctggctaccagctccccgctgccctgagctcggcgggctggcattcggcccggggaaaagcggagcagaaaaacaaccagaaaaaaaaaatctcatcatggcaaatattcaccaggaaaacgaagagatggagcagcctatgcagaatggagaggaagaccgccctttgggaggaggtgaaggccaccagcctgcaggaaatcgacggggacaggctcgccgacttgcccctaattttcgatgggccatacccaataggcagatcaatgatgggatgggtggagatggagatgatatggaaatattcatggaggagatgagagaaatcagaagaaaacttagggagctgcagttgaggaattgtctgcgtatccttatgggggagctctctaatcaccatgaccatcatgatgaattttgccttatgccttgactcctgccatttatcatgagattaatactgtgattcccgctgttttctttttccttgcattttcctaatatgcctttactgatccgtttgctgtgaaccctatgttatttccatgtgtcaagtgggtcttgtgttgccagcttctatttgaagattgcctttgcactcagtgtaagtttctgtcagcagtagtttcacccatttgcatggaaaaatttaaagctaataaagca

SEQ ID NO: 19754 - DNA, 913 bp, Homo sapiens
  source 1..913: mol_type = unassigned DNA
gcgtgcatatggcggtggcgggtggggggaagggggagatcctgctgcactggccgcccaagttggggggcgagctcggtggtgacgcgcggccctcacgtgacccagagctgcagagcgacgcagccttcggtgcagtcgtcactcgcgtctggctaccagctccccgctgccctgagctcggcgggctggcattcggcccggggaaaagcggagcaggtctgcgaggctaagtgtctccgcggcgcacctcgcggcgagaatccggaggagaaggagactgcaaggataggcccagaaaaacaaccagaaaaaaaaaatctcatcatggcaaatattcaccaggaaaacgaagagatggagcagcctatgcagaatggagaggaagaccgccctttgggaggaggtgaaggccaccagcctgcaggaaatcgacggggacaggctcgccgacttgcccctaattttcgatgggccatacccaataggcagatcaatgatgggatgggtggagatggagatgatatggaaatattcatggaggagatgagagaaatcagaagaaaacttagggagctgcagttgaggaattgtctgcgtatccttatgggggagctctctaatcaccatgaccatcatgatgaattttgccttatgccttgactcctgccatttatcatgagattaatactgtgattcccgctgttttctttttccttgcattttcctaatatgcctttactgatccgtttgctgtgaaccctatgttatttccatgtgtcaagtgggtcttgtgttgccagcttctatttgaagattgcctttgcactcagtgtaagtttctgtcagcagtagtttcacccatttgcatggaaaaatttaaagctaataaagcaatttaaaaagcaatcta

SEQ ID NO: 19755 - DNA, 2563 bp, Homo sapiens
  source 1..2563: mol_type = unassigned DNA
aggtgtgtgtgtctgagggtgtgtgtgtgagtgtggctggccccagtacctggccaagcccaccacttccacctgggccctacacccccacaatgtgtacccctcttatctgccctggagcctgtacagccatgccacgctacccctgagagtctagaaagctggtcactaactttgcagacggatgagccttgagcacccagaggagactggggctgtcaacgctgccccttgtcctgccggcttggatcccctgacagggtccttctaggcttcagactggcaccctgaccatggaaccctgaagtggcagtgacttctagagctcagtggcagaccccacgacccttcctcccccttcctccccctcccaccaccagctttcaagctcccagagggaggggtggggaggggatcctgatctcacagggcagggggcttccatcatgatgctcaactcagacaccatggagctggacctgccgcccacccactcagagactgagtcgggcttcagtgactgtgggggcggggcgggccctgatggtgccgggcctgggggtccgggagggggccaggcccgaggcccagagccgggagagcctggccggaaagacctgcagcatctgagccgcgaggagcgccggcgccggcgccgcgccacagccaagtaccgcacggcccacgccacgcgagaacgcatccgcgtggaagccttcaacctggccttcgccgagctgcgcaagctgctgcctacgctgccccccgacaagaagctctccaagattgagattctgcgcctggccatctgctatatctcctacctgaaccacgtgctggacgtctgaactcagcctgtctcccacctcccgggcctctctggggcccctttccaccgctcactgcttagaaaggccgcatcctccccgagcccttataccttggcatggagtcccaaaggccctgggcacaggcagagagcccaccggctggtcatgagggcctcttcctttctctgacccaggcacctcgagggctattctcctgggttccttccggggtttattgctgaggcccagctgtgcagaattgtttgctagtgtggttggtatggaatccttgctggctttactaagccagccacacttggagtctgcccccaagctctctcactgaatgctgcctcttctacccctatgtccaaattttcagccaccacagacctcagctgtgtatcctatctgttctagcttctcctgcccctggtggggatgggctgtcagaattgcaagggaggaaggctggggttagagtggggagtgggcttcttcctccaagatctcagtctctcagtgcttggcagaggggtgaggccctggggaggcaggggttggtgccctgactcctgtgaggggaatctcagtagctgggaattatggaaaaactcttcctgtttctgtccatcttgttcctgtggcttagcacatacagacctcagatcttacttggtagtgagtgccttgccctctttgagctatttggctacttccctgtccctctgactcctactgtcccaattttctccctccctgtgtgtcactagagaaaaaaaaaaacaaaaacctagattccggattaggggatgacatcccaaacagcccggagtatttgcagaaggctcaggcaacgagtgggccacatctcacttctgcttcctcatctcagcccactctgaaaatgtgcagcaccctcactggttcctccccccaacgcaaggaggatgcccaattgttgccctctgaaaatgcacagttctcctggccctaggacttacttattacatttttttctctttccttgagctgcctttggcaagggaagagacccccaactctgcgcccctactccatgctgctgatccccacctgcgcactatagctcagggtcagcagtggaatgaagggccttagaacctgcatagaagaaatgaactcactgcatttctgtgctccctcctccctcgcaccaaactcctagctctacaagtatatttatttatttatttatttattcatctatttatttacttatttatttatttataaatattgctatttattgccgagttgtgcactttggggtagagtgaggggctcccagcagctctagctgggtctctcttgcttcctccctgcttacgcctttccttttcttgctccttcttcaactcctggtgtgtgtgagcatgccctttgcttgccacaccatatcctttccccagatccacctgtcctgacactctagtcctccaggatagtgctcctcccccagctccagggctcctggatgtccttcctcaactccctccacccctagacaatcctacctggtcccatctgcctcttttctctccccagcctgccctgtgacccttgcctcttcctgatactcccaagagcaggccccaggggtctgtgtcacatatctctgtgtgattccttctggttgcatccccaatttcatacaaaaagaaaaataaaagtgacctcgttctagcaccagg

SEQ ID NO: 19756 - DNA, 2512 bp, Homo sapiens
  source 1..2512: mol_type = unassigned DNA
aattggtaccaggagagcccagaagccacacacgcatctctgcctctttgctctggctctcccaccctcttcccgtctttctctgcttccttgtcactgttactccaggagacgttcacttttcaccaacctttctccaagcatctccaagccactgactatatatattttgctacaagagacctagaagaggaaaaaaggcacgagacttttcaacacatcgtttaaaaaaatcatcaacgaatttcttgcaatgtttgagaacaattaaaaggaaaaagcgttttttaaaaaatctatcaactaagtgaacaatcattcatatcgtctacatcctgagatattattgtccctcgctgcggacaccagcgagatgacagctgctttttcatttttgaatgtaataaatatttgctgcttttaatattttccggaatctcccctcgctattccttggaattttaactctaaagattggagaacagattatcaaaaaggcttttgcaagcctccaaaatgatgctgagtccggaccaagcagcagattcggaccatcccagctcggcgcactcggatccggagtccctgggcggcacggacaccaaggtgctcggcagcgtgtcggacctggagccggtggaggaggccgagggcgacggcaagggcggcagccgagccgcgctctacccgcacccgcagcagctgagccgcgaggagaagcgccgccgccggcgcgccacggccaagtaccgctcggcccacgccacccgcgagcgcatccgcgtggaagccttcaacttggccttcgccgagctccgcaaattgctgcccacgctgcccccggacaagaagctctccaagatcgagatcctgcgcctggccatctgctacatctcctatctcaaccacgtcctggacgtgtagggcggggtgcgccgcggggggccgcctgtcccggcgtccgcgaaacgctacggatccggacgggcgccgtcgctcgggtggcggaggctgcggtggcccagcgagacggccgcctcgagagacggccggggaagaagctcgctacctgttctctctggtcagcagggcgacgagggaaggtttccgacgcaggcaggtggggttgtctggcgagcccgggggctcgcaggggggattttccaggccaggagaacctcgtggagacacccgagatgagccacttctggggctccccaagggttgtggttttaacccactggagactttgagttctcctacattcatccgccacaaatcttaatgtgttgaaagaatgagggcagaagttcagagtatgcaggctcataactttaggctatctggaatttttctaatggacaaatcaccaaacactgggaaggaggagagaggagggatctctcccatagagatggaaggcacagaaaggtgcgactggaaactttcctttctgttgtgaaaataaagattatattagaatccaaataaaccctgaatatttagtaagtttaaaaagacaaattgagaacaagtagacacactgtgggaggatctgagcttggtgatattttatccccaagatatgacaccaaggtagacaggaaaatccatatttaaatggaaactttaatatctgattacttttgcaggcgaagtgcccctttatatatccaaaaacatctatttgtgaccttaaacatgtggacccataggtgcagttagaaaaagacaacctatttttatttatgttagaaggagtagagtatttttttcaagacatttatttttcagagtggtgatacttttactttggatactctgtgccaatttatttatagtcaagtgtttacactttttcctgtggaataattatgtctaactttttacgtgtttgttgagattatactgtggtctttctttctgctctaattatattgcacttgtataacaaatttcccacttctccctgtttctaaacatattttatatattaagatgtttgttcttgaaaggttcttttgttgtgagatcagcaacactagcacttcactattatagttttttaaaaagtgtattattcttatctgtagttatgtctgagaagtcctttacaagctgtttataaggagagtagcttctttgtgtgtgtgatgtttgtgcgtgtgatgaatttagcaaattaagttattttcctaaaaaaaaaagaaaaaaagaattcagaactactttcctctgtgacaccaaaaagaaaagtctataacctgaaaatgtttcatgttctctgctgtgaaactcttaaaacaaggagtgtattttagagacaagggaaaaaaaccacatctgctatccaaagattttagtctttttcagggtttttttgtgtctctgttgctttatataatgcaatattttgtagtgaaaatagatataatctggtttctatctgacgagtttttcatatctcatgaatggtgcgctgttttgcatataaataaaggtatcaaataaa

SEQ ID NO: 19757 - DNA, 7226 bp, Homo sapiens
  source 1..7226: mol_type = unassigned DNA
gagtatatctggatatgtttatttttctatgtcaatatatatctgttcctcaatatgtatttatactgaataataataataatgatagccaacacttactgaacatgagttctaggcattagtttaagcactttacatatattatcttgttcaccttcagaaaaaaacatgacataacattacataacatgctttgattattctcattttacagattagaaaactaaggtccaaaaaggttaagtaacttacaactaaattcacacagctagcatatgacagagccacaaagccggactttttaagtcactacttatcacctccccattcatttaataatattatttaatattactcttatagtctataatatcataatttgtatggtgcttactatttcatcaaatattttcaaatacattgggtctcatagcgagcctgtgaaatgagaagtgcaatattattattctcatttttacaggaaagaaaattgatagaactgaaccatgggtgtcctttagtggaagcgtttctatgttacaaatatctggggtacctctgtacatagagtcacatcataaatgaactgagtacctataatgtgtcaagctcagacattagtgctggggatataagctacagacctcccctggaagcatcatagcctaggaagagagaccagtgtggtaaccaagaaccaagaatcacggtacacaatatgtagtctctaagggagacatgaaaggagtgcttatggagcacagaaggaggggccatctgtgccagggaggtcttagaaaaggcaaaggggtgggggagggggaggctttgatggaagaaagaatgtgtgtgtgtgaatgtgaatccatgtctgtgtctatgacagtgtggctaggcatcactaagtatggatctgagtgtgtacctgtttatacaggcttacttctgtaagcattaatttttgtgtatgctggctgctggtatagaatgagtaagcctgaacataaaagggaatttgtctggtatcacacacaccatagcagaattggacctgccctgataggcacaccctgtcatgactccccaacaccaggggaaccagagatgctggtcctttcccactgtagcagctgcccactctagagctatggtgattagacccaccagtttttttcaatccatcagtatggatgtgtggtggtctaatagagccagccagcttgtatgatgaagggggaggaggtacaggtgtctgtgggtgtgcatctgtgtgcacacttctggttgtgtgtgaatgcttagcattggctgttcctaactagagtgagaaaacctcccttctcccttcattgtcaccaccttggggtgtttatccactcacccatttccattgccacctgtatgggaccggcttccatcttcactttaacgttctggggatatctaaaatatacctctgtgctggggttaggcagaagcaaggctggggagtgttggtgcccttatttgttggaggcactccctcctttccccgacccctgccccattgtggtccaggaatctctcaaaggagcaaaaatgtgggcaaaggcaaatagtacttgtggaagccatgaaaaacccggagggtcactcccaggggtgggctgctcaatgtgcctcccctggtgataaaatctgcttttagggcaaaattaaggaagacaagtgaggactcctctctccacaaatgttcccctaggaactggcggggtgggagtaaggctgtaatgctcttttatttctttaagcttgtatgatcaaaacaagctaaaataatcacaaataatatgttattgatattaactatgagtatcttcataaagtggcaaaataattgaactagattttattttttattataaggtatacaaattcagggccatgggatcatgtaaggcaaaggcattatgtactgggacacactggtaatttgtgtttacatcttggcacaagcactgccacgcagtacaatatattagcatgttaagatgggcaagaatgaagtgcaataatcaacacatgtagcatgtcatatttcagcttgaatgaatgagtgggtggagagaaaaacaaacatacagaaaagtagaattatctcatgtcgtggtccgtgaatatgtggattctctttctagttccaccaatggcttaatctattgaaaggttcttaccatctattgataagttagtctcatagcagatcatttctcaaaaatgttaatatgcttaatcaaaccttactgaagtatcttttaaaatgtaaatgatctctaataaatgttggctgttgcatgtctaaatactttattgcagcatcttatatagtatatatttccatgttctggacacaaatatttttctaaatattaagggaaagtggtggctttgtaatatgccaggggaattctttgatagtcaatatattgtttatttgtacttaaatatttcatcaataatctggaaaagagaaatagcctgactacggctagatactgtttagaggctaagatttctatcatgaactgcttttcaattgttatattttatggcacagattcagtgggaatctgatctgctaaaatatttgggctgtgaaaactcccacactgtgacagatgtcaagtccaattaagtgactcatgtccaggtttctgtccaataggatttcccattaaatatcaatttaggggaaaaaaattccatcccccttcctaagcctttatctcttccaccatctccaggctgaatcaattggtaccaggagagcccagaagccacacacgcatctctgcctctttgctctggctctcccaccctcttcccgtctttctctgcttccttgtcactgttactccaggagacgttcacttttcaccaacctttctccaagcatctccaagccactgactatatatattttgctacaaggtaaagagaagaggggctggggacgggggatatagccaaaccttgaaagactttgaaactggaaaataggtgtctatttatacaacatacaagtaagtgagggaagaggaagaggcaaccttagctcctagttacagtattgtgttcctgggaactggggagatatcagctgaacaaagccttatctcaaaaaaaaaaaaaaaatcacttctgagcaagatcacatctctgtcctgcacttcccagtttctgctcagccgtattaaggaaaagaaaggcatacgataggagcggaatcttatcttaaccatctttcttattgattattccgctattagaaagtggaggaatcagccctttgatgtgattgtgtttatctctgcatctcttttgttatttttagagacctagaagaggaaaaaaggcacgagacttttcaacacatcgtttaaaaaaatcatcaacgaatttcttgcaatgtttgagaacaattaaaaggaaaaagcgttttttaaaaaatctatcaactaagtgaacaatcattcatatcgtctacatcctgagatattattgtccctcgctgcggacaccagcgagatgacagctgctttttcatttttgaatgtaataaatatttgctgcttttaatattttccggaatctcccctcgctattccttggaattttaactctaaagattggagaacagattatcaaaaaggcttttgcaaggtaagactcctttaaataatttttttcagcttgaaataagttagattattcatactgtatctatagatgcagttcattccataaagagataaaacgcatacacggcatactatttatgaatatttttaaagatctagaggagaatttaatgtgctttgagggcaacccaggaactttttaccagaactacaactatttagtggcttattgtgattttccattactcgtctatttatttctgccctttcaagctgactgtgtaggtgcaagttgttctactcataaacgtacccgagaaaagcccgtagggagtcacatgcagctctctgggagcatttgtttttattttgccgtagaggacctgatttcctcgcagggaaattaaagctgttttggcccaattcgctcctctgcaagtgcggtgctgggaaccgatcacccatccccttgcttttgtttctctagaagcaaacgctcctatacgtcgccgacgcggatttctcccgtgccgagcgtcgtggaggctgcccacgccggggccccgagttctcagcctggtcctcactcccgacgcccaggggcggtgcgtgcagcccctgcaggggcctttctcctcctgccgggccctttctcgaagcccgaattacccggaagcccagcggttctgagcggccccctcccagaaggcgcacagtccgggccagtgctccaggcgccccagagaagcctggccaggtggcgtttccaagagggcacagttaagttagaggaaggctaagcaccgacatgcccggacttggccaggccacccggggacagctgcagcctgccgagctccggttccgggagcgcccgaactttgccggcagagatgcagctcccgccgggacaacacgcgctgcacccgctagtccccgcctgccccgccccgggcccttcccttctcttcccttccctctgcatcctctcctccctcagcggcccggctgccggcattttcccgcaaggtggtcgccagactgccgggcgcattgtctgatcccacgtcgccgtgtccctaggtcccctatgtgtgtggctgtctgcgtgacagatggtgctccgggagcctgcgagggcatcggagtcaattttctttttaaaggctcccccacgtttgtttagtcatttctttacgatttcggagaagcgcgaggggtccaagaagccttcccgcccccagccactggctctccgcctgcgctccaggatggggattcctgaccggccgcaccccagagccaggcgcccccggcgcagccccagaccagcgccaggccctcgggcgccgcggctgccgggttgcttcgccggaggccctcggggcgagaagtgcaccccgcgtctccccgcccccgtgaaaacccagatgtattcgttgttcgaaatcgctcgtttgtccgggaaggggacgaagggagggaggaggaatagcgcggttggcatttggccggaagaggcacaaaaacccagtcgcgaccccacaggcctgcggttgttccccaggcccagggccacaggcccgctgtggccgtctgcaagtcgaggtgtccagtctagtatgcggcctgggtcaaccgcgtccccgccggctcccgcgccagggcgaggcgcagggctcgcgccctcgggccagatcctatcggcgccctcccgcgtcgcgcgccggcctgctgtggggagggggcccgggccgcgcgtccgctgggaggaccggcgtggtaggcctcggcagccatccttccagcaaaataccctgattccttttactgattaattttccgacccctcctcagcctccaaaatgatgctgagtccggaccaagcagcagattcggaccatcccagctcggcgcactcggatccggagtccctgggcggcacggacaccaaggtgctcggcagcgtgtcggacctggagccggtggaggaggccgagggcgacggcaagggcggcagccgagccgcgctctacccgcacccgcagcagctgagccgcgaggagaagcgccgccgccggcgcgccacggccaagtaccgctcggcccacgccacccgcgagcgcatccgcgtggaagccttcaacttggccttcgccgagctccgcaaattgctgcccacgctgcccccggacaagaagctctccaagatcgagatcctgcgcctggccatctgctacatctcctatctcaaccacgtcctggacgtgtagggcggggtgcgccgcggggggccgcctgtcccggcgtccgcgaaacgctacggatccggacgggcgccgtcgctcgggtggcggaggctgcggtggcccagcgagacggccgcctcgagagacggccggggaagaagctcgctacctgttctctctggtcagcagggcgacgagggaaggtttccgacgcaggcaggtggggttgtctggcgagcccgggggctcgcaggggggattttccaggccaggagaacctcgtggagacacccgagatgagccacttctggggctccccaagggttgtggttttaacccactggagactttgagttctcctacattcatccgccacaaatcttaatgtgttgaaagaatgagggcagaagttcagagtatgcaggctcataactttaggctatctggaatttttctaatggacaaatcaccaaacactgggaaggaggagagaggagggatctctcccatagagatggaaggcacagaaaggtgcgactggaaactttcctttctgttgtgaaaataaagattatattagaatccaaataaaccctgaatatttagtaagtttaaaaagacaaattgagaacaagtagacacactgtgggaggatctgagcttggtgatattttatccccaagatatgacaccaaggtagacaggaaaatccatatttaaatggaaactttaatatctgattacttttgcaggcgaagtgcccctttatatatccaaaaacatctatttgtgaccttaaacatgtggacccataggtgcagttagaaaaagacaacctatttttatttatgttagaaggagtagagtatttttttcaagacatttatttttcagagtggtgatacttttactttggatactctgtgccaatttatttatagtcaagtgtttacactttttcctgtggaataattatgtctaactttttacgtgtttgttgagattatactgtggtctttctttctgctctaattatattgcacttgtataacaaatttcccacttctccctgtttctaaacatattttatatattaagatgtttgttcttgaaaggttcttttgttgtgagatcagcaacactagcacttcactattatagttttttaaaaagtgtattattcttatctgtagttatgtctgagaagtcctttacaagctgtttataaggagagtagcttctttgtgtgtgtgatgtttgtgcgtgtgatgaatttagcaaattaagttattttcct

SEQ ID NO: 19758 - DNA, 855 bp, Homo sapiens
  source 1..855: mol_type = unassigned DNA
acttctgagcaagatcacatctctgtcctgcacttcccagtttctgctcagccgtattaaggaaaagaaaggcatacgataggagcggaatcttatcttaaccatctttcttattgattattccgctattagaaagtggaggaatcagccctttgatgtgattgtgtttatctctgcatctcttttgttatttttagagacctagaagaggaaaaaaggcacgagacttttcaacacatcgtttaaaaaaatcatcaacgaatttcttgcaatgtttgagaacaattaaaaggaaaaagcgttttttaaaaaatctatcaactaagtgaacaatcattcatatcgtctacatcctgagatattattgtccctcgctgcggacaccagcgagatgacagctgctttttcatttttgaatgtaataaatatttgctgcttttaatattttccggaatctcccctcgctattccttggaattttaactctaaagattggagaacagattatcaaaaaggcttttgcaagcctccaaaatgatgctgagtccggaccaagcagcagattcggaccatcccagctcggcgcactcggatccggagtccctgggcggcacggacaccaaggtgctcggcagcgtgtcggacctggagccggtggaggaggccgagggcgacggcaagggcggcagccgagccgcgctctacccgcacccgcagcagctgagccgcgaggagaagcgccgccgccggcgcgccacggccaagtaccgctcggcccacgccacccgcgagcgcatccgcgtggaagccttcaacttggccttcgccgagctccgcaaattgctgcccacgctg

SEQ ID NO: 19759 - DNA, 2738 bp, Homo sapiens
  source 1..2738: mol_type = unassigned DNA
gagcgcagagctgcagccgccgagccggacgtgtccgcgaagatggcgggccggagcatgcaagcggcaagatgtcctacagatgaattatctttaaccaattgtgcagttgtgaatgaaaaggatttccagtctggccagcatgtgattgtgaggacctctcccaatcacaggtacacatttacactgaagacacatccatcggtggttccagggagcattgcattcagtttacctcagtctccttatatacatttgacaaagccaaacagtgtattggcacaatgaccatcgagattgatttcctgcagaaaaaaagcattgactccaacccttatgacaccgacaagatggcagcagaatttattcagcaattcaacaaccaggccttctcagtgggacaacagcttgtctttagcttcaatgaaaagctttttggcttactggtgaaggacattgaagccatggatcctagcatcctgaagggagagcctgcgacagggaaaaggcagaagattgaagtaggactggttgttggaaacagtcaagttgcatttgaaaaagcagaaaattcgtcacttaatcttattggcaaagctaaaaccaaggaaaatcgccaatcaattatcaatcctgactggaactttgaaaaaatgggaataggaggtctagacaaggaattttcagatattttccgacgagcatttgcttcccgagtatttcctccagagattgtggagcagatgggttgtaaacatgttaaaggcatcctgttatatggacccccaggttgtggtaagactctcttggctcgacagattggcaagatgttgaatgcaagagagcccaaagtggtcaatgggccagaaatccttaacaaatatgtgggagaatcagaggctaacattcgcaaactttttgctgatgctgaagaggagcaaaggaggcttggtgctaacagtggtttgcacatcatcatctttgatgaaattgatgccatctgcaagcagagagggagcatggctggtagcacgggagttcatgacactgttgtcaaccagttgctgtccaaaattgatggcgtggagcagctaaacaacatcctagtcattggaatgaccaatagaccagatctgatagatgaggctcttcttagacctggaagactggaagttaaaatggagataggcttgccagatgagaaaggccgactacagattcttcacatccacacagcaagaatgagagggcatcagttactctctgctgatgtagacattaaagaactggccgtggagaccaagaatttcagtggtgctgaattggagggtctggtgcgagcagcccagtccactgctatgaatagacacataaaggccagtactaaagtggaagtggacatggagaaagcagaaagcctgcaagtgacgagaggagacttccttgcttctttggagaatgatatcaaaccagcctttggcacaaaccaagaagattatgcaagttacattatgaacggtatcatcaaatggggtgacccagttactcgagttctagatgatggggagctgctggtgcagcagactaagaacagtgaccgcacaccattggtcagcgtgcttctggaaggccctcctcacagtgggaagactgctttagctgcaaaaattgcagaggaatccaacttcccgttcatcaagatctgttctcctgataaaatgattggcttttctgaaacagccaaatgtcaggccatgaagaagatctttgatgatgcgtacaaatcccagctcagttgtgtggttgtggatgacattgagagattgcttgattacgtccctattggccctcgattttcaaatcttgtattacaggctcttctcgttttactgaaaaaggcacctcctcagggccgcaagcttcttatcattgggaccactagccgcaaagatgtccttcaggagatggaaatgcttaacgctttcagcaccaccatccacgtgcccaacattgccacaggagagcagctgttggaagctttggagcttttgggcaacttcaaggataaggaacgcaccacaattgcacagcaagtcaaagggaagaaggtctggataggaatcaagaagttactaatgctgatcgagatgtccctacagatggatcctgaataccgtgtgagaaaattcttggccctcttaagagaagaaggagcgtaatagcccccttgattttgattgaaaatgaactatttgaaacacacagtgaccaagggaagtgaccaaggtgaagatggcctaggatcttcactgtcttactcaagatactggactaagtggaacgttctctaccttcaacatgtgctcgctctgcatgattagtgcaataaaactcccttccttatgcatactgagatagcttagtgtctcgtggaaggtgtcaatttggtttagaatgctgcgcttaccttcccatgcaggctaaagtgattccttcttgctcagtccctctgggtgggaaccatccagtacttgtggacactacacgtttcaacctctctactagcaccatcacccttgaaaactctcagtcagtgtcatgaatgttgcatgacaacagttggccgattagaaggcagactttctacatgcaaatctggcttagtaaatcgaggtgtgggccagagatcctctgacagctgtcctgagctaacactaaaagtcactgggtatttggtt

SEQ ID NO: 19760 - DNA, 3943 bp, Homo sapiens
  source 1..3943: mol_type = unassigned DNA
gcgcgcggcgggggcgggctttgccgagcgcagagctgcagccgccgagccggacgtgtccgcgaagatggcgggccggagcatgcaagcggcaagatgtcctacagatgaattatctttaaccaattgtgcagttgtgaatgaaaaggatttccagtctggccagcatgtgattgtgaggacctctcccaatcacaggtacacatttacactgaagacacatccatcggtggttccagggagcattgcattcagtttacctcagagaaaatgggctgggctttctattgggcaagaaatagaagtctccttatatacatttgacaaagccaaacagtgtattggcacaatgaccatcgagattgatttcctgcagaaaaaaagcattgactccaacccttatgacaccgacaagatggcagcagaatttattcagcaattcaacaaccaggccttctcagtgggacaacagcttgtctttagcttcaatgaaaagctttttggcttactggtgaaggacattgaagccatggatcctagcatcctgaagggagagcctgcgacagggaaaaggcagaagattgaagtaggactggttgttggaaacagtcaagttgcatttgaaaaagcagaaaattcgtcacttaatcttattggcaaagctaaaaccaaggaaaatcgccaatcaattatcaatcctgactggaactttgaaaaaatgggaataggaggtctagacaaggaattttcagatattttccgacgagcatttgcttcccgagtatttcctccagagattgtggagcagatgggttgtaaacatgttaaaggcatcctgttatatggacccccaggttgtggtaagactctcttggctcgacagattggcaagatgttgaatgcaagagagcccaaagtggtcaatgggccagaaatccttaacaaatatgtgggagaatcagaggctaacattcgcaaactttttgctgatgctgaagaggagcaaaggaggcttggtgctaacagtggtttgcacatcatcatctttgatgaaattgatgccatctgcaagcagagagggagcatggctggtagcacgggagttcatgacactgttgtcaaccagttgctgtccaaaattgatggcgtggagcagctaaacaacatcctagtcattggaatgaccaatagaccagatctgatagatgaggctcttcttagacctggaagactggaagttaaaatggagataggcttgccagatgagaaaggccgactacagattcttcacatccacacagcaagaatgagagggcatcagttactctctgctgatgtagacattaaagaactggccgtggagaccaagaatttcagtggtgctgaattggagggtctggtgcgagcagcccagtccactgctatgaatagacacataaaggccagtactaaagtggaagtggacatggagaaagcagaaagcctgcaagtgacgagaggagacttccttgcttctttggagaatgatatcaaaccagcctttggcacaaaccaagaagattatgcaagttacattatgaacggtatcatcaaatggggtgacccagttactcgagttctagatgatggggagctgctggtgcagcagactaagaacagtgaccgcacaccattggtcagcgtgcttctggaaggccctcctcacagtgggaagactgctttagctgcaaaaattgcagaggaatccaacttcccgttcatcaagatctgttctcctgataaaatgattggcttttctgaaacagccaaatgtcaggccatgaagaagatctttgatgatgcgtacaaatcccagctcagttgtgtggttgtggatgacattgagagattgcttgattacgtccctattggccctcgattttcaaatcttgtattacaggctcttctcgttttactgaaaaaggcacctcctcagggccgcaagcttcttatcattgggaccactagccgcaaagatgtccttcaggagatggaaatgcttaacgctttcagcaccaccatccacgtgcccaacattgccacaggagagcagctgttggaagctttggagcttttgggcaacttcaaggataaggaacgcaccacaattgcacagcaagtcaaagggaagaaggtctggataggaatcaagaagttactaatgctgatcgagatgtccctacagatggatcctgaataccgtgtgagaaaattcttggccctcttaagagaagaaggagctagcccccttgattttgattgaaaatgaactatttgaaacacacagtgaccaagggaagtgaccaaggtgaagatggcctaggatcttcactgtcttactcaagatactggactaagtggaacgttctctaccttcaacatgtgctcgctctgcatgattagtgcaataaaactcccttccttatgcatactgagatagcttagtgtctcgtggaaggtgtcaatttggtttagaatgctgcgcttaccttcccatgcaggctaaagtgattccttcttgctcagtccctctgggtgggaaccatccagtacttgtggacactacacgtttcaacctctctactagcaccatcacccttgaaaactctcagtcagtgtcatgaatgttgcatgacaacagttggccgattagaaggcagactttctacatgcaaatctggcttagtaaatcgaggtgtgggccagagatcctctgacagctgtcctgagctaacactaaaagtcactgggtatttggttaaaggtctcccacaagactggtattctctttgcctgaagaaacaaggcattgaatctctaaaatgctgttctcaatcattgtcagagatgttttcaagttgcagtcagaagatctttcttaatagaaagtcagatgactaccgtgttggttgtgacttccccttaagtataactaatttgctctgtggtaagagatatgctcattattaccacttagaagatgttgttaaaaacatgtgaaagataggtatggaaaaagcatacacccccaaacagaaaggagttattaaagtaatttacaaacctctcagcactaattagtgtccaactccaagtgggtcaattccttagtataatattaaggcttactagtatcactgctttttccttagcttaatgacttacttagaatttatcctttattttaaatgatctgtactatctagtgtctaaaacactattctccagaaaaatcaatcattttctagccctctccctcagtcctttattgtccattccaatacattgaacacatttcctttaccctccacacacttcttccaaaaggaagcacccgttgagtccttttgagggtgatttgtcttacaactgactgacttagcaggaatttaattaggtcatatttggtgatgagacttatggagtgtgcctctctctcccaactgctgcttaaaatgcaaggacaagcaattagaagccatcctaaggtgcttacctcacacgccacccatgaggcttgtggccacagtggcacttgggtgtggctcctctgttatttgtcctcatgtgagaaagcagatcatctccaaatcttgccatttgtatacttttggtggagacttggatgtcatatcttctttgttttgggttttcttccctagcttattttgtggcttttaaagaagtggattgtattgtgagatcctgtgattcctggtggccagtatcctggattcctctaagatcttgcctctttcctcctcatgaaagcagcacacattgtgttaacttatgtctcttgttaaatgagcttaatgtctttgtgttttgtccaaaactgtattgaaaaaatattgtttaatgcaaatgaaggaatgcaataaagagtaaatatacttgaaaa

SEQ ID NO: 19761 - DNA, 1842 bp, Homo sapiens
  source 1..1842: mol_type = unassigned DNA
tggagcgccgttcgccggtatgtgcgcatgcgttgaggtctcttgacgccgattggggggtcacgagtcacgggcggcgtgcggcggctggtgggggcgtgtccggcggagcgggcgcggcgttacgaggccgctggttggccagcgctagtcacgtggttcctggccgcaagcgacgcgcgccggtgcgacgtcaacgcagccgggcgagttttaccgatctgtgttccgcggcccggccgcggctgagtcttcccagggtcagggtcaggcgctttgctgagtccctttgtggccgccatggacaattccgggaaggaagcggaggcgatggcgctgttggccgaggcggagcgcaaagtgaagaactcgcagtccttcttctctggcctctttggaggctcatccaaaatagaggaagcatgcgaaatctacgccagagcagcaaacatgttcaaaatggccaaaaactggagtgctgctggaaacgcgttctgccaggctgcacagctgcacctgcagctccagagcaagcacgacgcagccacctgctttgtggacgctggcaacgcattcaagaaagccgacccccaagaggccattaactgtttgatgcgagcaatcgagatctacacagacatgggccgattcacgattgcggccaagcaccacatctccattgctgagatctatgagacagagttggtggacatcgagaaggccattgcccactacgagcagtctgcagactactacaaaggcgaggagtccaacagctcagccaacaagtgtctgctgaaggtggctggttacgctgcgctgctggagcagtatcagaaggccattgacatctacgaacaggtggggaccaatgccatggacagccccctcctcaagtacagcgccaaagactacttcttcaaggcggccctctgccacttctgcatcgacatgctcaacgccaagctggctgtccaaaagtatgaggagctgttcccagctttctctgattcccgggaatgcaagttgatgaaaaaattgctagaggcccacgaggagcagaatgtggacagctacaccgagtcggtgaaggaatacgactccatctcccggctggaccagtggctcaccaccatgctgctgcgcatcaagaagaccatccagggcgatgaggaggacctgcgctaagccccacccagccccccagtgcccgtcttcctgtcccatctgctcagagagaggtggggccgagacttgctggagagcttccctcctttcccatctggggagtgccgcgggccacagtgggcaggtggcaccgggggtcagcatgcaggggcgccagaggcccaggctgctggccggacagtcaccctctgttctcgctacatcccttgccccctgtccatttatttaagcccccataggtgcccttcacccccaaaaccagctgtacagaatctttgatacagacctatttgctaggggtgctgccggggatttggggtcagcatctggccccctatctcctgaccagctgagtcatgaggccggtttctctctctctcccacttttgtcccccagccaagctctaaagcacatgtagccgctgagacctgctgtttctgctgggggcaggctcctcttcccccagccccgggagcctcccccagcttcctgcagccccgacctctcaggttagaccctgggccctggagcttaggggattctccccaccccagccccacacctgctccttccctaatgctttgaggttttcttggttggaagctgcagctggcccaagaaagaaaataaaaaacaacacttttgcatgagtc

SEQ ID NO: 19762 - DNA, 3837 bp, Homo sapiens
  source 1..3837: mol_type = unassigned DNA
gtccctgcggccgccagagggagggttaaggcgcctgggcgcacagcgagccggctgagggggctgtggcggccgcggcgggcgacatggacaacgcggggaaggagcgtgaggcagtacagctgatggcggaggccgagaagcgagtcaaggcctcccactccttcctccgagggctgtttggaggaaacacaagaatagaagaggcttgtgaaatgtataccagagctgcaaatatgttcaagatggctaaaaattggagtgctgcaggaaacgcattttgtcaggcagccaagctccacatgcagcttcagagcaaacatgactctgctaccagctttgtggatgctggaaatgcttacaaaaaggcagatccccaagaggctatcaactgcttaaatgcagccatcgacatttacacagacatgggaaggtttacaattgcagccaagcaccacattactattgcagagatctatgagactgaacttgtagacattgagaaggctattgcacattatgaacaatctgctgattattacaaaggagaagaatccaacagctcagcaaacaagtgtctgctgaaggtggcagcatatgctgcccagcttgagcagtaccagaaagccattgagatctatgagcaggttggggcaaacacaatggataatcctttgttgaaatacagtgcaaaggattacttcttcaaagctgccctctgccacttcatagtagacgagttgaatgccaagcttgctcttgagaaatatgaggaaatgtttccagcatttactgattcaagagaatgtaaattattgaaaaaactcctagaagctcatgaagaacagaacagtgaagcttacactgaagcagtgaaggaatttgactcaatatctcgcttggatcagtggctgaccaccatgttgcttcgcatcaaaaagtccatccaaggggatggagaaggagatggagacctaaaatgaaatgtttttgtctttgtggcatgcagctaactcctctttagttttgtcttagggtcaagtgatctttatgggatgcctatttaatggcttaattttgttgcatatgagccagacggcctgtgtattgtttaagctcgccaagtctgtgttgctgtgaaatgaatgaaggagaggctcctgttcatcttgtggtaatgatgggttgtttcatgcttatcagaacccccagcgttttctgagaagtacttcagaatctcattcctcatatttcattggtatttgtggagcctatgtttaatgttgccacgtgtttttatgtcctttttgttggacttgagtactcagcccagttgttctcatagatgctttgcattttctctgtgctttggcatctgaatatgttctttaaatgtgtgtttagtttaggacagttactaggaatgagtttataacttcattagaaatcatttctatttttgttatcctgtgattattttgatggtgctagtgactagtttctttgctttttgtgttgttccgtatgctaacatgtgcatggcaaaaatttagaatagccagggtctgtaggcatcacattgtgaggaagggagctttctggaagtacttgcttcatgtatggatgagtgtcaaagtgaatttgatttgtacttagacacacgcgtttacacacacacacatatcacaagatctgttagaaatggaatttttctctttttctggagatagttttcacttttagttggagtggaaatccctttatatttacattgaagtattttaattggcatagcctgctcattattttcatgtttatacactttcccacgttgaggtggtgtgttctgtgctgtgactatagaaatcttggtcagggctggatagattatctaagtcaagcttgagaatgaatgtatgtaattttcctgtttattgtacatgatgggttaggtggggtgaatgtggtacaggaatgtcctgtatgcccaagtgggcaagaaccccaacttgtttctcaggggacttgattgttctcttagctggtggaatatgttggcttatgtgtttgaactctgtcgtgtttaattggtttatataatatatgtatgctatcttgattcatgaacttgatcctattaatttatatgctgatattgtactttagacatacgcttgtctcctgaatgtcctctgaatatttatagttaaatgatttatatttgaaatgtgttgccagacttaacccagcagacactctgacatcacggagcttcactgatgacaggtaacgaaacttcctatgttatgtcaggtagtagtaagtagtattggaatgatgttttcatttttggtggctctcaactggaattggtagtgtttccaggccaagggtcgactgcaggttgtttgagaaatgatgagtaggtcagtctaggaagaaagagaaagtagcaggaaaggaagtgggaagggccagccaaggacagactgtagaggatccacatcaggtggccacgaggacttgcaggctatagttatggtggtgacatgcatgaggtgggctggtagagcaggaagctctgtgatgtcagagcatctactgggactacaggtgcactgtagtccccactactgggggtggcaatgaagacactctgtctgttgggccctagaatttaatgtggatttcctccttccttccaagttctgagattcttaaatgagagctggctgtcttctagaggtaagacctggaatggagtccagttggtactttttcactccctcttagaatctcttatgaaaaaatgatcagagagaaaagtggggttttgtttccccacctaataatatatcctacaaccagccaaatgcacttttgtgaaaatggggtgtgaggagtggttctgcagcttgagtcctctggttttaagtagtttgtttctacttgtttaaagaatcttctggtctgaccacttaaagtaaaaactacatgatttattttcgggcaattatgtttagctttcatcattatactccaacagacccgtctgaaggggtatttttttttaacaataatgtttgtaacattttgttgtgtcaattagagggtcacttgtttgtattgcaataaacactgggaccagttccggggttaagaattaatttttgtttttaatatttcacatgaaaagaatcaaagtaattgtaatggctagaagagacctgccagaagattaaaaaaaagaatgagagaaaagcccagttagtggtgtgcaaacttacttcctttaaatgtcccatggatgtaggacagtgccatgtttcaagatgcctgtgagctaggtcttcaagatttatagaatgttacttatgaacaaaatataattatttatggtacaattcttgtactttagcaaatctggagttagttcatagtcaaagtcagttaatatttcttagaggaaagttttgctttttgtggcaacatttttatagcttgtgtgagttcttttttatttaatgatttgaaagcagtatttttgcacagtcgtgaccgtgtgtggtggcgtcactgtaaccaaagtatatgcaccagcccttgtgcatttattgtttctcctgattttgtggatttaaatgtccaaatgcaaacctttgtgacttcctttggaggacttggcagcacagcatgcccccgtgacctgcctgctgtggtatgagctatgaccaagagcaggcttcctgctccatggagtcctgagttgctctggggcaggggattacgttatgaaaactaaccatgtgtaacaataaatctaccttagcagaaaaa

SEQ ID NO: 19763 - DNA, 3756 bp, Homo sapiens
  source 1..3756: mol_type = unassigned DNA
aaggcgcctgggcgcacagcgagccggctgagggggctgtggcggccgcggcgggcgacatggacaacgcggggaaggagcgtgaggcagtacagctgatggcggaggccgagaagcgagtcaaggcctcccactccttcctccgagggctgtttggaggaaacacaagaatagaagaggcttgtgaaatgtataccagagctgcaaatatgttcaagatggctaaaaattggagtgctgcaggaaacgcattttgtcaggcagccaagctccacatgcagcttcagagcaaacatgactctgctaccagctttgtggatgctggaaatgcttacaaaaaggcagatccccaagggaaggtttacaattgcagccaagcaccacattactattgcagagatctatgagactgaacttgtagacattgagaaggctattgcacattatgaacaatctgctgattattacaaaggagaagaatccaacagctcagcaaacaagtgtctgctgaaggtggcagcatatgctgcccagcttgagcagtaccagaaagccattgagatctatgagcaggttggggcaaacacaatggataatcctttgttgaaatacagtgcaaaggattacttcttcaaagctgccctctgccacttcatagtagacgagttgaatgccaagcttgctcttgagaaatatgaggaaatgtttccagcatttactgattcaagagaatgtaaattattgaaaaaactcctagaagctcatgaagaacagaacagtgaagcttacactgaagcagtgaaggaatttgactcaatatctcgcttggatcagtggctgaccaccatgttgcttcgcatcaaaaagtccatccaaggggatggagaaggagatggagacctaaaatgaaatgtttttgtctttgtggcatgcagctaactcctctttagttttgtcttagggtcaagtgatctttatgggatgcctatttaatggcttaattttgttgcatatgagccagacggcctgtgtattgtttaagctcgccaagtctgtgttgctgtgaaatgaatgaaggagaggctcctgttcatcttgtggtaatgatgggttgtttcatgcttatcagaacccccagcgttttctgagaagtacttcagaatctcattcctcatatttcattggtatttgtggagcctatgtttaatgttgccacgtgtttttatgtcctttttgttggacttgagtactcagcccagttgttctcatagatgctttgcattttctctgtgctttggcatctgaatatgttctttaaatgtgtgtttagtttaggacagttactaggaatgagtttataacttcattagaaatcatttctatttttgttatcctgtgattattttgatggtgctagtgactagtttctttgctttttgtgttgttccgtatgctaacatgtgcatggcaaaaatttagaatagccagggtctgtaggcatcacattgtgaggaagggagctttctggaagtacttgcttcatgtatggatgagtgtcaaagtgaatttgatttgtacttagacacacgcgtttacacacacacacatatcacaagatctgttagaaatggaatttttctctttttctggagatagttttcacttttagttggagtggaaatccctttatatttacattgaagtattttaattggcatagcctgctcattattttcatgtttatacactttcccacgttgaggtggtgtgttctgtgctgtgactatagaaatcttggtcagggctggatagattatctaagtcaagcttgagaatgaatgtatgtaattttcctgtttattgtacatgatgggttaggtggggtgaatgtggtacaggaatgtcctgtatgcccaagtgggcaagaaccccaacttgtttctcaggggacttgattgttctcttagctggtggaatatgttggcttatgtgtttgaactctgtcgtgtttaattggtttatataatatatgtatgctatcttgattcatgaacttgatcctattaatttatatgctgatattgtactttagacatacgcttgtctcctgaatgtcctctgaatatttatagttaaatgatttatatttgaaatgtgttgccagacttaacccagcagacactctgacatcacggagcttcactgatgacaggtaacgaaacttcctatgttatgtcaggtagtagtaagtagtattggaatgatgttttcatttttggtggctctcaactggaattggtagtgtttccaggccaagggtcgactgcaggttgtttgagaaatgatgagtaggtcagtctaggaagaaagagaaagtagcaggaaaggaagtgggaagggccagccaaggacagactgtagaggatccacatcaggtggccacgaggacttgcaggctatagttatggtggtgacatgcatgaggtgggctggtagagcaggaagctctgtgatgtcagagcatctactgggactacaggtgcactgtagtccccactactgggggtggcaatgaagacactctgtctgttgggccctagaatttaatgtggatttcctccttccttccaagttctgagattcttaaatgagagctggctgtcttctagaggtaagacctggaatggagtccagttggtactttttcactccctcttagaatctcttatgaaaaaatgatcagagagaaaagtggggttttgtttccccacctaataatatatcctacaaccagccaaatgcacttttgtgaaaatggggtgtgaggagtggttctgcagcttgagtcctctggttttaagtagtttgtttctacttgtttaaagaatcttctggtctgaccacttaaagtaaaaactacatgatttattttcgggcaattatgtttagctttcatcattatactccaacagacccgtctgaaggggtatttttttttaacaataatgtttgtaacattttgttgtgtcaattagagggtcacttgtttgtattgcaataaacactgggaccagttccggggttaagaattaatttttgtttttaatatttcacatgaaaagaatcaaagtaattgtaatggctagaagagacctgccagaagattaaaaaaaagaatgagagaaaagcccagttagtggtgtgcaaacttacttcctttaaatgtcccatggatgtaggacagtgccatgtttcaagatgcctgtgagctaggtcttcaagatttatagaatgttacttatgaacaaaatataattatttatggtacaattcttgtactttagcaaatctggagttagttcatagtcaaagtcagttaatatttcttagaggaaagttttgctttttgtggcaacatttttatagcttgtgtgagttcttttttatttaatgatttgaaagcagtatttttgcacagtcgtgaccgtgtgtggtggcgtcactgtaaccaaagtatatgcaccagcccttgtgcatttattgtttctcctgattttgtggatttaaatgtccaaatgcaaacctttgtgacttcctttggaggacttggcagcacagcatgcccccgtgacctgcctgctgtggtatgagctatgaccaagagcaggcttcctgctccatggagtcctgagttgctctggggcaggggattacgttatgaaaactaaccatgtgtaacaataaatctaccttagc

SEQ ID NO: 19764 - DNA, 1331 bp, Homo sapiens
  source 1..1331: mol_type = unassigned DNA
gagggggctgtggcggccgcggcgggcgacatggacaacgcggggaaggagcgtgaggcagtacagctgatggcggaggccgagggctgtttggaggaaacacaagaatagaagaggcttgtgaaatgtataccagagctgcaaatatgttcaagatggctaaaaattggagtgctgcaggaaacgcattttgtcaggcagccaagctccacatgcagcttcagagcaaacatgactctgctaccagctttgtggatgctggaaatgcttacaaaaaggcagatccccaagaggctatcaactgcttaaatgcagccatcgacatttacacagacatgggaaggtttacaattgcagccaagcaccacattactattgcagagatctatgagactgaacttgtagacattgagaaggctattgcacattatgaacaatctgctgattattacaaaggagaagaatccaacagctcagcaaacaagtgtctgctgaaggtggcagcatatgctgcccagcttgagcagtaccagaaagccattgagatctatgagcaggttggggcaaacacaatggataatcctttgttgaaatacagtgcaaaggattacttcttcaaagctgccctctgccacttcatagtagacgagttgaatgccaagcttgctcttgagaaatatgaggaaatgtttccagcatttactgattcaagagaatgtaaattattgaaaaaactcctagaagctcatgaagaacagaacagtgaagcttacactgaagcagtgaaggaatttgactcaatatctcgcttggatcagtggctgaccaccatgttgcttcgcatcaaaaagtccatccaaggggatggagaaggagatggagacctaaaatgaaatgtttttgtctttgtggcatgcagctaactcctctttagttttgtcttagggtcaagtgatctttatgggatgcctatttaatggcttaattttgttgcatatgagccagacggcctgtgtattgtttaagctcgccaagtctgtgttgctgtgaaatgaatgaaggagaggctcctgttcatcttgtggtaatgatgggttgtttcatgcttatcagaacccccagcgttttctgagaagtacttcagaatctcattcctcatatttcattggtatttgtggagcctatgtttaatgttgccacgtgtttttatgtcctttttgttggacttgagtactcagcccagttgttctcatagatgctttgcattttctctgtgctttggcatctgaatatgttctttaaatgtgtgtttagtttaggacagttactag

SEQ ID NO: 19765 - DNA, 1366 bp, Homo sapiens
  source 1..1366: mol_type = unassigned DNA
agagggagggttaaggcgcctgggcgcacagcgagccggctgagggggctgtggcggccgcggcgggcgacatggacaacgcggggaaggagcgtgaggcagtacagctgatggcggaggccgagaagcgagtcaaggcctcccactccttcctccgagggctgtttggaggaaacacaagaatagaagaggcttgtgaaatgtataccagagctgcaaatatgttcaagatggctaaaaattggagtgaggctatcaactgcttaaatgcagccatcgacatttacacagacatgggaaggtttacaattgcagccaagcaccacattactattgcagagatctatgagactgaacttgtagacattgagaaggctattgcacattatgaacaatctgctgattattacaaaggagaagaatccaacagctcagcaaacaagtgtctgctgaaggtggcagcatatgctgcccagcttgagcagtaccagaaagccattgagatctatgagcaggttggggcaaacacaatggataatcctttgttgaaatacagtgcaaaggattacttcttcaaagctgccctctgccacttcatagtagacgagttgaatgccaagcttgctcttgagaaatatgaggaaatgtttccagcatttactgattcaagagaatgtaaattattgaaaaaactcctagaagctcatgaagaacagaacagtgaagcttacactgaagcagtgaaggaatttgactcaatatctcgcttggatcagtggctgaccaccatgttgcttcgcatcaaaaagtccatccaaggggatggagaaggagatggagacctaaaatgaaatgtttttgtctttgtggcatgcagctaactcctctttagttttgtcttagggtcaagtgatctttatgggatgcctatttaatggcttaattttgttgcatatgagccagacggcctgtgtattgtttaagctcgccaagtctgtgttgctgtgaaatgaatgaaggagaggctcctgttcatcttgtggtaatgatgggttgtttcatgcttatcagaacccccagcgttttctgagaagtacttcagaatctcattcctcatatttcattggtatttgtggagcctatgtttaatgttgccacgtgtttttatgtcctttttgttggacttgagtactcagcccagttgttctcatagatgctttgcattttctctgtgctttggcatctgaatatgttctttaaatgtgtgtttagtttaggacagttactaggaatgagtttataacttcattagaaatcatttctatttttgttatcctgtgattattttgatggtgctagtgactag

SEQ ID NO: 19766 - DNA, 3615 bp, Homo sapiens
  source 1..3615: mol_type = unassigned DNA
ggacgggacggagccggggcagccagaagaggtgggaaaagcggaggaggacgcccaggaggaggcggcggcggcggccgggaagtgaaaggtctcgcaaagttcagcggcggctgcgggcgccgagccccgggctagcggcagacgagcccgcagggccgctccgcggggcagcgcagccaggccggctatggtcccggggctcccgccgccccccaggtgcccgggacccgccaggccggtgcgcgagggtcaccccacctccccgcgcggtcccggcccctggctcccagctgccggcgaccgctgaccgagcccggcgccccaggaggaggaagaaaccagggccccgttccctcccgaggacggcggcgcttcatcccgcagcccagaggtctcggctccctccggcacccgcccggcccggctgctcccggctcctcccggccatggggagctgcgcgcggctgctgctgctctggggctgcacggtggtggccgcaggactgagtggagtagctggagtgagttcccgctgtgaaaaagcctgcaaccctcggatgggaaatttggctttggggcgaaaactctgggcagacaccacctgcggtcagaatgctaccgaactgtactgcttctacagtgagaacacggatctgacttgtcggcagcccaaatgtgacaagtgcaatgctgcctatcctcacctggctcacctgccatctgccatggcagactcatccttccggtttcctcgcacatggtggcagtctgcggaggatgtgcacagagaaaagatccagttagacctggaagctgaattctacttcactcacctaattgtgatgttcaagtcccccaggccggctgccatggtgctggaccgctcccaggactttgggaaaacatggaagccttataagtactttgcgactaactgctccgctacatttggcctggaagatgatgttgtcaagaagggcgctatttgtacttctaaatactccagtccttttccatgcactggaggagaggttattttcaaagctttgtcaccaccatacgatacagagaacccttacagtgccaaagttcaggagcagctgaagatcaccaaccttcgcgtgcagctgctgaaacgacagtcttgtccctgtcagagaaatgacctgaacgaagagcctcaacattttacacactatgcaatctatgatttcattgtcaagggcagctgcttctgcaatggccacgctgatcaatgcatacctgttcatggcttcagacctgtcaaggccccaggaacattccacatggtccatgggaagtgtatgtgtaagcacaacacagcaggcagccactgccagcactgtgccccgttatacaatgaccggccatgggaggcagctgatggcaaaacgggggctcccaacgagtgcagaacctgcaagtgtaatgggcatgctgatacctgtcacttcgacgttaatgtgtgggaggcatcagggaatcgtagtggtggtgtctgtgatgactgtcagcacaacacagaaggacagtattgccagaggtgcaagccaggcttctatcgtgacctgcggagacccttctcagctccagatgcttgcaaaccgtgttcctgccatccagtaggatcagctgtccttcctgccaactcagtgaccttctgcgaccccagcaatggtgactgcccttgcaagcctggggtggcagggcgacgttgtgacaggtgcatggtgggatactggggcttcggagactatggctgtcgaccatgtgactgtgcggggagctgtgaccctatcaccggagactgcatcagcagccacacagacatagactggtatcatgaagttcctgacttccgtcccgtgcacaataagagcgaaccagcctgggagtgggaggatgcgcaggggttttctgcacttctacactcaggtaaatgcgaatgtaaggaacagacattaggaaatgccaaggcattctgtggaatgaaatattcatatgtgctaaaaataaagattttatcagctcatgataaaggtactcatgttgaggtcaatgtgaagattaaaaaggtcttaaaatctaccaaactgaagattttccgaggaaagcgaacattatatccagaatcatggacggacagaggatgcacttgtccaatcctcaatcctggtttggaataccttgtagcaggacatgaggatataagaacaggcaaactaattgtgaatatgaaaagctttgtccagcactggaaaccttctcttggaagaaaagtcatggatattttaaaaagagagtgcaagtagcattaagatggatagcacataatggcacttgtctatgtacaaaacacaaactttagagcaagaagacctcagacaggaaactggaattttttaaagtgccaaaacatatagaaatgtttgaatgcatgggtcttatctaacttatctcttctggacccatgtttaaatacagttttatttcatgaagagaaatgaaaacccctacactgatatctgttttctatgggactgattctgaaattcttaactattaagaatattttaatagcagcatgacatttagcagtaatccattaagggcagtacctctaacaaggacgccttccagcttcagcgatgttacttacgtttgatgctacttaaagtaatgaatgacgttttaaggaatccctaaccctactatcagaaaaggtgtttgttaaagagccttctcttgtgtgttacgcatgaactttggtctgtaggtgttaaatggaacctctccatgtgtatatagtatttccttgtataaagcactttactacctaccacttgtgttgtgaacgtttggtgactgctgttgaaagaaggaaaagggtgtgtgagaaagcctactgaagcagcagcactgccactacatgtggacaaaagtgaccatataaaagaagttgtgctatttaactctgaatacttggagaaactaggtgaagatgcaaccagaaaggagaatatgtatgcgtgaagtctcagctttgagctggaggctagattccaagatgacagccatgatgaaactttttaaaaaactaaaccagaagagactttaaaataagagaaagaaatcataaatgtagacatatgcttggctaaaggggaaatggactttaaattttaaagagctcatttgcaatgcacttgtatacacttcaaaaattattgtagacacagaatttgttatatttttgtgcttagtatttaaacctgaacattgaaacagttttcctccttgtctttcttaacagtaatagtcattatatttacctgttttttaacacaatgtatgtgatagtcaaaaaatcacagtttttcattattattcatcttctgtacccacgcataaccactatacatagtttcttttgtacttgaatatacaaaacatgaacacagtgccatatgaataatttcacatacagaacctttttttctctgaagtcctgtggacttgcaaatatatatatatattgctttgttaatttgtttttatatttcatatatgtaataaaggaatatgatctga

SEQ ID NO: 19767 - DNA, 1971 bp, Homo sapiens
  source 1..1971: mol_type = unassigned DNA
ctagagggagtctactgctcttaggaatgttccgggagaaggactgagtggagtagctggagtgagttcccgctgtgaaaaagcctgcaaccctcggatgggaaatttggctttggggcgaaaactctgggcagacaccacctgcggtcagaatgctaccgaactgtactgcttctacagtgagaacacggatctgacttgtcggcagcccaaatgtgacaagtgcaatgctgcctatcctcacctggctcacctgccatctgccatggcagactcatccttccggtttcctcgcacatggtggcagtctgcggaggatgtgcacagagaaaagatccagttagacctggaagctgaattctacttcactcacctaattgtgatgttcaagtcccccaggccggctgccatggtgctggaccgctcccaggactttgggaaaacatggaagccttataagtactttgcgactaactgctccgctacatttggcctggaagatgatgttgtcaagaagggcgctatttgtacttctaaatactccagtccttttccatgcactggaggagaggttattttcaaagctttgtcaccaccatacgatacagagaacccttacagtgccaaagttcaggagcagctgaagatcaccaaccttcgcgtgcagctgctgaaacgacagtcttgtccctgtcagagaaatgacctgaacgaagagcctcaacattttacacactatgcaatctatgatttcattgtcaagggcagctgcttctgcaatggccacgctgatcaatgcatacctgttcatggcttcagacctgtcaaggccccaggaacattccacatggtccatgggaagtgtatgtgtaagcacaacacagcaggcagccactgccagcactgtgccccgttatacaatgaccggccatgggaggcagctgatggcaaaacgggggctcccaacgagtgcagaacctgcaagtgtaatgggcatgctgatacctgtcacttcgacgttaatgtgtgggaggcatcagggaatcgtagtggtggtgtctgtgatgactgtcagcacaacacagaaggacagtattgccagaggtgcaagccaggcttctatcgtgacctgcggagacccttctcagctccagatgcttgcaaaccgtgttcctgccatccagtaggatcagctgtccttcctgccaactcagtgaccttctgcgaccccagcaatggtgactgcccttgcaagcctggggtggcagggcgacgttgtgacaggtgcatggtgggatactggggcttcggagactatggctgtcgaccatgtgactgtgcggggagctgtgaccctatcaccggagactgcatcagcagccacacagacatagactggtatcatgaagttcctgacttccgtcccgtgcacaataagagcgaaccagcctgggagtgggaggatgcgcaggggttttctgcacttctacactcaggtaaatgcgaatgtaaggaacagacattaggaaatgccaaggcattctgtggaatgaaatattcatatgtgctaaaaataaagattttatcagctcatgataaaggtactcatgttgaggtcaatgtgaagattaaaaaggtcttaaaatctaccaaactgaagattttccgaggaaagcgaacattatatccagaatcatggacggacagaggatgcacttgtccaatcctcaatcctggtttggaataccttgtagcaggacatgaggatataagaacaggcaaactaattgtgaatatgaaaagctttgtccagcactggaaaccttctcttggaagaaaagtcatggatattttaaaaagagagtgcaagtagcattaagatggatagcacataatggcacttgtctatgtacaaaacacaaactttagagcaagaagacctcagacaggaaactggaattttttaaagtg

SEQ ID NO: 19768 - DNA, 1818 bp, Homo sapiens
  source 1..1818: mol_type = unassigned DNA
atggggagctgcgcgcggctgctgctgctctggggctgcacggtggtggccgcaggactgagtggagtagctggagtgagttcccgctgtgaaaaagcctgcaaccctcggatgggaaatttggctttggggcgaaaactctgggcagacaccacctgcggtcagaatgctaccgaactgtactgcttctacagtgagaacacggatctgacttgtcggcagcccaaatgtgacaagtgcaatgctgcctatcctcacctggctcacctgccatctgccatggcagactcatccttccggtttcctcgcacatggtggcagtctgcggaggatgtgcacagagaaaagatccagttagacctggaagctgaattctacttcactcacctaattgtgatgttcaagtcccccaggccggctgccatggtgctggaccgctcccaggactttgggaaaacatggaagccttataagtactttgcgactaactgctccgctacatttggcctggaagatgatgttgtcaagaagggcgctatttgtacttctaaatactccagtccttttccatgcactggaggagaggttattttcaaagctttgtcaccaccatacgatacagagaacccttacagtgccaaagttcaggagcagctgaagatcaccaaccttcgcgtgcagctgctgaaacgacagtcttgtccctgtcagagaaatgacctgaacgaagagcctcaacattttacacactatgcaatctatgatttcattgtcaagggcagctgcttctgcaatggccacgctgatcaatgcatacctgttcatggcttcagacctgtcaaggccccaggaacattccacatggtccatgggaagtgtatgtgtaagcacaacacagcaggcagccactgccagcactgtgccccgttatacaatgaccggccatgggaggcagctgatggcaaaacgggggctcccaacgagtgcagaacctgcaagtgtaatgggcatgctgatacctgtcacttcgacgttaatgtgtgggaggcatcagggaatcgtagtggtggtgtctgtgatgactgtcagcacaacacagaaggacagtattgccagaggtgcaagccaggcttctatcgtgacctgcggagacccttctcagctccagatgcttgcaaaccgtgttcctgccatccagtaggatcagctgtccttcctgccaactcagtgaccttctgcgaccccagcaatggtgactgcccttgcaagcctggggtggcagggcgacgttgtgacaggtgcatggtgggatactggggcttcggagactatggctgtcgaccatgtgactgtgcggggagctgtgaccctatcaccggagactgcatcagcagccacacagacatagactggtatcatgaagttcctgacttccgtcccgtgcacaataagagcgaaccagcctgggagtgggaggatgcgcaggggttttctgcacttctacactcagtgctaaaaataaagattttatcagctcatgataaaggtactcatgttgaggtcaatgtgaagattaaaaaggtcttaaaatctaccaaactgaagattttccgaggaaagcgaacattatatccagaatcatggacggacagaggatgcacttgtccaatcctcaatcctggtttggaataccttgtagcaggacatgaggatataagaacaggcaaactaattgtgaatatgaaaagctttgtccagcactggaaaccttctcttggaagaaaagtcatggatattttaaaaagagagtgcaagtag

SEQ ID NO: 19769 - DNA, 4703 bp, Homo sapiens
  source 1..4703: mol_type = unassigned DNA
ttattaatatcactatatttttggagggagaggcacctttctcatcctctcttcctctccgcccacccttactccctccccctcatctacctgtcaaagtcactgatcttttgcatttcggaagaggacgtcaacgggaaggaattccccctctgggtgcgggctccgagagggggcgacttgcaggaggctccccccgggggcggaggcgaagggtgttggtgccagaagaaaagaatgattgatgggaaacagacaccgggctatagacactcatccttttgcttcagatactgatatctcagcctgcttgagcatcccttgtgagctgtgaacattgaggatcactcagggttatcggatgtacaacgggagagccatcgctttgctaaattattatctgcaattggacatcttttacaaaaaccaaactagacctgagtctaatagatatgttctaagacaaagaaaaagctgcaagttgttaacgcctaacacacaagtatgttaggcttccaccaaagtcctcaatatacctgaatacgcacaatatcttaactcttcatatttggttttgggatctgctttgaggtcccatcttcatttaaaaaaaaatacagagacctacctacccgtacgcatacatacatatgtgtatatatatgtaaactagacaaagatcgcagatcataaagcaagctctgctttagtttccaagaagattacaaagaatttagagatgtatttgtcaagattcctgtcgattcatgccctttgggttacggtgtcctcagtgatgcagccctaccctttggtttggggacattatgatttgtgtaagactcagatttacacggaagaagggaaagtttgggattacatggcctgccagccggaatccacggacatgacaaaatatctgaaagtgaaactcgatcctccggatattacctgtggagaccctcctgagacgttctgtgcaatgggcaatccctacatgtgcaataatgagtgtgatgcgagtacccctgagctggcacacccccctgagctgatgtttgattttgaaggaagacatccctccacattttggcagtctgccacttggaaggagtatcccaagcctctccaggttaacatcactctgtcttggagcaaaaccattgagctaacagacaacatagttattacctttgaatctgggcgtccagaccaaatgatcctggagaagtctctcgattatggacgaacatggcagccctatcagtattatgccacagactgcttagatgcttttcacatggatcctaaatccgtgaaggatttatcacagcatacggtcttagaaatcatttgcacagaagagtactcaacagggtatacaacaaatagcaaaataatccactttgaaatcaaagacaggttcgcgttttttgctggacctcgcctacgcaatatggcttccctctacggacagctggatacaaccaagaaactcagagatttctttacagtcacagacctgaggataaggctgttaagaccagccgttggggaaatatttgtagatgagctacacttggcacgctacttttacgcgatctcagacataaaggtgcgaggaaggtgcaagtgtaatctccatgccactgtatgtgtgtatgacaacagcaaattgacatgcgaatgtgagcacaacactacaggtccagactgtgggaaatgcaagaagaattatcagggccgaccttggagtccaggctcctatctccccatccccaaaggcactgcaaatacctgtatccccagtatttccagtattggtagtaagtaaaaacaaaaacaaaaaaaacaccaaaccaagtctaggctagctttgctttgttgttcacctcctcagatctattttcccagtgtccatttctgatgtaatagggtattttctttgtgaattgcatttttgtgttggttttctgcacagatctggtgagaacacagataaagtgattatttgtgcataactccatgaacatggcagtgctatgacttttctgactactcttaaccagtgagggctacctagactcaggtgcaattccttagataatcatcattcaggaaaaatataagtagtcctatttatccatacttagcaaccaacaaacaaattgaactctctcttagactggatttggatgtctgacataattttaaaaagcagaaaatgaaagccaatgaatgccttgggtatatgcatcagaacccaagaaaaagtccatgataccaagggaagggaattttgttaatgcattaaattctatgttttgtgaaggcctgaaacaggcaaatttgtgatcagtagtctctctggagagataaaggaaaaagagaatctgtacattcatttctccttcctaaaatacgatgatctatgtcttcttgactacttagctttgagtttgatatagaaagagtataaaaaatatgtgcagaatttgggagtgagagtactagaaattcctttaataaatctgttagtatgaatccaagcaattgaagagaaaccgctcttcaaccatctgtagaacacttccccagtatcactacaaagaactttcttccagctatcatgggagaaccaggtgtagctcccgcttcatgtgtaaaataatgatgccctcatgccaagcctgaaattcacattaagaaaatgcccagtaactttacagagcaaaattttaaatttttttttatacattgcaccctttatctctaatggctaaaatctttgaacaactactaagtaactgattacaaataaattaccgagaaagcaagattacgcatggtaagcggagagaattttcactgtagtgtcatcccctcacaggcttgtgtcataggtgctgtgccaggcagggtgatcgcagtgtaaatagccattgaatgattgcgattcccagcatccatctaaaaagcaatactctgataatttggataaagcaacttcctgcttcttataaatgcacagtcaggtgtcccaatttataaatcaacccagtttacttgagcttgtgaataggcctggacactgatttgttaagcgctagatgtggtaaatgccatgaaaattggccactttgtaaatagaagtagtgttcacatccatttagagataccagcctaatgctacagcatcctctttgtgatcttgttgaaacagcatcagtgttaaaaacttgcaaatgaaaaccttcagctctaatagtctaatttttctgctttagtatcccccttggcatttgcctaactgtatatataccccacaatgtgctcctttcaggccttgacaattgcatttgcacgtgcattttagtgcaacagggaagcaagtagaagcaagctgacacagattattgaggctgctatagtgatctggcctgtcagaagtttcagaaatggatggatggaaaagtagttctttggcgttggggtgtctttctgtttggagtgtcagttgtatgttgcatggcccctctaactgtactgctcactcgacatcccattcggccgcctccaccacattccccatatctgagcatcagcagatgttgaccttttacacatcaaatcaggaaatttctgttttgttttgttttgttttgttttgaaatcagtggtgacctgaaaggatgcttcgttgtgcctttgaaaaaaatatattaacctttattatcgagaacctaggaaaatttactcctaataaaaaccctctgactaaaagtgatattttggactctcccttcaatatgcctctggctgttccgcttagaatgcaatgggtattttctcagatttccagcaaacaggatgtaagagcttccagaggtcacccaacatcacacatgactagcttacctgtttcctggcttttaaggtaaagagttacagtaaaaccatcaaacgtgattgtatcttctaggctgctttaatggcattcgaaagttccttctttgtgggcttataagttgctttttgcgtgcactcgtggattcctttcccctccaaagggcaagaattcacacgtagacgacactgcctgttccagagggcacgggaatggggttttcaaggtgcaagccagagaaaaggaagctgtttggatatttagctaagttatgggtgtttgccagtgctttttgcattaccccaaagaaggaatcaatgactataattccactaactatatagaaagataccattatagcagatgtaacacccctgagaccccgattatcacagcatagctcaaggaaaataaatgatgtatattatcgatgtagattattgatgtatataaccatcagtttacatacatattctgtatacacagtgattaaaggttttggggccctaataaatttcagtatagatctcaaaatgccaacgcctgtattaaggttcaaatgcatggatagggtggtcatcctttccgatcatctgctaaaaatgtttttgaaacaaatttcccattaaggtcattcgtacctgctgttgtctatctattaacaaataggtttcccataatcctaaggatacttgacttagaactcagtcattctgatctgctttggccatggctgaaaaaatgctggtgatattgtcagcaattaatgaatcccaaaataaatctgtagcctttg

SEQ ID NO: 19770 - DNA, 2856 bp, Homo sapiens
  source 1..2856: mol_type = unassigned DNA
aggagttactggaaacggcgcttctgtggaggagccgggggggatggggagtagagggagggggccctgttgcctcagcgccccgaggtcgtggagcggcagcagctgcagccggagcagcaccagcaacagcaacagcgagcgggacggagttaggaccgctcggagcgcacaggtctcgagggtgttggtgccagaagaaaagaatgattgatgggaaacagacaccgggctatagacactcatccttttgcttcagatactgatatctcagcctgcttgagcatcccttgtgagctgtgaacattgaggatcactcagggttatcggatgtacaacgggagagccatcgctttgctaaattattatctgcaattggacatcttttacaaaaaccaaactagacctgagtctaatagatatgttctaagacaaagaaaaagctgcaagttgttaacgcctaacacacaagtatgttaggcttccaccaaagtcctcaatatacctgaatacgcacaatatcttaactcttcatatttggttttgggatctgctttgaggtcccatcttcatttaaaaaaaaatacagagacctacctacccgtacgcatacatacatatgtgtatatatatgtaaactagacaaagatcgcagatcataaagcaagctctgctttagtttccaagaagattacaaagaatttagagatgtatttgtcaagattcctgtcgattcatgccctttgggttacggtgtcctcagtgatgcagccctaccctttggtttggggacattatgatttgtgtaagactcagatttacacggaagaagggaaagtttgggattacatggcctgccagccggaatccacggacatgacaaaatatctgaaagtgaaactcgatcctccggatattacctgtggagaccctcctgagacgttctgtgcaatgggcaatccctacatgtgcaataatgagtgtgatgcgagtacccctgagctggcacacccccctgagctgatgtttgattttgaaggaagacatccctccacattttggcagtctgccacttggaaggagtatcccaagcctctccaggttaacatcactctgtcttggagcaaaaccattgagctaacagacaacatagttattacctttgaatctgggcgtccagaccaaatgatcctggagaagtctctcgattatggacgaacatggcagccctatcagtattatgccacagactgcttagatgcttttcacatggatcctaaatccgtgaaggatttatcacagcatacggtcttagaaatcatttgcacagaagagtactcaacagggtatacaacaaatagcaaaataatccactttgaaatcaaagacaggttcgcgttttttgctggacctcgcctacgcaatatggcttccctctacggacagctggatacaaccaagaaactcagagatttctttacagtcacagacctgaggataaggctgttaagaccagccgttggggaaatatttgtagatgagctacacttggcacgctacttttacgcgatctcagacataaaggtgcgaggaaggtgcaagtgtaatctccatgccactgtatgtgtgtatgacaacagcaaattgacatgcgaatgtgagcacaacactacaggtccagactgtgggaaatgcaagaagaattatcagggccgaccttggagtccaggctcctatctccccatccccaaaggcactgcaaatacctgtatccccagtatttccagtattggtaatcctccaaagtttaataggatatggccgaatatttcttcccttgaggtttctaacccaaaacaagagtgttattgtaaccctttgggctcaatccatgatcgttgtaatggctcaggattttgtgagtgtaagactggaacaacagggcctaagtgtgatgagtgtctgccgggaaattcctggcactacggctgtcaaccgaatgtctgcgacaacgagctcctgcactgccagaacggagggacgtgccacaacaacgtgcgctgcctgtgcccggccgcatacacgggcatcctctgcgagaagctgcggtgcgaggaggctggcagctgcggctccgactctggccagggcgcgcccccgcacggctccccagcgctgctgctgctgaccacgctgctgggaaccgccagccccctggtgttctaggtgtcacctccagccacaccggacgggcctgtgccgtggggaagcagacacaacccaaacatttgctactaacataggaaacacacacatacagacacccccactcagacagtgtacaaactaagaaggcctaactgaactaagccatatttatcacccgtggacagcacatccgagtcaagactgttaatttctgactccagaggagttggcagctgttgatattatcactgcaaatcacattgccagctgcagagcatattgtggattggaaaggctgcgacagccccccaaacaggaaagacaaaaaacaaacaaatcaaccgacctaaaaacattggctactctagcgtggtgcgccctagtacgactccgcccagtgtgtggaccaaccaaatagcattctttgctgtcaggtgcattgtgggcataaggaaatctgttacaagctgccatattggcctgcttccgtccctgaatcccttccaacctgtgctttagtgaacgttgctctgtaacccttgttggttgaaagatttctttgtctgatgttagtgatgcacatgtgtaacagccccctctaaaagcgcaagccagtcatacccctgtatatcttagcagcactgagtc

SEQ ID NO: 19771 - DNA, 2916 bp, Homo sapiens
  source 1..2916: mol_type = unassigned DNA
aggagttactggaaacggcgcttctgtggaggagccgggggggatggggagtagagggagggggccctgttgcctcagcgccccgaggtcgtggagcggcagcagctgcagccggagcagcaccagcaacagcaacagcgagcgggacggagttaggaccgctcggagcgcacaggtctcgagggtgttggtgccagaagaaaagaatgattgatgggaaacagacaccgggctatagacactcatccttttgcttcagatactgatatctcagcctgcttgagcatcccttgtgagctgtgaacattgaggatcactcagggttatcggatgtacaacgggagagccatcgctttgctaaattattatctgcaattggacatcttttacaaaaaccaaactagacctgagtctaatagatatgttctaagacaaagaaaaagctgcaagttgttaacgcctaacacacaagtatgttaggcttccaccaaagtcctcaatatacctgaatacgcacaatatcttaactcttcatatttggttttgggatctgctttgaggtcccatcttcatttaaaaaaaaatacagagacctacctacccgtacgcatacatacatatgtgtatatatatgtaaactagacaaagatcgcagatcataaagcaagctctgctttagtttccaagaagattacaaagaatttagagatgtatttgtcaagattcctgtcgattcatgccctttgggttacggtgtcctcagtgatgcagccctaccctttggtttggggacattatgatttgtgtaagactcagatttacacggaagaagggaaagtttgggattacatggcctgccagccggaatccacggacatgacaaaatatctgaaagtgaaactcgatcctccggatattacctgtggagaccctcctgagacgttctgtgcaatgggcaatccctacatgtgcaataatgagtgtgatgcgagtacccctgagctggcacacccccctgagctgatgtttgattttgaaggaagacatccctccacattttggcagtctgccacttggaaggagtatcccaagcctctccaggttaacatcactctgtcttggagcaaaaccattgagctaacagacaacatagttattacctttgaatctgggcgtccagaccaaatgatcctggagaagtctctcgattatggacgaacatggcagccctatcagtattatgccacagactgcttagatgcttttcacatggatcctaaatccgtgaaggatttatcacagcatacggtcttagaaatcatttgcacagaagagtactcaacagggtatacaacaaatagcaaaataatccactttgaaatcaaagacaggttcgcgttttttgctggacctcgcctacgcaatatggcttccctctacggacagctggatacaaccaagaaactcagagatttctttacagtcacagacctgaggataaggctgttaagaccagccgttggggaaatatttgtagatgagctacacttggcacgctacttttacgcgatctcagacataaaggtgcgaggaaggtgcaagtgtaatctccatgccactgtatgtgtgtatgacaacagcaaattgacatgcgaatgtgagcacaacactacaggtccagactgtgggaaatgcaagaagaattatcagggccgaccttggagtccaggctcctatctccccatccccaaaggcactgcaaatacctgtatccccagtatttccagtattggtaatcctccaaagtttaataggatatggccgaatatttcttcccttgaggtttctaacccaaaacaagttgctcccaaattagctttgtcaacagtttcttctgttcaagttgcaaaccacaagagagagtgttattgtaaccctttgggctcaatccatgatcgttgtaatggctcaggattttgtgagtgtaagactggaacaacagggcctaagtgtgatgagtgtctgccgggaaattcctggcactacggctgtcaaccgaatgtctgcgacaacgagctcctgcactgccagaacggagggacgtgccacaacaacgtgcgctgcctgtgcccggccgcatacacgggcatcctctgcgagaagctgcggtgcgaggaggctggcagctgcggctccgactctggccagggcgcgcccccgcacggctccccagcgctgctgctgctgaccacgctgctgggaaccgccagccccctggtgttctaggtgtcacctccagccacaccggacgggcctgtgccgtggggaagcagacacaacccaaacatttgctactaacataggaaacacacacatacagacacccccactcagacagtgtacaaactaagaaggcctaactgaactaagccatatttatcacccgtggacagcacatccgagtcaagactgttaatttctgactccagaggagttggcagctgttgatattatcactgcaaatcacattgccagctgcagagcatattgtggattggaaaggctgcgacagccccccaaacaggaaagacaaaaaacaaacaaatcaaccgacctaaaaacattggctactctagcgtggtgcgccctagtacgactccgcccagtgtgtggaccaaccaaatagcattctttgctgtcaggtgcattgtgggcataaggaaatctgttacaagctgccatattggcctgcttccgtccctgaatcccttccaacctgtgctttagtgaacgttgctctgtaacccttgttggttgaaagatttctttgtctgatgttagtgatgcacatgtgtaacagccccctctaaaagcgcaagccagtcatacccctgtatatcttagcagcactgagtc

SEQ ID NO: 19772 - DNA, 3084 bp, Homo sapiens
  source 1..3084: mol_type = unassigned DNA
aggagttactggaaacggcgcttctgtggaggagccgggggggatggggagtagagggagggggccctgttgcctcagcgccccgaggtcgtggagcggcagcagctgcagccggagcagcaccagcaacagcaacagcgagcgggacggagttaggaccgctcggagcgcacaggtctcgagggtgttggtgccagaagaaaagaatgattgatgggaaacagacaccgggctatagacactcatccttttgcttcagatactgatatctcagcctgcttgagcatcccttgtgagctgtgaacattgaggatcactcagggttatcggatgtacaacgggagagccatcgctttgctaaattattatctgcaattggacatcttttacaaaaaccaaactagacctgagtctaatagatatgttctaagacaaagaaaaagctgcaagttgttaacgcctaacacacaagtatgttaggcttccaccaaagtcctcaatatacctgaatacgcacaatatcttaactcttcatatttggttttgggatctgctttgaggtcccatcttcatttaaaaaaaaatacagagacctacctacccgtacgcatacatacatatgtgtatatatatgtaaactagacaaagatcgcagatcataaagcaagctctgctttagtttccaagaagattacaaagaatttagagatgtatttgtcaagattcctgtcgattcatgccctttgggttacggtgtcctcagtgatgcagccctaccctttggtttggggacattatgatttgtgtaagactcagatttacacggaagaagggaaagtttgggattacatggcctgccagccggaatccacggacatgacaaaatatctgaaagtgaaactcgatcctccggatattacctgtggagaccctcctgagacgttctgtgcaatgggcaatccctacatgtgcaataatgagtgtgatgcgagtacccctgagctggcacacccccctgagctgatgtttgattttgaaggaagacatccctccacattttggcagtctgccacttggaaggagtatcccaagcctctccaggttaacatcactctgtcttggagcaaaaccattgagctaacagacaacatagttattacctttgaatctgggcgtccagaccaaatgatcctggagaagtctctcgattatggacgaacatggcagccctatcagtattatgccacagactgcttagatgcttttcacatggatcctaaatccgtgaaggatttatcacagcatacggtcttagaaatcatttgcacagaagagtactcaacagggtatacaacaaatagcaaaataatccactttgaaatcaaagacaggttcgcgttttttgctggacctcgcctacgcaatatggcttccctctacggacagctggatacaaccaagaaactcagagatttctttacagtcacagacctgaggataaggctgttaagaccagccgttggggaaatatttgtagatgagctacacttggcacgctacttttacgcgatctcagacataaaggtgcgaggaaggtgcaagtgtaatctccatgccactgtatgtgtgtatgacaacagcaaattgacatgcgaatgtgagcacaacactacaggtccagactgtgggaaatgcaagaagaattatcagggccgaccttggagtccaggctcctatctccccatccccaaaggcactgcaaatacctgtatccccagtatttccagtattggtaatcctccaaagtttaataggatatggccgaatatttcttcccttgaggtttctaacccaaaacaagttgctcccaaattagctttgtcaacagtttcttctgttcaagttgcaaaccacaagagagattgtgaatgcttcggccactccaatcgatgcagttatatcgatctgctaaatacagtcatttgcgtgagctgtaaacacaacactagagggcagcactgtgagttatgcaggctgggctacttcagaaatgcttctgcacaactggacgatgagaatgtgtgcatagagtgttattgtaaccctttgggctcaatccatgatcgttgtaatggctcaggattttgtgagtgtaagactggaacaacagggcctaagtgtgatgagtgtctgccgggaaattcctggcactacggctgtcaaccgaatgtctgcgacaacgagctcctgcactgccagaacggagggacgtgccacaacaacgtgcgctgcctgtgcccggccgcatacacgggcatcctctgcgagaagctgcggtgcgaggaggctggcagctgcggctccgactctggccagggcgcgcccccgcacggctccccagcgctgctgctgctgaccacgctgctgggaaccgccagccccctggtgttctaggtgtcacctccagccacaccggacgggcctgtgccgtggggaagcagacacaacccaaacatttgctactaacataggaaacacacacatacagacacccccactcagacagtgtacaaactaagaaggcctaactgaactaagccatatttatcacccgtggacagcacatccgagtcaagactgttaatttctgactccagaggagttggcagctgttgatattatcactgcaaatcacattgccagctgcagagcatattgtggattggaaaggctgcgacagccccccaaacaggaaagacaaaaaacaaacaaatcaaccgacctaaaaacattggctactctagcgtggtgcgccctagtacgactccgcccagtgtgtggaccaaccaaatagcattctttgctgtcaggtgcattgtgggcataaggaaatctgttacaagctgccatattggcctgcttccgtccctgaatcccttccaacctgtgctttagtgaacgttgctctgtaacccttgttggttgaaagatttctttgtctgatgttagtgatgcacatgtgtaacagccccctctaaaagcgcaagccagtcatacccctgtatatcttagcagcactgagtc

SEQ ID NO: 19773 - DNA, 1485 bp, Homo sapiens
  source 1..1485: mol_type = unassigned DNA
atgtatttgtcaagattcctgtcgattcatgccctttgggttacggtgtcctcagtgatgcagccctaccctttggtttggggacattatgatttgtgtaagactcagatttacacggaagaagggaaagtttgggattacatggcctgccagccggaatccacggacatgacaaaatatctgaaagtgaaactcgatcctccggatattacctgtggagaccctcctgagacgttctgtgcaatgggcaatccctacatgtgcaataatgagtgtgatgcgagtacccctgagctggcacacccccctgagctgatgtttgattttgaaggaagacatccctccacattttggcagtctgccacttggaaggagtatcccaagcctctccaggttaacatcactctgtcttggagcaaaaccattgagctaacagacaacatagttattacctttgaatctgggcgtccagaccaaatgatcctggagaagtctctcgattatggacgaacatggcagccctatcagtattatgccacagactgcttagatgcttttcacatggatcctaaatccgtgaaggatttatcacagcatacggtcttagaaatcatttgcacagaagagtactcaacagggtatacaacaaatagcaaaataatccactttgaaatcaaagacaggttcgcgttttttgctggacctcgcctacgcaatatggcttccctctacggacagctggatacaaccaagaaactcagagatttctttacagtcacagacctgaggataaggctgttaagaccagccgttggggaaatatttgtagatgagctacacttggcacgctacttttacgcgatctcagacataaaggtgcgaggaaggtgcaagtgtaatctccatgccactgtatgtgtgtatgacaacagcaaattgacatgcgaatgtgagcacaacactacaggtccagactgtgggaaatgcaagaagaattatcagggccgaccttggagtccaggctcctatctccccatccccaaaggcactgcaaatacctgtatccccagtatttccagtattggtaattgtgaatgcttcggccactccaatcgatgcagttatatcgatctgctaaatacagtcatttgcgtgagctgtaaacacaacactagagggcagcactgtgagttatgcaggctgggctacttcagaaatgcttctgcacaactggacgatgagaatgtgtgcatagcgaatgtctgcgacaacgagctcctgcactgccagaacggagggacgtgccacaacaacgtgcgctgcctgtgcccggccgcatacacgggcatcctctgcgagaagctgcggtgcgaggaggctggcagctgcggctccgactctggccagggcgcgcccccgcacggctccccagcgctgctgctgctgaccacgctgctgggaaccgccagccccctggtgttctag

SEQ ID NO: 19774 - DNA, 1443 bp, Homo sapiens
  source 1..1443: mol_type = unassigned DNA
atgtatttgtcaagattcctgtcgattcatgccctttgggttacggtgtcctcagtgatgcagccctaccctttggtttggggacattatgatttgtgtaagactcagatttacacggaagaagggaaagtttgggattacatggcctgccagccggaatccacggacatgacaaaatatctgaaagtgaaactcgatcctccggatattacctgtggagaccctcctgagacgttctgtgcaatgggcaatccctacatgtgcaataatgagtgtgatgcgagtacccctgagctggcacacccccctgagctgatgtttgattttgaaggaagacatccctccacattttggcagtctgccacttggaaggagtatcccaagcctctccaggttaacatcactctgtcttggagcaaaaccattgagctaacagacaacatagttattacctttgaatctgggcgtccagaccaaatgatcctggagaagtctctcgattatggacgaacatggcagccctatcagtattatgccacagactgcttagatgcttttcacatggatcctaaatccgtgaaggatttatcacagcatacggtcttagaaatcatttgcacagaagagtactcaacagggtatacaacaaatagcaaaataatccactttgaaatcaaagacaggttcgcgttttttgctggacctcgcctacgcaatatggcttccctctacggacagctggatacaaccaagaaactcagagatttctttacagtcacagacctgaggataaggctgttaagaccagccgttggggaaatatttgtagatgagctacacttggcacgctacttttacgcgatctcagacataaaggtgcgaggaaggtgcaagtgtaatctccatgccactgtatgtgtgtatgacaacagcaaattgacatgcgaatgtgagcacaacactacaggtccagactgtgggaaatgcaagaagaattatcagggccgaccttggagtccaggctcctatctccccatccccaaaggcactgcaaatacctgtatccccagtatttccagtattggtaatcctccaaagtttaataggatatggccgaatatttcttcccttgaggtttctaacccaaaacaagttgctcccaaattagctttgtcaacagtttcttctgttcaagttgcaaaccacaagagagcgaatgtctgcgacaacgagctcctgcactgccagaacggagggacgtgccacaacaacgtgcgctgcctgtgcccggccgcatacacgggcatcctctgcgagaagctgcggtgcgaggaggctggcagctgcggctccgactctggccagggcgcgcccccgcacggctccccagcgctgctgctgctgaccacgctgctgggaaccgccagccccctggtgttctag

SEQ ID NO: 19775 - DNA, 4628 bp, Homo sapiens
  source 1..4628: mol_type = unassigned DNA
gcatttcggaagaggacgtcaacgggaaggaattccccctctgggtgcgggctccgagagggggcgacttgcaggaggctccccccgggggcggaggcgaagggtgttggtgccagaagaaaagaatgattgatgggaaacagacaccgggctatagacactcatccttttgcttcagatactgatatctcagcctgcttgagcatcccttgtgagctgtgaacattgaggatcactcagggttatcggatgtacaacgggagagccatcgctttgctaaattattatctgcaattggacatcttttacaaaaaccaaactagacctgagtctaatagatatgttctaagacaaagaaaaagctgcaagttgttaacgcctaacacacaagtatgttaggcttccaccaaagtcctcaatatacctgaatacgcacaatatcttaactcttcatatttggttttgggatctgctttgaggtcccatcttcatttaaaaaaaaatacagagacctacctacccgtacgcatacatacatatgtgtatatatatgtaaactagacaaagatcgcagatcataaagcaagctctgctttagtttccaagaagattacaaagaatttagagatgtatttgtcaagattcctgtcgattcatgccctttgggttacggtgtcctcagtgatgcagccctaccctttggtttggggacattatgatttgtgtaagactcagatttacacggaagaagggaaagtttgggattacatggcctgccagccggaatccacggacatgacaaaatatctgaaagtgaaactcgatcctccggatattacctgtggagaccctcctgagacgttctgtgcaatgggcaatccctacatgtgcaataatgagtgtgatgcgagtacccctgagctggcacacccccctgagctgatgtttgattttgaaggaagacatccctccacattttggcagtctgccacttggaaggagtatcccaagcctctccaggttaacatcactctgtcttggagcaaaaccattgagctaacagacaacatagttattacctttgaatctgggcgtccagaccaaatgatcctggagaagtctctcgattatggacgaacatggcagccctatcagtattatgccacagactgcttagatgcttttcacatggatcctaaatccgtgaaggatttatcacagcatacggtcttagaaatcatttgcacagaagagtactcaacagggtatacaacaaatagcaaaataatccactttgaaatcaaagacaggttcgcgttttttgctggacctcgcctacgcaatatggcttccctctacggacagctggatacaaccaagaaactcagagatttctttacagtcacagacctgaggataaggctgttaagaccagccgttggggaaatatttgtagatgagctacacttggcacgctacttttacgcgatctcagacataaaggtgcgaggaaggtgcaagtgtaatctccatgccactgtatgtgtgtatgacaacagcaaattgacatgcgaatgtgagcacaacactacaggtccagactgtgggaaatgcaagaagaattatcagggccgaccttggagtccaggctcctatctccccatccccaaaggcactgcaaatacctgtatccccagtatttccagtattggtaatcctccaaagtttaataggatatggccgaatatttcttcccttgaggtttctaacccaaaacaagcgaatgtctgcgacaacgagctcctgcactgccagaacggagggacgtgccacaacaacgtgcgctgcctgtgcccggccgcatacacgggcatcctctgcgagaagctgcggtgcgaggaggctggcagctgcggctccgactctggccagggcgcgcccccgcacggctccccagcgctgctgctgctgaccacgctgctgggaaccgccagccccctggtgttctaggtgtcacctccagccacaccggacgggcctgtgccgtggggaagcagacacaacccaaacatttgctactaacataggaaacacacacatacagacacccccactcagacagtgtacaaactaagaaggcctaactgaactaagccatatttatcacccgtggacagcacatccgagtcaagactgttaatttctgactccagaggagttggcagctgttgatattatcactgcaaatcacattgccagctgcagagcatattgtggattggaaaggctgcgacagccccccaaacaggaaagacaaaaaacaaacaaatcaaccgacctaaaaacattggctactctagcgtggtgcgccctagtacgactccgcccagtgtgtggaccaaccaaatagcattctttgctgtcaggtgcattgtgggcataaggaaatctgttacaagctgccatattggcctgcttccgtccctgaatcccttccaacctgtgctttagtgaacgttgctctgtaacccttgttggttgaaagatttctttgtctgatgttagtgatgcacatgtgtaacagccccctctaaaagcgcaagccagtcatacccctgtatatcttagcagcactgagtccagtgcgagcacacacccactatacaagagtggctataggaaaaaagaaagtgtatctatccttttgtattcaaatgaagttatttttcttgaactactgtaatatgtagattttttgtattattgccaatttgtgttaccagacaatctgttaatgtatctaattcgaatcagcaaagactgacattttattttgtcctctttcgttctgttttgtttcactgtgcagagatttctctgtaagggcaacgaacgtgctggcatcaaagaatatcagtttacatatataacaagtgtaataagattccaccaaaggacattctaaatgttttcttgttgctttaacactggaagatttaaagaataaaaactcctgcataaacgatttcaggaatttgtattgcaatttcttaagatgaaaggaacagccaccaagcagtttcacactcactttactgatttctgtgtggactgagtacattcagctgacgaatttagttcccaggaagatggattgatgttcactagcttggacaacttctgcaaaatatgagactatttccacttgggaaaaattacaacagcaaaaaaaaaaaaaaaaaaaaaaaaaaatctaagtgattgccaagattatgccaaagcctgttggcagagtactaagagacttttatttttaagtcatgctattttcacagattgatggtgatcatgtgactctagggatgctgatctatgtatctttccaaatacagtgtttacatggagtatcacaagacgcaacctggggaaccaggaagggagcagggaaattgagtgatttgcaatttgactttgaatatattcagacttaagtatttagaggaaatatcaaaatataaagcagcaagtagacataactgctgttcctgagaataaagtttgttttaagtgctgcccaaggtgtaataaattcttgtttctgccttttattaggccaattactgtgcaagacagcaaggggaggcaggtggggaagaacctttgcaaagtttcaaagaggctaagacagtgtgcatttcgttcccagcacactgttgtcctacagattacaagtgtattagcagcagcatctcctggaatcaaaaacaattatcagcccgaaccagagtcttaaggacaatgaaattctacatgacttggtagaacaataacctatgatagtgtaaggtcagaaacctagttccagtctgaattcttcaccctgctgccactccttgctgaaacagggaaggggggaggaatgtctcctgataaataacctgggtaaaaactagatgaaggaacagcatgtcttattggttttgttcccagaaaagccaattcgaagaaggcaataaaaggtaaacaggtaatgcctgtgctgcctgccaccccacgtctaagtctattgaatgtttgttattcaaaccaacagtctcttttgatgtaagaaataaggaaagatggaaataaattagagcttaggcttagtgccagagtggccaaccagaaattggagatttacgttggaagcataaatagaaaattatatttcaggctcaccaaagaaacacatgaaaatgctgataacatagggagtttgagattatttataatgaggtggatttctgatattaaaattagagtttaagttgtcttatagtttattagcacaaaccaaaggcagcccatgttatttctggcaaagatgcactttatcgttatctgctcatggctttgtcgcaacgctcaggaatcagacactgcacacttcaatagttgggattccaaaagctaattctaaaatttaatgaaggcctgatttaaactgattcatctgcattttatctttatgaggccataagaatctaaattgatgaggaatatctttcattccgtgtatttagatatagttttctgaatttcctgaagcgatgtgatctgcttttaataaaaattcacttttaggt

SEQ ID NO: 19776 - DNA, 4034 bp, Homo sapiens
  source 1..4034: mol_type = unassigned DNA
taaaagtttaaggcgagaagtgtcagaggcagcggagcgaggaggcgcggaggagagccggcgagcaggggactgggctggcacgacctccgaaggctgagatctcattattaatatcactatatttttggagggagaggcacctttctcatcctctcttcctctccgcccacccttactccctccccctcatctacctgtcaaagtcactgatcttttgcatttcggaagaggacgtcaacgggaaggaattccccctctgggtgcgggctccgagagggggcgacttgcaggaggctccccccgggggcggaggcgaagggtgttggtgccagaagaaaagaatgattgatgggaaacagacaccgggctatagacactcatccttttgcttcagatactgatatctcagcctgcttgagcatcccttgtgagctgtgaacattgaggatcactcagggttatcggatgtacaacgggagagccatcgctttgctaaattattatctgcaattggacatcttttacaaaaaccaaactagacctgagtctaatagatatgttctaagacaaagaaaaagctgcaagttgttaacgcctaacacacaagtatgttaggcttccaccaaagtcctcaatatacctgaatacgcacaatatcttaactcttcatatttggttttgggatctgctttgaggtcccatcttcatttaaaaaaaaatacagagacctacctacccgtacgcatacatacatatgtgtatatatatgtaaactagacaaagatcgcagatcataaagcaagctctgctttagtttccaagaagattacaaagaatttagagatgtatttgtcaagattcctgtcgattcatgccctttgggttacggtgtcctcagtgatgcagccctaccctttggtttggggacattatgatttgtgtaagactcagatttacacggaagaagggaaagtttgggattacatggcctgccagccggaatccacggacatgacaaaatatctgaaagtgaaactcgatcctccggatattacctgtggagaccctcctgagacgttctgtgcaatgggcaatccctacatgtgcaataatgagtgtgatgcgagtacccctgagctggcacacccccctgagctgatgtttgattttgaaggaagacatccctccacattttggcagtctgccacttggaaggagtatcccaagcctctccaggttaacatcactctgtcttggagcaaaaccattgagctaacagacaacatagttattacctttgaatctgggcgtccagaccaaatgatcctggagaagtctctcgattatggacgaacatggcagccctatcagtattatgccacagactgcttagatgcttttcacatggatcctaaatccgtgaaggatttatcacagcatacggtcttagaaatcatttgcacagaagagtactcaacagggtatacaacaaatagcaaaataatccactttgaaatcaaagacaggttcgcgttttttgctggacctcgcctacgcaatatggcttccctctacggacagctggatacaaccaagaaactcagagatttctttacagtcacagacctgaggataaggctgttaagaccagccgttggggaaatatttgtagatgagctacacttggcacgctacttttacgcgatctcagacataaaggtgcgaggaaggtgcaagtgtaatctccatgccactgtatgtgtgtatgacaacagcaaattgacatgcgaatgtgagcacaacactacaggtccagactgtgggaaatgcaagaagaattatcagggccgaccttggagtccaggctcctatctccccatccccaaaggcactgcaaatacctgtatccccagtatttccagtattggtaattgtgaatgcttcggccactccaatcgatgcagttatatcgatctgctaaatacagtcatttgcgtgagctgtaaacacaacactagagggcagcactgtgagttatgcaggctgggctacttcagaaatgcttctgcacaactggacgatgagaatgtgtgcatagagtgttattgtaaccctttgggctcaatccatgatcgttgtaatggctcaggattttgtgagtgtaagactggaacaacagggcctaagtgtgatgagtgtctgccgggaaattcctggcactacggctgtcaaccgaatgtctgcgacaacgagctcctgcactgccagaacggagggacgtgccacaacaacgtgcgctgcctgtgcccggccgcatacacgggcatcctctgcgagaagctgcggtgcgaggaggctggcagctgcggctccgactctggccagggcgcgcccccgcacggctccccagcgctgctgctgctgaccacgctgctgggaaccgccagccccctggtgttctaggtgtcacctccagccacaccggacgggcctgtgccgtggggaagcagacacaacccaaacatttgctactaacataggaaacacacacatacagacacccccactcagacagtgtacaaactaagaaggcctaactgaactaagccatatttatcacccgtggacagcacatccgagtcaagactgttaatttctgactccagaggagttggcagctgttgatattatcactgcaaatcacattgccagctgcagagcatattgtggattggaaaggctgcgacagccccccaaacaggaaagacaaaaaacaaacaaatcaaccgacctaaaaacattggctactctagcgtggtgcgccctagtacgactccgcccagtgtgtggaccaaccaaatagcattctttgctgtcaggtgcattgtgggcataaggaaatctgttacaagctgccatattggcctgcttccgtccctgaatcccttccaacctgtgctttagtgaacgttgctctgtaacccttgttggttgaaagatttctttgtctgatgttagtgatgcacatgtgtaacagccccctctaaaagcgcaagccagtcatacccctgtatatcttagcagcactgagtccagtgcgagcacacacccactatacaagagtggctataggaaaaaagaaagtgtatctatccttttgtattcaaatgaagttatttttcttgaactactgtaatatgtagattttttgtattattgccaatttgtgttaccagacaatctgttaatgtatctaattcgaatcagcaaagactgacattttattttgtcctctttcgttctgttttgtttcactgtgcagagatttctctgtaagggcaacgaacgtgctggcatcaaagaatatcagtttacatatataacaagtgtaataagattccaccaaaggacattctaaatgttttcttgttgctttaacactggaagatttaaagaataaaaactcctgcataaacgatttcaggaatttgtattgcaatttcttaagatgaaaggaacagccaccaagcagtttcacactcactttactgatttctgtgtggactgagtacattcagctgacgaatttagttcccaggaagatggattgatgttcactagcttggacaacttctgcaaaatatgagactatttccacttgggaaaaattacaacagcaaaaaaaaaaaaaaaaaaaaaaaaaaatctaagtgattgccaagattatgccaaagcctgttggcagagtactaagagacttttatttttaagtcatgctattttcacagattgatggtgatcatgtgactctagggatgctgatctatgtatctttccaaatacagtgtttacatggagtatcacaagacgcaacctggggaaccaggaagggagcagggaaattgagtgatttgcaatttgactttgaatatattcagacttaagtatttagaggaaatatcaaaatataaagcagcaagtagacataactgctgttcctgagaataaagtttgttttaagtgctgcccaa

SEQ ID NO: 19777 - DNA, 2721 bp, Homo sapiens
  source 1..2721: mol_type = unassigned DNA
aggagttactggaaacggcgcttctgtggaggagccgggggggatggggagtagagggagggggccctgttgcctcagcgccccgaggtcgtggagcggcagcagctgcagccggagcagcaccagcaacagcaacagcgagcgggacggagttaggaccgctcggagcgcacaggtctcgagggtgttggtgccagaagaaaagaatgattgatgggaaacagacaccgggctatagacactcatccttttgcttcagatactgatatctcagcctgcttgagcatcccttgtgagctgtgaacattgaggatcactcagggttatcggatgtacaacgggagagccatcgctttgctaaattattatctgcaattggacatcttttacaaaaaccaaactagacctgagtctaatagatatgttctaagacaaagaaaaagctgcaagttgttaacgcctaacacacaagtatgttaggcttccaccaaagtcctcaatatacctgaatacgcacaatatcttaactcttcatatttggttttgggatctgctttgaggtcccatcttcatttaaaaaaaaatacagagacctacctacccgtacgcatacatacatatgtgtatatatatgtaaactagacaaagatcgcagatcataaagcaagctctgctttagtttccaagaagattacaaagaatttagagatgtatttgtcaagattcctgtcgattcatgccctttgggttacggtgtcctcagtgatgcagccctaccctttggtttggggacattatgatttgtgtaagactcagatttacacggaagaagggaaagtttgggattacatggcctgccagccggaatccacggacatgacaaaatatctgaaagtgaaactcgatcctccggatattacctgtggagaccctcctgagacgttctgtgcaatgggcaatccctacatgtgcaataatgagtgtgatgcgagtacccctgagctggcacacccccctgagctgatgtttgattttgaaggaagacatccctccacattttggcagtctgccacttggaaggagtatcccaagcctctccaggttaacatcactctgtcttggagcaaaaccattgagctaacagacaacatagttattacctttgaatctgggcgtccagaccaaatgatcctggagaagtctctcgattatggacgaacatggcagccctatcagtattatgccacagactgcttagatgcttttcacatggatcctaaatccgtgaaggatttatcacagcatacggtcttagaaatcatttgcacagaagagtactcaacagggtatacaacaaatagcaaaataatccactttgaaatcaaagacaggttcgcgttttttgctggacctcgcctacgcaatatggcttccctctacggacagctggatacaaccaagaaactcagagatttctttacagtcacagacctgaggataaggctgttaagaccagccgttggggaaatatttgtagatgagctacacttggcacgctacttttacgcgatctcagacataaaggtgcgaggaaggtgcaagtgtaatctccatgccactgtatgtgtgtatgacaacagcaaattgacatgcgaatgtgagcacaacactacaggtccagactgtgggaaatgcaagaagaattatcagggccgaccttggagtccaggctcctatctccccatccccaaaggcactgcaaatacctgtgatccctatcttacctcatgtggagatcctccaaagtttaataggatatggccgaatatttcttcccttgaggtttctaacccaaaacaagcgaatgtctgcgacaacgagctcctgcactgccagaacggagggacgtgccacaacaacgtgcgctgcctgtgcccggccgcatacacgggcatcctctgcgagaagctgcggtgcgaggaggctggcagctgcggctccgactctggccagggcgcgcccccgcacggctccccagcgctgctgctgctgaccacgctgctgggaaccgccagccccctggtgttctaggtgtcacctccagccacaccggacgggcctgtgccgtggggaagcagacacaacccaaacatttgctactaacataggaaacacacacatacagacacccccactcagacagtgtacaaactaagaaggcctaactgaactaagccatatttatcacccgtggacagcacatccgagtcaagactgttaatttctgactccagaggagttggcagctgttgatattatcactgcaaatcacattgccagctgcagagcatattgtggattggaaaggctgcgacagccccccaaacaggaaagacaaaaaacaaacaaatcaaccgacctaaaaacattggctactctagcgtggtgcgccctagtacgactccgcccagtgtgtggaccaaccaaatagcattctttgctgtcaggtgcattgtgggcataaggaaatctgttacaagctgccatattggcctgcttccgtccctgaatcccttccaacctgtgctttagtgaacgttgctctgtaacccttgttggttgaaagatttctttgtctgatgttagtgatgcacatgtgtaacagccccctctaaaagcgcaagccagtcatacccctgtatatcttagcagcactgagtc

SEQ ID NO: 19778 - DNA, 3149 bp, Homo sapiens
  source 1..3149: mol_type = unassigned DNA
gaggtacacgaggagttactggaaacggcgcttctgtggaggagccgggggggatggggagtagagggagggggccctgttgcctcagcgccccgaggtcgtggagcggcagcagctgcagccggagcagcaccagcaacagcaacagcgagcgggacggagttaggaccgctcggagcgcacaggtctcgagggtgttggtgccagaagaaaagaatgattgatgggaaacagacaccgggctatagacactcatccttttgcttcagatactgatatctcagcctgcttgagcatcccttgtgagctgtgaacattgaggatcactcagggttatcggatgtacaacgggagagccatcgctttgctaaattattatctgcaattggacatcttttacaaaaaccaaactagacctgagtctaatagatatgttctaagacaaagaaaaagctgcaagttgttaacgcctaacacacaagtatgttaggcttccaccaaagtcctcaatatacctgaatacgcacaatatcttaactcttcatatttggttttgggatctgctttgaggtcccatcttcatttaaaaaaaaatacagagacctacctacccgtacgcatacatacatatgtgtatatatatgtaaactagacaaagatcgcagatcataaagcaagctctgctttagtttccaagaagattacaaagaatttagagatgtatttgtcaagattcctgtcgattcatgccctttgggttacggtgtcctcagtgatgcagccctaccctttggtttggggacattatgatttgtgtaagactcagatttacacggaagaagggaaagtttgggattacatggcctgccagccggaatccacggacatgacaaaatatctgaaagtgaaactcgatcctccggatattacctgtggagaccctcctgagacgttctgtgcaatgggcaatccctacatgtgcaataatgagtgtgatgcgagtacccctgagctggcacacccccctgagctgatgtttgattttgaaggaagacatccctccacattttggcagtctgccacttggaaggagtatcccaagcctctccaggttaacatcactctgtcttggagcaaaaccattgagctaacagacaacatagttattacctttgaatctgggcgtccagaccaaatgatcctggagaagtctctcgattatggacgaacatggcagccctatcagtattatgccacagactgcttagatgcttttcacatggatcctaaatccgtgaaggatttatcacagcatacggtcttagaaatcatttgcacagaagagtactcaacagggtatacaacaaatagcaaaataatccactttgaaatcaaagacaggttcgcgttttttgctggacctcgcctacgcaatatggcttccctctacggacagctggatacaaccaagaaactcagagatttctttacagtcacagacctgaggataaggctgttaagaccagccgttggggaaatatttgtagatgagctacacttggcacgctacttttacgcgatctcagacataaaggtgcgaggaaggtgcaagtgtaatctccatgccactgtatgtgtgtatgacaacagcaaattgacatgcgaatgtgagcacaacactacaggtccagactgtgggaaatgcaagaagaattatcagggccgaccttggagtccaggctcctatctccccatccccaaaggcactgcaaatacctgtatccccagtatttccagtattggtaatcctccaaagtttaataggatatggccgaatatttcttcccttgaggtttctaacccaaaacaagttgctcccaaattagctttgtcaacagtttcttctgttcaagttgcaaaccacaagagagcgaatgtctgcgacaacgagctcctgcactgccagaacggagggacgtgccacaacaacgtgcgctgcctgtgcccggccgcatacacgggcatcctctgcgagaagctgcggtgcgaggaggctggcagctgcggctccgactctggccagggcgcgcccccgcacggctccccagcgctgctgctgctgaccacgctgctgggaaccgccagccccctggtgttctaggtgtcacctccagccacaccggacgggcctgtgccgtggggaagcagacacaacccaaacatttgctactaacataggaaacacacacatacagacacccccactcagacagtgtacaaactaagaaggcctaactgaactaagccatatttatcacccgtggacagcacatccgagtcaagactgttaatttctgactccagaggagttggcagctgttgatattatcactgcaaatcacattgccagctgcagagcatattgtggattggaaaggctgcgacagccccccaaacaggaaagacaaaaaacaaacaaatcaaccgacctaaaaacattggctactctagcgtggtgcgccctagtacgactccgcccagtgtgtggaccaaccaaatagcattctttgctgtcaggtgcattgtgggcataaggaaatctgttacaagctgccatattggcctgcttccgtccctgaatcccttccaacctgtgctttagtgaacgttgctctgtaacccttgttggttgaaagatttctttgtctgatgttagtgatgcacatgtgtaacagccccctctaaaagcgcaagccagtcatacccctgtatatcttagcagcactgagtccagtgcgagcacacacccactatacaagagtggctataggaaaaaagaaagtgtatctatccttttgtattcaaatgaagttatttttcttgaactactgtaatatgtagattttttgtattattgccaatttgtgttaccagacaatctgttaatgtatctaattcgaatcagcaaagactgacattttattttgtcctctttcgttctgttttgtttcactgtgcagagatttctctgtaagggcaacgaacgtgctggcatcaaagaatatcagtttacatatataacaagtgtaataagattccaccaaaggacattctaaatgttttcttgttgctttaacactggaagattt

SEQ ID NO: 19779 - DNA, 2823 bp, Homo sapiens
  source 1..2823: mol_type = unassigned DNA
aggagttactggaaacggcgcttctgtggaggagccgggggggatggggagtagagggagggggccctgttgcctcagcgccccgaggtcgtggagcggcagcagctgcagccggagcagcaccagcaacagcaacagcgagcgggacggagttaggaccgctcggagcgcacaggtctcgagggtgttggtgccagaagaaaagaatgattgatgggaaacagacaccgggctatagacactcatccttttgcttcagatactgatatctcagcctgcttgagcatcccttgtgagctgtgaacattgaggatcactcagggttatcggatgtacaacgggagagccatcgctttgctaaattattatctgcaattggacatcttttacaaaaaccaaactagacctgagtctaatagatatgttctaagacaaagaaaaagctgcaagttgttaacgcctaacacacaagtatgttaggcttccaccaaagtcctcaatatacctgaatacgcacaatatcttaactcttcatatttggttttgggatctgctttgaggtcccatcttcatttaaaaaaaaatacagagacctacctacccgtacgcatacatacatatgtgtatatatatgtaaactagacaaagatcgcagatcataaagcaagctctgctttagtttccaagaagattacaaagaatttagagatgtatttgtcaagattcctgtcgattcatgccctttgggttacggtgtcctcagtgatgcagccctaccctttggtttggggacattatgatttgtgtaagactcagatttacacggaagaagggaaagtttgggattacatggcctgccagccggaatccacggacatgacaaaatatctgaaagtgaaactcgatcctccggatattacctgtggagaccctcctgagacgttctgtgcaatgggcaatccctacatgtgcaataatgagtgtgatgcgagtacccctgagctggcacacccccctgagctgatgtttgattttgaaggaagacatccctccacattttggcagtctgccacttggaaggagtatcccaagcctctccaggttaacatcactctgtcttggagcaaaaccattgagctaacagacaacatagttattacctttgaatctgggcgtccagaccaaatgatcctggagaagtctctcgattatggacgaacatggcagccctatcagtattatgccacagactgcttagatgcttttcacatggatcctaaatccgtgaaggatttatcacagcatacggtcttagaaatcatttgcacagaagagtactcaacagggtatacaacaaatagcaaaataatccactttgaaatcaaagacaggttcgcgttttttgctggacctcgcctacgcaatatggcttccctctacggacagctggatacaaccaagaaactcagagatttctttacagtcacagacctgaggataaggctgttaagaccagccgttggggaaatatttgtagatgagctacacttggcacgctacttttacgcgatctcagacataaaggtgcgaggaaggtgcaagtgtaatctccatgccactgtatgtgtgtatgacaacagcaaattgacatgcgaatgtgagcacaacactacaggtccagactgtgggaaatgcaagaagaattatcagggccgaccttggagtccaggctcctatctccccatccccaaaggcactgcaaatacctgtgatccctatcttacctcatgtggagattgtgaatgcttcggccactccaatcgatgcagttatatcgatctgctaaatacagtcatttgcgtgagctgtaaacacaacactagagggcagcactgtgagttatgcaggctgggctacttcagaaatgcttctgcacaactggacgatgagaatgtgtgcatagcgaatgtctgcgacaacgagctcctgcactgccagaacggagggacgtgccacaacaacgtgcgctgcctgtgcccggccgcatacacgggcatcctctgcgagaagctgcggtgcgaggaggctggcagctgcggctccgactctggccagggcgcgcccccgcacggctccccagcgctgctgctgctgaccacgctgctgggaaccgccagccccctggtgttctaggtgtcacctccagccacaccggacgggcctgtgccgtggggaagcagacacaacccaaacatttgctactaacataggaaacacacacatacagacacccccactcagacagtgtacaaactaagaaggcctaactgaactaagccatatttatcacccgtggacagcacatccgagtcaagactgttaatttctgactccagaggagttggcagctgttgatattatcactgcaaatcacattgccagctgcagagcatattgtggattggaaaggctgcgacagccccccaaacaggaaagacaaaaaacaaacaaatcaaccgacctaaaaacattggctactctagcgtggtgcgccctagtacgactccgcccagtgtgtggaccaaccaaatagcattctttgctgtcaggtgcattgtgggcataaggaaatctgttacaagctgccatattggcctgcttccgtccctgaatcccttccaacctgtgctttagtgaacgttgctctgtaacccttgttggttgaaagatttctttgtctgatgttagtgatgcacatgtgtaacagccccctctaaaagcgcaagccagtcatacccctgtatatcttagcagcactgagtc

SEQ ID NO: 19780 - DNA, 3326 bp, Homo sapiens
  source 1..3326: mol_type = unassigned DNA
gaggtacacgaggagttactggaaacggcgcttctgtggaggagccgggggggatggggagtagagggagggggccctgttgcctcagcgccccgaggtcgtggagcggcagcagctgcagccggagcagcaccagcaacagcaacagcgagcgggacggagttaggaccgctcggagcgcacaggtctcgagggtgttggtgccagaagaaaagaatgattgatgggaaacagacaccgggctatagacactcatccttttgcttcagatactgatatctcagcctgcttgagcatcccttgtgagctgtgaacattgaggatcactcagggttatcggatgtacaacgggagagccatcgctttgctaaattattatctgcaattggacatcttttacaaaaaccaaactagacctgagtctaatagatatgttctaagacaaagaaaaagctgcaagttgttaacgcctaacacacaagtatgttaggcttccaccaaagtcctcaatatacctgaatacgcacaatatcttaactcttcatatttggttttgggatctgctttgaggtcccatcttcatttaaaaaaaaatacagagacctacctacccgtacgcatacatacatatgtgtatatatatgtaaactagacaaagatcgcagatcataaagcaagctctgctttagtttccaagaagattacaaagaatttagagatgtatttgtcaagattcctgtcgattcatgccctttgggttacggtgtcctcagtgatgcagccctaccctttggtttggggacattatgatttgtgtaagactcagatttacacggaagaagggaaagtttgggattacatggcctgccagccggaatccacggacatgacaaaatatctgaaagtgaaactcgatcctccggatattacctgtggagaccctcctgagacgttctgtgcaatgggcaatccctacatgtgcaataatgagtgtgatgcgagtacccctgagctggcacacccccctgagctgatgtttgattttgaaggaagacatccctccacattttggcagtctgccacttggaaggagtatcccaagcctctccaggttaacatcactctgtcttggagcaaaaccattgagctaacagacaacatagttattacctttgaatctgggcgtccagaccaaatgatcctggagaagtctctcgattatggacgaacatggcagccctatcagtattatgccacagactgcttagatgcttttcacatggatcctaaatccgtgaaggatttatcacagcatacggtcttagaaatcatttgcacagaagagtactcaacagggtatacaacaaatagcaaaataatccactttgaaatcaaagacaggttcgcgttttttgctggacctcgcctacgcaatatggcttccctctacggacagctggatacaaccaagaaactcagagatttctttacagtcacagacctgaggataaggctgttaagaccagccgttggggaaatatttgtagatgagctacacttggcacgctacttttacgcgatctcagacataaaggtgcgaggaaggtgcaagtgtaatctccatgccactgtatgtgtgtatgacaacagcaaattgacatgcgaatgtgagcacaacactacaggtccagactgtgggaaatgcaagaagaattatcagggccgaccttggagtccaggctcctatctccccatccccaaaggcactgcaaatacctgtatccccagtatttccagtattggtaattgtgaatgcttcggccactccaatcgatgcagttatatcgatctgctaaatacagtcatttgcgtgagctgtaaacacaacactagagggcagcactgtgagttatgcaggctgggctacttcagaaatgcttctgcacaactggacgatgagaatgtgtgcatagagtgttattgtaaccctttgggctcaatccatgatcgttgtaatggctcaggattttgtgagtgtaagactggaacaacagggcctaagtgtgatgagtgtctgccgggaaattcctggcactacggctgtcaaccgaatgtctgcgacaacgagctcctgcactgccagaacggagggacgtgccacaacaacgtgcgctgcctgtgcccggccgcatacacgggcatcctctgcgagaagctgcggtgcgaggaggctggcagctgcggctccgactctggccagggcgcgcccccgcacggctccccagcgctgctgctgctgaccacgctgctgggaaccgccagccccctggtgttctaggtgtcacctccagccacaccggacgggcctgtgccgtggggaagcagacacaacccaaacatttgctactaacataggaaacacacacatacagacacccccactcagacagtgtacaaactaagaaggcctaactgaactaagccatatttatcacccgtggacagcacatccgagtcaagactgttaatttctgactccagaggagttggcagctgttgatattatcactgcaaatcacattgccagctgcagagcatattgtggattggaaaggctgcgacagccccccaaacaggaaagacaaaaaacaaacaaatcaaccgacctaaaaacattggctactctagcgtggtgcgccctagtacgactccgcccagtgtgtggaccaaccaaatagcattctttgctgtcaggtgcattgtgggcataaggaaatctgttacaagctgccatattggcctgcttccgtccctgaatcccttccaacctgtgctttagtgaacgttgctctgtaacccttgttggttgaaagatttctttgtctgatgttagtgatgcacatgtgtaacagccccctctaaaagcgcaagccagtcatacccctgtatatcttagcagcactgagtccagtgcgagcacacacccactatacaagagtggctataggaaaaaagaaagtgtatctatccttttgtattcaaatgaagttatttttcttgaactactgtaatatgtagattttttgtattattgccaatttgtgttaccagacaatctgttaatgtatctaattcgaatcagcaaagactgacattttattttgtcctctttcgttctgttttgtttcactgtgcagagatttctctgtaagggcaacgaacgtgctggcatcaaagaatatcagtttacatatataacaagtgtaataagattccaccaaaggacattctaaatgttttcttgttgctttaacactggaagattt

SEQ ID NO: 19781 - DNA, 2932 bp, Homo sapiens
  source 1..2932: mol_type = unassigned DNA
tgcagccggagcagcaccagcaacagcaacagcgagcgggacggagttaggaccgctcggagcgcacaggtctcgagggtgttggtgccagaagaaaagaatgattgatgggaaacagacaccgggctatagacactcatccttttgcttcagatactgatatctcagcctgcttgagcatcccttgtgagctgtgaacattgaggatcactcagggttatcggatgtacaacgggagagccatcgctttgctaaattattatctgcaattggacatcttttacaaaaaccaaactagacctgagtctaatagatatgttctaagacaaagaaaaagctgcaagttgttaacgcctaacacacaagtatgttaggcttccaccaaagtcctcaatatacctgaatacgcacaatatcttaactcttcatatttggttttgggatctgctttgaggtcccatcttcatttaaaaaaaaatacagagacctacctacccgtacgcatacatacatatgtgtatatatatgtaaactagacaaagatcgcagatcataaagcaagctctgctttagtttccaagaagattacaaagaatttagagatgtatttgtcaagattcctgtcgattcatgccctttgggttacggtgtcctcagtgatgcagccctaccctttggtttggggacattatgatttgtgtaagactcagatttacacggaagaagggaaagtttgggattacatggcctgccagccggaatccacggacatgacaaaatatctgaaagtgaaactcgatcctccggatattacctgtggagaccctcctgagacgttctgtgcaatgggcaatccctacatgtgcaataatgagtgtgatgcgagtacccctgagctggcacacccccctgagctgatgtttgattttgaaggaagacatccctccacattttggcagtctgccacttggaaggagtatcccaagcctctccaggttaacatcactctgtcttggagcaaaaccattgagctaacagacaacatagttattacctttgaatctgggcgtccagaccaaatgatcctggagaagtctctcgattatggacgaacatggcagccctatcagtattatgccacagactgcttagatgcttttcacatggatcctaaatccgtgaaggatttatcacagcatacggtcttagaaatcatttgcacagaagagtactcaacagggtatacaacaaatagcaaaataatccactttgaaatcaaagacaggttcgcgttttttgctggacctcgcctacgcaatatggcttccctctacggacagctggatacaaccaagaaactcagagatttctttacagtcacagacctgaggataaggctgttaagaccagccgttggggaaatatttgtagatgagctacacttggcacgctacttttacgcgatctcagacataaaggtgcgaggaaggtgcaagtgtaatctccatgccactgtatgtgtgtatgacaacagcaaattgacatgcgaatgtgagcacaacactacaggtccagactgtgggaaatgcaagaagaattatcagggccgaccttggagtccaggctcctatctccccatccccaaaggcactgcaaatacctgtatccccagtatttccagtattggtacgaatgtctgcgacaacgagctcctgcactgccagaacggagggacgtgccacaacaacgtgcgctgcctgtgcccggccgcatacacgggcatcctctgcgagaagctgcggtgcgaggaggctggcagctgcggctccgactctggccagggcgcgcccccgcacggctccccagcgctgctgctgctgaccacgctgctgggaaccgccagccccctggtgttctaggtgtcacctccagccacaccggacgggcctgtgccgtggggaagcagacacaacccaaacatttgctactaacataggaaacacacacatacagacacccccactcagacagtgtacaaactaagaaggcctaactgaactaagccatatttatcacccgtggacagcacatccgagtcaagactgttaatttctgactccagaggagttggcagctgttgatattatcactgcaaatcacattgccagctgcagagcatattgtggattggaaaggctgcgacagccccccaaacaggaaagacaaaaaacaaacaaatcaaccgacctaaaaacattggctactctagcgtggtgcgccctagtacgactccgcccagtgtgtggaccaaccaaatagcattctttgctgtcaggtgcattgtgggcataaggaaatctgttacaagctgccatattggcctgcttccgtccctgaatcccttccaacctgtgctttagtgaacgttgctctgtaacccttgttggttgaaagatttctttgtctgatgttagtgatgcacatgtgtaacagccccctctaaaagcgcaagccagtcatacccctgtatatcttagcagcactgagtccagtgcgagcacacacccactatacaagagtggctataggaaaaaagaaagtgtatctatccttttgtattcaaatgaagttatttttcttgaactactgtaatatgtagattttttgtattattgccaatttgtgttaccagacaatctgttaatgtatctaattcgaatcagcaaagactgacattttattttgtcctctttcgttctgttttgtttcactgtgcagagatttctctgtaagggcaacgaacgtgctggcatcaaagaatatcagtttacatatataacaagtgtaataagattccaccaaaggacattctaaatgttttcttgttgctttaacactggaagatttaaagaataaaaactcctgcataaac

SEQ ID NO: 19782 - DNA, 1829 bp, Homo sapiens
  source 1..1829: mol_type = unassigned DNA
gaggtacacgaggagttactggaaacggcgcttctgtggaggagccgggggggatggggagtagagggagggggccctgttgcctcagcgccccgaggtcgtggagcggcagcagctgcagccggagcagcaccagcaacagcaacagcgagcgggacggagttaggaccgctcggagcgcacaggtctcgagggtgttggtgccagaagaaaagaatgattgatgggaaacagacaccgggctatagacactcatccttttgcttcagatactgatatctcagcctgcttgagcatcccttgtgagctgtgaacattgaggatcactcagggttatcggatgtacaacgggagagccatcgctttgctaaattattatctgcaattggacatcttttacaaaaaccaaactagacctgagtctaatagatatgttctaagacaaagaaaaagctgcaagttgttaacgcctaacacacaagtatgttaggcttccaccaaagtcctcaatatacctgaatacgcacaatatcttaactcttcatatttggttttgggatctgctttgaggtcccatcttcatttaaaaaaaaatacagagacctacctacccgtacgcatacatacatatgtgtatatatatgtaaactagacaaagatcgcagatcataaagcaagctctgctttagtttccaagaagattacaaagaatttagagatgtatttgtcaagattcctgtcgattcatgccctttgggttacggtgtcctcagtgatgcagccctaccctttggtttggggacattatgatttgtgtaagactcagatttacacggaagaagggaaagtttgggattacatggcctgccagccggaatccacggacatgacaaaatatctgaaagtgaaactcgatcctccggatattacctgtggagaccctcctgagacgttctgtgcaatgggcaatccctacatgtgcaataatgagtgtgatgcgagtacccctgagctggcacacccccctgagctgatgtttgattttgaaggaagacatccctccacattttggcagtctgccacttggaaggagtatcccaagcctctccaggttaacatcactctgtcttggagcaaaaccattgagctaacagacaacatagttattacctttgaatctgggcgtccagaccaaatgatcctggagaagtctctcgattatggacgaacatggcagccctatcagtattatgccacagactgcttagatgcttttcacatggatcctaaatccgtgaaggatttatcacagcatacggtcttagaaatcatttgcacagaagagtactcaacagggtatacaacaaatagcaaaataatccactttgaaatcaaagacaggttcgcgttttttgctggacctcgcctacgcaatatggcttccctctacggacagctggatacaaccaagaaactcagagatttctttacagtcacagacctgaggataaggctgttaagaccagccgttggggaaatatttgtagatgagctacacttggcacgctacttttacgcgatctcagacataaaggtgcgaggaaggtgcaagtgtaatctccatgccactgtatgtgtgtatgacaacagcaaattgacatgcgaatgtgagcacaacactacaggtccagactgtgggaaatgcaagaagaattatcagggccgaccttggagtccaggctcctatctccccatccccaaaggcactgcaaatacctgtatccccagtatttccagtattggtagtaagtaaaaacaaaaacaaaaaa

SEQ ID NO: 19783 - DNA, 2655 bp, Homo sapiens
  source 1..2655: mol_type = unassigned DNA
aggagttactggaaacggcgcttctgtggaggagccgggggggatggggagtagagggagggggccctgttgcctcagcgccccgaggtcgtggagcggcagcagctgcagccggagcagcaccagcaacagcaacagcgagcgggacggagttaggaccgctcggagcgcacaggtctcgagggtgttggtgccagaagaaaagaatgattgatgggaaacagacaccgggctatagacactcatccttttgcttcagatactgatatctcagcctgcttgagcatcccttgtgagctgtgaacattgaggatcactcagggttatcggatgtacaacgggagagccatcgctttgctaaattattatctgcaattggacatcttttacaaaaaccaaactagacctgagtctaatagatatgttctaagacaaagaaaaagctgcaagttgttaacgcctaacacacaagtatgttaggcttccaccaaagtcctcaatatacctgaatacgcacaatatcttaactcttcatatttggttttgggatctgctttgaggtcccatcttcatttaaaaaaaaatacagagacctacctacccgtacgcatacatacatatgtgtatatatatgtaaactagacaaagatcgcagatcataaagcaagctctgctttagtttccaagaagattacaaagaatttagagatgtatttgtcaagattcctgtcgattcatgccctttgggttacggtgtcctcagtgatgcagccctaccctttggtttggggacattatgatttgtgtaagactcagatttacacggaagaagggaaagtttgggattacatggcctgccagccggaatccacggacatgacaaaatatctgaaagtgaaactcgatcctccggatattacctgtggagaccctcctgagacgttctgtgcaatgggcaatccctacatgtgcaataatgagtgtgatgcgagtacccctgagctggcacacccccctgagctgatgtttgattttgaaggaagacatccctccacattttggcagtctgccacttggaaggagtatcccaagcctctccaggttaacatcactctgtcttggagcaaaaccattgagctaacagacaacatagttattacctttgaatctgggcgtccagaccaaatgatcctggagaagtctctcgattatggacgaacatggcagccctatcagtattatgccacagactgcttagatgcttttcacatggatcctaaatccgtgaaggatttatcacagcatacggtcttagaaatcatttgcacagaagagtactcaacagggtatacaacaaatagcaaaataatccactttgaaatcaaagacaggttcgcgttttttgctggacctcgcctacgcaatatggcttccctctacggacagctggatacaaccaagaaactcagagatttctttacagtcacagacctgaggataaggctgttaagaccagccgttggggaaatatttgtagatgagctacacttggcacgctacttttacgcgatctcagacataaaggtgcgaggaaggtgcaagtgtaatctccatgccactgtatgtgtgtatgacaacagcaaattgacatgcgaatgtgagcacaacactacaggtccagactgtgggaaatgcaagaagaattatcagggccgaccttggagtccaggctcctatctccccatccccaaaggcactgcaaatacctatctgccaagcatgtactctgtggcagcgaatgtctgcgacaacgagctcctgcactgccagaacggagggacgtgccacaacaacgtgcgctgcctgtgcccggccgcatacacgggcatcctctgcgagaagctgcggtgcgaggaggctggcagctgcggctccgactctggccagggcgcgcccccgcacggctccccagcgctgctgctgctgaccacgctgctgggaaccgccagccccctggtgttctaggtgtcacctccagccacaccggacgggcctgtgccgtggggaagcagacacaacccaaacatttgctactaacataggaaacacacacatacagacacccccactcagacagtgtacaaactaagaaggcctaactgaactaagccatatttatcacccgtggacagcacatccgagtcaagactgttaatttctgactccagaggagttggcagctgttgatattatcactgcaaatcacattgccagctgcagagcatattgtggattggaaaggctgcgacagccccccaaacaggaaagacaaaaaacaaacaaatcaaccgacctaaaaacattggctactctagcgtggtgcgccctagtacgactccgcccagtgtgtggaccaaccaaatagcattctttgctgtcaggtgcattgtgggcataaggaaatctgttacaagctgccatattggcctgcttccgtccctgaatcccttccaacctgtgctttagtgaacgttgctctgtaacccttgttggttgaaagatttctttgtctgatgttagtgatgcacatgtgtaacagccccctctaaaagcgcaagccagtcatacccctgtatatcttagcagcactgagtc

SEQ ID NO: 19784 - DNA, 2958 bp, Homo sapiens
  source 1..2958: mol_type = unassigned DNA
aggagttactggaaacggcgcttctgtggaggagccgggggggatggggagtagagggagggggccctgttgcctcagcgccccgaggtcgtggagcggcagcagctgcagccggagcagcaccagcaacagcaacagcgagcgggacggagttaggaccgctcggagcgcacaggtctcgagggtgttggtgccagaagaaaagaatgattgatgggaaacagacaccgggctatagacactcatccttttgcttcagatactgatatctcagcctgcttgagcatcccttgtgagctgtgaacattgaggatcactcagggttatcggatgtacaacgggagagccatcgctttgctaaattattatctgcaattggacatcttttacaaaaaccaaactagacctgagtctaatagatatgttctaagacaaagaaaaagctgcaagttgttaacgcctaacacacaagtatgttaggcttccaccaaagtcctcaatatacctgaatacgcacaatatcttaactcttcatatttggttttgggatctgctttgaggtcccatcttcatttaaaaaaaaatacagagacctacctacccgtacgcatacatacatatgtgtatatatatgtaaactagacaaagatcgcagatcataaagcaagctctgctttagtttccaagaagattacaaagaatttagagatgtatttgtcaagattcctgtcgattcatgccctttgggttacggtgtcctcagtgatgcagccctaccctttggtttggggacattatgatttgtgtaagactcagatttacacggaagaagggaaagtttgggattacatggcctgccagccggaatccacggacatgacaaaatatctgaaagtgaaactcgatcctccggatattacctgtggagaccctcctgagacgttctgtgcaatgggcaatccctacatgtgcaataatgagtgtgatgcgagtacccctgagctggcacacccccctgagctgatgtttgattttgaaggaagacatccctccacattttggcagtctgccacttggaaggagtatcccaagcctctccaggttaacatcactctgtcttggagcaaaaccattgagctaacagacaacatagttattacctttgaatctgggcgtccagaccaaatgatcctggagaagtctctcgattatggacgaacatggcagccctatcagtattatgccacagactgcttagatgcttttcacatggatcctaaatccgtgaaggatttatcacagcatacggtcttagaaatcatttgcacagaagagtactcaacagggtatacaacaaatagcaaaataatccactttgaaatcaaagacaggttcgcgttttttgctggacctcgcctacgcaatatggcttccctctacggacagctggatacaaccaagaaactcagagatttctttacagtcacagacctgaggataaggctgttaagaccagccgttggggaaatatttgtagatgagctacacttggcacgctacttttacgcgatctcagacataaaggtgcgaggaaggtgcaagtgtaatctccatgccactgtatgtgtgtatgacaacagcaaattgacatgcgaatgtgagcacaacactacaggtccagactgtgggaaatgcaagaagaattatcagggccgaccttggagtccaggctcctatctccccatccccaaaggcactgcaaatacctgtgatccctatcttacctcatgtggagattgtgaatgcttcggccactccaatcgatgcagttatatcgatctgctaaatacagtcatttgcgtgagctgtaaacacaacactagagggcagcactgtgagttatgcaggctgggctacttcagaaatgcttctgcacaactggacgatgagaatgtgtgcatagagtgttattgtaaccctttgggctcaatccatgatcgttgtaatggctcaggattttgtgagtgtaagactggaacaacagggcctaagtgtgatgagtgtctgccgggaaattcctggcactacggctgtcaaccgaatgtctgcgacaacgagctcctgcactgccagaacggagggacgtgccacaacaacgtgcgctgcctgtgcccggccgcatacacgggcatcctctgcgagaagctgcggtgcgaggaggctggcagctgcggctccgactctggccagggcgcgcccccgcacggctccccagcgctgctgctgctgaccacgctgctgggaaccgccagccccctggtgttctaggtgtcacctccagccacaccggacgggcctgtgccgtggggaagcagacacaacccaaacatttgctactaacataggaaacacacacatacagacacccccactcagacagtgtacaaactaagaaggcctaactgaactaagccatatttatcacccgtggacagcacatccgagtcaagactgttaatttctgactccagaggagttggcagctgttgatattatcactgcaaatcacattgccagctgcagagcatattgtggattggaaaggctgcgacagccccccaaacaggaaagacaaaaaacaaacaaatcaaccgacctaaaaacattggctactctagcgtggtgcgccctagtacgactccgcccagtgtgtggaccaaccaaatagcattctttgctgtcaggtgcattgtgggcataaggaaatctgttacaagctgccatattggcctgcttccgtccctgaatcccttccaacctgtgctttagtgaacgttgctctgtaacccttgttggttgaaagatttctttgtctgatgttagtgatgcacatgtgtaacagccccctctaaaagcgcaagccagtcatacccctgtatatcttagcagcactgagtc

SEQ ID NO: 19785 - DNA, 942 bp, Homo sapiens
  source 1..942: mol_type = unassigned DNA
gggcgtgctagggccccgccgccctggcccggccttgccttgcgctgcgcgctcaccatggtgggccccgcgccgcggcggcggctgcggccgctggcagcgctggccctggtcctggcgctggccccggggctgcccacagcccgggccgggcagacaccgcgccctgccgagcgggggcccccagtgcggcttttcaccgaggaggagctggcccgctatggcggggaggaggaagatcagcccatctacttggcagtgaagggagtggtgtttgatgtcacctccggaaaggagttttatggacgaggagccccctacaatgccttgacggggaaggactccactagaggggtagccaagatgtccttggatcctgcagacctcacccatgacactacgggtctcacggccaaggaactggaggccctggatgaggtcttcaccaaagtgtacaaagccaaataccccatcgtcggctacactgcccggagaattctcaatgaggatggcagccctaacctggacttcaagcctgaagaccagccccattttgacatcaaggatgagttctgatgttccccctgcaggagcaggttcttgggagcgtgaggcaggaagacactaggtgctgaatctcctgcaaaactggctgcctggaggccctgagccacccagatctgaataaaacagatgcttaccctggaagagcaaatgcctcctgttgtccttggtcaggggttctgtctacctggggacccctgtctgcacaccagggatcaataagagccaaagtgggacacctcctagatgtcagtatcagctggctgggcagtggaattttgagcgacctttactttatacttttctgtgcttgacagattttcagccatgaccatgttcactttataatcaaaacaaaaataaaggtcccatttttac

SEQ ID NO: 19786 - DNA, 2088 bp, Homo sapiens
  source 1..2088: mol_type = unassigned DNA
atgagcctcctcctctccttctacctgctggggttgcttgtcagtagcgggcaagatcggttcgctatgttagcaaacaataacctgcagattctcaacatcaataaaagtgatgaaggtatatacagatgtgaaggaagagtggaggccaggggagaaattgacttccgtgatatcattgttattgttaatgtgccgccagcaatctcaatgcctcagaaatcttttaatgccacagcagagagaggagaagaaatgacattttcctgcagggcctcaggctctccagaacccgccatctcctggttcaggaatggcaagctcattgaagaaaatgagaagtacatattgaaagggagcaatacagaactcactgtcaggaacataatcaatagtgatggtggtccttatgtctgcagggccacaaataaggcaggagaagatgaaaagcaagctttcctccaagtctttgtacagcctcacataatacagcttaaaaatgaaactacatatgagaatggtcaagtcacactcgtatgtgatgcggaaggggagcctattccagaaatcacttggaaaagagctgtggatggcttcacgttcactgaaggcgataagagcctggacggccgtatcgaagtcaaagggcagcatggaagctcatcactgcatattaaagatgtgaagttgtcagattcagggagatatgactgtgaagctgcaagcagaattggagggcatcaaaagagcatgtaccttgatattgaatatgcccccaagtttatatcaaaccaaacaatttattactcttgggaaggaaatcctatcaatataagttgtgatgtgaaatcgaatccaccagcatcaattcactggagaagagataaattagtcttacctgctaaaaacacgaccaatttaaagacttatagtacaggaagaaagatgatattagagattgcacctacatctgacaatgactttggacgctataattgcacagccactaatcatataggaacaagatttcaagaatatattcttgctttggctgacgtgccatccagtccctatggagtgaagatcatagagctgtcgcagaccacggccaaggtttccttcaacaaaccggactcccatggaggtgtacctattcatcactatcaggtggatgtcaaagaagtagcgtcagaaatctggaaaattgtacgctcccatggagttcaaacaatggttgttttgaacaacctggaaccaaatacaacttatgaaatcagggttgcagctgtaaatggaaagggacaaggagactacagtaaaatagaaatcttccaaacattaccagttcgtgaaccaagtcctccatccatacatggacagccaagcagtggaaagagctttaaactcagcatcaccaaacaggacgatggaggggcccctattttggaatacattgtgaaatatagaagtaaagataaggaagaccaatggctagagaaaaaagtgcaaggaaataaagaccacatcattttggagcatctccagtggaccatggggtatgaagttcagattacagctgccaatagattgggatattctgaaccgacagtttatgaattcagcatgccaccaaagcccaacattattaaagacacgctgtttaatggtcttgggcttggagcagtaattggcctgggagttgctgcactgctgctaattcttgtggtaacagacgtcagctgcttctttattcggcaatgtgggttgctgatgtgcatcactaggagaatgtgtggaaagaaaagtggctccagtggcaaaagtaaagaactcgaagaaggaaaagctgcatacctgaaagatggatcaaaagaaccaatagtggagatgagaacagaggatgaaagagttactaatcacgaagatgggagcccagtaaatgagccaaatgaaaccacaccactgacagaacctgaaaaattgcctttaaaggaagaagatgggaaagaagctctaaatccagaaactatagaaattaaagtttctaacgacatcattcaatcaaaagaagacgacagcaaagcataa

SEQ ID NO: 19787 - DNA, 8135 bp, Homo sapiens
  source 1..8135: mol_type = unassigned DNA
gctgccgccgcggcggccgctgctgctgctgcttctgccgccgctgccgccgccgctgcctggatatagtgcggcaagagcggagcttgcagtcactttgcgaggaggagcgcgcgggctgcgggcggctggggcaccgcgggagcggcggcggcggctctagcagaggcggccggggcagcgaaaggttctctctccagggctggacttaataactttgaaactgtccaccggtgtcacgtcctgaacatgagcctcctcctctccttctacctgctggggttgcttgtcagtagcgggcaagctcttcttcaagtgacaatttcacttagcaaagtagagcttagtgttggagaatctaaattcttcacatgtacagcgattggtgaacctgaaagtatagattggtataatcctcaaggagagaagataatttcaacacagagggtagtagtgcaaaaggaaggtgttaggtcacggttaaccatctacaatgcaaatatagaagatgcagggatatatcgttgtcaagcaacagatgccaaaggacaaacacaagaagctacagtagttttggaaatttaccaaaaactcactttcagagaagtggtatctccacaagaattcaaacaaggagaagatgcagaagtggtttgccgagttagcagttcacctgcacctgctgtcagctggttgtatcataatgaggaagtcaccactatttccgacaatcggttcgctatgttagcaaacaataacctgcagattctcaacatcaataaaagtgatgaaggtatatacagatgtgaaggaagagtggaggccaggggagaaattgacttccgtgatatcattgttattgttaatgtgccgccagcaatctcaatgcctcagaaatcttttaatgccacagcagagagaggagaagaaatgacattttcctgcagggcctcaggctctccagaacccgccatctcctggttcaggaatggcaagctcattgaagaaaatgagaagtacatattgaaagggagcaatacagaactcactgtcaggaacataatcaatagtgatggtggtccttatgtctgcagggccacaaataaggcaggagaagatgaaaagcaagctttcctccaagtctttgtacagcctcacataatacagcttaaaaatgaaactacatatgagaatggtcaagtcacactcgtatgtgatgcggaaggggagcctattccagaaatcacttggaaaagagctgtggatggcttcacgttcactgaaggcgataagagcctggacggccgtatcgaagtcaaagggcagcatggaagctcatcactgcatattaaagatgtgaagttgtcagattcagggagatatgactgtgaagctgcaagcagaattggagggcatcaaaagagcatgtaccttgatattgaatatgcccccaagtttatatcaaaccaaacaatttattactcttgggaaggaaatcctatcaatataagttgtgatgtgaaatcgaatccaccagcatcaattcactggagaagagataaattagtcttacctgctaaaaacacgaccaatttaaagacttatagtacaggaagaaagatgatattagagattgcacctacatctgacaatgactttggacgctataattgcacagccactaatcatataggaacaagatttcaagaatatattcttgctttggctgacgtgccatccagtccctatggagtgaagatcatagagctgtcgcagaccacggccaaggtttccttcaacaaaccggactcccatggaggtgtacctattcatcactatcaggtggatgtcaaagaagtagcgtcagaaatctggaaaattgtacgctcccatggagttcaaacaatggttgttttgaacaacctggaaccaaatacaacttatgaaatcagggttgcagctgtaaatggaaagggacaaggagactacagtaaaatagaaatcttccaaacattaccagttcgtgaaccaagtcctccatccatacatggacagccaagcagtggaaagagctttaaactcagcatcaccaaacaggacgatggaggggcccctattttggaatacattgtgaaatatagaagtaaagataaggaagaccaatggctagagaaaaaagtgcaaggaaataaagaccacatcattttggagcatctccagtggaccatggggtatgaagttcagattacagctgccaatagattgggatattctgaaccgacagtttatgaattcagcatgccaccaaagcccaacattattaaagacacgctgtttaatggtcttgggcttggagcagtaattggcctgggagttgctgcactgctgctaattcttgtggtaacagacgtcagctgcttctttattcggcaatgtgggttgctgatgtgcatcactaggagaatgtgtggaaagaaaagtggctccagtggcaaaagtaaagaactcgaagaaggaaaagctgcatacctgaaagatggatcaaaagaaccaatagtggagatgagaacagaggatgaaagagttactaatcacgaagatgggagcccagtaaatgagccaaatgaaaccacaccactgacagaacctgaaaaattgcctttaaaggaagaagatgggaaagaagctctaaatccagaaactatagaaattaaagtttctaacgacatcattcaatcaaaagaagacgacagcaaagcataacaacaatattacaggggcttgaacaacactacgaagagtatttggattgcgtgaccctatgaccaaaactattccattgaccttaatttcttgggaaacttctagcttggaatagcttgtacacatatacatatgatcaaatactcctgcccatgatccattcccttttgttattgttgttgttgttgctgttgttgttaattttgttaagaatttcaatatcaagactgactggcaccaacactttggtattcaatttgattctatgactgaagtactggaatttattatgtggctaaagtgctctatttattaagaactatatttaataccaccaacaaatataggggttaaggaaaaaaaacgtgagctacatgtgtaagaaggccctgcatgtgtatgagtcctattctgggcaaatagattcttaaagtggctttcaacttcaagatgaaggagcttaataatggttactcattttatcaggggaatttcagggaacgtaggcgtcaaagagccagttatctttagcagatattaaaaattgaaaactttggagaactcatttcaagttatgattcagtgcattttcaacattgatttttgatagactgaagtgccagatcaaaattgttacccatttgaaagaatattagttgtatataaaattagattagaaagactttctaaatctctatctctttatatatgtcctattcattcacaatggattatacaaaaaaaagtgtattgcaagtgaaataatattgatttctgccctcagcttcaaataaagtaaattgaaatgggaacaatatcaatatggtgtcttgatatatttataaatatgtgattatcatttatttttaaaataatttatcaaaaaacaagtctttagtgttcaaatacttcaaatcatatcctcagatatatttttagcccatggttttatataatctttaagaactaattttaccactgttataggttcaccattaaatataattggctaataaaaattttaaggttgactaaattaagaagaaattatttaacattttaatgtgccataaaagagtaaatgataaataattaaatgccactatgtgttctattccggatgttctagctagaagtcattttaagattttgataaacaactttggttgaagaaattccttaagtattcaacacaaactttctaatatcttttgttagggttataccagaataaaatgcttctttacttccaagctatgcaagctcccagaggtaatagagtgacacatgatttaacttatatgtaaggtttaaaaaagtatttatcattataaacatacataccatttgggagcaggtttattaaccttgagagccaaaggtttccttaggccctgtaacattcagaacctttggtgtttcaggtggtattatagctcaaatagtgacaggacagggaatgcgttccaaaggaatattggagcaattttaacattgcagaaacctgctctgggtgtgtctctctgtagagataacctgatgattattaaatgtaaaattaaggcaactcatgaatatttttatttacaaagtgcttgaaactcagccaaggagagaaaactaagtacttttatataattcatcacttttctggctacagcaggacagaatatgaccatcttcgtttgaaggcaccaaatcgtcgcagtgtctttgccataagttgcagggttaaatgcgggaatctctccttgcgttcctgtctggcgtattctgaagaaaagaacagaattcttgtgcctacctaagaatttgagtagtgtctaaacaaacaaagcagttaggtcattttaactgacttgattatccaactggtctttgacagatttgactgttcatatttagtttatgtttgtctgatcatccagtttgctttattttgctgtgttttattttgttgtttgttttgttttgtaccagtgtactaaaactagtcaaaatacttgaattagtttgtttgtgcaaagtgtacaagcttagtaaagtgtccatgaagcaatagccatgaatgctaattatttctaaatagggccacatggttttaaactaatgatggtgaaagaaatacgatgactgagaaagtcatttcgcatgtttactattgttatattcgtgctttacttcaagagtgcagaaatcataataaataacaaactatttttgtgttttctcaatgtgacatttctgtttctctcatttattcggattttccttgtaaagaaattgacatatatttcatatatatatacacatatatatatatacacatatatatacatatatatatatgatgttaaatttcctgccactcatgtggagtaatgatctgaaattaacagataatctgaagctaattatattcagactatttcaagtgcactgtttcagttgcccgggtggtccttacctcttgtccttgaaatccatgccatgctgaagcaaggcaatactgtgataaagtattttttttaatatttcaatggaatgctccaaatgatttataaaaatttcaaaataaaagatggcttgtagtaaattgtaaaatatgagtagaactgaaataacctgtttcattcttattctagattaaacaaacatatacatataaccatataaatgttatttttattgtctgagagtactcttaaatattagtataaagtgtcaaaagaattgactgaatataagtactgttaaaataatttgaaccctatgatattttaaaccaagaggcaaagatatcacctaaaacttggtatttcttgataggttaggtgcaattaggcagtgacaatctgtattcaacaacatataagaggaaagagtaatatcagaattttgacacaaattaatgtgtcaacatattttacaatgattgtcaaaggaatttaagaattgtatttttaaagatttatttattatttttgtgggctaagacattgccattctattgatactaatgtctaacattaatgtttcttgttttcttttatttttaatattaataactataaaagcatttttcaaaggctatttgatccagcacacttcatatggatcttagtctttgaattaaatatttatataaatagattttattaatcaaattatttatttgtgtgccaacaattaattgtaactttatgatcatatctttgtttatgcttcttattttaaataattaagatgtatctgtgccttttaattagcatgacagtctgctttattaaaagaaaaaaactacaattaacatcattactagtatattttgcttagatttgagatactcaaatgatgctgtcttatttacagtcagtaattaagttcaattcaaactattttaccttgaatataaaatctaaatataataaactatactgtataatttactttaattcatgtcaaaacaattctttttatacacacacatgaaatattcttaatctgttctgtattgtttttctaaacaataaatacattctagatattgttgaaattaaattttgccagttgtaagacaaagacaacagataacttttgaaaatcaagcaaattactatggtgtttcttgggtcttcattattccatttatatatattttttatttcgaataataaatcaacctttatttttggcaataagattatcactgacgaaaatatgtacagttcaagaagtagaaataatattttccattagttaatttaggaaatattggaatagcatattataattatttatgaggttcccaatgttgtttttcacagaaaataaggtaaacattcaacttaaatcccccatgaagttttttcatgctcatactcataatcattatcacataatgtgcttattcaacaaactttgtatctggatatatttttaacaataagtttgttagcattatttatttatctttagagagaaaatatttgcatctgtttatttaccctttgaagcattaatacttagtcactcacattgaaattgcatatggatgtatcaacataggctaaaattaaattatggatgtcgcagaaatgaaatacttcatcttagaaggtaaaattttcaagaaagtattttattcatggacttaataatgtcttaagatgaaacaattttatgtccaaatgagaaatttataaaaagacccacatatagtagttgctgaacaaacataattttcttccagctcccatccttcctttttgaaaaattgaatttacccatgtagatgcagctatttacaattatacaagaatgcgaatagattaattatatcttctcatataaaggcaaagaattttatattatatataatgctaaatatttatttgataacacaatattcttagaaaaatagtttattactttaggattttatctataacataaatatattatttgttattacctctttaaattttcattttatacaatttttgagattctggccacacaacattcagaattattgctcatgtaaatttaaatattgctacttattttttttcttttctgaaatgaaaacatgaatcttttggcatctgtttttagcctcccatggaagacagtaagcaaaaccatcactgttggagaatttcaaatcacaacccgacataggagagtagagaaacaaagaaatgagtggatctagaaaggcaaactgaattgctatatttggaatagctaagaaggacctgactttgagaagtgctagaccagggactaggaacgttgcttagataaaaattatggccgattacactgatgcgaaggagaaaacagtgtaacacagaggagaaagttaacagagatagaatctatgatttaattttgcaaatagtttttttagagaacaacatgcatactataaaagaaatgatactattaagaacaaacctacttgttccaactcttaaagaaatattcatggtttagcatttgcctctaaaccctgttagaaatatgtgaagttagaaataaaggtttttttaaaaaaaaagcttttttggtatgtgaactgtatgctgtgctcagtatgtactgaaacatactatcttttattttctttaatttatatattccattcaaattctatattcttaagttagctaccacaacgttttcttattgtttcaatatggtatgtcccaatgaaatgctgtatatatatgtctaaactgtaaaaattatactgcaaatgttgaagttttgtatttatgagagacattgaaagtatggcttacagtatatcaaacttgtcacacttcaccatttgtatattaatagtaaagatacttttactttaa

SEQ ID NO: 19788 - DNA, 1494 bp, Homo sapiens
  source 1..1494: mol_type = unassigned DNA
agccagcactagtggacttcctgaaatctcgcgccctgtcccacaccggagctggtaccgctgccttctacttcagcacatggaactctgcctccgcagttcttagtccgtacccggcatttcaacaaaaatagttatttgaagagtaccacgatggtgagatctgattcaggaggacaagtttaccttgattatcacaacaggcaaggtctctttgttgactggaaatacaacgaagcactttatcttgaagaagggcaaccagagacttattacaggacagctcttcttcaagtgacaatttcacttagcaaagtagagcttagtgttggagaatctaaattcttcacatgtacagcgattggtgaacctgaaagtatagattggtataatcctcaaggagagaagataatttcaacacagagggtagtagtgcaaaaggaaggtgttaggtcacggttaaccatctacaatgcaaatatagaagatgcagggatatatcgttgtcaagcaacagatgccaaaggacaaacacaagaagctacagtagttttggaaatttaccaaaaactcactttcagagaagtggtatctccacaagaattcaaacaaggagaagatgcagaagtggtttgccgagttagcagttcacctgcacctgctgtcagctggttgtatcataatgaggaagtcaccactatttccgacaatcggttcgctatgttagcaaacaataacctgcagattctcaacatcaataaaagtgatgaaggtatatacagatgtgaaggaagagtggaggccaggggagaaattgacttccgtgatatcattgttattgttaatgtgccgccagcaatctcaatgcctcagaaatcttttaatgccacagcagagagaggagaagaaatgacattttcctgcagggcctcaggctctccagaacccgccatctcctggttcaggaatggcaagctcattgaagaaaatgagaagtacatattgaaagggagcaatacagaactcactgtcaggaacataatcaatagtgatggtggtccttatgtctgcagggccacaaataaggcaggagaagatgaaaagcaagctttcctccaagtctttgtacagcctcacataatacagcttaaaaatgaaactacatatgagaatggtcaagtcacactcgtatgtgatgcggaaggggagcctattccagaaatcacttggaaaagagctgtggatggcttcacgttcactgaaggcgataagagcctggacggccgtatcgaagtcaaagggcagcatggaagctcatcactgcatattaaagatgtgaagttgtcagattcagggagatatgactgtgaagctgcaagcagaattggagggcatcaaaagagcatgtaccttgatattgaatcttaaacagatttcttggcattcttccagttcattttcaacatttccgaggcgttactttactaagaagca

SEQ ID NO: 19789 - DNA, 3620 bp, Homo sapiens
  source 1..3620: mol_type = unassigned DNA
gaagtttaacagtccaggcgggagccggaagcccagcgcggagccggccgcggccccctgttgtgttgctgcggagaggtacttggatgcattttacaggttagcctcacttgagctgttgtcctgcaagtaaagtgtatttttggtgattgaaagttggagaactttcatttcagctgagtggtgtagttgaattggttcctgtagccgctgtccctaaacccaggccgacgttaccgccttgtgtcctgactgctagctttcgacgggaccgtctttgagggactcatgtaaagtctctcccttaatgctcagttcttagaagaccgaggcgcagtcatgcaggaaaacctcagatttgcttcatcaggagatgatattaaaatatgggatgcttcatctatgacattggtggataaattcaacccacacacatcaccacatggaatcagctcaatatgttggagcagcaataataactttttagtaacagcatcttccagtggcgacaaaatagttgtctcaagttgcaaatgtaaacctgttccacttttagagcttgctgaagggcaaaagcagacatgtgtcaatttaaattctacatctatgtatttggtaagcggaggcctaaataacactgttaatatttgggatttaaaatcaaaaagagttcatcgatctcttaaggatcataaagatcaagtaacttgtgtaacatacaattggaatgattgctacattgcttctggatctcttagtggtgaaattattttacacagtgtaaccactaatttatctagtactccttttggccatggtagtaaccagtctgttcggcacttgaagtactccttgtttaagaaatcactactgggcagtgtttcggataatggaatagtaactctctgggatgtaaatagtcagagtccataccataactttgacagtgtacacaaagctccagcgtcaggcatctgtttttctcctgtcaatgaattgctctttgtaaccataggcttggataaaagaatcatcctctatgacacttcaagtaagaagctagtgaaaactttagtggctgacactcctctaactgcggtagatttcatgcctgatggagccactttggctattggatcttcccgggggaaaatatatcaatatgatttaagaatgttgaaatcaccagttaagaccatcagtgctcacaagacatctgtgcagtgtatagcatttcagtactccactgttcttactaagtcaagtttaaataaaggctgttcaaataagcccacaacagtgaacaaacgaagtgttaatgtgaatgctgctagtggaggagttcagaattccggaattgtcagagaagcacctgccacgtccattgccacagttctaccacaacctatgacatcagctatggggaaaggaacagttgctgttcaagaaaaagcaggtttgcctcgaagcataaacacagacactttatctaaggaaacagacagtggaaaaaatcaggatttctccagctttgatgatactgggaaaagtagtttaggtgacatgttctcacctatcagagatgatgctgtagttaacaagggaagtgatgagtccataggcaaaggagatggctttgactttctaccgcagttgaactcagtgtttcctccaagaaaaaatccagtaacttcaagtacttcagtattgcattctagtcctcttaatgtttttatgggatctccagggaaagaggaaaatgaaaaccgtgatctaacagctgagtctaagaaaatatatatgggaaaacaggaatctaaagactccttcaaacagttagcaaagttggtcacatctggtgctgaaagtggaaatctaaatacctctccatcatctaaccaaacaagaaattctgagaaatttgaaaagccagagaatgaaattgaagcccagttgatatgtgaacccccaatcaatggatcctcaactccaaatccaaagatagcatcttctgtcactgctggagttgccagttcactctcagaaaaaatagccgacagcattggaaataaccggcaaaatgcaccattgacttccattcaaattcgttttattcagaacatgatacaggaaacgttggatgactttagagaagcatgccatagggacattgtgaatttgcaagtggagatgattaaacagtttcatatgcaactgaatgaaatgcattctttgctggaaagatactcagtgaatgaaggtttagtggctgaaattgaaagactacgagaagaaaacaaaagattacgggcccacttttgaaatttcagtgaataccttaatgttctgtaatttgggaagtttctggcaacacagaactacatagaatcagtattgttttcatggcctccagggaaaaaatgtttttcaagtaagagtaaaaggatgatgggattttataccaacaactgtttcatcttaaaaatatgtatatttttatattaaaaattgtacagtatgtcatctacccaataggaaagtcaacaggatctttattttttgaaagctttagccatccactaagtgccctttttcataagagaagaaaattgtgcataaaaattggttatgtttgttttttagtcatcttttttaacatatatttttgattgacaaattgcctttcaaatttttggggctagttgagatttaaagagtttgatatgccttctatttttatggagaaagtaattttaaaatggcaattggtgtttctaagccattgactaataaaacatagggttggctagtaattattttgttaacttgatgaagtcaagtatgactattatttattgtacatttgataagacaatttttggaattttgaattgcacaaattacatgatatcttttgcatttatgttactatattgtacttctgacaaatctttattcctgggtggtatttttaagatatctttacctataaaaaatgtttaaggttcataggactcgacaagagctatctggtgattttctcattagtaacatgcaacgttgtactgcaaaatttcaatcaacatgacaacttataatgagtggagatttcatattaggtactaaatattatagtattatttctattttctttttccaaataagaagcttggattattttattttgtggtctttatcattaactttaattctttctgtactgtgtataatatttttatattattggccttaccataaaattatttagaaaggttgtcaaaataagttatacctctttggcaatagatagatgtatacatctacctactatgatctacaattttaggttaagtgaagcttgggggggctactgacttggttaccttcttgtctcttgtcccaaagatttaaactgtgtacctttgtatagctcttctgccccattttgacttctgagatgaaagtatttactaaaattaaaaaaaaaaaaacaaaaaacaaacctttagctcactaactttatgggtttctgaagtgatggaaatttttaaggatatatttaataagcataaacttactaataattacttccaaaaataaaaacaggaatattactttta

SEQ ID NO: 19790 - DNA, 2490 bp, Homo sapiens
  source 1..2490: mol_type = unassigned DNA
aggcgggagccggaagcccagcgcggagccggccgcggccccctgttgtgttgctgcggagaggtacttggatgcattttacaggttagcctcacttgagctgttgtcctgcaagtaaagtgtatttttggtgattgaaagttggagaactttcatttcagctgagtggtgtagttgaattggttcctgtagccgctgtccctaaacccaggccgacgttaccgccttgtgtcctgactgctagctttcgacgggaccgtctttgagggactcatgtaaagtctctcccttaatgctcagttcttagaagaccgagcaaaagcagacatgtgtcaatttaaattctacatctatgtatttggtaagcggaggcctaaataacactgttaatatttgggatttaaaatcaaaaagagttcatcgatctcttaaggatcataaagatcaagtaacttgtgtaacatacaattggaatgattgctacattgcttctggatctcttagtggtgaaattattttacacagtgtaaccactaatttatctagtactccttttggccatggtagtaaccagtctgttcggcacttgaagtactccttgtttaagaaatcactactgggcagtgtttcggataatggaatagtaactctctgggatgtaaatagtcagagtccataccataactttgacagtgtacacaaagctccagcgtcaggcatctgtttttctcctgtcaatgaattgctctttgtaaccataggcttggataaaagaatcatcctctatgacacttcaagtaagaagctagtgaaaactttagtggctgacactcctctaactgcggtagatttcatgcctgatggagccactttggctattggatcttcccgggggaaaatatatcaatatgatttaagaatgttgaaatcaccagttaagaccatcagtgctcacaagacatctgtgcagtgtatagcatttcagtactccactgttcttactaagtcaagtttaaataaaggctgttcaaataagcccacaacagtgaacaaacgaagtgttaatgtgaatgctgctagtggaggagttcagaattccggaattgtcagagaagcacctgccacgtccattgccacagttctaccacaacctatgacatcagctatggggaaaggaacagttgctgttcaagaaaaagcaggtttgcctcgaagcataaacacagacactttatctaaggaaacagacagtggaaaaaatcaggatttctccagctttgatgatactgggaaaagtagtttaggtgacatgttctcacctatcagagatgatgctgtagttaacaagggaagtgatgagtccataggcaaaggagatggctttgactttctaccgcagttgaactcagtgtttcctccaagaaaaaatccagtaacttcaagtacttcagtattgcattctagtcctcttaatgtttttatgggatctccagggaaagaggaaaatgaaaaccgtgatctaacagctgagtctaagaaaatatatatgggaaaacaggaatctaaagactccttcaaacagttagcaaagttggtcacatctggtgctgaaagtggaaatctaaatacctctccatcatctaaccaaacaagaaattctgagaaatttgaaaagccagagaatgaaattgaagcccagttgatatgtgaacccccaatcaatggatcctcaactccaaatccaaagatagcatcttctgtcactgctggagttgccagttcactctcagaaaaaatagccgacagcattggaaataaccggcaaaatgcaccattgacttccattcaaattcgttttattcagaacatgatacaggaaacgttggatgactttagagaagcatgccatagggacattgtgaatttgcaagtggagatgattaaacagtttcatatgcaactgaatgaaatgcattctttgctggaaagatactcagtgaatgaaggtttagtggctgaaattgaaagactacgagaagaaaacaaaagattacgggcccacttttgaaatttcagtgaataccttaatgttctgtaatttgggaagtttctggcaacacagaactacatagaatcagtattgttttcatggcctccagggaaaaaatgtttttcaagtaagagtaaaaggatgatgggattttataccaacaactgtttcatcttaaaaatatgtatatttttatattaaaaattgtacagtatgtcatctacccaataggaaagtcaacaggatctttattttttgaaagctttagccatccactaagtgccctttttcataagagaagaaaattgtgcataaaaattggttatgtttgttttttagtcatcttttttaacatatatttttgattgacaaattgcctttcaaatttttggggctagttgagatttaaagagtttgatatgccttctatttttatggag

SEQ ID NO: 19791 - DNA, 3366 bp, Homo sapiens
  source 1..3366: mol_type = unassigned DNA
aagtttaacagtccaggcgggagccggaagcccagcgcggagccggccgcggccccctgttgtgttgctgcggagaggcgcagtcatgcaggaaaacctcagatttgcttcatcaggagatgatattaaaatatgggatgcttcatctatgacattggtggataaattcaacccacacacatcaccacatggaatcagctcaatatgttggagcagcaataataactttttagtaacagcatcttccagtggcgacaaaatagttgtctcaagttgcaaatgtaaacctgttccacttttagagcttgctgaagggcaaaagcagacatgtgtcaatttaaattctacatctatgtatttggtaagcggaggcctaaataacactgttaatatttgggatttaaaatcaaaaagagttcatcgatctcttaaggatcataaagatcaagtaacttgtgtaacatacaattggaatgattgctacattgcttctggatctcttagtggtgaaattattttacacagtgtaaccactaatttatctagtactccttttggccatggtagtaaccagtctgttcggcacttgaagtactccttgtttaagaaatcactactgggcagtgtttcggataatggaatagtaactctctgggatgtaaatagtcagagtccataccataactttgacagtgtacacaaagctccagcgtcaggcatctgtttttctcctgtcaatgaattgctctttgtaaccataggcttggataaaagaatcatcctctatgacacttcaagtaagaagctagtgaaaactttagtggctgacactcctctaactgcggtagatttcatgcctgatggagccactttggctattggatcttcccgggggaaaatatatcaatatgatttaagaatgttgaaatcaccagttaagaccatcagtgctcacaagacatctgtgcagtgtatagcatttcagtactccactgttcttactaagtcaagtttaaataaaggctgttcaaataagcccacaacagtgaacaaacgaagtgttaatgtgaatgctgctagtggaggagttcagaattccggaattgtcagagaagcacctgccacgtccattgccacagttctaccacaacctatgacatcagctatggggaaaggaacagttgctgttcaagaaaaagcaggtttgcctcgaagcataaacacagacactttatctaaggaaacagacagtggaaaaaatcaggatttctccagctttgatgatactgggaaaagtagtttaggtgacatgttctcacctatcagagatgatgctgtagttaacaagggaagtgatgagtccataggcaaaggagatggctttgactttctaccgcagttgaactcagtgtttcctccaagaaaaaatccagtaacttcaagtacttcagtattgcattctagtcctcttaatgtttttatgggatctccagggaaagaggaaaatgaaaaccgtgatctaacagctgagtctaagaaaatatatatgggaaaacaggaatctaaagactccttcaaacagttagcaaagttggtcacatctggtgctgaaagtggaaatctaaatacctctccatcatctaaccaaacaagaaattctgagaaatttgaaaagccagagaatgaaattgaagcccagttgatatgtgaacccccaatcaatggatcctcaactccaaatccaaagatagcatcttctgtcactgctggagttgccagttcactctcagaaaaaatagccgacagcattggaaataaccggcaaaatgcaccattgacttccattcaaattcgttttattcagaacatgatacaggaaacgttggatgactttagagaagcatgccatagggacattgtgaatttgcaagtggagatgattaaacagtttcatatgcaactgaatgaaatgcattctttgctggaaagatactcagtgaatgaaggtttagtggctgaaattgaaagactacgagaagaaaacaaaagattacgggcccacttttgaaatttcagtgaataccttaatgttctgtaatttgggaagtttctggcaacacagaactacatagaatcagtattgttttcatggcctccagggaaaaaatgtttttcaagtaagagtaaaaggatgatgggattttataccaacaactgtttcatcttaaaaatatgtatatttttatattaaaaattgtacagtatgtcatctacccaataggaaagtcaacaggatctttattttttgaaagctttagccatccactaagtgccctttttcataagagaagaaaattgtgcataaaaattggttatgtttgttttttagtcatcttttttaacatatatttttgattgacaaattgcctttcaaatttttggggctagttgagatttaaagagtttgatatgccttctatttttatggagaaagtaattttaaaatggcaattggtgtttctaagccattgactaataaaacatagggttggctagtaattattttgttaacttgatgaagtcaagtatgactattatttattgtacatttgataagacaatttttggaattttgaattgcacaaattacatgatatcttttgcatttatgttactatattgtacttctgacaaatctttattcctgggtggtatttttaagatatctttacctataaaaaatgtttaaggttcataggactcgacaagagctatctggtgattttctcattagtaacatgcaacgttgtactgcaaaatttcaatcaacatgacaacttataatgagtggagatttcatattaggtactaaatattatagtattatttctattttctttttccaaataagaagcttggattattttattttgtggtctttatcattaactttaattctttctgtactgtgtataatatttttatattattggccttaccataaaattatttagaaaggttgtcaaaataagttatacctctttggcaatagatagatgtatacatctacctactatgatctacaattttaggttaagtgaagcttgggggggctactgacttggttaccttcttgtctcttgtcccaaagatttaaactgtgtacctttgtatagctcttctgccccattttgacttctgagatgaaagtatttactaaaattaaaaaaaaaaaaacaaaaaacaaacctttagctcactaactttatgggtttctgaagtgatggaaatttttaaggatatatttaataagcataaacttactaataattacttccaaaaataaaaacaggaatattactttta

SEQ ID NO: 19792 - DNA, 3162 bp, Homo sapiens
  source 1..3162: mol_type = unassigned DNA
aatgtgagccatttttgaaagctactctgtaagctatactcattgcttgtcttcttagtgtgttagcttttataatcgcaattcttataatagtctagtgctatagatgttcatggattgtttgatgctccataactcctcatttagataactttttagtaacagcatcttccagtggcgacaaaatagttgtctcaagttgcaaatgtaaacctgttccacttttagagcttgctgaagggcaaaagcagacatgtgtcaatttaaattctacatctatgtatttggtaagcggaggcctaaataacactgttaatatttgggatttaaaatcaaaaagagttcatcgatctcttaaggatcataaagatcaagtaacttgtgtaacatacaattggaatgattgctacattgcttctggatctcttagtggtgaaattattttacacagtgtaaccactaatttatctagtactccttttggccatggtagtaaccagtctgttcggcacttgaagtactccttgtttaagaaatcactactgggcagtgtttcggataatggaatagtaactctctgggatgtaaatagtcagagtccataccataactttgacagtgtacacaaagctccagcgtcaggcatctgtttttctcctgtcaatgaattgctctttgtaaccataggcttggataaaagaatcatcctctatgacacttcaagtaagaagctagtgaaaactttagtggctgacactcctctaactgcggtagatttcatgcctgatggagccactttggctattggatcttcccgggggaaaatatatcaatatgatttaagaatgttgaaatcaccagttaagaccatcagtgctcacaagacatctgtgcagtgtatagcatttcagtactccactgttcttactaagtcaagtttaaataaaggctgttcaaataagcccacaacagtgaacaaacgaagtgttaatgtgaatgctgctagtggaggagttcagaattccggaattgtcagagaagcacctgccacgtccattgccacagttctaccacaacctatgacatcagctatggggaaaggaacagttgctgttcaagaaaaagcaggtttgcctcgaagcataaacacagacactttatctaaggaaacagacagtggaaaaaatcaggatttctccagctttgatgatactgggaaaagtagtttaggtgacatgttctcacctatcagagatgatgctgtagttaacaagggaagtgatgagtccataggcaaaggagatggctttgactttctaccgcagttgaactcagtgtttcctccaagaaaaaatccagtaacttcaagtacttcagtattgcattctagtcctcttaatgtttttatgggatctccagggaaagaggaaaatgaaaaccgtgatctaacagctgagtctaagaaaatatatatgggaaaacaggaatctaaagactccttcaaacagttagcaaagttggtcacatctggtgctgaaagtggaaatctaaatacctctccatcatctaaccaaacaagaaattctgagaaatttgaaaagccagagaatgaaattgaagcccagttgatatgtgaacccccaatcaatggatcctcaactccaaatccaaagatagcatcttctgtcactgctggagttgccagttcactctcagaaaaaatagccgacagcattggaaataaccggcaaaatgcaccattgacttccattcaaattcgttttattcagaacatgatacaggaaacgttggatgactttagagaagcatgccatagggacattgtgaatttgcaagtggagatgattaaacagtttcatatgcaactgaatgaaatgcattctttgctggaaagatactcagtgaatgaaggtttagtggctgaaattgaaagactacgagaagaaaacaaaagattacgggcccacttttgaaatttcagtgaataccttaatgttctgtaatttgggaagtttctggcaacacagaactacatagaatcagtattgttttcatggcctccagggaaaaaatgtttttcaagtaagagtaaaaggatgatgggattttataccaacaactgtttcatcttaaaaatatgtatatttttatattaaaaattgtacagtatgtcatctacccaataggaaagtcaacaggatctttattttttgaaagctttagccatccactaagtgccctttttcataagagaagaaaattgtgcataaaaattggttatgtttgttttttagtcatcttttttaacatatatttttgattgacaaattgcctttcaaatttttggggctagttgagatttaaagagtttgatatgccttctatttttatggagaaagtaattttaaaatggcaattggtgtttctaagccattgactaataaaacatagggttggctagtaattattttgttaacttgatgaagtcaagtatgactattatttattgtacatttgataagacaatttttggaattttgaattgcacaaattacatgatatcttttgcatttatgttactatattgtacttctgacaaatctttattcctgggtggtatttttaagatatctttacctataaaaaatgtttaaggttcataggactcgacaagagctatctggtgattttctcattagtaacatgcaacgttgtactgcaaaatttcaatcaacatgacaacttataatgagtggagatttcatattaggtactaaatattatagtattatttctattttctttttccaaataagaagcttggattattttattttgtggtctttatcattaactttaattctttctgtactgtgtataatatttttatattattggccttaccataaaattatttagaaaggttgtcaaaataagttatacctctttggcaatagatagatgtatacatctacctactatgatctacaattttaggttaagtgaagcttgggggggctactgacttggttaccttcttgtctcttgtcccaaagatttaaactgtgtacctttgtatagctcttctgccccattttgacttctgagatgaaagtatttactaaaattaaaaaaaaaaaa

SEQ ID NO: 19793 - DNA, 581 bp, Homo sapiens
  source 1..581: mol_type = unassigned DNA
agcgcggagccggccgcggccccctgttgtgttgctgcggagaggtacttggatgcattttacagcaaaagcagacatgtgtcaatttaaattctacatctatgtatttggtaagcggaggcctaaataacactgttaatatttgggatttaaaatcaaaaagagttcatcgatctcttaaggatcataaagatcaagtaacttgtgtaacatacaattggaatgattgctacattgcttctggatctcttagtggtgaaattattttacacagtgtaaccactaatttatctagtactccttttggccatggtagtaaccagtctgttcggcacttgaagtactccttgtttaagaaatcactactgggcagtgtttcggataatggaatagtaactctctgggatgtaaatagtcagagtccataccataactttgacagtgtacacaaagctccagcgtcaggcatctgtttttctcctgtcaatgaattgctctttgtaaccataggcttggataaaagaatcatcctctatgacacttcaagtaagaagctagtgaaaactttagtggctgacact

SEQ ID NO: 19794 - DNA, 582 bp, Homo sapiens
  source 1..582: mol_type = unassigned DNA
aacagtccaggcgggagccggaagcccagcgcggagccggccgcggccccctgttgtgttgctgcggagaggtacttggatgcattttacaggcgcagtcatgcaggaaaacctcagatttgcttcatcaggagatgatattaaaatatgggatgcttcatctatgacattggtggataaattcaacccacacacatcaccacatggaatcagctcaatatgttggagcagcaataataactttttagtaacagcatcttccagtggcgacaaaatagttgtctcaagttgcaaatgtaaacctgttccacttttagagcttgctgaagggcaaaagcagacatgtgtcaatttaaattctacatctatgtatttggtaagcggaggcctaaataacactgttaatatttgggatttaaaatcaaaaagagttcatcgatctcttaaggatcataaagatcaagtaacttgtgtaacatacaattggaatgattgctacattgcttctggatctcttagtggtgaaattattttacacagtgtaaccactaatttatctagtactccttttggccatggtag

SEQ ID NO: 19795 - DNA, 554 bp, Homo sapiens
  source 1..554: mol_type = unassigned DNA
agtccaggcgggagccggaagcccagcgcggagccggccgcggccccctgttgtgttgctgcggagaggtacttggatgcattttacagctgagtggtgtagttgaattggttcctgtagccgctgtccctaaacccaggccgacgttaccgccttgtgtcctgactgctagctttcgacgggaccgtctttgagggactcatgtaaagtctctcccttaatgctcagttcttagaagaccgaggcgcagtcatgcaggaaaacctcagatttgcttcatcaggagatgatattaaaatatgggatgcttcatctatgacattggtggataaattcaacccacacacatcaccacatggaatcagctcaatatgttggagcagcaataataactttttagtaacagcatcttccagtggcgacaaaatagttgtctcaagttgcaaatgtaaacctgttccacttttagagcttgctgaagggcaaaagcagacatgtgtcaatttaaattctacatctatgtatttggtaagcggaggcctaaataacactgt

SEQ ID NO: 19796 - DNA, 595 bp, Homo sapiens
  source 1..595: mol_type = unassigned DNA
aacagtccaggcgggagccggaagcccagcgcggagccggccgcggccccctgttgtgttgctgcggagaggtgaggttccggaggccctgaggcgcagtcatgcaggaaaacctcagatttgcttcatcaggagatgatattaaaatatgggatgcttcatctatgacattggtggataaattcaacccacacacatcaccacatggaatcagctcaatatgttggagcagcaataataactttttagtaacagcatcttccagtggcgacaaaatagttgtctcaagttgcaaatgtaaacctgttccacttttagagcttgctgaagggcaaaagcagacatgtgtcaatttaaattctacatctatgtatttggtaagcggaggcctaaataacactgttaatatttgggatttaaaatcaaaaagagttcatcgatctcttaaggatcataaagatcaagtaacttgtgtaacatacaattggaatgattgctacattgcttctggatctcttagtggtgaaattattttacacagtgtaaccactaatttatctagtactccttttggccatggtagtaaccagtctgt

SEQ ID NO: 19797 - DNA, 2367 bp, Homo sapiens
  source 1..2367: mol_type = unassigned DNA
gggaagtgtccggggaggcgcgggccggggtcgcgcacctcccggagccttgtggggtgtgctgcctccgaaaagtttgcctcgtctccacaagtctgtctccttttttgtcaacctcaagtacttttcttttggcaggtacttggatgcattttacaggcgcagtcatgcaggaaaacctcagatttgcttcatcaggagatgatattaaaatatgggatgcttcatctatgacattggtggataaattcaacccacacacatcaccacatggaatcagctcaatatgttggagcagcaataataactttttagtaacagcatcttccagtggcgacaaaatagttgtctcaagttgcaaatgtaaacctgttccacttttagagcttgctgaagggcaaaagcagacatgtgtcaatttaaattctacatctatgtatttggtaagcggaggcctaaataacactgttaatatttgggatttaaaatcaaaaagagttcatcgatctcttaaggatcataaagatcaagtaacttgtgtaacatacaattggaatgattgctacattgcttctggatctcttagtggtgaaattattttacacagtgtaaccactaatttatctagtactccttttggccatggtagtaaccagtctgttcggcacttgaagtactccttgtttaagaaatcactactgggcagtgtttcggataatggaatagtaactctctgggatgtaaatagtcagagtccataccataactttgacagtgtacacaaagctccagcgtcaggcatctgtttttctcctgtcaatgaattgctctttgtaaccataggcttggataaaagaatcatcctctatgacacttcaagtaagaagctagtgaaaactttagtggctgacactcctctaactgcggtagatttcatgcctgatggagccactttggctattggatcttcccgggggaaaatatatcaatatgatttaagaatgttgaaatcaccagttaagaccatcagtgctcacaagacatctgtgcagtgtatagcatttcagtactccactgttcttactaagtcaagtttaaataaaggctgttcaaataagcccacaacagtgaacaaacgaagtgttaatgtgaatgctgctagtggaggagttcagaattccggaattgtcagagaagcacctgccacgtccattgccacagttctaccacaacctatgacatcagctatggggaaaggaacagttgctgttcaagaaaaagcaggtttgcctcgaagcataaacacagacactttatctaaggaaacagacagtggaaaaaatcaggatttctccagctttgatgatactgggaaaagtagtttaggtgacatgttctcacctatcagagatgatgctgtagttaacaagggaagtgatgagtccataggcaaaggagatggctttgactttctaccgcagttgaactcagtgtttcctccaagaaaaaatccagtaacttcaagtacttcagtattgcattctagtcctcttaatgtttttatgggatctccagggaaagaggaaaatgaaaaccgtgatctaacagctgagtctaagaaaatatatatgggaaaacaggaatctaaagactccttcaaacagttagcaaagttggtcacatctggtgctgaaagtggaaatctaaatacctctccatcatctaaccaaacaagaaattctgagaaatttgaaaagccagagaatgaaattgaagcccagttgatatgtgaacccccaatcaatggatcctcaactccaaatccaaagatagcatcttctgtcactgctggagttgccagttcactctcagaaaaaatagccgacagcattggaaataaccggcaaaatgcaccattgacttccattcaaattcgttttattcagaacatgatacaggaaacgttggatgactttagagaagcatgccatagggacattgtgaatttgcaagtggagatgattaaacagtttcatatgcaactgaatgaaatgcattctttgctggaaagatactcagtgaatgaaggtttagtggctgaaattgaaagactacgagaagaaaacaaaagattacgggcccacttttgaaatttcagtgaataccttaatgttctgtaatttgggaagtttctggcaacacagaactacatagaatcagtattgttttcatggcctccagggaaaaaatgtttttcaagtaagagtaaaaggatgatgggattttataccaacaactgtttcatcttaaaaatatgtatatttttatattaaaaattgtacagtatgtcatctacccaataggaaa

SEQ ID NO: 19798 - DNA, 7019 bp, Homo sapiens
  source 1..7019: mol_type = unassigned DNA
gctgcagctgagctcagcttaaaggtcgctggaaatcaagtgctttgtaagtgaaggcattttgactacaagcgattcaagacattttggaaacgtcagtctctggaatgggtcgtctttttctttctatgatatctggtatctaatgttttacttaggataaagactactacttaatagctcttttaggcaccacaaatgattttttcttttgatgcagtgcagctgcttctagcctgtctacggacagagatctttgttatgactttcagcccttaacatgtttggaaatgagaacaaatggcacaaagcttacgattgcactttgcagccagaagaagcaatacttaccctttgtcagaaacctccggagatgacttggatagccatgttcacatgtgcttcaaaagaccaacacggatttcaacgtctaacgttgttcaaatgaagctgactcccagacagactgcactagctccgttaataaaggaaaacgttcagtctcaagaaagatcatctgttccctcatctgaaaatgttaataaaaagagcagctgtctacagatttcactacagccaacaaggtacagtggatatcttcagtctagcaatgtcttagctgatagtgatgatgcttcgtttacttgtatcttgaaggatggtatttacagtagtgctgtggtcgataatgaattgaatgctgtgaatgatggtcaccttgtaagcagtccagccatttgtagtggtagccttagtaacttttcaaccagtgataatgggtcttacagcagcaacggtagtgattttgggtcatgtgcaagtatcacaagtggaggttcatatactaacagtgtcatcagtgacagtagtagttatacttttccaccaagtgatgatacttttttgggtggaaacttaccttctgacagcacctccaatagaagtgtgccaaacaggaatactactccttgtgaaattttttcaagaagtacaagtacagatccttttgtccaggatgacttggaacatggattagagattatgaaattgccagtgagcaggaacacaaaaattccactaaaacgttactcctccttagtcatttttcctaggagtccttcaactacccgaccgacttctccaacaagtctgtgtactcttctgagcaaaggatcctatcaaacttcacaccagtttattatttctcctagtgaaattgcacataatgaggatggcactagtgctaaaggatttctttcaacagctgtcaatggacttcggttatctaaaacaatttgtacccccggagaagtaagagacatacggccgcttcacaggaagggctcgttacagaagaaaattgttctttcgaataatactcccagacagactgtctgtgaaaagtcatctgaaggatattcttgtgtttcagtgcatttcacccaacgaaaagcagctacattagactgtgaaacaacaaatggtgattgtaaaccagaaatgtcagaaattaagcttaattctgattcagagtatattaagctcatgcataggacatctgcatgtttgccatcctcccaaaatgtagattgtcaaataaatatcaatggagaattggaaagaccacattcacagatgaacaaaaaccatggtattttacgaagaagtatttcattgggaggagcttatccaaatatttcctgtctatccagccttaagcacaattgttctaaagggggaccatctcagttactcataaagtttgcatctggaaatgaaggtaaagtggataatttatcaagagacagcaacagagattgcacaaatgaactgtctaattcttgcaagcctggctgggttgttttggaccaaccagatgctgcttgccatttgcagcaacaacaagaaccttctcctctacctccagggtgggaagagaggcaggatatccttggaaggacctattatgtaaaccatgaatctagaagaacacagtggaaaagaccaacccctcaggacaacctaacagatgctgagaatggcaacattcaactgcaagcacaacgtgcatttaccaccaggcggcagatatccgaggaaacagaaagtgttgacaaccgagagtcttccgagaactgggaaattataagagaagatgaagccaccatgtatagcaaccaggccttcccatcacctccaccgtcaagtaacttggatgttccaactcatcttgcagaagaattgaatgccagactcaccatttttggaaattcagccgtgagccagccagcatcgagctcaaatcattccagcagaagaggcagcttacaagcctatacttttgaggaacaacctacacttcctgtgcttttgcctacttcatctggattaccaccaggttgggaagaaaaacaagatgaaagaggaagatcatattatgtagatcacaattccagaacgactacttggacaaagcccactgtacaggccacagtggagaccagtcagctgacctcaagccagagttctgcaggccctcaatcacaagcctccaccagtgattcaggccagcaggtgacccagccatctgaaattgagcaaggattccttcctaaaggctgggaagtccggcatgcaccaaatgggaggcctttctttattgaccacaacactaaaaccaccacctgggaagatccaagattgaaaattccagcccatctgagaggaaagacatcacttgatacttccaatgatctagggcctttacctccaggatgggaagagagaactcacacagatggaagaatcttctacataaatcacaatataaaaagaacacaatgggaagatcctcggttggagaatgtagcaataactggaccagcagtgccctactccagggattacaaaagaaagtatgagttcttccgaagaaagttgaagaagcagaatgacattccaaacaaatttgaaatgaaacttcgccgagcaactgttcttgaagactcttaccggagaattatgggtgtcaagagagcagacttcctgaaggctcgactgtggattgagtttgatggtgaaaagggattggattatggaggagttgccagagaatggttcttcctgatctcaaaggaaatgtttaacccttattatgggttgtttgaatattctgctacggacaattataccctacagataaatccaaactctggattgtgtaacgaagatcacctctcttacttcaagtttattggtcgggtagctggaatggcagtttatcatggcaaactgttggatggttttttcatccgcccattttacaagatgatgcttcacaaaccaataacccttcatgatatggaatctgtggatagtgaatattacaattccctaagatggattcttgaaaatgacccaacagaattggacctcaggtttatcatagatgaagaactttttggacagacacatcaacatgagctgaaaaatggtggatcagaaatagttgtcaccaataagaacaaaaaggaatatatttatcttgtaatacaatggcgatttgtaaaccgaatccagaagcaaatggctgcttttaaagagggattctttgaactaataccacaggatctcatcaaaatttttgatgaaaatgaactagagcttcttatgtgtggactgggagatgttgatgtgaatgactggagggaacatacaaagtataaaaatggctacagtgcaaatcatcaggttatacagtggttttggaaggctgttttaatgatggattcagaaaaaagaataagattacttcagtttgtcactggcacatctcgggtgcctatgaatggatttgctgaactatacggttcaaatggaccacagtcatttacagttgaacagtggggtactcctgaaaagctgccaagagctcatacctgttttaatcgcctggacttgccaccttatgaatcatttgaagaattatgggataaacttcagatggcaattgaaaacacccagggctttgatggagttgattagattacaaataacaatctgtagtgtttttactgccatagttttataaccaaaatcttgacttaaaattttccggggaactactaaaatgtggccactgagtcttcccagatcttgaagaaaatcatataaaaagcatttgaagaaatagtacgacaacttatttttaatcacttttaaataatgtgttgcatttacacagttgtttcatgctgtctttagagttaggtgcctgcctaaagccaggcaccaccacacctggctttagagttcacacaataggatataagtcctgtatgacttaaatagtgaattttgtccttaacatttacctcttgtatagtatctgccaggcagttttttcttaaactactgagatgataactgtgaaatatttgtgatacgtgtcatgtgtgaaaagtttgatgcattttgagatggaaaactgaaatttggaaaaagaaatactttactattgagtaaactacaatatatttagtgctactcgcagctatttattattttgtagacctgccttatgcaccttactgcctagatttttgggaaaaaactttggaaagtgtgttacctatatttctagccaactaactcacagaaaaactgtttacttcttcactttcgaagtatttggcttttgttaatatgcagttttactaaacagatggttcataagacatgtgaagcaaattcatatttgcaatgggtaaaaagtattaaagcctttctcttgcctgcatatcctattgaccattggtatagtcatcactttttcatattttagtgtagttagaagaattccttcttcaaacattaaagatccacaaagcagtatttctaaatatgccttgaagaactaaatgaagtgtatagcacttgcctttactagatattctttacacttgtacaattatgtagtaaatgtatgtttacagggtttatcatgtttacagattaagctaatttctgtagtcgcatttttatatttttagtatcactctagtaaaaaaaccaaataatttgtttaaaataaccaaagagttgttataatgcataatttgtattaaatttattactatttcttatgccttttaaaatactgtttactatgaagacaatgtttttaattacaaatccagaattctgtaggcaaaatgctacagttcatatcttcctttaaccaaactgaagtacataaagaccatgtacatgtattcatcaaacgtttattgaatgctgcgtgcctagcgctgtgctatgctctggggtaagagttgtcagcttcagagaagctgagtcctgatcctcaaggaacttgcaaatgtgtctatgaatttgtaaaacaatcaaaagtaggcgtaagcagaataaggcaaaagggaaagtgttctaggttccagcacacctgcaaagataaagtgtgccaagactgtatttatatttcatacttatattgtttcatccttatattggaatgattatatagaaaatgctcttaaaaagattaaacctatttctcagtatggtatcttggtgatttaggaataattgtaaatatatgttacgaatcttcttaaatatatatatatacacaccctgtgagaactgtaaaaagtacctctggttcttggtttaagtttgttggggtataacatgatgagtactcattagcacctgatagaaatctgaaatgtgacagtagcaaaaccactttctactttccaaacaccacagcatcagcatggtttaggggaagcaattcacagattaatgtaccctgcgttttgtcttcaccattgtcaaccagcagtcaaggatgagcaccaggtatagtcctggtttgatatctcaccagccatgtgaactgaagcagcttacttaacctctctggattcatatttcttcatctgtcaaatgagagtaatcatgcccaccctcattgtcatgccagattgtcagaagttccagacagatgagaaagcaaaaagtactttgtaaagtgttatacaatcagaaggtgctttgtgctgaccgtcagattgtgtcaagtcaggtgtgcaaattgaccacactcccaaagaatcatttaaaagtaaagtgacttctaagagacaaggaagtaggaacatttctgatattaaatatataaataatatggatacacatgtgtatatctgtatatggatcttaccatcataattcattttcttcatatcagcaaagtaatagtaatgtgggccaatgcattttggaaatgtcctcattatgtagaatggaatgtgaaaattatttttgttaaaacaggattttgccacaattatttaaatattatgtttgtgaactatctaagcatgagaaaatacaaagctttctttgtatctggctgatactcatttggatgattctgtgactcatagaacatgatgttaaatgagaccagactcaactgccaccagtccccagctgcagaccttcatccccttcatctcccactaggggctcgtggtctggaagaaacatctatcaagcaacacagccccttatcccagatagaaaagtgtctcaaatgcattctactgcgggacagtcagtaggatcattttcataaagcaaggacatcatatgtttctagaaattacaagcatataactttagcctacaatctcttattaaaaatttttaacaaaattgtattacaaatgcatttcatcagaactcaaatttaaatggtgtttgttttgggtttttatttataatgctgaagttattccatataagtatcaagttaaacacaattcattttgattataaactatttgactttttaaaatcttctgacacagtaaatatatatatcaagattgatgtatcaaaatttattgcacactttaaagtgtaaaatcattttttaaaatcttgaatccacaaataaagttctattctgattttaaaaaacaaaa

SEQ ID NO: 19799 - DNA, 5760 bp, Homo sapiens
  source 1..5760: mol_type = unassigned DNA
ctcccgcttctcctcctcctcctccacagttgcctgccctgggcgggggcgagcgcgtccggtttgctggaagcgttcggaaatggcaacttgcgcggtggaggtgttcgggctcctggaggacgaggaaaattcacgaattgtgagagtaagagttatagccggaataggccttgccaagaaggatatattgggagctagtgatccttacgtgagagtgacgttatatgacccaatgaatggagttcttacaagtgtgcaaacaaaaaccattaaaaagagtttgaatccaaagtggaatgaagaaatattattcagagttcatcctcagcagcaccggcttctttttgaagtgtttgacgaaaaccgattgacaagagatgatttcctaggtcaagtggatgttccactttatccattaccgacagaaaatccaagattggagagaccatatacatttaaggattttgttcttcatccaagaagtcacaaatcaagagttaaaggttatctgagactaaaaatgacttatttacctaaaaccagtggctcagaagatgataatgcagaacaggctgaggaattagagcctggctgggttgttttggaccaaccagatgctgcttgccatttgcagcaacaacaagaaccttctcctctacctccagggtgggaagagaggcaggatatccttggaaggacctattatgtaaaccatgaatctagaagaacacagtggaaaagaccaacccctcaggacaacctaacagatgctgagaatggcaacattcaactgcaagcacaacgtgcatttaccaccaggcggcagatatccgaggaaacagaaagtgttgacaaccgagagtcttccgagaactgggaaattataagagaagatgaagccaccatgtatagcaaccaggccttcccatcacctccaccgtcaagtaacttggatgttccaactcatcttgcagaagaattgaatgccagactcaccatttttggaaattcagccgtgagccagccagcatcgagctcaaatcattccagcagaagaggcagcttacaagcctatacttttgaggaacaacctacacttcctgtgcttttgcctacttcatctggattaccaccaggttgggaagaaaaacaagatgaaagaggaagatcatattatgtagatcacaattccagaacgactacttggacaaagcccactgtacaggccacagtggagaccagtcagctgacctcaagccagagttctgcaggccctcaatcacaagcctccaccagtgattcaggccagcaggtgacccagccatctgaaattgagcaaggattccttcctaaaggctgggaagtccggcatgcaccaaatgggaggcctttctttattgaccacaacactaaaaccaccacctgggaagatccaagattgaaaattccagcccatctgagaggaaagacatcacttgatacttccaatgatctagggcctttacctccaggatgggaagagagaactcacacagatggaagaatcttctacataaatcacaatataaaaagaacacaatgggaagatcctcggttggagaatgtagcaataactggaccagcagtgccctactccagggattacaaaagaaagtatgagttcttccgaagaaagttgaagaagcagaatgacattccaaacaaatttgaaatgaaacttcgccgagcaactgttcttgaagactcttaccggagaattatgggtgtcaagagagcagacttcctgaaggctcgactgtggattgagtttgatggtgaaaagggattggattatggaggagttgccagagaatggttcttcctgatctcaaaggaaatgtttaacccttattatgggttgtttgaatattctgctacggacaattataccctacagataaatccaaactctggattgtgtaacgaagatcacctctcttacttcaagtttattggtcgggtagctggaatggcagtttatcatggcaaactgttggatggttttttcatccgcccattttacaagatgatgcttcacaaaccaataacccttcatgatatggaatctgtggatagtgaatattacaattccctaagatggattcttgaaaatgacccaacagaattggacctcaggtttatcatagatgaagaactttttggacagacacatcaacatgagctgaaaaatggtggatcagaaatagttgtcaccaataagaacaaaaaggaatatatttatcttgtaatacaatggcgatttgtaaaccgaatccagaagcaaatggctgcttttaaagagggattctttgaactaataccacaggatctcatcaaaatttttgatgaaaatgaactagagcttcttatgtgtggactgggagatgttgatgtgaatgactggagggaacatacaaagtataaaaatggctacagtgcaaatcatcaggttatacagtggttttggaaggctgttttaatgatggattcagaaaaaagaataagattacttcagtttgtcactggcacatctcgggtgcctatgaatggatttgctgaactatacggttcaaatggaccacagtcatttacagttgaacagtggggtactcctgaaaagctgccaagagctcatacctgttttaatcgcctggacttgccaccttatgaatcatttgaagaattatgggataaacttcagatggcaattgaaaacacccagggctttgatggagttgattagattacaaataacaatctgtagtgtttttactgccatagttttataaccaaaatcttgacttaaaattttccggggaactactaaaatgtggccactgagtcttcccagatcttgaagaaaatcatataaaaagcatttgaagaaatagtacgacaacttatttttaatcacttttaaataatgtgttgcatttacacagttgtttcatgctgtctttagagttaggtgcctgcctaaagccaggcaccaccacacctggctttagagttcacacaataggatataagtcctgtatgacttaaatagtgaattttgtccttaacatttacctcttgtatagtatctgccaggcagttttttcttaaactactgagatgataactgtgaaatatttgtgatacgtgtcatgtgtgaaaagtttgatgcattttgagatggaaaactgaaatttggaaaaagaaatactttactattgagtaaactacaatatatttagtgctactcgcagctatttattattttgtagacctgccttatgcaccttactgcctagatttttgggaaaaaactttggaaagtgtgttacctatatttctagccaactaactcacagaaaaactgtttacttcttcactttcgaagtatttggcttttgttaatatgcagttttactaaacagatggttcataagacatgtgaagcaaattcatatttgcaatgggtaaaaagtattaaagcctttctcttgcctgcatatcctattgaccattggtatagtcatcactttttcatattttagtgtagttagaagaattccttcttcaaacattaaagatccacaaagcagtatttctaaatatgccttgaagaactaaatgaagtgtatagcacttgcctttactagatattctttacacttgtacaattatgtagtaaatgtatgtttacagggtttatcatgtttacagattaagctaatttctgtagtcgcatttttatatttttagtatcactctagtaaaaaaaccaaataatttgtttaaaataaccaaagagttgttataatgcataatttgtattaaatttattactatttcttatgccttttaaaatactgtttactatgaagacaatgtttttaattacaaatccagaattctgtaggcaaaatgctacagttcatatcttcctttaaccaaactgaagtacataaagaccatgtacatgtattcatcaaacgtttattgaatgctgcgtgcctagcgctgtgctatgctctggggtaagagttgtcagcttcagagaagctgagtcctgatcctcaaggaacttgcaaatgtgtctatgaatttgtaaaacaatcaaaagtaggcgtaagcagaataaggcaaaagggaaagtgttctaggttccagcacacctgcaaagataaagtgtgccaagactgtatttatatttcatacttatattgtttcatccttatattggaatgattatatagaaaatgctcttaaaaagattaaacctatttctcagtatggtatcttggtgatttaggaataattgtaaatatatgttacgaatcttcttaaatatatatatatacacaccctgtgagaactgtaaaaagtacctctggttcttggtttaagtttgttggggtataacatgatgagtactcattagcacctgatagaaatctgaaatgtgacagtagcaaaaccactttctactttccaaacaccacagcatcagcatggtttaggggaagcaattcacagattaatgtaccctgcgttttgtcttcaccattgtcaaccagcagtcaaggatgagcaccaggtatagtcctggtttgatatctcaccagccatgtgaactgaagcagcttacttaacctctctggattcatatttcttcatctgtcaaatgagagtaatcatgcccaccctcattgtcatgccagattgtcagaagttccagacagatgagaaagcaaaaagtactttgtaaagtgttatacaatcagaaggtgctttgtgctgaccgtcagattgtgtcaagtcaggtgtgcaaattgaccacactcccaaagaatcatttaaaagtaaagtgacttctaagagacaaggaagtaggaacatttctgatattaaatatataaataatatggatacacatgtgtatatctgtatatggatcttaccatcataattcattttcttcatatcagcaaagtaatagtaatgtgggccaatgcattttggaaatgtcctcattatgtagaatggaatgtgaaaattatttttgttaaaacaggattttgccacaattatttaaatattatgtttgtgaactatctaagcatgagaaaatacaaagctttctttgtatctggctgatactcatttggatgattctgtgactcatagaacatgatgttaaatgagaccagactcaactgccaccagtccccagctgcagaccttcatccccttcatctcccactaggggctcgtggtctggaagaaacatctatcaagcaacacagccccttatcccagatagaaaagtgtctcaaatgcattctactgcgggacagtcagtaggatcattttcataaagcaaggacatcatatgtttctagaaattacaagcatataactttagcctacaatctcttattaaaaatttttaacaaaattgtattacaaatgcatttcatcagaactcaaatttaaatggtgtttgttttgggtttttatttataatgctgaagttattccatataagtatcaagttaaacacaattcattttgattataaactatttgactttttaaaatcttctgacacagtaaatatatatatcaagattgatgtatcaaaatttattgcacactttaaagtgtaaaatcattttttaaaatcttgaatccacaaataaagttctattctgattttaaaaaacaaaa

SEQ ID NO: 19800 - DNA, 6751 bp, Homo sapiens
  source 1..6751: mol_type = unassigned DNA
ggtcgctggaaatcaagtgctttgtaagtgaaggcattttgactacaagcgattcaagacattttggaaacgtcagtctctggaatgggtcgtctttttctttctatgatatctggtatctaatgttttacttaggataaagactactacttaatagctcttttaggcaccacaaatgattttttcttttgatgcagtgcagctgcttctagcctgtctacggacagagatctttgttatgactttcagcccttaacatgtttggaaatgagaacaaatggcacaaagcttacgattgcactttgcagccagaagaagcaatacttaccctttgtcagaaacctccggagatgacttggatagccatgttcacatgtgcttcaaaagaccaacacggatttcaacgtctaacgttgttcaaatgaagctgactcccagacagactgcactagctccgttaataaaggaaaacgttcagtctcaagaaagatcatctgttccctcatctgaaaatgttaataaaaagagcagctgtctacagatttcactacagccaacaaggtacagtggatatcttcagtctagcaatgtcttagctgatagtgatgatgcttcgtttacttgtatcttgaaggatggtatttacagtagtgctgtggtcgataatgaattgaatgctgtgaatgatggtcaccttgtaagcagtccagccatttgtagtggtagccttagtaacttttcaaccagtgataatgggtcttacagcagcaacggtagtgattttgggtcatgtgcaagtatcacaagtggaggttcatatactaacagtgtcatcagtgacagtagtagttatacttttccaccaagtgatgatacttttttgggtggaaacttaccttctgacagcacctccaatagaagtgtgccaaacaggaatactactccttgtgaaattttttcaagaagtacaagtacagatccttttgtccaggatgacttggaacatggattagagattatgaaattgccagtgagcaggaacacaaaaattccactaaaacgttactcctccttagtcatttttcctaggagtccttcaactacccgaccgacttctccaacaagtctgtgtactcttctgagcaaaggatcctatcaaacttcacaccagtttattatttctcctagtgaaattgcacataatgaggatggcactagtgctaaaggatttctttcaacagctgtcaatggacttcggttatctaaaacaatttgtacccccggagaagtaagagacatacggccgcttcacaggaagggctcgttacagaagaaaattgttctttcgaataatactcccagacagactgtctgtgaaaagtcatctgaaggatattcttgtgtttcagtgcatttcacccaacgaaaagcagctacattagactgtgaaacaacaaatggtgattgtaaaccagaaatgtcagaaattaagcttaattctgattcagagtatattaagctcatgcataggacatctgcatgtttgccatcctcccaaaatgtagattgtcaaataaatatcaatggagaattggaaagaccacattcacagatgaacaaaaaccatggtattttacgaagaagtatttcattgggaggagcttatccaaatatttcctgtctatccagccttaagcacaattgttctaaagggggaccatctcagttactcataaagtttgcatctggaaatgaaggtaaagtggataatttatcaagagacagcaacagagattgcacaaatgaactgtctaattcttgcaagacaagagatgatttcctaggtcaagtggatgttccactttatccattaccgacagaaaatccaagattggagagaccatatacatttaaggattttgttcttcatccaagaagtcacaaatcaagagttaaaggttatctgagactaaaaatgacttatttacctaaaaccagtggctcagaagatgataatgcagaacaggctgaggaattagagcaacaacaagaaccttctcctctacctccagggtgggaagagaggcaggatatccttggaaggacctattatgtaaaccatgaatctagaagaacacagtggaaaagaccaacccctcaggacaacctaacagatgctgagaatggcaacattcaactgcaagcacaacgtgcatttaccaccaggcggcagatatccgaggaaacagaaagtgttgacaaccgagagtcttccgagaactgggaaattataagagaagatgaagccaccatgtatagcaaccaggccttcccatcacctccaccgtcaagtaacttggatgttccaactcatcttgcagaagaattgaatgccagactcaccatttttggaaattcagccgtgagccagccagcatcgagctcaaatcattccagcagaagaggcagcttacaagcctatacttttgaggaacaacctacacttcctgtgcttttgcctacttcatctggattaccaccaggttgggaagaaaaacaagatgaaagaggaagatcatattatgtagatcacaattccagaacgactacttggacaaagcccactgtacaggccacagtggagaccagtcagctgacctcaagccagagttctgcaggccctcaatcacaagcctccaccagtgattcaggccagcaggtgacccagccatctgaaattgagcaaggattccttcctaaaggctgggaagtccggcatgcaccaaatgggaggcctttctttattgaccacaacactaaaaccaccacctgggaagatccaagattgaaaattccagcccatctgagaggaaagacatcacttgatacttccaatgatctagggcctttacctccaggatgggaagagagaactcacacagatggaagaatcttctacataaatcacaatataaaaagaacacaatgggaagatcctcggttggagaatgtagcaataactggaccagcagtgccctactccagggattacaaaagaaagtatgagttcttccgaagaaagttgaagaagcagaatgacattccaaacaaatttgaaatgaaacttcgccgagcaactgttcttgaagactcttaccggagaattatgggtgtcaagagagcagacttcctgaaggctcgactgtggattgagtttgatggtgaaaagggattggattatggaggagttgccagagaatggttcttcctgatctcaaaggaaatgtttaacccttattatgggttgtttgaatattctgctacggacaattataccctacagataaatccaaactctggattgtgtaacgaagatcacctctcttacttcaagtttattggtcgggtagctggaatggcagtttatcatggcaaactgttggatggttttttcatccgcccattttacaagatgatgcttcacaaaccaataacccttcatgatatggaatctgtggatagtgaatattacaattccctaagatggattcttgaaaatgacccaacagaattggacctcaggtttatcatagatgaagaactttttggacagacacatcaacatgagctgaaaaatggtggatcagaaatagttgtcaccaataagaacaaaaaggaatatatttatcttgtaatacaatggcgatttgtaaaccgaatccagaagcaaatggctgcttttaaagagggattctttgaactaataccacaggatctcatcaaaatttttgatgaaaatgaactagagcttcttatgtgtggactgggagatgttgatgtgaatgactggagggaacatacaaagtataaaaatggctacagtgcaaatcatcaggttatacagtggttttggaaggctgttttaatgatggattcagaaaaaagaataagattacttcagtttgtcactggcacatctcgggtgcctatgaatggatttgctgaactatacggttcaaatggaccacagtcatttacagttgaacagtggggtactcctgaaaagctgccaagagctcatacctgttttaatcgcctggacttgccaccttatgaatcatttgaagaattatgggataaacttcagatggcaattgaaaacacccagggctttgatggagttgattagattacaaataacaatctgtagtgtttttactgccatagttttataaccaaaatcttgacttaaaattttccggggaactactaaaatgtggccactgagtcttcccagatcttgaagaaaatcatataaaaagcatttgaagaaatagtacgacaacttatttttaatcacttttaaataatgtgttgcatttacacagttgtttcatgctgtctttagagttaggtgcctgcctaaagccaggcaccaccacacctggctttagagttcacacaataggatataagtcctgtatgacttaaatagtgaattttgtccttaacatttacctcttgtatagtatctgccaggcagttttttcttaaactactgagatgataactgtgaaatatttgtgatacgtgtcatgtgtgaaaagtttgatgcattttgagatggaaaactgaaatttggaaaaagaaatactttactattgagtaaactacaatatatttagtgctactcgcagctatttattattttgtagacctgccttatgcaccttactgcctagatttttgggaaaaaactttggaaagtgtgttacctatatttctagccaactaactcacagaaaaactgtttacttcttcactttcgaagtatttggcttttgttaatatgcagttttactaaacagatggttcataagacatgtgaagcaaattcatatttgcaatgggtaaaaagtattaaagcctttctcttgcctgcatatcctattgaccattggtatagtcatcactttttcatattttagtgtagttagaagaattccttcttcaaacattaaagatccacaaagcagtatttctaaatatgccttgaagaactaaatgaagtgtatagcacttgcctttactagatattctttacacttgtacaattatgtagtaaatgtatgtttacagggtttatcatgtttacagattaagctaatttctgtagtcgcatttttatatttttagtatcactctagtaaaaaaaccaaataatttgtttaaaataaccaaagagttgttataatgcataatttgtattaaatttattactatttcttatgccttttaaaatactgtttactatgaagacaatgtttttaattacaaatccagaattctgtaggcaaaatgctacagttcatatcttcctttaaccaaactgaagtacataaagaccatgtacatgtattcatcaaacgtttattgaatgctgcgtgcctagcgctgtgctatgctctggggtaagagttgtcagcttcagagaagctgagtcctgatcctcaaggaacttgcaaatgtgtctatgaatttgtaaaacaatcaaaagtaggcgtaagcagaataaggcaaaagggaaagtgttctaggttccagcacacctgcaaagataaagtgtgccaagactgtatttatatttcatacttatattgtttcatccttatattggaatgattatatagaaaatgctcttaaaaagattaaacctatttctcagtatggtatcttggtgatttaggaataattgtaaatatatgttacgaatcttcttaaatatatatatatacacaccctgtgagaactgtaaaaagtacctctggttcttggtttaagtttgttggggtataacatgatgagtactcattagcacctgatagaaatctgaaatgtgacagtagcaaaaccactttctactttccaaacaccacagcatcagcatggtttaggggaagcaattcacagattaatgtaccctgcgttttgtcttcaccattgtcaaccagcagtcaaggatgagcaccaggtatagtcctggtttgatatctcaccagccatgtgaactgaagcagcttacttaacctctctggattcatatttcttcatctgtcaaatgagagtaatcatgcccaccctcattgtcatgccagattgtcagaagttccagacagatgagaaagcaaaaagtactttgtaaagtgttatacaatcagaaggtgctttgtgctgaccgtcagattgtgtcaagtcaggtgtgcaaattgaccacactcccaaagaatcatttaaaagtaaagtgacttctaagagacaaggaagtaggaacatttctgatattaaatatataaataatatggatacacatgtgtatatctgtatatggatcttaccatcataattcattttcttcatatcagcaaagtaatagtaatgtgggccaatgcattttggaaatgtcctcattatgtagaatggaatgtgaaaattatttttgttaaaacaggattttgccacaattatttaaatattatgtttgtgaactatctaagcatgagaaaatacaaagctttctttgtatctggctgatactcatttggatgattctgtgactcatagaacatgatgttaaatgagaccagactcaactgccaccagtccccagctgcagaccttcatccccttcatctcccactaggggctcgtggtctggaagaaacatctatcaagcaacacagccccttatccc

SEQ ID NO: 19801 - DNA, 7235 bp, Homo sapiens
  source 1..7235: mol_type = unassigned DNA
gctgcagctgagctcagcttaaaggtcgctggaaatcaagtgctttgtaagtgaaggcattttgactacaagcgattcaagacattttggaaacgtcagtctctggaatgggtcgtctttttctttctatgatatctggtatctaatgttttacttaggataaagactactacttaatagctcttttaggcaccacaaatgattttttcttttgatgcagtgcagctgcttctagcctgtctacggacagagatctttgttatgactttcagcccttaacatgtttggaaatgagaacaaatggcacaaagcttacgattgcactttgcagccagaagaagcaatacttaccctttgtcagaaacctccggagatgacttggatagccatgttcacatgtgcttcaaaagaccaacacggatttcaacgtctaacgttgttcaaatgaagctgactcccagacagactgcactagctccgttaataaaggaaaacgttcagtctcaagaaagatcatctgttccctcatctgaaaatgttaataaaaagagcagctgtctacagatttcactacagccaacaaggtacagtggatatcttcagtctagcaatgtcttagctgatagtgatgatgcttcgtttacttgtatcttgaaggatggtatttacagtagtgctgtggtcgataatgaattgaatgctgtgaatgatggtcaccttgtaagcagtccagccatttgtagtggtagccttagtaacttttcaaccagtgataatgggtcttacagcagcaacggtagtgattttgggtcatgtgcaagtatcacaagtggaggttcatatactaacagtgtcatcagtgacagtagtagttatacttttccaccaagtgatgatacttttttgggtggaaacttaccttctgacagcacctccaatagaagtgtgccaaacaggaatactactccttgtgaaattttttcaagaagtacaagtacagatccttttgtccaggatgacttggaacatggattagagattatgaaattgccagtgagcaggaacacaaaaattccactaaaacgttactcctccttagtcatttttcctaggagtccttcaactacccgaccgacttctccaacaagtctgtgtactcttctgagcaaaggatcctatcaaacttcacaccagtttattatttctcctagtgaaattgcacataatgaggatggcactagtgctaaaggatttctttcaacagctgtcaatggacttcggttatctaaaacaatttgtacccccggagaagtaagagacatacggccgcttcacaggaagggctcgttacagaagaaaattgttctttcgaataatactcccagacagactgtctgtgaaaagtcatctgaaggatattcttgtgtttcagtgcatttcacccaacgaaaagcagctacattagactgtgaaacaacaaatggtgattgtaaaccagaaatgtcagaaattaagcttaattctgattcagagtatattaagctcatgcataggacatctgcatgtttgccatcctcccaaaatgtagattgtcaaataaatatcaatggagaattggaaagaccacattcacagatgaacaaaaaccatggtattttacgaagaagtatttcattgggaggagcttatccaaatatttcctgtctatccagccttaagcacaattgttctaaagggggaccatctcagttactcataaagtttgcatctggaaatgaaggtaaagtggataatttatcaagagacagcaacagagattgcacaaatgaactgtctaattcttgcaagacaagagatgatttcctaggtcaagtggatgttccactttatccattaccgacagaaaatccaagattggagagaccatatacatttaaggattttgttcttcatccaagaagtcacaaatcaagagttaaaggttatctgagactaaaaatgacttatttacctaaaaccagtggctcagaagatgataatgcagaacaggctgaggaattagagcctggctgggttgttttggaccaaccagatgctgcttgccatttgcagcaacaacaagaaccttctcctctacctccagggtgggaagagaggcaggatatccttggaaggacctattatgtaaaccatgaatctagaagaacacagtggaaaagaccaacccctcaggacaacctaacagatgctgagaatggcaacattcaactgcaagcacaacgtgcatttaccaccaggcggcagatatccgaggaaacagaaagtgttgacaaccgagagtcttccgagaactgggaaattataagagaagatgaagccaccatgtatagcaaccaggccttcccatcacctccaccgtcaagtaacttggatgttccaactcatcttgcagaagaattgaatgccagactcaccatttttggaaattcagccgtgagccagccagcatcgagctcaaatcattccagcagaagaggcagcttacaagcctatacttttgaggaacaacctacacttcctgtgcttttgcctacttcatctggattaccaccaggttgggaagaaaaacaagatgaaagaggaagatcatattatgtagatcacaattccagaacgactacttggacaaagcccactgtacaggccacagtggagaccagtcagctgacctcaagccagagttctgcaggccctcaatcacaagcctccaccagtgattcaggccagcaggtgacccagccatctgaaattgagcaaggattccttcctaaaggctgggaagtccggcatgcaccaaatgggaggcctttctttattgaccacaacactaaaaccaccacctgggaagatccaagattgaaaattccagcccatctgagaggaaagacatcacttgatacttccaatgatctagggcctttacctccaggatgggaagagagaactcacacagatggaagaatcttctacataaatcacaatataaaaagaacacaatgggaagatcctcggttggagaatgtagcaataactggaccagcagtgccctactccagggattacaaaagaaagtatgagttcttccgaagaaagttgaagaagcagaatgacattccaaacaaatttgaaatgaaacttcgccgagcaactgttcttgaagactcttaccggagaattatgggtgtcaagagagcagacttcctgaaggctcgactgtggattgagtttgatggtgaaaagggattggattatggaggagttgccagagaatggttcttcctgatctcaaaggaaatgtttaacccttattatgggttgtttgaatattctgctacggacaattataccctacagataaatccaaactctggattgtgtaacgaagatcacctctcttacttcaagtttattggtcgggtagctggaatggcagtttatcatggcaaactgttggatggttttttcatccgcccattttacaagatgatgcttcacaaaccaataacccttcatgatatggaatctgtggatagtgaatattacaattccctaagatggattcttgaaaatgacccaacagaattggacctcaggtttatcatagatgaagaactttttggacagacacatcaacatgagctgaaaaatggtggatcagaaatagttgtcaccaataagaacaaaaaggaatatatttatcttgtaatacaatggcgatttgtaaaccgaatccagaagcaaatggctgcttttaaagagggattctttgaactaataccacaggatctcatcaaaatttttgatgaaaatgaactagagcttcttatgtgtggactgggagatgttgatgtgaatgactggagggaacatacaaagtataaaaatggctacagtgcaaatcatcaggttatacagtggttttggaaggctgttttaatgatggattcagaaaaaagaataagattacttcagtttgtcactggcacatctcgggtgcctatgaatggatttgctgaactatacggttcaaatggaccacagtcatttacagttgaacagtggggtactcctgaaaagctgccaagagctcatacctgttttaatcgcctggacttgccaccttatgaatcatttgaagaattatgggataaacttcagatggcaattgaaaacacccagggctttgatggagttgattagattacaaataacaatctgtagtgtttttactgccatagttttataaccaaaatcttgacttaaaattttccggggaactactaaaatgtggccactgagtcttcccagatcttgaagaaaatcatataaaaagcatttgaagaaatagtacgacaacttatttttaatcacttttaaataatgtgttgcatttacacagttgtttcatgctgtctttagagttaggtgcctgcctaaagccaggcaccaccacacctggctttagagttcacacaataggatataagtcctgtatgacttaaatagtgaattttgtccttaacatttacctcttgtatagtatctgccaggcagttttttcttaaactactgagatgataactgtgaaatatttgtgatacgtgtcatgtgtgaaaagtttgatgcattttgagatggaaaactgaaatttggaaaaagaaatactttactattgagtaaactacaatatatttagtgctactcgcagctatttattattttgtagacctgccttatgcaccttactgcctagatttttgggaaaaaactttggaaagtgtgttacctatatttctagccaactaactcacagaaaaactgtttacttcttcactttcgaagtatttggcttttgttaatatgcagttttactaaacagatggttcataagacatgtgaagcaaattcatatttgcaatgggtaaaaagtattaaagcctttctcttgcctgcatatcctattgaccattggtatagtcatcactttttcatattttagtgtagttagaagaattccttcttcaaacattaaagatccacaaagcagtatttctaaatatgccttgaagaactaaatgaagtgtatagcacttgcctttactagatattctttacacttgtacaattatgtagtaaatgtatgtttacagggtttatcatgtttacagattaagctaatttctgtagtcgcatttttatatttttagtatcactctagtaaaaaaaccaaataatttgtttaaaataaccaaagagttgttataatgcataatttgtattaaatttattactatttcttatgccttttaaaatactgtttactatgaagacaatgtttttaattacaaatccagaattctgtaggcaaaatgctacagttcatatcttcctttaaccaaactgaagtacataaagaccatgtacatgtattcatcaaacgtttattgaatgctgcgtgcctagcgctgtgctatgctctggggtaagagttgtcagcttcagagaagctgagtcctgatcctcaaggaacttgcaaatgtgtctatgaatttgtaaaacaatcaaaagtaggcgtaagcagaataaggcaaaagggaaagtgttctaggttccagcacacctgcaaagataaagtgtgccaagactgtatttatatttcatacttatattgtttcatccttatattggaatgattatatagaaaatgctcttaaaaagattaaacctatttctcagtatggtatcttggtgatttaggaataattgtaaatatatgttacgaatcttcttaaatatatatatatacacaccctgtgagaactgtaaaaagtacctctggttcttggtttaagtttgttggggtataacatgatgagtactcattagcacctgatagaaatctgaaatgtgacagtagcaaaaccactttctactttccaaacaccacagcatcagcatggtttaggggaagcaattcacagattaatgtaccctgcgttttgtcttcaccattgtcaaccagcagtcaaggatgagcaccaggtatagtcctggtttgatatctcaccagccatgtgaactgaagcagcttacttaacctctctggattcatatttcttcatctgtcaaatgagagtaatcatgcccaccctcattgtcatgccagattgtcagaagttccagacagatgagaaagcaaaaagtactttgtaaagtgttatacaatcagaaggtgctttgtgctgaccgtcagattgtgtcaagtcaggtgtgcaaattgaccacactcccaaagaatcatttaaaagtaaagtgacttctaagagacaaggaagtaggaacatttctgatattaaatatataaataatatggatacacatgtgtatatctgtatatggatcttaccatcataattcattttcttcatatcagcaaagtaatagtaatgtgggccaatgcattttggaaatgtcctcattatgtagaatggaatgtgaaaattatttttgttaaaacaggattttgccacaattatttaaatattatgtttgtgaactatctaagcatgagaaaatacaaagctttctttgtatctggctgatactcatttggatgattctgtgactcatagaacatgatgttaaatgagaccagactcaactgccaccagtccccagctgcagaccttcatccccttcatctcccactaggggctcgtggtctggaagaaacatctatcaagcaacacagccccttatcccagatagaaaagtgtctcaaatgcattctactgcgggacagtcagtaggatcattttcataaagcaaggacatcatatgtttctagaaattacaagcatataactttagcctacaatctcttattaaaaatttttaacaaaattgtattacaaatgcatttcatcagaactcaaatttaaatggtgtttgttttgggtttttatttataatgctgaagttattccatataagtatcaagttaaacacaattcattttgattataaactatttgactttttaaaatcttctgacacagtaaatatatatatcaagattgatgtatcaaaatttattgcacactttaaagtgtaaaatcattttttaaaatcttgaatccacaaataaagttctattctgattttaaaaaacaaaa

SEQ ID NO: 19802 - DNA, 8161 bp, Homo sapiens
  source 1..8161: mol_type = unassigned DNA
gagaggcgccggggctgccgcccggtgctcggcgcgctctcgggagccgcccgcccgctggtcccgcagccttccgggaggaagcggtgccggcagcgtccagggcgcgctctcgggcaccctcacctgccggcgcccggccgcttacccggcagggcgtgcgcagggtagggtgcgggaccggggggacctggaggcagaggggagaaccggccgtccgcgccgcagcacagccgctgggagcgcctcagaccccgcgcggggcgccggctccatggcgaccgggctcggggagccggtctatggactttccgaagacgagggagagtcccgtattctcagagtaaaagttgtttctggaattgatctcgccaaaaaggacatctttggagccagtgatccgtatgtgaaactttcattgtacgtagcggatgagaatagagaacttgctttggtccagacaaaaacaattaaaaagacactgaacccaaaatggaatgaagaattttatttcagggtaaacccatctaatcacagactcctatttgaagtatttgacgaaaatagactgacacgagacgacttcctgggccaggtggacgtgccccttagtcaccttccgacagaagatccaaccatggagcgaccctatacatttaaggactttctcctcagaccaagaagtcataagtctcgagttaagggatttttgcgattgaaaatggcctatatgccaaaaaatggaggtcaagatgaagaaaacagtgaccagagggatgacatggagcatggatgggaagttgttgactcaaatgactcggcttctcagcaccaagaggaacttcctcctcctcctctgcctcccgggtgggaagaaaaagtggacaatttaggccgaacttactatgtcaaccacaacaaccggaccactcagtggcacagaccaagcctgatggacgtgtcctcggagtcggacaataacatcagacagatcaaccaggaggcagcacaccggcgcttccgctcccgcaggcacatcagcgaagacttggagcccgagccctcggagggcggggatgtccccgagccttgggagaccatttcagaggaagtgaatatcgctggagactctctcggtctggctctgcccccaccaccggcctccccaggatctcggaccagccctcaggagctgtcagaggaactaagcagaaggcttcagatcactccagactccaatggggaacagttcagctctttgattcaaagagaaccctcctcaaggttgaggtcatgcagtgtcaccgacgcagttgcagaacagggccatctaccaccgggtgccaaggactcacccgtacgtcgggctgtgaaagacaccctttccaacccacagtccccacagccatcaccttacaactcccccaaaccacaacacaaagtcacacagagcttcttgccacccggctgggaaatgaggatagcgccaaacggccggcccttcttcattgatcataacacaaagactacaacctgggaagatccacgtttgaaatttccagtacatatgcggtcaaagacatctttaaaccccaatgaccttggcccccttcctcctggctgggaagaaagaattcacttggatggccgaacgttttatattgatcataatagcaaaattactcagtgggaagacccaagactgcagaacccagctattactggtccggctgtcccttactccagagaatttaagcagaaatatgactacttcaggaagaaattaaagaaacctgctgatatccccaataggtttgaaatgaaacttcacagaaataacatatttgaagagtcctatcggagaattatgtccgtgaaaagaccagatgtcctaaaagctagactgtggattgagtttgaatcagagaaaggtcttgactatgggggtgtggccagagaatggttcttcttactgtccaaagagatgttcaacccctactacggcctctttgagtactctgccacggacaactacacccttcagatcaaccctaattcaggcctctgtaatgaggatcatttgtcctacttcacttttattggaagagttgctggtctggccgtatttcatgggaagctcttagatggtttcttcattagaccattttacaagatgatgttgggaaagcagataaccctgaatgacatggaatctgtggatagtgaatattacaactctttgaaatggatcctggagaatgaccctactgagctggacctcatgttctgcatagacgaagaaaactttggacagacatatcaagtggatttgaagcccaatgggtcagaaataatggtcacaaatgaaaacaaaagggaatatatcgacttagtcatccagtggagatttgtgaacagggtccagaagcagatgaacgccttcttggagggattcacagaactacttcctattgatttgattaaaatttttgatgaaaatgagctggagttgctcatgtgcggcctcggtgatgtggatgtgaatgactggagacagcattctatttacaagaacggctactgcccaaaccaccccgtcattcagtggttctggaaggctgtgctactcatggacgccgaaaagcgtatccggttactgcagtttgtcacagggacatcgcgagtacctatgaatggatttgccgaactttatggttccaatggtcctcagctgtttacaatagagcaatggggcagtcctgagaaactgcccagagctcacacatgctttaatcgccttgacttacctccatatgaaacctttgaagatttacgagagaaacttctcatggccgtggaaaatgctcaaggatttgaaggggtggattaagcaccctgtgcctcgggggtggttgttcttcaagcaagttctgcttgcacttttgcatttgcctaacagacttttgcagaggcgatggcagagagcagctgcaggcatggtccctggagccgagccttcaccacgcactcgtccaagttcggatgcgggaacctggtcccagcttgagttcctgcctttcccaccacaaattatcaactggttgatgtgtacactaattacatttcaggaggacttaatgctatttatgttgtgcctctgcaggcaaagcccttaataaatattttacatcctttctaatgacaatgaatggaattaatcactcaacaggtatagtattacgactcatgtttactttttaaaatgatttagaccgattttcagattttatttcgttatgattaaagatgtctcatgtacttggaaaagtgagcattttttttttttttgtatttcactttcataccaggcttaatgtcaatgacatttttatttttgaagtactctgacacctccaccctctactttattagaattggaaggcaaatttttgtccaaaaacctacagacaagtactttgagagaatttccaatataatattagacataatgataattttttccatactcagaatgaaaaactggatattacgtttttgttttggggtttttttgtacaaatttagctaatagctacaggctgagagaattgtaacatagcatgacaaattttgtgttgacttgaaaggaatcacaccattattccttagaagtaattacatgtgttctaacacatttgagacagggttggactcccatttctcatccgagaaattacttaacccttcctggcgctgtacagtcatcttttattctatttcctctttgctgtttgtagtagagacattttgaatgaaacttggcactgcttgattcaaaactgtggaaaccagatctgtttagtctcctgtttgtatgcgtttgctaatggtagctaaataaccagtttttgttgtaaatgcaccaattctgaaggcactttatgtactacatggaggtcatatctggttttgtttttatttttttatcatgaacattaaatgtgatgatgatttcttttccctgcacacatctttccggtgcaatatctatcaattgtgaatctggctgctggtgtataaaaacctggatgtaaagctgagcctacagacctgtcctcaccaactgttttgtgatttctactcaactacaaagatttatttaatgtactcttaatctaactgagttttgttaccaatgacctgttgcatgcttcaataccgtgtactgcctgagttgtgcctcttgtgtgctagattaaaagtgagacagagacttgacttgatcctctgagctcaagctattgagctggtagtggcagaggactgagggtacctgcacagtttgattcttttccacgtgtaagtctccattgcagaattgtcgtgctttgagaaaacacctgaggcagtgtgggagttgaacgaccctgctgtcctttttaacctgtgttgtcctagaccctgtcggggcagtcaggggacactagagatttgatctcatgcgagtcatcaataggacaaaaaagttgtggtttggggaggtctgtttgttacataaaaaggacctttcggtgtaagaaattgccgtttttaccctgccctggctggcatgtgagaagccatggaaggttgtggttgtaaatgagttgtctaaaggggtgcagaggcctgaggtttctaaaagaaggtagatttctacagagctgagtgttggttcctttttcttattggttgaaaattacctggtagtgatcagaaaacttagatgctatgtaactaaaaaaaaaaaaaaaaaaaaaaaaaaaaaaaaaaaaattcccgctcatgagttttgactattggtgagatgttttccgctacagttaacatgacaaatgtctcagtggcaaaaatcccctttttgtaagcccccatagtctagaggcagttttctttttaagaatcatgccagagcctgagtcgagcagtatgctttcttggtttttgagagtaattgtgtaattgtagagggagaaatccaattctaacctaagaactgggattcttctgtcatcttgtaaaccgtatattgaaaaaaacagaatgtcactaaatgcatattaagtcaagtattggaaagtataaaagaaaaatcattctgacaatttctaagccagaagcaaacaagaattactgaaatctaccccatgaatacttggaaggcagtaattgtgagtgacacctcagttcatcaaccccttaataatatcagcttaattttaatgacaactaaatatgctgaagtgaggatttagtattttttaaaaaagcaaaacaaggttcagtagtcctcagcaattctccaagtttctctctttgcctaaaatggtcatagatcttgatttctctgaatcgtgatgaccacacccagtcatcttcacagcataattgcaggtggcagtaaagagagtgtgctgggtaaggagcagttgctgggtcattccttgggccccgacctgcccggggagtagccctgggggagagagggcagtgttgcctatcccagaggtcccagcagtcacactgctctgcaggccgggctctctttatagccagagaaatcaccttaatgcagtctctttagttgtctgctgaagctgtagttattatgggccacttacatgaggctgagaagtacgtgccggagctcacacactgcctgttgcggttctcttaacatcagttatcacagctgcctgtgggtcccgggtatttccattcctgccccttgttggcccgaggaaggatgtggaaagagcacctggtgggatgaaggtccaacagcctgtgcctctccactgctggccctggagccggcagcagtgaggcattcattgtctgtgttgcggtgtattcccagcttcagtgctcttttcctttttgcctgaaatgtttatgcttctctgcagccagtcctctaacaaatctcaagaacaaaggtaagacacttggtttttgtttccaggacccttcagaaggtgacatcagatattccctaaattcagacaatgagggatacagagcgacttggcatgtattatttctcccatgtaaggacaaagggacagattattattgttatttctgagacagagtcttgctctgtagctcaggctggagtgcagtggctcaatctcagctcaccacaacctctgcctcctggcttcaagcgattcttctgcctcagcctccccgaatagttgggattacaggcacccaccaccacgcctggctaatttttgtatttttagtagagatggtttcaccatgctggccaggctggtcttgaactcctgacctcaggtgatcctcccgcctcagccttccaaagtgctgggattacaagcatgagccaccgcacccggcctcacagtgacagattctgagaaacagcatgcaaaacatttgaaccattttctacatctcccattgttgcatagagagtgtgcaccgctgctatcttgccagatccacactggtcctcccgaaagccaggttcatacacagcaactttttaattattctaacagttacccattaacagtcgactcctgtatttctgagagtcttgtactcacctctgaaatttaaaaacgtataaagagagcctgggttaatcagttctgcagcccctacgtgacactgtgctagttctccttcttctgtctcctccttaccctggccctgcacccctgtacttaagagggagaggtgggaggtgctgtctggtatcatttgctgcctcgccagtagagggtgccgctgtgcagggtaactgcccgcctgctcccttcctgacctcccctgaccccgaagatcactacctctgtcattcaggcattggggtacatcctgataagtcgtgtcagaactgccaatttcaggactgagatgtgtttttaaaaaacaaatccttataaactccactttgtactttagattttaaaactggggaaaaatgtgatattctttggaccacttttttaatttatataagccttaatgaacagtgtctatacatttgcatacacacacccccaccccagagtgttctcagtatgtcagagaaagtgccacagcattaggacgggagcttggagaacgttttctagaaaagggttagcttcctgttggcatgaaattttccaagcaaacctcattaaacatctgttgtttgttaaagatgttccactgaaagcaacgcatgtttcaaaggcacgtctttccgttcgttggttttctgtgtgtaaggagtagcattgctgttggcgcctaacctcgcgtgcactgcattctcaaccccgtaccagtgcatcatcagaagccttcctcgtgaccataactctgtgtctgcagatatgtgttcccgtgtaagccagttttccccttttactcagactgatttcacctagattgtcacggtttccttcatgttaactttgcgtgactttgttcttcctttactactctgtatgtaatatatatacatatatacgtacatatgctgtccaaatatatttgtatatatttgtatagcatttttacacctttattgagtaatctggtttcgaaaggaggtgagagtttagtcccttctgcagttttctccaagctgtgtcctgtgaatttcaacccttggagcctaagaaaaccctaggaagatgatgttaatttgctgtcatttcctaattcaggatctatcatcaaatgaaacatgaaaaaaacagtgacttttaaggtgaaaagagtttcaagcattccaaataaattatcaatgtttcataactttttattataaacccacctcctaataggaagccaagtactatttgatacagtggtaaaaaccaaactaccttgaatttttttaaggcaacttatgaataatgctcattttcacagtcagaatagctttaaaatatggttgaatttgatacacacaggaagttttcttgaagaacaatcctttcgcttttcttttttcttgagagatctaaagagaaactgtagattgttttcctgacagcaaaagactaatgtgacaaaatgaagtcattgtaaagaagcgatgcaacttgtcaaatatttaataaagaattatggaagctggaacattttctac

SEQ ID NO: 19803 - DNA, 8416 bp, Homo sapiens
  source 1..8416: mol_type = unassigned DNA
gagaggcgccggggctgccgcccggtgctcggcgcgctctcgggagccgcccgcccgctggtcccgcagccttccgggaggaagcggtgccggcagcgtccagggcgcgctctcgggcaccctcacctgccggcgcccggccgcttacccggcagggcgtgcgcagggtagggtgcgggaccggggggacctggaggcagaggggagaaccggccgtccgcgccgcagcacagccgctgggagcgcctcagaccccgcgcggggcgccggctccatggcgaccgggctcggggagccggtctatggactttccgaagacgagggagagtcccgtattctcagagtaaaagttgtttctggaattgatctcgccaaaaaggacatctttggagccagtgatccgtatgtgaaactttcattgtacgtagcggatgagaatagagaacttgctttggtccagacaaaaacaattaaaaagacactgaacccaaaatggaatgaagaattttatttcagggtaaacccatctaatcacagactcctatttgaagtatttgacgaaaatagactgacacgagacgacttcctgggccaggtggacgtgccccttagtcaccttccgacagaagatccaaccatggagcgaccctatacatttaaggactttctcctcagaccaagaagtcataagtctcgagttaagggatttttgcgattgaaaatggcctatatgccaaaaaatggaggtcaagatgaagaaaacagtgaccagagggatgacatggagcatggatgggaagttgttgactcaaatgactcggcttctcagcaccaagaggaacttcctcctcctcctctgcctcccgggtgggaagaaaaagtggacaatttaggccgaacttactatgtcaaccacaacaaccggaccactcagtggcacagaccaagcctgatggacgtgtcctcggagtcggacaataacatcagacagatcaaccaggaggcagcacaccggcgcttccgctcccgcaggcacatcagcgaagacttggagcccgagccctcggagggcggggatgtccccgagccttgggagaccatttcagaggaagtgaatatcgctggagactctctcggtctggctctgcccccaccaccggcctccccaggatctcggaccagccctcaggagctgtcagaggaactaagcagaaggcttcagatcactccagactccaatggggaacagttcagctctttgattcaaagagaaccctcctcaaggttgaggtcatgcagtgtcaccgacgcagttgcagaacagggccatctaccaccgccatcagtggcctatgtacataccacgccgggtctgccttcaggctgggaagaaagaaaagatgctaaggggcgcacatactatgtcaatcataacaatcgaaccacaacttggactcgacctatcatgcagcttgcagaagatggtgcgtccggatcagccacaaacagtaacaaccatctaatcgagcctcagatccgccggcctcgtagcctcagctcgccaacagtaactttatctgccccgctggagggtgccaaggactcacccgtacgtcgggctgtgaaagacaccctttccaacccacagtccccacagccatcaccttacaactcccccaaaccacaacacaaagtcacacagagcttcttgccacccggctgggaaatgaggatagcgccaaacggccggcccttcttcattgatcataacacaaagactacaacctgggaagatccacgtttgaaatttccagtacatatgcggtcaaagacatctttaaaccccaatgaccttggcccccttcctcctggctgggaagaaagaattcacttggatggccgaacgttttatattgatcataatagcaaaattactcagtgggaagacccaagactgcagaacccagctattactggtccgaaagctgtcccttactccagagaatttaagcagaaatatgactacttcaggaagaaattaaagaaacctgctgatatccccaataggtttgaaatgaaacttcacagaaataacatatttgaagagtcctatcggagaattatgtccgtgaaaagaccagatgtcctaaaagctagactgtggattgagtttgaatcagagaaaggtcttgactatgggggtgtggccagagaatggttcttcttactgtccaaagagatgttcaacccctactacggcctctttgagtactctgccacggacaactacacccttcagatcaaccctaattcaggcctctgtaatgaggatcatttgtcctacttcacttttattggaagagttgctggtctggccgtatttcatgggaagctcttagatggtttcttcattagaccattttacaagatgatgttgggaaagcagataaccctgaatgacatggaatctgtggatagtgaatattacaactctttgaaatggatcctggagaatgaccctactgagctggacctcatgttctgcatagacgaagaaaactttggacagacatatcaagtggatttgaagcccaatgggtcagaaataatggtcacaaatgaaaacaaaagggaatatatcgacttagtcatccagtggagatttgtgaacagggtccagaagcagatgaacgccttcttggagggattcacagaactacttcctattgatttgattaaaatttttgatgaaaatgagctggagttgctcatgtgcggcctcggtgatgtggatgtgaatgactggagacagcattctatttacaagaacggctactgcccaaaccaccccgtcattcagtggttctggaaggctgtgctactcatggacgccgaaaagcgtatccggttactgcagtttgtcacagggacatcgcgagtacctatgaatggatttgccgaactttatggttccaatggtcctcagctgtttacaatagagcaatggggcagtcctgagaaactgcccagagctcacacatgctttaatcgccttgacttacctccatatgaaacctttgaagatttacgagagaaacttctcatggccgtggaaaatgctcaaggatttgaaggggtggattaagcaccctgtgcctcgggggtggttgttcttcaagcaagttctgcttgcacttttgcatttgcctaacagacttttgcagaggcgatggcagagagcagctgcaggcatggtccctggagccgagccttcaccacgcactcgtccaagttcggatgcgggaacctggtcccagcttgagttcctgcctttcccaccacaaattatcaactggttgatgtgtacactaattacatttcaggaggacttaatgctatttatgttgtgcctctgcaggcaaagcccttaataaatattttacatcctttctaatgacaatgaatggaattaatcactcaacaggtatagtattacgactcatgtttactttttaaaatgatttagaccgattttcagattttatttcgttatgattaaagatgtctcatgtacttggaaaagtgagcattttttttttttttgtatttcactttcataccaggcttaatgtcaatgacatttttatttttgaagtactctgacacctccaccctctactttattagaattggaaggcaaatttttgtccaaaaacctacagacaagtactttgagagaatttccaatataatattagacataatgataattttttccatactcagaatgaaaaactggatattacgtttttgttttggggtttttttgtacaaatttagctaatagctacaggctgagagaattgtaacatagcatgacaaattttgtgttgacttgaaaggaatcacaccattattccttagaagtaattacatgtgttctaacacatttgagacagggttggactcccatttctcatccgagaaattacttaacccttcctggcgctgtacagtcatcttttattctatttcctctttgctgtttgtagtagagacattttgaatgaaacttggcactgcttgattcaaaactgtggaaaccagatctgtttagtctcctgtttgtatgcgtttgctaatggtagctaaataaccagtttttgttgtaaatgcaccaattctgaaggcactttatgtactacatggaggtcatatctggttttgtttttatttttttatcatgaacattaaatgtgatgatgatttcttttccctgcacacatctttccggtgcaatatctatcaattgtgaatctggctgctggtgtataaaaacctggatgtaaagctgagcctacagacctgtcctcaccaactgttttgtgatttctactcaactacaaagatttatttaatgtactcttaatctaactgagttttgttaccaatgacctgttgcatgcttcaataccgtgtactgcctgagttgtgcctcttgtgtgctagattaaaagtgagacagagacttgacttgatcctctgagctcaagctattgagctggtagtggcagaggactgagggtacctgcacagtttgattcttttccacgtgtaagtctccattgcagaattgtcgtgctttgagaaaacacctgaggcagtgtgggagttgaacgaccctgctgtcctttttaacctgtgttgtcctagaccctgtcggggcagtcaggggacactagagatttgatctcatgcgagtcatcaataggacaaaaaagttgtggtttggggaggtctgtttgttacataaaaaggacctttcggtgtaagaaattgccgtttttaccctgccctggctggcatgtgagaagccatggaaggttgtggttgtaaatgagttgtctaaaggggtgcagaggcctgaggtttctaaaagaaggtagatttctacagagctgagtgttggttcctttttcttattggttgaaaattacctggtagtgatcagaaaacttagatgctatgtaactaaaaaaaaaaaaaaaaaaaaaaaaaaaaaaaaaaaaattcccgctcatgagttttgactattggtgagatgttttccgctacagttaacatgacaaatgtctcagtggcaaaaatcccctttttgtaagcccccatagtctagaggcagttttctttttaagaatcatgccagagcctgagtcgagcagtatgctttcttggtttttgagagtaattgtgtaattgtagagggagaaatccaattctaacctaagaactgggattcttctgtcatcttgtaaaccgtatattgaaaaaaacagaatgtcactaaatgcatattaagtcaagtattggaaagtataaaagaaaaatcattctgacaatttctaagccagaagcaaacaagaattactgaaatctaccccatgaatacttggaaggcagtaattgtgagtgacacctcagttcatcaaccccttaataatatcagcttaattttaatgacaactaaatatgctgaagtgaggatttagtattttttaaaaaagcaaaacaaggttcagtagtcctcagcaattctccaagtttctctctttgcctaaaatggtcatagatcttgatttctctgaatcgtgatgaccacacccagtcatcttcacagcataattgcaggtggcagtaaagagagtgtgctgggtaaggagcagttgctgggtcattccttgggccccgacctgcccggggagtagccctgggggagagagggcagtgttgcctatcccagaggtcccagcagtcacactgctctgcaggccgggctctctttatagccagagaaatcaccttaatgcagtctctttagttgtctgctgaagctgtagttattatgggccacttacatgaggctgagaagtacgtgccggagctcacacactgcctgttgcggttctcttaacatcagttatcacagctgcctgtgggtcccgggtatttccattcctgccccttgttggcccgaggaaggatgtggaaagagcacctggtgggatgaaggtccaacagcctgtgcctctccactgctggccctggagccggcagcagtgaggcattcattgtctgtgttgcggtgtattcccagcttcagtgctcttttcctttttgcctgaaatgtttatgcttctctgcagccagtcctctaacaaatctcaagaacaaaggtaagacacttggtttttgtttccaggacccttcagaaggtgacatcagatattccctaaattcagacaatgagggatacagagcgacttggcatgtattatttctcccatgtaaggacaaagggacagattattattgttatttctgagacagagtcttgctctgtagctcaggctggagtgcagtggctcaatctcagctcaccacaacctctgcctcctggcttcaagcgattcttctgcctcagcctccccgaatagttgggattacaggcacccaccaccacgcctggctaatttttgtatttttagtagagatggtttcaccatgctggccaggctggtcttgaactcctgacctcaggtgatcctcccgcctcagccttccaaagtgctgggattacaagcatgagccaccgcacccggcctcacagtgacagattctgagaaacagcatgcaaaacatttgaaccattttctacatctcccattgttgcatagagagtgtgcaccgctgctatcttgccagatccacactggtcctcccgaaagccaggttcatacacagcaactttttaattattctaacagttacccattaacagtcgactcctgtatttctgagagtcttgtactcacctctgaaatttaaaaacgtataaagagagcctgggttaatcagttctgcagcccctacgtgacactgtgctagttctccttcttctgtctcctccttaccctggccctgcacccctgtacttaagagggagaggtgggaggtgctgtctggtatcatttgctgcctcgccagtagagggtgccgctgtgcagggtaactgcccgcctgctcccttcctgacctcccctgaccccgaagatcactacctctgtcattcaggcattggggtacatcctgataagtcgtgtcagaactgccaatttcaggactgagatgtgtttttaaaaaacaaatccttataaactccactttgtactttagattttaaaactggggaaaaatgtgatattctttggaccacttttttaatttatataagccttaatgaacagtgtctatacatttgcatacacacacccccaccccagagtgttctcagtatgtcagagaaagtgccacagcattaggacgggagcttggagaacgttttctagaaaagggttagcttcctgttggcatgaaattttccaagcaaacctcattaaacatctgttgtttgttaaagatgttccactgaaagcaacgcatgtttcaaaggcacgtctttccgttcgttggttttctgtgtgtaaggagtagcattgctgttggcgcctaacctcgcgtgcactgcattctcaaccccgtaccagtgcatcatcagaagccttcctcgtgaccataactctgtgtctgcagatatgtgttcccgtgtaagccagttttccccttttactcagactgatttcacctagattgtcacggtttccttcatgttaactttgcgtgactttgttcttcctttactactctgtatgtaatatatatacatatatacgtacatatgctgtccaaatatatttgtatatatttgtatagcatttttacacctttattgagtaatctggtttcgaaaggaggtgagagtttagtcccttctgcagttttctccaagctgtgtcctgtgaatttcaacccttggagcctaagaaaaccctaggaagatgatgttaatttgctgtcatttcctaattcaggatctatcatcaaatgaaacatgaaaaaaacagtgacttttaaggtgaaaagagtttcaagcattccaaataaattatcaatgtttcataactttttattataaacccacctcctaataggaagccaagtactatttgatacagtggtaaaaaccaaactaccttgaatttttttaaggcaacttatgaataatgctcattttcacagtcagaatagctttaaaatatggttgaatttgatacacacaggaagttttcttgaagaacaatcctttcgcttttcttttttcttgagagatctaaagagaaactgtagattgttttcctgacagcaaaagactaatgtgacaaaatgaagtcattgtaaagaagcgatgcaacttgtcaaatatttaataaagaattatggaagctggaacattttctac

SEQ ID NO: 19804 - DNA, 8281 bp, Homo sapiens
  source 1..8281: mol_type = unassigned DNA
gagaggcgccggggctgccgcccggtgctcggcgcgctctcgggagccgcccgcccgctggtcccgcagccttccgggaggaagcggtgccggcagcgtccagggcgcgctctcgggcaccctcacctgccggcgcccggccgcttacccggcagggcgtgcgcagggtagggtgcgggaccggggggacctggaggcagaggggagaaccggccgtccgcgccgcagcacagccgctgggagcgcctcagaccccgcgcggggcgccggctccatggcgaccgggctcggggagccggtctatggactttccgaagacgagggagagtcccgtattctcagagtaaaagttgtttctggaattgatctcgccaaaaaggacatctttggagccagtgatccgtatgtgaaactttcattgtacgtagcggatgagaatagagaacttgctttggtccagacaaaaacaattaaaaagacactgaacccaaaatggaatgaagaattttatttcagggtaaacccatctaatcacagactcctatttgaagtatttgacgaaaatagactgacacgagacgacttcctgggccaggtggacgtgccccttagtcaccttccgacagaagatccaaccatggagcgaccctatacatttaaggactttctcctcagaccaagaagtcataagtctcgagttaagggatttttgcgattgaaaatggcctatatgccaaaaaatggaggtcaagatgaagaaaacagtgaccagagggatgacatggagcatggatgggaagttgttgactcaaatgactcggcttctcagcaccaagaggaacttcctcctcctcctctgcctcccgggtgggaagaaaaagtggacaatttaggccgaacttactatgtcaaccacaacaaccggaccactcagtggcacagaccaagcctgatggacgtgtcctcggagtcggacaataacatcagacagatcaaccaggaggcagcacaccggcgcttccgctcccgcaggcacatcagcgaagacttggagcccgagccctcggagggcggggatgtccccgagccttgggagaccatttcagaggaagtgaatatcgctggagactctctcggtctggctctgcccccaccaccggcctccccaggatctcggaccagccctcaggagctgtcagaggaactaagcagaaggcttcagatcactccagactccaatggggaacagttcagctctttgattcaaagagaaccctcctcaaggttgaggtcatgcagtgtcaccgacgcagttgcagaacagggccatctaccaccgcttgcagaagatggtgcgtccggatcagccacaaacagtaacaaccatctaatcgagcctcagatccgccggcctcgtagcctcagctcgccaacagtaactttatctgccccgctggagggtgccaaggactcacccgtacgtcgggctgtgaaagacaccctttccaacccacagtccccacagccatcaccttacaactcccccaaaccacaacacaaagtcacacagagcttcttgccacccggctgggaaatgaggatagcgccaaacggccggcccttcttcattgatcataacacaaagactacaacctgggaagatccacgtttgaaatttccagtacatatgcggtcaaagacatctttaaaccccaatgaccttggcccccttcctcctggctgggaagaaagaattcacttggatggccgaacgttttatattgatcataatagcaaaattactcagtgggaagacccaagactgcagaacccagctattactggtccggctgtcccttactccagagaatttaagcagaaatatgactacttcaggaagaaattaaagaaacctgctgatatccccaataggtttgaaatgaaacttcacagaaataacatatttgaagagtcctatcggagaattatgtccgtgaaaagaccagatgtcctaaaagctagactgtggattgagtttgaatcagagaaaggtcttgactatgggggtgtggccagagaatggttcttcttactgtccaaagagatgttcaacccctactacggcctctttgagtactctgccacggacaactacacccttcagatcaaccctaattcaggcctctgtaatgaggatcatttgtcctacttcacttttattggaagagttgctggtctggccgtatttcatgggaagctcttagatggtttcttcattagaccattttacaagatgatgttgggaaagcagataaccctgaatgacatggaatctgtggatagtgaatattacaactctttgaaatggatcctggagaatgaccctactgagctggacctcatgttctgcatagacgaagaaaactttggacagacatatcaagtggatttgaagcccaatgggtcagaaataatggtcacaaatgaaaacaaaagggaatatatcgacttagtcatccagtggagatttgtgaacagggtccagaagcagatgaacgccttcttggagggattcacagaactacttcctattgatttgattaaaatttttgatgaaaatgagctggagttgctcatgtgcggcctcggtgatgtggatgtgaatgactggagacagcattctatttacaagaacggctactgcccaaaccaccccgtcattcagtggttctggaaggctgtgctactcatggacgccgaaaagcgtatccggttactgcagtttgtcacagggacatcgcgagtacctatgaatggatttgccgaactttatggttccaatggtcctcagctgtttacaatagagcaatggggcagtcctgagaaactgcccagagctcacacatgctttaatcgccttgacttacctccatatgaaacctttgaagatttacgagagaaacttctcatggccgtggaaaatgctcaaggatttgaaggggtggattaagcaccctgtgcctcgggggtggttgttcttcaagcaagttctgcttgcacttttgcatttgcctaacagacttttgcagaggcgatggcagagagcagctgcaggcatggtccctggagccgagccttcaccacgcactcgtccaagttcggatgcgggaacctggtcccagcttgagttcctgcctttcccaccacaaattatcaactggttgatgtgtacactaattacatttcaggaggacttaatgctatttatgttgtgcctctgcaggcaaagcccttaataaatattttacatcctttctaatgacaatgaatggaattaatcactcaacaggtatagtattacgactcatgtttactttttaaaatgatttagaccgattttcagattttatttcgttatgattaaagatgtctcatgtacttggaaaagtgagcattttttttttttttgtatttcactttcataccaggcttaatgtcaatgacatttttatttttgaagtactctgacacctccaccctctactttattagaattggaaggcaaatttttgtccaaaaacctacagacaagtactttgagagaatttccaatataatattagacataatgataattttttccatactcagaatgaaaaactggatattacgtttttgttttggggtttttttgtacaaatttagctaatagctacaggctgagagaattgtaacatagcatgacaaattttgtgttgacttgaaaggaatcacaccattattccttagaagtaattacatgtgttctaacacatttgagacagggttggactcccatttctcatccgagaaattacttaacccttcctggcgctgtacagtcatcttttattctatttcctctttgctgtttgtagtagagacattttgaatgaaacttggcactgcttgattcaaaactgtggaaaccagatctgtttagtctcctgtttgtatgcgtttgctaatggtagctaaataaccagtttttgttgtaaatgcaccaattctgaaggcactttatgtactacatggaggtcatatctggttttgtttttatttttttatcatgaacattaaatgtgatgatgatttcttttccctgcacacatctttccggtgcaatatctatcaattgtgaatctggctgctggtgtataaaaacctggatgtaaagctgagcctacagacctgtcctcaccaactgttttgtgatttctactcaactacaaagatttatttaatgtactcttaatctaactgagttttgttaccaatgacctgttgcatgcttcaataccgtgtactgcctgagttgtgcctcttgtgtgctagattaaaagtgagacagagacttgacttgatcctctgagctcaagctattgagctggtagtggcagaggactgagggtacctgcacagtttgattcttttccacgtgtaagtctccattgcagaattgtcgtgctttgagaaaacacctgaggcagtgtgggagttgaacgaccctgctgtcctttttaacctgtgttgtcctagaccctgtcggggcagtcaggggacactagagatttgatctcatgcgagtcatcaataggacaaaaaagttgtggtttggggaggtctgtttgttacataaaaaggacctttcggtgtaagaaattgccgtttttaccctgccctggctggcatgtgagaagccatggaaggttgtggttgtaaatgagttgtctaaaggggtgcagaggcctgaggtttctaaaagaaggtagatttctacagagctgagtgttggttcctttttcttattggttgaaaattacctggtagtgatcagaaaacttagatgctatgtaactaaaaaaaaaaaaaaaaaaaaaaaaaaaaaaaaaaaaattcccgctcatgagttttgactattggtgagatgttttccgctacagttaacatgacaaatgtctcagtggcaaaaatcccctttttgtaagcccccatagtctagaggcagttttctttttaagaatcatgccagagcctgagtcgagcagtatgctttcttggtttttgagagtaattgtgtaattgtagagggagaaatccaattctaacctaagaactgggattcttctgtcatcttgtaaaccgtatattgaaaaaaacagaatgtcactaaatgcatattaagtcaagtattggaaagtataaaagaaaaatcattctgacaatttctaagccagaagcaaacaagaattactgaaatctaccccatgaatacttggaaggcagtaattgtgagtgacacctcagttcatcaaccccttaataatatcagcttaattttaatgacaactaaatatgctgaagtgaggatttagtattttttaaaaaagcaaaacaaggttcagtagtcctcagcaattctccaagtttctctctttgcctaaaatggtcatagatcttgatttctctgaatcgtgatgaccacacccagtcatcttcacagcataattgcaggtggcagtaaagagagtgtgctgggtaaggagcagttgctgggtcattccttgggccccgacctgcccggggagtagccctgggggagagagggcagtgttgcctatcccagaggtcccagcagtcacactgctctgcaggccgggctctctttatagccagagaaatcaccttaatgcagtctctttagttgtctgctgaagctgtagttattatgggccacttacatgaggctgagaagtacgtgccggagctcacacactgcctgttgcggttctcttaacatcagttatcacagctgcctgtgggtcccgggtatttccattcctgccccttgttggcccgaggaaggatgtggaaagagcacctggtgggatgaaggtccaacagcctgtgcctctccactgctggccctggagccggcagcagtgaggcattcattgtctgtgttgcggtgtattcccagcttcagtgctcttttcctttttgcctgaaatgtttatgcttctctgcagccagtcctctaacaaatctcaagaacaaaggtaagacacttggtttttgtttccaggacccttcagaaggtgacatcagatattccctaaattcagacaatgagggatacagagcgacttggcatgtattatttctcccatgtaaggacaaagggacagattattattgttatttctgagacagagtcttgctctgtagctcaggctggagtgcagtggctcaatctcagctcaccacaacctctgcctcctggcttcaagcgattcttctgcctcagcctccccgaatagttgggattacaggcacccaccaccacgcctggctaatttttgtatttttagtagagatggtttcaccatgctggccaggctggtcttgaactcctgacctcaggtgatcctcccgcctcagccttccaaagtgctgggattacaagcatgagccaccgcacccggcctcacagtgacagattctgagaaacagcatgcaaaacatttgaaccattttctacatctcccattgttgcatagagagtgtgcaccgctgctatcttgccagatccacactggtcctcccgaaagccaggttcatacacagcaactttttaattattctaacagttacccattaacagtcgactcctgtatttctgagagtcttgtactcacctctgaaatttaaaaacgtataaagagagcctgggttaatcagttctgcagcccctacgtgacactgtgctagttctccttcttctgtctcctccttaccctggccctgcacccctgtacttaagagggagaggtgggaggtgctgtctggtatcatttgctgcctcgccagtagagggtgccgctgtgcagggtaactgcccgcctgctcccttcctgacctcccctgaccccgaagatcactacctctgtcattcaggcattggggtacatcctgataagtcgtgtcagaactgccaatttcaggactgagatgtgtttttaaaaaacaaatccttataaactccactttgtactttagattttaaaactggggaaaaatgtgatattctttggaccacttttttaatttatataagccttaatgaacagtgtctatacatttgcatacacacacccccaccccagagtgttctcagtatgtcagagaaagtgccacagcattaggacgggagcttggagaacgttttctagaaaagggttagcttcctgttggcatgaaattttccaagcaaacctcattaaacatctgttgtttgttaaagatgttccactgaaagcaacgcatgtttcaaaggcacgtctttccgttcgttggttttctgtgtgtaaggagtagcattgctgttggcgcctaacctcgcgtgcactgcattctcaaccccgtaccagtgcatcatcagaagccttcctcgtgaccataactctgtgtctgcagatatgtgttcccgtgtaagccagttttccccttttactcagactgatttcacctagattgtcacggtttccttcatgttaactttgcgtgactttgttcttcctttactactctgtatgtaatatatatacatatatacgtacatatgctgtccaaatatatttgtatatatttgtatagcatttttacacctttattgagtaatctggtttcgaaaggaggtgagagtttagtcccttctgcagttttctccaagctgtgtcctgtgaatttcaacccttggagcctaagaaaaccctaggaagatgatgttaatttgctgtcatttcctaattcaggatctatcatcaaatgaaacatgaaaaaaacagtgacttttaaggtgaaaagagtttcaagcattccaaataaattatcaatgtttcataactttttattataaacccacctcctaataggaagccaagtactatttgatacagtggtaaaaaccaaactaccttgaatttttttaaggcaacttatgaataatgctcattttcacagtcagaatagctttaaaatatggttgaatttgatacacacaggaagttttcttgaagaacaatcctttcgcttttcttttttcttgagagatctaaagagaaactgtagattgttttcctgacagcaaaagactaatgtgacaaaatgaagtcattgtaaagaagcgatgcaacttgtcaaatatttaataaagaattatggaagctggaacattttctac

SEQ ID NO: 19805 - DNA, 8378 bp, Homo sapiens
  source 1..8378: mol_type = unassigned DNA
gccatttccagagaggaacaaccgtgtagactgctttcctgggagtcaagttaaaacttctctcctgtgaccttgtcacccggcagtggaaagttacccttggctgcagccacgacttccgcatactcttcagaacttgctctgcccttgagttttccagctttcctttaatgcactaaacctttaatattgtattctcctaaatgagacgtctcgcatttgagcagggagagtcccgtattctcagagtaaaagttgtttctggaattgatctcgccaaaaaggacatctttggagccagtgatccgtatgtgaaactttcattgtacgtagcggatgagaatagagaacttgctttggtccagacaaaaacaattaaaaagacactgaacccaaaatggaatgaagaattttatttcagggtaaacccatctaatcacagactcctatttgaagtatttgacgaaaatagactgacacgagacgacttcctgggccaggtggacgtgccccttagtcaccttccgacagaagatccaaccatggagcgaccctatacatttaaggactttctcctcagaccaagaagtcataagtctcgagttaagggatttttgcgattgaaaatggcctatatgccaaaaaatggaggtcaagatgaagaaaacagtgaccagagggatgacatggagcatggatgggaagttgttgactcaaatgactcggcttctcagcaccaagaggaacttcctcctcctcctctgcctcccgggtgggaagaaaaagtggacaatttaggccgaacttactatgtcaaccacaacaaccggaccactcagtggcacagaccaagcctgatggacgtgtcctcggagtcggacaataacatcagacagatcaaccaggaggcagcacaccggcgcttccgctcccgcaggcacatcagcgaagacttggagcccgagccctcggagggcggggatgtccccgagccttgggagaccatttcagaggaagtgaatatcgctggagactctctcggtctggctctgcccccaccaccggcctccccaggatctcggaccagccctcaggagctgtcagaggaactaagcagaaggcttcagatcactccagactccaatggggaacagttcagctctttgattcaaagagaaccctcctcaaggttgaggtcatgcagtgtcaccgacgcagttgcagaacagggccatctaccaccgcccagtgccccagctgggagagcgcgttcatcaactgtcacgggtggtgaggaaccaacgccatcagtggcctatgtacataccacgccgggtctgccttcaggctgggaagaaagaaaagatgctaaggggcgcacatactatgtcaatcataacaatcgaaccacaacttggactcgacctatcatgcagcttgcagaagatggtgcgtccggatcagccacaaacagtaacaaccatctaatcgagcctcagatccgccggcctcgtagcctcagctcgccaacagtaactttatctgccccgctggagggtgccaaggactcacccgtacgtcgggctgtgaaagacaccctttccaacccacagtccccacagccatcaccttacaactcccccaaaccacaacacaaagtcacacagagcttcttgccacccggctgggaaatgaggatagcgccaaacggccggcccttcttcattgatcataacacaaagactacaacctgggaagatccacgtttgaaatttccagtacatatgcggtcaaagacatctttaaaccccaatgaccttggcccccttcctcctggctgggaagaaagaattcacttggatggccgaacgttttatattgatcataatagcaaaattactcagtgggaagacccaagactgcagaacccagctattactggtccggctgtcccttactccagagaatttaagcagaaatatgactacttcaggaagaaattaaagaaacctgctgatatccccaataggtttgaaatgaaacttcacagaaataacatatttgaagagtcctatcggagaattatgtccgtgaaaagaccagatgtcctaaaagctagactgtggattgagtttgaatcagagaaaggtcttgactatgggggtgtggccagagaatggttcttcttactgtccaaagagatgttcaacccctactacggcctctttgagtactctgccacggacaactacacccttcagatcaaccctaattcaggcctctgtaatgaggatcatttgtcctacttcacttttattggaagagttgctggtctggccgtatttcatgggaagctcttagatggtttcttcattagaccattttacaagatgatgttgggaaagcagataaccctgaatgacatggaatctgtggatagtgaatattacaactctttgaaatggatcctggagaatgaccctactgagctggacctcatgttctgcatagacgaagaaaactttggacagacatatcaagtggatttgaagcccaatgggtcagaaataatggtcacaaatgaaaacaaaagggaatatatcgacttagtcatccagtggagatttgtgaacagggtccagaagcagatgaacgccttcttggagggattcacagaactacttcctattgatttgattaaaatttttgatgaaaatgagctggagttgctcatgtgcggcctcggtgatgtggatgtgaatgactggagacagcattctatttacaagaacggctactgcccaaaccaccccgtcattcagtggttctggaaggctgtgctactcatggacgccgaaaagcgtatccggttactgcagtttgtcacagggacatcgcgagtacctatgaatggatttgccgaactttatggttccaatggtcctcagctgtttacaatagagcaatggggcagtcctgagaaactgcccagagctcacacatgctttaatcgccttgacttacctccatatgaaacctttgaagatttacgagagaaacttctcatggccgtggaaaatgctcaaggatttgaaggggtggattaagcaccctgtgcctcgggggtggttgttcttcaagcaagttctgcttgcacttttgcatttgcctaacagacttttgcagaggcgatggcagagagcagctgcaggcatggtccctggagccgagccttcaccacgcactcgtccaagttcggatgcgggaacctggtcccagcttgagttcctgcctttcccaccacaaattatcaactggttgatgtgtacactaattacatttcaggaggacttaatgctatttatgttgtgcctctgcaggcaaagcccttaataaatattttacatcctttctaatgacaatgaatggaattaatcactcaacaggtatagtattacgactcatgtttactttttaaaatgatttagaccgattttcagattttatttcgttatgattaaagatgtctcatgtacttggaaaagtgagcattttttttttttttgtatttcactttcataccaggcttaatgtcaatgacatttttatttttgaagtactctgacacctccaccctctactttattagaattggaaggcaaatttttgtccaaaaacctacagacaagtactttgagagaatttccaatataatattagacataatgataattttttccatactcagaatgaaaaactggatattacgtttttgttttggggtttttttgtacaaatttagctaatagctacaggctgagagaattgtaacatagcatgacaaattttgtgttgacttgaaaggaatcacaccattattccttagaagtaattacatgtgttctaacacatttgagacagggttggactcccatttctcatccgagaaattacttaacccttcctggcgctgtacagtcatcttttattctatttcctctttgctgtttgtagtagagacattttgaatgaaacttggcactgcttgattcaaaactgtggaaaccagatctgtttagtctcctgtttgtatgcgtttgctaatggtagctaaataaccagtttttgttgtaaatgcaccaattctgaaggcactttatgtactacatggaggtcatatctggttttgtttttatttttttatcatgaacattaaatgtgatgatgatttcttttccctgcacacatctttccggtgcaatatctatcaattgtgaatctggctgctggtgtataaaaacctggatgtaaagctgagcctacagacctgtcctcaccaactgttttgtgatttctactcaactacaaagatttatttaatgtactcttaatctaactgagttttgttaccaatgacctgttgcatgcttcaataccgtgtactgcctgagttgtgcctcttgtgtgctagattaaaagtgagacagagacttgacttgatcctctgagctcaagctattgagctggtagtggcagaggactgagggtacctgcacagtttgattcttttccacgtgtaagtctccattgcagaattgtcgtgctttgagaaaacacctgaggcagtgtgggagttgaacgaccctgctgtcctttttaacctgtgttgtcctagaccctgtcggggcagtcaggggacactagagatttgatctcatgcgagtcatcaataggacaaaaaagttgtggtttggggaggtctgtttgttacataaaaaggacctttcggtgtaagaaattgccgtttttaccctgccctggctggcatgtgagaagccatggaaggttgtggttgtaaatgagttgtctaaaggggtgcagaggcctgaggtttctaaaagaaggtagatttctacagagctgagtgttggttcctttttcttattggttgaaaattacctggtagtgatcagaaaacttagatgctatgtaactaaaaaaaaaaaaaaaaaaaaaaaaaaaaaaaaaaaaattcccgctcatgagttttgactattggtgagatgttttccgctacagttaacatgacaaatgtctcagtggcaaaaatcccctttttgtaagcccccatagtctagaggcagttttctttttaagaatcatgccagagcctgagtcgagcagtatgctttcttggtttttgagagtaattgtgtaattgtagagggagaaatccaattctaacctaagaactgggattcttctgtcatcttgtaaaccgtatattgaaaaaaacagaatgtcactaaatgcatattaagtcaagtattggaaagtataaaagaaaaatcattctgacaatttctaagccagaagcaaacaagaattactgaaatctaccccatgaatacttggaaggcagtaattgtgagtgacacctcagttcatcaaccccttaataatatcagcttaattttaatgacaactaaatatgctgaagtgaggatttagtattttttaaaaaagcaaaacaaggttcagtagtcctcagcaattctccaagtttctctctttgcctaaaatggtcatagatcttgatttctctgaatcgtgatgaccacacccagtcatcttcacagcataattgcaggtggcagtaaagagagtgtgctgggtaaggagcagttgctgggtcattccttgggccccgacctgcccggggagtagccctgggggagagagggcagtgttgcctatcccagaggtcccagcagtcacactgctctgcaggccgggctctctttatagccagagaaatcaccttaatgcagtctctttagttgtctgctgaagctgtagttattatgggccacttacatgaggctgagaagtacgtgccggagctcacacactgcctgttgcggttctcttaacatcagttatcacagctgcctgtgggtcccgggtatttccattcctgccccttgttggcccgaggaaggatgtggaaagagcacctggtgggatgaaggtccaacagcctgtgcctctccactgctggccctggagccggcagcagtgaggcattcattgtctgtgttgcggtgtattcccagcttcagtgctcttttcctttttgcctgaaatgtttatgcttctctgcagccagtcctctaacaaatctcaagaacaaaggtaagacacttggtttttgtttccaggacccttcagaaggtgacatcagatattccctaaattcagacaatgagggatacagagcgacttggcatgtattatttctcccatgtaaggacaaagggacagattattattgttatttctgagacagagtcttgctctgtagctcaggctggagtgcagtggctcaatctcagctcaccacaacctctgcctcctggcttcaagcgattcttctgcctcagcctccccgaatagttgggattacaggcacccaccaccacgcctggctaatttttgtatttttagtagagatggtttcaccatgctggccaggctggtcttgaactcctgacctcaggtgatcctcccgcctcagccttccaaagtgctgggattacaagcatgagccaccgcacccggcctcacagtgacagattctgagaaacagcatgcaaaacatttgaaccattttctacatctcccattgttgcatagagagtgtgcaccgctgctatcttgccagatccacactggtcctcccgaaagccaggttcatacacagcaactttttaattattctaacagttacccattaacagtcgactcctgtatttctgagagtcttgtactcacctctgaaatttaaaaacgtataaagagagcctgggttaatcagttctgcagcccctacgtgacactgtgctagttctccttcttctgtctcctccttaccctggccctgcacccctgtacttaagagggagaggtgggaggtgctgtctggtatcatttgctgcctcgccagtagagggtgccgctgtgcagggtaactgcccgcctgctcccttcctgacctcccctgaccccgaagatcactacctctgtcattcaggcattggggtacatcctgataagtcgtgtcagaactgccaatttcaggactgagatgtgtttttaaaaaacaaatccttataaactccactttgtactttagattttaaaactggggaaaaatgtgatattctttggaccacttttttaatttatataagccttaatgaacagtgtctatacatttgcatacacacacccccaccccagagtgttctcagtatgtcagagaaagtgccacagcattaggacgggagcttggagaacgttttctagaaaagggttagcttcctgttggcatgaaattttccaagcaaacctcattaaacatctgttgtttgttaaagatgttccactgaaagcaacgcatgtttcaaaggcacgtctttccgttcgttggttttctgtgtgtaaggagtagcattgctgttggcgcctaacctcgcgtgcactgcattctcaaccccgtaccagtgcatcatcagaagccttcctcgtgaccataactctgtgtctgcagatatgtgttcccgtgtaagccagttttccccttttactcagactgatttcacctagattgtcacggtttccttcatgttaactttgcgtgactttgttcttcctttactactctgtatgtaatatatatacatatatacgtacatatgctgtccaaatatatttgtatatatttgtatagcatttttacacctttattgagtaatctggtttcgaaaggaggtgagagtttagtcccttctgcagttttctccaagctgtgtcctgtgaatttcaacccttggagcctaagaaaaccctaggaagatgatgttaatttgctgtcatttcctaattcaggatctatcatcaaatgaaacatgaaaaaaacagtgacttttaaggtgaaaagagtttcaagcattccaaataaattatcaatgtttcataactttttattataaacccacctcctaataggaagccaagtactatttgatacagtggtaaaaaccaaactaccttgaatttttttaaggcaacttatgaataatgctcattttcacagtcagaatagctttaaaatatggttgaatttgatacacacaggaagttttcttgaagaacaatcctttcgcttttcttttttcttgagagatctaaagagaaactgtagattgttttcctgacagcaaaagactaatgtgacaaaatgaagtcattgtaaagaagcgatgcaacttgtcaaatatttaataaagaattatggaagctggaacattttctac

SEQ ID NO: 19806 - DNA, 8413 bp, Homo sapiens
  source 1..8413: mol_type = unassigned DNA
gagaggcgccggggctgccgcccggtgctcggcgcgctctcgggagccgcccgcccgctggtcccgcagccttccgggaggaagcggtgccggcagcgtccagggcgcgctctcgggcaccctcacctgccggcgcccggccgcttacccggcagggcgtgcgcagggtagggtgcgggaccggggggacctggaggcagaggggagaaccggccgtccgcgccgcagcacagccgctgggagcgcctcagaccccgcgcggggcgccggctccatggcgaccgggctcggggagccggtctatggactttccgaagacgagggagagtcccgtattctcagagtaaaagttgtttctggaattgatctcgccaaaaaggacatctttggagccagtgatccgtatgtgaaactttcattgtacgtagcggatgagaatagagaacttgctttggtccagacaaaaacaattaaaaagacactgaacccaaaatggaatgaagaattttatttcagggtaaacccatctaatcacagactcctatttgaagtatttgacgaaaatagactgacacgagacgacttcctgggccaggtggacgtgccccttagtcaccttccgacagaagatccaaccatggagcgaccctatacatttaaggactttctcctcagaccaagaagtcataagtctcgagttaagggatttttgcgattgaaaatggcctatatgccaaaaaatggaggtcaagatgaagaaaacagtgaccagagggatgacatggagcatggatgggaagttgttgactcaaatgactcggcttctcagcaccaagaggaacttcctcctcctcctctgcctcccgggtgggaagaaaaagtggacaatttaggccgaacttactatgtcaaccacaacaaccggaccactcagtggcacagaccaagcctgatggacgtgtcctcggagtcggacaataacatcagacagatcaaccaggaggcagcacaccggcgcttccgctcccgcaggcacatcagcgaagacttggagcccgagccctcggagggcggggatgtccccgagccttgggagaccatttcagaggaagtgaatatcgctggagactctctcggtctggctctgcccccaccaccggcctccccaggatctcggaccagccctcaggagctgtcagaggaactaagcagaaggcttcagatcactccagactccaatggggaacagttcagctctttgattcaaagagaaccctcctcaaggttgaggtcatgcagtgtcaccgacgcagttgcagaacagggccatctaccaccgccatcagtggcctatgtacataccacgccgggtctgccttcaggctgggaagaaagaaaagatgctaaggggcgcacatactatgtcaatcataacaatcgaaccacaacttggactcgacctatcatgcagcttgcagaagatggtgcgtccggatcagccacaaacagtaacaaccatctaatcgagcctcagatccgccggcctcgtagcctcagctcgccaacagtaactttatctgccccgctggagggtgccaaggactcacccgtacgtcgggctgtgaaagacaccctttccaacccacagtccccacagccatcaccttacaactcccccaaaccacaacacaaagtcacacagagcttcttgccacccggctgggaaatgaggatagcgccaaacggccggcccttcttcattgatcataacacaaagactacaacctgggaagatccacgtttgaaatttccagtacatatgcggtcaaagacatctttaaaccccaatgaccttggcccccttcctcctggctgggaagaaagaattcacttggatggccgaacgttttatattgatcataatagcaaaattactcagtgggaagacccaagactgcagaacccagctattactggtccggctgtcccttactccagagaatttaagcagaaatatgactacttcaggaagaaattaaagaaacctgctgatatccccaataggtttgaaatgaaacttcacagaaataacatatttgaagagtcctatcggagaattatgtccgtgaaaagaccagatgtcctaaaagctagactgtggattgagtttgaatcagagaaaggtcttgactatgggggtgtggccagagaatggttcttcttactgtccaaagagatgttcaacccctactacggcctctttgagtactctgccacggacaactacacccttcagatcaaccctaattcaggcctctgtaatgaggatcatttgtcctacttcacttttattggaagagttgctggtctggccgtatttcatgggaagctcttagatggtttcttcattagaccattttacaagatgatgttgggaaagcagataaccctgaatgacatggaatctgtggatagtgaatattacaactctttgaaatggatcctggagaatgaccctactgagctggacctcatgttctgcatagacgaagaaaactttggacagacatatcaagtggatttgaagcccaatgggtcagaaataatggtcacaaatgaaaacaaaagggaatatatcgacttagtcatccagtggagatttgtgaacagggtccagaagcagatgaacgccttcttggagggattcacagaactacttcctattgatttgattaaaatttttgatgaaaatgagctggagttgctcatgtgcggcctcggtgatgtggatgtgaatgactggagacagcattctatttacaagaacggctactgcccaaaccaccccgtcattcagtggttctggaaggctgtgctactcatggacgccgaaaagcgtatccggttactgcagtttgtcacagggacatcgcgagtacctatgaatggatttgccgaactttatggttccaatggtcctcagctgtttacaatagagcaatggggcagtcctgagaaactgcccagagctcacacatgctttaatcgccttgacttacctccatatgaaacctttgaagatttacgagagaaacttctcatggccgtggaaaatgctcaaggatttgaaggggtggattaagcaccctgtgcctcgggggtggttgttcttcaagcaagttctgcttgcacttttgcatttgcctaacagacttttgcagaggcgatggcagagagcagctgcaggcatggtccctggagccgagccttcaccacgcactcgtccaagttcggatgcgggaacctggtcccagcttgagttcctgcctttcccaccacaaattatcaactggttgatgtgtacactaattacatttcaggaggacttaatgctatttatgttgtgcctctgcaggcaaagcccttaataaatattttacatcctttctaatgacaatgaatggaattaatcactcaacaggtatagtattacgactcatgtttactttttaaaatgatttagaccgattttcagattttatttcgttatgattaaagatgtctcatgtacttggaaaagtgagcattttttttttttttgtatttcactttcataccaggcttaatgtcaatgacatttttatttttgaagtactctgacacctccaccctctactttattagaattggaaggcaaatttttgtccaaaaacctacagacaagtactttgagagaatttccaatataatattagacataatgataattttttccatactcagaatgaaaaactggatattacgtttttgttttggggtttttttgtacaaatttagctaatagctacaggctgagagaattgtaacatagcatgacaaattttgtgttgacttgaaaggaatcacaccattattccttagaagtaattacatgtgttctaacacatttgagacagggttggactcccatttctcatccgagaaattacttaacccttcctggcgctgtacagtcatcttttattctatttcctctttgctgtttgtagtagagacattttgaatgaaacttggcactgcttgattcaaaactgtggaaaccagatctgtttagtctcctgtttgtatgcgtttgctaatggtagctaaataaccagtttttgttgtaaatgcaccaattctgaaggcactttatgtactacatggaggtcatatctggttttgtttttatttttttatcatgaacattaaatgtgatgatgatttcttttccctgcacacatctttccggtgcaatatctatcaattgtgaatctggctgctggtgtataaaaacctggatgtaaagctgagcctacagacctgtcctcaccaactgttttgtgatttctactcaactacaaagatttatttaatgtactcttaatctaactgagttttgttaccaatgacctgttgcatgcttcaataccgtgtactgcctgagttgtgcctcttgtgtgctagattaaaagtgagacagagacttgacttgatcctctgagctcaagctattgagctggtagtggcagaggactgagggtacctgcacagtttgattcttttccacgtgtaagtctccattgcagaattgtcgtgctttgagaaaacacctgaggcagtgtgggagttgaacgaccctgctgtcctttttaacctgtgttgtcctagaccctgtcggggcagtcaggggacactagagatttgatctcatgcgagtcatcaataggacaaaaaagttgtggtttggggaggtctgtttgttacataaaaaggacctttcggtgtaagaaattgccgtttttaccctgccctggctggcatgtgagaagccatggaaggttgtggttgtaaatgagttgtctaaaggggtgcagaggcctgaggtttctaaaagaaggtagatttctacagagctgagtgttggttcctttttcttattggttgaaaattacctggtagtgatcagaaaacttagatgctatgtaactaaaaaaaaaaaaaaaaaaaaaaaaaaaaaaaaaaaaattcccgctcatgagttttgactattggtgagatgttttccgctacagttaacatgacaaatgtctcagtggcaaaaatcccctttttgtaagcccccatagtctagaggcagttttctttttaagaatcatgccagagcctgagtcgagcagtatgctttcttggtttttgagagtaattgtgtaattgtagagggagaaatccaattctaacctaagaactgggattcttctgtcatcttgtaaaccgtatattgaaaaaaacagaatgtcactaaatgcatattaagtcaagtattggaaagtataaaagaaaaatcattctgacaatttctaagccagaagcaaacaagaattactgaaatctaccccatgaatacttggaaggcagtaattgtgagtgacacctcagttcatcaaccccttaataatatcagcttaattttaatgacaactaaatatgctgaagtgaggatttagtattttttaaaaaagcaaaacaaggttcagtagtcctcagcaattctccaagtttctctctttgcctaaaatggtcatagatcttgatttctctgaatcgtgatgaccacacccagtcatcttcacagcataattgcaggtggcagtaaagagagtgtgctgggtaaggagcagttgctgggtcattccttgggccccgacctgcccggggagtagccctgggggagagagggcagtgttgcctatcccagaggtcccagcagtcacactgctctgcaggccgggctctctttatagccagagaaatcaccttaatgcagtctctttagttgtctgctgaagctgtagttattatgggccacttacatgaggctgagaagtacgtgccggagctcacacactgcctgttgcggttctcttaacatcagttatcacagctgcctgtgggtcccgggtatttccattcctgccccttgttggcccgaggaaggatgtggaaagagcacctggtgggatgaaggtccaacagcctgtgcctctccactgctggccctggagccggcagcagtgaggcattcattgtctgtgttgcggtgtattcccagcttcagtgctcttttcctttttgcctgaaatgtttatgcttctctgcagccagtcctctaacaaatctcaagaacaaaggtaagacacttggtttttgtttccaggacccttcagaaggtgacatcagatattccctaaattcagacaatgagggatacagagcgacttggcatgtattatttctcccatgtaaggacaaagggacagattattattgttatttctgagacagagtcttgctctgtagctcaggctggagtgcagtggctcaatctcagctcaccacaacctctgcctcctggcttcaagcgattcttctgcctcagcctccccgaatagttgggattacaggcacccaccaccacgcctggctaatttttgtatttttagtagagatggtttcaccatgctggccaggctggtcttgaactcctgacctcaggtgatcctcccgcctcagccttccaaagtgctgggattacaagcatgagccaccgcacccggcctcacagtgacagattctgagaaacagcatgcaaaacatttgaaccattttctacatctcccattgttgcatagagagtgtgcaccgctgctatcttgccagatccacactggtcctcccgaaagccaggttcatacacagcaactttttaattattctaacagttacccattaacagtcgactcctgtatttctgagagtcttgtactcacctctgaaatttaaaaacgtataaagagagcctgggttaatcagttctgcagcccctacgtgacactgtgctagttctccttcttctgtctcctccttaccctggccctgcacccctgtacttaagagggagaggtgggaggtgctgtctggtatcatttgctgcctcgccagtagagggtgccgctgtgcagggtaactgcccgcctgctcccttcctgacctcccctgaccccgaagatcactacctctgtcattcaggcattggggtacatcctgataagtcgtgtcagaactgccaatttcaggactgagatgtgtttttaaaaaacaaatccttataaactccactttgtactttagattttaaaactggggaaaaatgtgatattctttggaccacttttttaatttatataagccttaatgaacagtgtctatacatttgcatacacacacccccaccccagagtgttctcagtatgtcagagaaagtgccacagcattaggacgggagcttggagaacgttttctagaaaagggttagcttcctgttggcatgaaattttccaagcaaacctcattaaacatctgttgtttgttaaagatgttccactgaaagcaacgcatgtttcaaaggcacgtctttccgttcgttggttttctgtgtgtaaggagtagcattgctgttggcgcctaacctcgcgtgcactgcattctcaaccccgtaccagtgcatcatcagaagccttcctcgtgaccataactctgtgtctgcagatatgtgttcccgtgtaagccagttttccccttttactcagactgatttcacctagattgtcacggtttccttcatgttaactttgcgtgactttgttcttcctttactactctgtatgtaatatatatacatatatacgtacatatgctgtccaaatatatttgtatatatttgtatagcatttttacacctttattgagtaatctggtttcgaaaggaggtgagagtttagtcccttctgcagttttctccaagctgtgtcctgtgaatttcaacccttggagcctaagaaaaccctaggaagatgatgttaatttgctgtcatttcctaattcaggatctatcatcaaatgaaacatgaaaaaaacagtgacttttaaggtgaaaagagtttcaagcattccaaataaattatcaatgtttcataactttttattataaacccacctcctaataggaagccaagtactatttgatacagtggtaaaaaccaaactaccttgaatttttttaaggcaacttatgaataatgctcattttcacagtcagaatagctttaaaatatggttgaatttgatacacacaggaagttttcttgaagaacaatcctttcgcttttcttttttcttgagagatctaaagagaaactgtagattgttttcctgacagcaaaagactaatgtgacaaaatgaagtcattgtaaagaagcgatgcaacttgtcaaatatttaataaagaattatggaagctggaacattttctac

SEQ ID NO: 19807 - DNA, 8473 bp, Homo sapiens
  source 1..8473: mol_type = unassigned DNA
gagaggcgccggggctgccgcccggtgctcggcgcgctctcgggagccgcccgcccgctggtcccgcagccttccgggaggaagcggtgccggcagcgtccagggcgcgctctcgggcaccctcacctgccggcgcccggccgcttacccggcagggcgtgcgcagggtagggtgcgggaccggggggacctggaggcagaggggagaaccggccgtccgcgccgcagcacagccgctgggagcgcctcagaccccgcgcggggcgccggctccatggcgaccgggctcggggagccggtctatggactttccgaagacgagggagagtcccgtattctcagagtaaaagttgtttctggaattgatctcgccaaaaaggacatctttggagccagtgatccgtatgtgaaactttcattgtacgtagcggatgagaatagagaacttgctttggtccagacaaaaacaattaaaaagacactgaacccaaaatggaatgaagaattttatttcagggtaaacccatctaatcacagactcctatttgaagtatttgacgaaaatagactgacacgagacgacttcctgggccaggtggacgtgccccttagtcaccttccgacagaagatccaaccatggagcgaccctatacatttaaggactttctcctcagaccaagaagtcataagtctcgagttaagggatttttgcgattgaaaatggcctatatgccaaaaaatggaggtcaagatgaagaaaacagtgaccagagggatgacatggagcatggatgggaagttgttgactcaaatgactcggcttctcagcaccaagaggaacttcctcctcctcctctgcctcccgggtgggaagaaaaagtggacaatttaggccgaacttactatgtcaaccacaacaaccggaccactcagtggcacagaccaagcctgatggacgtgtcctcggagtcggacaataacatcagacagatcaaccaggaggcagcacaccggcgcttccgctcccgcaggcacatcagcgaagacttggagcccgagccctcggagggcggggatgtccccgagccttgggagaccatttcagaggaagtgaatatcgctggagactctctcggtctggctctgcccccaccaccggcctccccaggatctcggaccagccctcaggagctgtcagaggaactaagcagaaggcttcagatcactccagactccaatggggaacagttcagctctttgattcaaagagaaccctcctcaaggttgaggtcatgcagtgtcaccgacgcagttgcagaacagggccatctaccaccgcccagtgccccagctgggagagcgcgttcatcaactgtcacgggtggtgaggaaccaacgccatcagtggcctatgtacataccacgccgggtctgccttcaggctgggaagaaagaaaagatgctaaggggcgcacatactatgtcaatcataacaatcgaaccacaacttggactcgacctatcatgcagcttgcagaagatggtgcgtccggatcagccacaaacagtaacaaccatctaatcgagcctcagatccgccggcctcgtagcctcagctcgccaacagtaactttatctgccccgctggagggtgccaaggactcacccgtacgtcgggctgtgaaagacaccctttccaacccacagtccccacagccatcaccttacaactcccccaaaccacaacacaaagtcacacagagcttcttgccacccggctgggaaatgaggatagcgccaaacggccggcccttcttcattgatcataacacaaagactacaacctgggaagatccacgtttgaaatttccagtacatatgcggtcaaagacatctttaaaccccaatgaccttggcccccttcctcctggctgggaagaaagaattcacttggatggccgaacgttttatattgatcataatagcaaaattactcagtgggaagacccaagactgcagaacccagctattactggtccggctgtcccttactccagagaatttaagcagaaatatgactacttcaggaagaaattaaagaaacctgctgatatccccaataggtttgaaatgaaacttcacagaaataacatatttgaagagtcctatcggagaattatgtccgtgaaaagaccagatgtcctaaaagctagactgtggattgagtttgaatcagagaaaggtcttgactatgggggtgtggccagagaatggttcttcttactgtccaaagagatgttcaacccctactacggcctctttgagtactctgccacggacaactacacccttcagatcaaccctaattcaggcctctgtaatgaggatcatttgtcctacttcacttttattggaagagttgctggtctggccgtatttcatgggaagctcttagatggtttcttcattagaccattttacaagatgatgttgggaaagcagataaccctgaatgacatggaatctgtggatagtgaatattacaactctttgaaatggatcctggagaatgaccctactgagctggacctcatgttctgcatagacgaagaaaactttggacagacatatcaagtggatttgaagcccaatgggtcagaaataatggtcacaaatgaaaacaaaagggaatatatcgacttagtcatccagtggagatttgtgaacagggtccagaagcagatgaacgccttcttggagggattcacagaactacttcctattgatttgattaaaatttttgatgaaaatgagctggagttgctcatgtgcggcctcggtgatgtggatgtgaatgactggagacagcattctatttacaagaacggctactgcccaaaccaccccgtcattcagtggttctggaaggctgtgctactcatggacgccgaaaagcgtatccggttactgcagtttgtcacagggacatcgcgagtacctatgaatggatttgccgaactttatggttccaatggtcctcagctgtttacaatagagcaatggggcagtcctgagaaactgcccagagctcacacatgctttaatcgccttgacttacctccatatgaaacctttgaagatttacgagagaaacttctcatggccgtggaaaatgctcaaggatttgaaggggtggattaagcaccctgtgcctcgggggtggttgttcttcaagcaagttctgcttgcacttttgcatttgcctaacagacttttgcagaggcgatggcagagagcagctgcaggcatggtccctggagccgagccttcaccacgcactcgtccaagttcggatgcgggaacctggtcccagcttgagttcctgcctttcccaccacaaattatcaactggttgatgtgtacactaattacatttcaggaggacttaatgctatttatgttgtgcctctgcaggcaaagcccttaataaatattttacatcctttctaatgacaatgaatggaattaatcactcaacaggtatagtattacgactcatgtttactttttaaaatgatttagaccgattttcagattttatttcgttatgattaaagatgtctcatgtacttggaaaagtgagcattttttttttttttgtatttcactttcataccaggcttaatgtcaatgacatttttatttttgaagtactctgacacctccaccctctactttattagaattggaaggcaaatttttgtccaaaaacctacagacaagtactttgagagaatttccaatataatattagacataatgataattttttccatactcagaatgaaaaactggatattacgtttttgttttggggtttttttgtacaaatttagctaatagctacaggctgagagaattgtaacatagcatgacaaattttgtgttgacttgaaaggaatcacaccattattccttagaagtaattacatgtgttctaacacatttgagacagggttggactcccatttctcatccgagaaattacttaacccttcctggcgctgtacagtcatcttttattctatttcctctttgctgtttgtagtagagacattttgaatgaaacttggcactgcttgattcaaaactgtggaaaccagatctgtttagtctcctgtttgtatgcgtttgctaatggtagctaaataaccagtttttgttgtaaatgcaccaattctgaaggcactttatgtactacatggaggtcatatctggttttgtttttatttttttatcatgaacattaaatgtgatgatgatttcttttccctgcacacatctttccggtgcaatatctatcaattgtgaatctggctgctggtgtataaaaacctggatgtaaagctgagcctacagacctgtcctcaccaactgttttgtgatttctactcaactacaaagatttatttaatgtactcttaatctaactgagttttgttaccaatgacctgttgcatgcttcaataccgtgtactgcctgagttgtgcctcttgtgtgctagattaaaagtgagacagagacttgacttgatcctctgagctcaagctattgagctggtagtggcagaggactgagggtacctgcacagtttgattcttttccacgtgtaagtctccattgcagaattgtcgtgctttgagaaaacacctgaggcagtgtgggagttgaacgaccctgctgtcctttttaacctgtgttgtcctagaccctgtcggggcagtcaggggacactagagatttgatctcatgcgagtcatcaataggacaaaaaagttgtggtttggggaggtctgtttgttacataaaaaggacctttcggtgtaagaaattgccgtttttaccctgccctggctggcatgtgagaagccatggaaggttgtggttgtaaatgagttgtctaaaggggtgcagaggcctgaggtttctaaaagaaggtagatttctacagagctgagtgttggttcctttttcttattggttgaaaattacctggtagtgatcagaaaacttagatgctatgtaactaaaaaaaaaaaaaaaaaaaaaaaaaaaaaaaaaaaaattcccgctcatgagttttgactattggtgagatgttttccgctacagttaacatgacaaatgtctcagtggcaaaaatcccctttttgtaagcccccatagtctagaggcagttttctttttaagaatcatgccagagcctgagtcgagcagtatgctttcttggtttttgagagtaattgtgtaattgtagagggagaaatccaattctaacctaagaactgggattcttctgtcatcttgtaaaccgtatattgaaaaaaacagaatgtcactaaatgcatattaagtcaagtattggaaagtataaaagaaaaatcattctgacaatttctaagccagaagcaaacaagaattactgaaatctaccccatgaatacttggaaggcagtaattgtgagtgacacctcagttcatcaaccccttaataatatcagcttaattttaatgacaactaaatatgctgaagtgaggatttagtattttttaaaaaagcaaaacaaggttcagtagtcctcagcaattctccaagtttctctctttgcctaaaatggtcatagatcttgatttctctgaatcgtgatgaccacacccagtcatcttcacagcataattgcaggtggcagtaaagagagtgtgctgggtaaggagcagttgctgggtcattccttgggccccgacctgcccggggagtagccctgggggagagagggcagtgttgcctatcccagaggtcccagcagtcacactgctctgcaggccgggctctctttatagccagagaaatcaccttaatgcagtctctttagttgtctgctgaagctgtagttattatgggccacttacatgaggctgagaagtacgtgccggagctcacacactgcctgttgcggttctcttaacatcagttatcacagctgcctgtgggtcccgggtatttccattcctgccccttgttggcccgaggaaggatgtggaaagagcacctggtgggatgaaggtccaacagcctgtgcctctccactgctggccctggagccggcagcagtgaggcattcattgtctgtgttgcggtgtattcccagcttcagtgctcttttcctttttgcctgaaatgtttatgcttctctgcagccagtcctctaacaaatctcaagaacaaaggtaagacacttggtttttgtttccaggacccttcagaaggtgacatcagatattccctaaattcagacaatgagggatacagagcgacttggcatgtattatttctcccatgtaaggacaaagggacagattattattgttatttctgagacagagtcttgctctgtagctcaggctggagtgcagtggctcaatctcagctcaccacaacctctgcctcctggcttcaagcgattcttctgcctcagcctccccgaatagttgggattacaggcacccaccaccacgcctggctaatttttgtatttttagtagagatggtttcaccatgctggccaggctggtcttgaactcctgacctcaggtgatcctcccgcctcagccttccaaagtgctgggattacaagcatgagccaccgcacccggcctcacagtgacagattctgagaaacagcatgcaaaacatttgaaccattttctacatctcccattgttgcatagagagtgtgcaccgctgctatcttgccagatccacactggtcctcccgaaagccaggttcatacacagcaactttttaattattctaacagttacccattaacagtcgactcctgtatttctgagagtcttgtactcacctctgaaatttaaaaacgtataaagagagcctgggttaatcagttctgcagcccctacgtgacactgtgctagttctccttcttctgtctcctccttaccctggccctgcacccctgtacttaagagggagaggtgggaggtgctgtctggtatcatttgctgcctcgccagtagagggtgccgctgtgcagggtaactgcccgcctgctcccttcctgacctcccctgaccccgaagatcactacctctgtcattcaggcattggggtacatcctgataagtcgtgtcagaactgccaatttcaggactgagatgtgtttttaaaaaacaaatccttataaactccactttgtactttagattttaaaactggggaaaaatgtgatattctttggaccacttttttaatttatataagccttaatgaacagtgtctatacatttgcatacacacacccccaccccagagtgttctcagtatgtcagagaaagtgccacagcattaggacgggagcttggagaacgttttctagaaaagggttagcttcctgttggcatgaaattttccaagcaaacctcattaaacatctgttgtttgttaaagatgttccactgaaagcaacgcatgtttcaaaggcacgtctttccgttcgttggttttctgtgtgtaaggagtagcattgctgttggcgcctaacctcgcgtgcactgcattctcaaccccgtaccagtgcatcatcagaagccttcctcgtgaccataactctgtgtctgcagatatgtgttcccgtgtaagccagttttccccttttactcagactgatttcacctagattgtcacggtttccttcatgttaactttgcgtgactttgttcttcctttactactctgtatgtaatatatatacatatatacgtacatatgctgtccaaatatatttgtatatatttgtatagcatttttacacctttattgagtaatctggtttcgaaaggaggtgagagtttagtcccttctgcagttttctccaagctgtgtcctgtgaatttcaacccttggagcctaagaaaaccctaggaagatgatgttaatttgctgtcatttcctaattcaggatctatcatcaaatgaaacatgaaaaaaacagtgacttttaaggtgaaaagagtttcaagcattccaaataaattatcaatgtttcataactttttattataaacccacctcctaataggaagccaagtactatttgatacagtggtaaaaaccaaactaccttgaatttttttaaggcaacttatgaataatgctcattttcacagtcagaatagctttaaaatatggttgaatttgatacacacaggaagttttcttgaagaacaatcctttcgcttttcttttttcttgagagatctaaagagaaactgtagattgttttcctgacagcaaaagactaatgtgacaaaatgaagtcattgtaaagaagcgatgcaacttgtcaaatatttaataaagaattatggaagctggaacattttctac

SEQ ID NO: 19808 - DNA, 8300 bp, Homo sapiens
  source 1..8300: mol_type = unassigned DNA
atcagtataagtagcgagctgggcgcattccttctcagttgtgttaaaacttgctggtattcccccggtatcagcagaggtgtgtacgggcactgctttaaaactgggaaggaggaagacgaggccagggagccggagggtcaccaaggtagatttccagcagcgctagtccagctgaacactttccagccttgtttttcagcagctttgaggaaaagtatagtgatccgtatgtgaaactttcattgtacgtagcggatgagaatagagaacttgctttggtccagacaaaaacaattaaaaagacactgaacccaaaatggaatgaagaattttatttcagggtaaacccatctaatcacagactcctatttgaagtatttgacgaaaatagactgacacgagacgacttcctgggccaggtggacgtgccccttagtcaccttccgacagaagatccaaccatggagcgaccctatacatttaaggactttctcctcagaccaagaagtcataagtctcgagttaagggatttttgcgattgaaaatggcctatatgccaaaaaatggaggtcaagatgaagaaaacagtgaccagagggatgacatggagcatggatgggaagttgttgactcaaatgactcggcttctcagcaccaagaggaacttcctcctcctcctctgcctcccgggtgggaagaaaaagtggacaatttaggccgaacttactatgtcaaccacaacaaccggaccactcagtggcacagaccaagcctgatggacgtgtcctcggagtcggacaataacatcagacagatcaaccaggaggcagcacaccggcgcttccgctcccgcaggcacatcagcgaagacttggagcccgagccctcggagggcggggatgtccccgagccttgggagaccatttcagaggaagtgaatatcgctggagactctctcggtctggctctgcccccaccaccggcctccccaggatctcggaccagccctcaggagctgtcagaggaactaagcagaaggcttcagatcactccagactccaatggggaacagttcagctctttgattcaaagagaaccctcctcaaggttgaggtcatgcagtgtcaccgacgcagttgcagaacagggccatctaccaccgcccagtgccccagctgggagagcgcgttcatcaactgtcacgggtggtgaggaaccaacgccatcagtggcctatgtacataccacgccgggtctgccttcaggctgggaagaaagaaaagatgctaaggggcgcacatactatgtcaatcataacaatcgaaccacaacttggactcgacctatcatgcagcttgcagaagatggtgcgtccggatcagccacaaacagtaacaaccatctaatcgagcctcagatccgccggcctcgtagcctcagctcgccaacagtaactttatctgccccgctggagggtgccaaggactcacccgtacgtcgggctgtgaaagacaccctttccaacccacagtccccacagccatcaccttacaactcccccaaaccacaacacaaagtcacacagagcttcttgccacccggctgggaaatgaggatagcgccaaacggccggcccttcttcattgatcataacacaaagactacaacctgggaagatccacgtttgaaatttccagtacatatgcggtcaaagacatctttaaaccccaatgaccttggcccccttcctcctggctgggaagaaagaattcacttggatggccgaacgttttatattgatcataatagcaaaattactcagtgggaagacccaagactgcagaacccagctattactggtccggctgtcccttactccagagaatttaagcagaaatatgactacttcaggaagaaattaaagaaacctgctgatatccccaataggtttgaaatgaaacttcacagaaataacatatttgaagagtcctatcggagaattatgtccgtgaaaagaccagatgtcctaaaagctagactgtggattgagtttgaatcagagaaaggtcttgactatgggggtgtggccagagaatggttcttcttactgtccaaagagatgttcaacccctactacggcctctttgagtactctgccacggacaactacacccttcagatcaaccctaattcaggcctctgtaatgaggatcatttgtcctacttcacttttattggaagagttgctggtctggccgtatttcatgggaagctcttagatggtttcttcattagaccattttacaagatgatgttgggaaagcagataaccctgaatgacatggaatctgtggatagtgaatattacaactctttgaaatggatcctggagaatgaccctactgagctggacctcatgttctgcatagacgaagaaaactttggacagacatatcaagtggatttgaagcccaatgggtcagaaataatggtcacaaatgaaaacaaaagggaatatatcgacttagtcatccagtggagatttgtgaacagggtccagaagcagatgaacgccttcttggagggattcacagaactacttcctattgatttgattaaaatttttgatgaaaatgagctggagttgctcatgtgcggcctcggtgatgtggatgtgaatgactggagacagcattctatttacaagaacggctactgcccaaaccaccccgtcattcagtggttctggaaggctgtgctactcatggacgccgaaaagcgtatccggttactgcagtttgtcacagggacatcgcgagtacctatgaatggatttgccgaactttatggttccaatggtcctcagctgtttacaatagagcaatggggcagtcctgagaaactgcccagagctcacacatgctttaatcgccttgacttacctccatatgaaacctttgaagatttacgagagaaacttctcatggccgtggaaaatgctcaaggatttgaaggggtggattaagcaccctgtgcctcgggggtggttgttcttcaagcaagttctgcttgcacttttgcatttgcctaacagacttttgcagaggcgatggcagagagcagctgcaggcatggtccctggagccgagccttcaccacgcactcgtccaagttcggatgcgggaacctggtcccagcttgagttcctgcctttcccaccacaaattatcaactggttgatgtgtacactaattacatttcaggaggacttaatgctatttatgttgtgcctctgcaggcaaagcccttaataaatattttacatcctttctaatgacaatgaatggaattaatcactcaacaggtatagtattacgactcatgtttactttttaaaatgatttagaccgattttcagattttatttcgttatgattaaagatgtctcatgtacttggaaaagtgagcattttttttttttttgtatttcactttcataccaggcttaatgtcaatgacatttttatttttgaagtactctgacacctccaccctctactttattagaattggaaggcaaatttttgtccaaaaacctacagacaagtactttgagagaatttccaatataatattagacataatgataattttttccatactcagaatgaaaaactggatattacgtttttgttttggggtttttttgtacaaatttagctaatagctacaggctgagagaattgtaacatagcatgacaaattttgtgttgacttgaaaggaatcacaccattattccttagaagtaattacatgtgttctaacacatttgagacagggttggactcccatttctcatccgagaaattacttaacccttcctggcgctgtacagtcatcttttattctatttcctctttgctgtttgtagtagagacattttgaatgaaacttggcactgcttgattcaaaactgtggaaaccagatctgtttagtctcctgtttgtatgcgtttgctaatggtagctaaataaccagtttttgttgtaaatgcaccaattctgaaggcactttatgtactacatggaggtcatatctggttttgtttttatttttttatcatgaacattaaatgtgatgatgatttcttttccctgcacacatctttccggtgcaatatctatcaattgtgaatctggctgctggtgtataaaaacctggatgtaaagctgagcctacagacctgtcctcaccaactgttttgtgatttctactcaactacaaagatttatttaatgtactcttaatctaactgagttttgttaccaatgacctgttgcatgcttcaataccgtgtactgcctgagttgtgcctcttgtgtgctagattaaaagtgagacagagacttgacttgatcctctgagctcaagctattgagctggtagtggcagaggactgagggtacctgcacagtttgattcttttccacgtgtaagtctccattgcagaattgtcgtgctttgagaaaacacctgaggcagtgtgggagttgaacgaccctgctgtcctttttaacctgtgttgtcctagaccctgtcggggcagtcaggggacactagagatttgatctcatgcgagtcatcaataggacaaaaaagttgtggtttggggaggtctgtttgttacataaaaaggacctttcggtgtaagaaattgccgtttttaccctgccctggctggcatgtgagaagccatggaaggttgtggttgtaaatgagttgtctaaaggggtgcagaggcctgaggtttctaaaagaaggtagatttctacagagctgagtgttggttcctttttcttattggttgaaaattacctggtagtgatcagaaaacttagatgctatgtaactaaaaaaaaaaaaaaaaaaaaaaaaaaaaaaaaaaaaattcccgctcatgagttttgactattggtgagatgttttccgctacagttaacatgacaaatgtctcagtggcaaaaatcccctttttgtaagcccccatagtctagaggcagttttctttttaagaatcatgccagagcctgagtcgagcagtatgctttcttggtttttgagagtaattgtgtaattgtagagggagaaatccaattctaacctaagaactgggattcttctgtcatcttgtaaaccgtatattgaaaaaaacagaatgtcactaaatgcatattaagtcaagtattggaaagtataaaagaaaaatcattctgacaatttctaagccagaagcaaacaagaattactgaaatctaccccatgaatacttggaaggcagtaattgtgagtgacacctcagttcatcaaccccttaataatatcagcttaattttaatgacaactaaatatgctgaagtgaggatttagtattttttaaaaaagcaaaacaaggttcagtagtcctcagcaattctccaagtttctctctttgcctaaaatggtcatagatcttgatttctctgaatcgtgatgaccacacccagtcatcttcacagcataattgcaggtggcagtaaagagagtgtgctgggtaaggagcagttgctgggtcattccttgggccccgacctgcccggggagtagccctgggggagagagggcagtgttgcctatcccagaggtcccagcagtcacactgctctgcaggccgggctctctttatagccagagaaatcaccttaatgcagtctctttagttgtctgctgaagctgtagttattatgggccacttacatgaggctgagaagtacgtgccggagctcacacactgcctgttgcggttctcttaacatcagttatcacagctgcctgtgggtcccgggtatttccattcctgccccttgttggcccgaggaaggatgtggaaagagcacctggtgggatgaaggtccaacagcctgtgcctctccactgctggccctggagccggcagcagtgaggcattcattgtctgtgttgcggtgtattcccagcttcagtgctcttttcctttttgcctgaaatgtttatgcttctctgcagccagtcctctaacaaatctcaagaacaaaggtaagacacttggtttttgtttccaggacccttcagaaggtgacatcagatattccctaaattcagacaatgagggatacagagcgacttggcatgtattatttctcccatgtaaggacaaagggacagattattattgttatttctgagacagagtcttgctctgtagctcaggctggagtgcagtggctcaatctcagctcaccacaacctctgcctcctggcttcaagcgattcttctgcctcagcctccccgaatagttgggattacaggcacccaccaccacgcctggctaatttttgtatttttagtagagatggtttcaccatgctggccaggctggtcttgaactcctgacctcaggtgatcctcccgcctcagccttccaaagtgctgggattacaagcatgagccaccgcacccggcctcacagtgacagattctgagaaacagcatgcaaaacatttgaaccattttctacatctcccattgttgcatagagagtgtgcaccgctgctatcttgccagatccacactggtcctcccgaaagccaggttcatacacagcaactttttaattattctaacagttacccattaacagtcgactcctgtatttctgagagtcttgtactcacctctgaaatttaaaaacgtataaagagagcctgggttaatcagttctgcagcccctacgtgacactgtgctagttctccttcttctgtctcctccttaccctggccctgcacccctgtacttaagagggagaggtgggaggtgctgtctggtatcatttgctgcctcgccagtagagggtgccgctgtgcagggtaactgcccgcctgctcccttcctgacctcccctgaccccgaagatcactacctctgtcattcaggcattggggtacatcctgataagtcgtgtcagaactgccaatttcaggactgagatgtgtttttaaaaaacaaatccttataaactccactttgtactttagattttaaaactggggaaaaatgtgatattctttggaccacttttttaatttatataagccttaatgaacagtgtctatacatttgcatacacacacccccaccccagagtgttctcagtatgtcagagaaagtgccacagcattaggacgggagcttggagaacgttttctagaaaagggttagcttcctgttggcatgaaattttccaagcaaacctcattaaacatctgttgtttgttaaagatgttccactgaaagcaacgcatgtttcaaaggcacgtctttccgttcgttggttttctgtgtgtaaggagtagcattgctgttggcgcctaacctcgcgtgcactgcattctcaaccccgtaccagtgcatcatcagaagccttcctcgtgaccataactctgtgtctgcagatatgtgttcccgtgtaagccagttttccccttttactcagactgatttcacctagattgtcacggtttccttcatgttaactttgcgtgactttgttcttcctttactactctgtatgtaatatatatacatatatacgtacatatgctgtccaaatatatttgtatatatttgtatagcatttttacacctttattgagtaatctggtttcgaaaggaggtgagagtttagtcccttctgcagttttctccaagctgtgtcctgtgaatttcaacccttggagcctaagaaaaccctaggaagatgatgttaatttgctgtcatttcctaattcaggatctatcatcaaatgaaacatgaaaaaaacagtgacttttaaggtgaaaagagtttcaagcattccaaataaattatcaatgtttcataactttttattataaacccacctcctaataggaagccaagtactatttgatacagtggtaaaaaccaaactaccttgaatttttttaaggcaacttatgaataatgctcattttcacagtcagaatagctttaaaatatggttgaatttgatacacacaggaagttttcttgaagaacaatcctttcgcttttcttttttcttgagagatctaaagagaaactgtagattgttttcctgacagcaaaagactaatgtgacaaaatgaagtcattgtaaagaagcgatgcaacttgtcaaatatttaataaagaattatggaagctggaacattttctac

SEQ ID NO: 19809 - DNA, 8406 bp, Homo sapiens
  source 1..8406: mol_type = unassigned DNA
gccatttccagagaggaacaaccgtgtagactgctttcctgggagtcaagttaaaacttctctcctgtgaccttgtcacccggcagtggaaagttacccttggctgcagccacgacttccgcatactcttcagaacttgctctgcccttgagttttccagctttcctttaatgcactaaacctttaatattgtattctcctaaatgagacgtctcgcatttgagcaggtaacactcgggagagtcccgtattctcagagtaaaagttgtttctggaattgatctcgccaaaaaggacatctttggagccagcttctgctccattgctgttgaacttttttttggtcgtgacatcagaaaaataaccaagtgtgagtctgataatagcaatgatccgtatgtgaaactttcattgtacgtagcggatgagaatagagaacttgctttggtccagacaaaaacaattaaaaagacactgaacccaaaatggaatgaagaattttatttcagggtaaacccatctaatcacagactcctatttgaagtatttgacgaaaatagactgacacgagacgacttcctgggccaggtggacgtgccccttagtcaccttccgacagaagatccaaccatggagcgaccctatacatttaaggactttctcctcagaccaagaagtcataagtctcgagttaagggatttttgcgattgaaaatggcctatatgccaaaaaatggaggtcaagatgaagaaaacagtgaccagagggatgacatggagcatggatgggaagttgttgactcaaatgactcggcttctcagcaccaagaggaacttcctcctcctcctctgcctcccgggtgggaagaaaaagtggacaatttaggccgaacttactatgtcaaccacaacaaccggaccactcagtggcacagaccaagcctgatggacgtgtcctcggagtcggacaataacatcagacagatcaaccaggaggcagcacaccggcgcttccgctcccgcaggcacatcagcgaagacttggagcccgagccctcggagggcggggatgtccccgagccttgggagaccatttcagaggaagtgaatatcgctggagactctctcggtctggctctgcccccaccaccggcctccccaggatctcggaccagccctcaggagctgtcagaggaactaagcagaaggcttcagatcactccagactccaatggggaacagttcagctctttgattcaaagagaaccctcctcaaggttgaggtcatgcagtgtcaccgacgcagttgcagaacagggccatctaccaccgccatcagtggcctatgtacataccacgccgggtctgccttcaggctgggaagaaagaaaagatgctaaggggcgcacatactatgtcaatcataacaatcgaaccacaacttggactcgacctatcatgcagcttgcagaagatggtgcgtccggatcagccacaaacagtaacaaccatctaatcgagcctcagatccgccggcctcgtagcctcagctcgccaacagtaactttatctgccccgctggagggtgccaaggactcacccgtacgtcgggctgtgaaagacaccctttccaacccacagtccccacagccatcaccttacaactcccccaaaccacaacacaaagtcacacagagcttcttgccacccggctgggaaatgaggatagcgccaaacggccggcccttcttcattgatcataacacaaagactacaacctgggaagatccacgtttgaaatttccagtacatatgcggtcaaagacatctttaaaccccaatgaccttggcccccttcctcctggctgggaagaaagaattcacttggatggccgaacgttttatattgatcataatagcaaaattactcagtgggaagacccaagactgcagaacccagctattactggtccggctgtcccttactccagagaatttaagcagaaatatgactacttcaggaagaaattaaagaaacctgctgatatccccaataggtttgaaatgaaacttcacagaaataacatatttgaagagtcctatcggagaattatgtccgtgaaaagaccagatgtcctaaaagctagactgtggattgagtttgaatcagagaaaggtcttgactatgggggtgtggccagagaatggttcttcttactgtccaaagagatgttcaacccctactacggcctctttgagtactctgccacggacaactacacccttcagatcaaccctaattcaggcctctgtaatgaggatcatttgtcctacttcacttttattggaagagttgctggtctggccgtatttcatgggaagctcttagatggtttcttcattagaccattttacaagatgatgttgggaaagcagataaccctgaatgacatggaatctgtggatagtgaatattacaactctttgaaatggatcctggagaatgaccctactgagctggacctcatgttctgcatagacgaagaaaactttggacagacatatcaagtggatttgaagcccaatgggtcagaaataatggtcacaaatgaaaacaaaagggaatatatcgacttagtcatccagtggagatttgtgaacagggtccagaagcagatgaacgccttcttggagggattcacagaactacttcctattgatttgattaaaatttttgatgaaaatgagctggagttgctcatgtgcggcctcggtgatgtggatgtgaatgactggagacagcattctatttacaagaacggctactgcccaaaccaccccgtcattcagtggttctggaaggctgtgctactcatggacgccgaaaagcgtatccggttactgcagtttgtcacagggacatcgcgagtacctatgaatggatttgccgaactttatggttccaatggtcctcagctgtttacaatagagcaatggggcagtcctgagaaactgcccagagctcacacatgctttaatcgccttgacttacctccatatgaaacctttgaagatttacgagagaaacttctcatggccgtggaaaatgctcaaggatttgaaggggtggattaagcaccctgtgcctcgggggtggttgttcttcaagcaagttctgcttgcacttttgcatttgcctaacagacttttgcagaggcgatggcagagagcagctgcaggcatggtccctggagccgagccttcaccacgcactcgtccaagttcggatgcgggaacctggtcccagcttgagttcctgcctttcccaccacaaattatcaactggttgatgtgtacactaattacatttcaggaggacttaatgctatttatgttgtgcctctgcaggcaaagcccttaataaatattttacatcctttctaatgacaatgaatggaattaatcactcaacaggtatagtattacgactcatgtttactttttaaaatgatttagaccgattttcagattttatttcgttatgattaaagatgtctcatgtacttggaaaagtgagcattttttttttttttgtatttcactttcataccaggcttaatgtcaatgacatttttatttttgaagtactctgacacctccaccctctactttattagaattggaaggcaaatttttgtccaaaaacctacagacaagtactttgagagaatttccaatataatattagacataatgataattttttccatactcagaatgaaaaactggatattacgtttttgttttggggtttttttgtacaaatttagctaatagctacaggctgagagaattgtaacatagcatgacaaattttgtgttgacttgaaaggaatcacaccattattccttagaagtaattacatgtgttctaacacatttgagacagggttggactcccatttctcatccgagaaattacttaacccttcctggcgctgtacagtcatcttttattctatttcctctttgctgtttgtagtagagacattttgaatgaaacttggcactgcttgattcaaaactgtggaaaccagatctgtttagtctcctgtttgtatgcgtttgctaatggtagctaaataaccagtttttgttgtaaatgcaccaattctgaaggcactttatgtactacatggaggtcatatctggttttgtttttatttttttatcatgaacattaaatgtgatgatgatttcttttccctgcacacatctttccggtgcaatatctatcaattgtgaatctggctgctggtgtataaaaacctggatgtaaagctgagcctacagacctgtcctcaccaactgttttgtgatttctactcaactacaaagatttatttaatgtactcttaatctaactgagttttgttaccaatgacctgttgcatgcttcaataccgtgtactgcctgagttgtgcctcttgtgtgctagattaaaagtgagacagagacttgacttgatcctctgagctcaagctattgagctggtagtggcagaggactgagggtacctgcacagtttgattcttttccacgtgtaagtctccattgcagaattgtcgtgctttgagaaaacacctgaggcagtgtgggagttgaacgaccctgctgtcctttttaacctgtgttgtcctagaccctgtcggggcagtcaggggacactagagatttgatctcatgcgagtcatcaataggacaaaaaagttgtggtttggggaggtctgtttgttacataaaaaggacctttcggtgtaagaaattgccgtttttaccctgccctggctggcatgtgagaagccatggaaggttgtggttgtaaatgagttgtctaaaggggtgcagaggcctgaggtttctaaaagaaggtagatttctacagagctgagtgttggttcctttttcttattggttgaaaattacctggtagtgatcagaaaacttagatgctatgtaactaaaaaaaaaaaaaaaaaaaaaaaaaaaaaaaaaaaaattcccgctcatgagttttgactattggtgagatgttttccgctacagttaacatgacaaatgtctcagtggcaaaaatcccctttttgtaagcccccatagtctagaggcagttttctttttaagaatcatgccagagcctgagtcgagcagtatgctttcttggtttttgagagtaattgtgtaattgtagagggagaaatccaattctaacctaagaactgggattcttctgtcatcttgtaaaccgtatattgaaaaaaacagaatgtcactaaatgcatattaagtcaagtattggaaagtataaaagaaaaatcattctgacaatttctaagccagaagcaaacaagaattactgaaatctaccccatgaatacttggaaggcagtaattgtgagtgacacctcagttcatcaaccccttaataatatcagcttaattttaatgacaactaaatatgctgaagtgaggatttagtattttttaaaaaagcaaaacaaggttcagtagtcctcagcaattctccaagtttctctctttgcctaaaatggtcatagatcttgatttctctgaatcgtgatgaccacacccagtcatcttcacagcataattgcaggtggcagtaaagagagtgtgctgggtaaggagcagttgctgggtcattccttgggccccgacctgcccggggagtagccctgggggagagagggcagtgttgcctatcccagaggtcccagcagtcacactgctctgcaggccgggctctctttatagccagagaaatcaccttaatgcagtctctttagttgtctgctgaagctgtagttattatgggccacttacatgaggctgagaagtacgtgccggagctcacacactgcctgttgcggttctcttaacatcagttatcacagctgcctgtgggtcccgggtatttccattcctgccccttgttggcccgaggaaggatgtggaaagagcacctggtgggatgaaggtccaacagcctgtgcctctccactgctggccctggagccggcagcagtgaggcattcattgtctgtgttgcggtgtattcccagcttcagtgctcttttcctttttgcctgaaatgtttatgcttctctgcagccagtcctctaacaaatctcaagaacaaaggtaagacacttggtttttgtttccaggacccttcagaaggtgacatcagatattccctaaattcagacaatgagggatacagagcgacttggcatgtattatttctcccatgtaaggacaaagggacagattattattgttatttctgagacagagtcttgctctgtagctcaggctggagtgcagtggctcaatctcagctcaccacaacctctgcctcctggcttcaagcgattcttctgcctcagcctccccgaatagttgggattacaggcacccaccaccacgcctggctaatttttgtatttttagtagagatggtttcaccatgctggccaggctggtcttgaactcctgacctcaggtgatcctcccgcctcagccttccaaagtgctgggattacaagcatgagccaccgcacccggcctcacagtgacagattctgagaaacagcatgcaaaacatttgaaccattttctacatctcccattgttgcatagagagtgtgcaccgctgctatcttgccagatccacactggtcctcccgaaagccaggttcatacacagcaactttttaattattctaacagttacccattaacagtcgactcctgtatttctgagagtcttgtactcacctctgaaatttaaaaacgtataaagagagcctgggttaatcagttctgcagcccctacgtgacactgtgctagttctccttcttctgtctcctccttaccctggccctgcacccctgtacttaagagggagaggtgggaggtgctgtctggtatcatttgctgcctcgccagtagagggtgccgctgtgcagggtaactgcccgcctgctcccttcctgacctcccctgaccccgaagatcactacctctgtcattcaggcattggggtacatcctgataagtcgtgtcagaactgccaatttcaggactgagatgtgtttttaaaaaacaaatccttataaactccactttgtactttagattttaaaactggggaaaaatgtgatattctttggaccacttttttaatttatataagccttaatgaacagtgtctatacatttgcatacacacacccccaccccagagtgttctcagtatgtcagagaaagtgccacagcattaggacgggagcttggagaacgttttctagaaaagggttagcttcctgttggcatgaaattttccaagcaaacctcattaaacatctgttgtttgttaaagatgttccactgaaagcaacgcatgtttcaaaggcacgtctttccgttcgttggttttctgtgtgtaaggagtagcattgctgttggcgcctaacctcgcgtgcactgcattctcaaccccgtaccagtgcatcatcagaagccttcctcgtgaccataactctgtgtctgcagatatgtgttcccgtgtaagccagttttccccttttactcagactgatttcacctagattgtcacggtttccttcatgttaactttgcgtgactttgttcttcctttactactctgtatgtaatatatatacatatatacgtacatatgctgtccaaatatatttgtatatatttgtatagcatttttacacctttattgagtaatctggtttcgaaaggaggtgagagtttagtcccttctgcagttttctccaagctgtgtcctgtgaatttcaacccttggagcctaagaaaaccctaggaagatgatgttaatttgctgtcatttcctaattcaggatctatcatcaaatgaaacatgaaaaaaacagtgacttttaaggtgaaaagagtttcaagcattccaaataaattatcaatgtttcataactttttattataaacccacctcctaataggaagccaagtactatttgatacagtggtaaaaaccaaactaccttgaatttttttaaggcaacttatgaataatgctcattttcacagtcagaatagctttaaaatatggttgaatttgatacacacaggaagttttcttgaagaacaatcctttcgcttttcttttttcttgagagatctaaagagaaactgtagattgttttcctgacagcaaaagactaatgtgacaaaatgaagtcattgtaaagaagcgatgcaacttgtcaaatatttaataaagaattatggaagctggaacattttctac

SEQ ID NO: 19810 - DNA, 8346 bp, Homo sapiens
  source 1..8346: mol_type = unassigned DNA
acatttgaatttgctcccgattcgagagaggcaggcatccgcggcagcagcttccaacccagacaggcttaagccgcgcgagggtgcccgggtgggtggctgcgcagggccctacctgggcgggagcggctgcagagccctgtccacgcggtgcctccccagcacggcacctcccactccaggctgttggttacctggccgggagctggcggagaccaggatttctcctcgccgccgttgctgttgttaggggaaacagaccatctgcatctagacctgcctctctctccgctccccacttcagacgagctcttcctgcctggaatctgtgatccgtatgtgaaactttcattgtacgtagcggatgagaatagagaacttgctttggtccagacaaaaacaattaaaaagacactgaacccaaaatggaatgaagaattttatttcagggtaaacccatctaatcacagactcctatttgaagtatttgacgaaaatagactgacacgagacgacttcctgggccaggtggacgtgccccttagtcaccttccgacagaagatccaaccatggagcgaccctatacatttaaggactttctcctcagaccaagaagtcataagtctcgagttaagggatttttgcgattgaaaatggcctatatgccaaaaaatggaggtcaagatgaagaaaacagtgaccagagggatgacatggagcatggatgggaagttgttgactcaaatgactcggcttctcagcaccaagaggaacttcctcctcctcctctgcctcccgggtgggaagaaaaagtggacaatttaggccgaacttactatgtcaaccacaacaaccggaccactcagtggcacagaccaagcctgatggacgtgtcctcggagtcggacaataacatcagacagatcaaccaggaggcagcacaccggcgcttccgctcccgcaggcacatcagcgaagacttggagcccgagccctcggagggcggggatgtccccgagccttgggagaccatttcagaggaagtgaatatcgctggagactctctcggtctggctctgcccccaccaccggcctccccaggatctcggaccagccctcaggagctgtcagaggaactaagcagaaggcttcagatcactccagactccaatggggaacagttcagctctttgattcaaagagaaccctcctcaaggttgaggtcatgcagtgtcaccgacgcagttgcagaacagggccatctaccaccgccatcagtggcctatgtacataccacgccgggtctgccttcaggctgggaagaaagaaaagatgctaaggggcgcacatactatgtcaatcataacaatcgaaccacaacttggactcgacctatcatgcagcttgcagaagatggtgcgtccggatcagccacaaacagtaacaaccatctaatcgagcctcagatccgccggcctcgtagcctcagctcgccaacagtaactttatctgccccgctggagggtgccaaggactcacccgtacgtcgggctgtgaaagacaccctttccaacccacagtccccacagccatcaccttacaactcccccaaaccacaacacaaagtcacacagagcttcttgccacccggctgggaaatgaggatagcgccaaacggccggcccttcttcattgatcataacacaaagactacaacctgggaagatccacgtttgaaatttccagtacatatgcggtcaaagacatctttaaaccccaatgaccttggcccccttcctcctggctgggaagaaagaattcacttggatggccgaacgttttatattgatcataatagcaaaattactcagtgggaagacccaagactgcagaacccagctattactggtccggctgtcccttactccagagaatttaagcagaaatatgactacttcaggaagaaattaaagaaacctgctgatatccccaataggtttgaaatgaaacttcacagaaataacatatttgaagagtcctatcggagaattatgtccgtgaaaagaccagatgtcctaaaagctagactgtggattgagtttgaatcagagaaaggtcttgactatgggggtgtggccagagaatggttcttcttactgtccaaagagatgttcaacccctactacggcctctttgagtactctgccacggacaactacacccttcagatcaaccctaattcaggcctctgtaatgaggatcatttgtcctacttcacttttattggaagagttgctggtctggccgtatttcatgggaagctcttagatggtttcttcattagaccattttacaagatgatgttgggaaagcagataaccctgaatgacatggaatctgtggatagtgaatattacaactctttgaaatggatcctggagaatgaccctactgagctggacctcatgttctgcatagacgaagaaaactttggacagacatatcaagtggatttgaagcccaatgggtcagaaataatggtcacaaatgaaaacaaaagggaatatatcgacttagtcatccagtggagatttgtgaacagggtccagaagcagatgaacgccttcttggagggattcacagaactacttcctattgatttgattaaaatttttgatgaaaatgagctggagttgctcatgtgcggcctcggtgatgtggatgtgaatgactggagacagcattctatttacaagaacggctactgcccaaaccaccccgtcattcagtggttctggaaggctgtgctactcatggacgccgaaaagcgtatccggttactgcagtttgtcacagggacatcgcgagtacctatgaatggatttgccgaactttatggttccaatggtcctcagctgtttacaatagagcaatggggcagtcctgagaaactgcccagagctcacacatgctttaatcgccttgacttacctccatatgaaacctttgaagatttacgagagaaacttctcatggccgtggaaaatgctcaaggatttgaaggggtggattaagcaccctgtgcctcgggggtggttgttcttcaagcaagttctgcttgcacttttgcatttgcctaacagacttttgcagaggcgatggcagagagcagctgcaggcatggtccctggagccgagccttcaccacgcactcgtccaagttcggatgcgggaacctggtcccagcttgagttcctgcctttcccaccacaaattatcaactggttgatgtgtacactaattacatttcaggaggacttaatgctatttatgttgtgcctctgcaggcaaagcccttaataaatattttacatcctttctaatgacaatgaatggaattaatcactcaacaggtatagtattacgactcatgtttactttttaaaatgatttagaccgattttcagattttatttcgttatgattaaagatgtctcatgtacttggaaaagtgagcattttttttttttttgtatttcactttcataccaggcttaatgtcaatgacatttttatttttgaagtactctgacacctccaccctctactttattagaattggaaggcaaatttttgtccaaaaacctacagacaagtactttgagagaatttccaatataatattagacataatgataattttttccatactcagaatgaaaaactggatattacgtttttgttttggggtttttttgtacaaatttagctaatagctacaggctgagagaattgtaacatagcatgacaaattttgtgttgacttgaaaggaatcacaccattattccttagaagtaattacatgtgttctaacacatttgagacagggttggactcccatttctcatccgagaaattacttaacccttcctggcgctgtacagtcatcttttattctatttcctctttgctgtttgtagtagagacattttgaatgaaacttggcactgcttgattcaaaactgtggaaaccagatctgtttagtctcctgtttgtatgcgtttgctaatggtagctaaataaccagtttttgttgtaaatgcaccaattctgaaggcactttatgtactacatggaggtcatatctggttttgtttttatttttttatcatgaacattaaatgtgatgatgatttcttttccctgcacacatctttccggtgcaatatctatcaattgtgaatctggctgctggtgtataaaaacctggatgtaaagctgagcctacagacctgtcctcaccaactgttttgtgatttctactcaactacaaagatttatttaatgtactcttaatctaactgagttttgttaccaatgacctgttgcatgcttcaataccgtgtactgcctgagttgtgcctcttgtgtgctagattaaaagtgagacagagacttgacttgatcctctgagctcaagctattgagctggtagtggcagaggactgagggtacctgcacagtttgattcttttccacgtgtaagtctccattgcagaattgtcgtgctttgagaaaacacctgaggcagtgtgggagttgaacgaccctgctgtcctttttaacctgtgttgtcctagaccctgtcggggcagtcaggggacactagagatttgatctcatgcgagtcatcaataggacaaaaaagttgtggtttggggaggtctgtttgttacataaaaaggacctttcggtgtaagaaattgccgtttttaccctgccctggctggcatgtgagaagccatggaaggttgtggttgtaaatgagttgtctaaaggggtgcagaggcctgaggtttctaaaagaaggtagatttctacagagctgagtgttggttcctttttcttattggttgaaaattacctggtagtgatcagaaaacttagatgctatgtaactaaaaaaaaaaaaaaaaaaaaaaaaaaaaaaaaaaaaattcccgctcatgagttttgactattggtgagatgttttccgctacagttaacatgacaaatgtctcagtggcaaaaatcccctttttgtaagcccccatagtctagaggcagttttctttttaagaatcatgccagagcctgagtcgagcagtatgctttcttggtttttgagagtaattgtgtaattgtagagggagaaatccaattctaacctaagaactgggattcttctgtcatcttgtaaaccgtatattgaaaaaaacagaatgtcactaaatgcatattaagtcaagtattggaaagtataaaagaaaaatcattctgacaatttctaagccagaagcaaacaagaattactgaaatctaccccatgaatacttggaaggcagtaattgtgagtgacacctcagttcatcaaccccttaataatatcagcttaattttaatgacaactaaatatgctgaagtgaggatttagtattttttaaaaaagcaaaacaaggttcagtagtcctcagcaattctccaagtttctctctttgcctaaaatggtcatagatcttgatttctctgaatcgtgatgaccacacccagtcatcttcacagcataattgcaggtggcagtaaagagagtgtgctgggtaaggagcagttgctgggtcattccttgggccccgacctgcccggggagtagccctgggggagagagggcagtgttgcctatcccagaggtcccagcagtcacactgctctgcaggccgggctctctttatagccagagaaatcaccttaatgcagtctctttagttgtctgctgaagctgtagttattatgggccacttacatgaggctgagaagtacgtgccggagctcacacactgcctgttgcggttctcttaacatcagttatcacagctgcctgtgggtcccgggtatttccattcctgccccttgttggcccgaggaaggatgtggaaagagcacctggtgggatgaaggtccaacagcctgtgcctctccactgctggccctggagccggcagcagtgaggcattcattgtctgtgttgcggtgtattcccagcttcagtgctcttttcctttttgcctgaaatgtttatgcttctctgcagccagtcctctaacaaatctcaagaacaaaggtaagacacttggtttttgtttccaggacccttcagaaggtgacatcagatattccctaaattcagacaatgagggatacagagcgacttggcatgtattatttctcccatgtaaggacaaagggacagattattattgttatttctgagacagagtcttgctctgtagctcaggctggagtgcagtggctcaatctcagctcaccacaacctctgcctcctggcttcaagcgattcttctgcctcagcctccccgaatagttgggattacaggcacccaccaccacgcctggctaatttttgtatttttagtagagatggtttcaccatgctggccaggctggtcttgaactcctgacctcaggtgatcctcccgcctcagccttccaaagtgctgggattacaagcatgagccaccgcacccggcctcacagtgacagattctgagaaacagcatgcaaaacatttgaaccattttctacatctcccattgttgcatagagagtgtgcaccgctgctatcttgccagatccacactggtcctcccgaaagccaggttcatacacagcaactttttaattattctaacagttacccattaacagtcgactcctgtatttctgagagtcttgtactcacctctgaaatttaaaaacgtataaagagagcctgggttaatcagttctgcagcccctacgtgacactgtgctagttctccttcttctgtctcctccttaccctggccctgcacccctgtacttaagagggagaggtgggaggtgctgtctggtatcatttgctgcctcgccagtagagggtgccgctgtgcagggtaactgcccgcctgctcccttcctgacctcccctgaccccgaagatcactacctctgtcattcaggcattggggtacatcctgataagtcgtgtcagaactgccaatttcaggactgagatgtgtttttaaaaaacaaatccttataaactccactttgtactttagattttaaaactggggaaaaatgtgatattctttggaccacttttttaatttatataagccttaatgaacagtgtctatacatttgcatacacacacccccaccccagagtgttctcagtatgtcagagaaagtgccacagcattaggacgggagcttggagaacgttttctagaaaagggttagcttcctgttggcatgaaattttccaagcaaacctcattaaacatctgttgtttgttaaagatgttccactgaaagcaacgcatgtttcaaaggcacgtctttccgttcgttggttttctgtgtgtaaggagtagcattgctgttggcgcctaacctcgcgtgcactgcattctcaaccccgtaccagtgcatcatcagaagccttcctcgtgaccataactctgtgtctgcagatatgtgttcccgtgtaagccagttttccccttttactcagactgatttcacctagattgtcacggtttccttcatgttaactttgcgtgactttgttcttcctttactactctgtatgtaatatatatacatatatacgtacatatgctgtccaaatatatttgtatatatttgtatagcatttttacacctttattgagtaatctggtttcgaaaggaggtgagagtttagtcccttctgcagttttctccaagctgtgtcctgtgaatttcaacccttggagcctaagaaaaccctaggaagatgatgttaatttgctgtcatttcctaattcaggatctatcatcaaatgaaacatgaaaaaaacagtgacttttaaggtgaaaagagtttcaagcattccaaataaattatcaatgtttcataactttttattataaacccacctcctaataggaagccaagtactatttgatacagtggtaaaaaccaaactaccttgaatttttttaaggcaacttatgaataatgctcattttcacagtcagaatagctttaaaatatggttgaatttgatacacacaggaagttttcttgaagaacaatcctttcgcttttcttttttcttgagagatctaaagagaaactgtagattgttttcctgacagcaaaagactaatgtgacaaaatgaagtcattgtaaagaagcgatgcaacttgtcaaatatttaataaagaattatggaagctggaacattttctac

SEQ ID NO: 19811 - DNA, 8436 bp, Homo sapiens
  source 1..8436: mol_type = unassigned DNA
attttgaccgctatttagaagagtgacctcataaatcttttagcaaagtagacacacatacctaccacatttcttaaaagtagattcgtattttgatttgagattgttgaaaagcatggtatgtttggagtgcacttagttatgtcccatctcataaagactgttgagctctctgcactgctgatgatgaagcattgcatgaacccagaaaacggggatgccaaagcacagggcttaggtgctgttccttgcgtcatcagcagaggtctgtccactttgtagaagggagagtcccgtattctcagagtaaaagttgtttctggaattgatctcgccaaaaaggacatctttggagccagtgatccgtatgtgaaactttcattgtacgtagcggatgagaatagagaacttgctttggtccagacaaaaacaattaaaaagacactgaacccaaaatggaatgaagaattttatttcagggtaaacccatctaatcacagactcctatttgaagtatttgacgaaaatagactgacacgagacgacttcctgggccaggtggacgtgccccttagtcaccttccgacagaagatccaaccatggagcgaccctatacatttaaggactttctcctcagaccaagaagtcataagtctcgagttaagggatttttgcgattgaaaatggcctatatgccaaaaaatggaggtcaagatgaagaaaacagtgaccagagggatgacatggagcatggatgggaagttgttgactcaaatgactcggcttctcagcaccaagaggaacttcctcctcctcctctgcctcccgggtgggaagaaaaagtggacaatttaggccgaacttactatgtcaaccacaacaaccggaccactcagtggcacagaccaagcctgatggacgtgtcctcggagtcggacaataacatcagacagatcaaccaggaggcagcacaccggcgcttccgctcccgcaggcacatcagcgaagacttggagcccgagccctcggagggcggggatgtccccgagccttgggagaccatttcagaggaagtgaatatcgctggagactctctcggtctggctctgcccccaccaccggcctccccaggatctcggaccagccctcaggagctgtcagaggaactaagcagaaggcttcagatcactccagactccaatggggaacagttcagctctttgattcaaagagaaccctcctcaaggttgaggtcatgcagtgtcaccgacgcagttgcagaacagggccatctaccaccgcccagtgccccagctgggagagcgcgttcatcaactgtcacgggtggtgaggaaccaacgccatcagtggcctatgtacataccacgccgggtctgccttcaggctgggaagaaagaaaagatgctaaggggcgcacatactatgtcaatcataacaatcgaaccacaacttggactcgacctatcatgcagcttgcagaagatggtgcgtccggatcagccacaaacagtaacaaccatctaatcgagcctcagatccgccggcctcgtagcctcagctcgccaacagtaactttatctgccccgctggagggtgccaaggactcacccgtacgtcgggctgtgaaagacaccctttccaacccacagtccccacagccatcaccttacaactcccccaaaccacaacacaaagtcacacagagcttcttgccacccggctgggaaatgaggatagcgccaaacggccggcccttcttcattgatcataacacaaagactacaacctgggaagatccacgtttgaaatttccagtacatatgcggtcaaagacatctttaaaccccaatgaccttggcccccttcctcctggctgggaagaaagaattcacttggatggccgaacgttttatattgatcataatagcaaaattactcagtgggaagacccaagactgcagaacccagctattactggtccggctgtcccttactccagagaatttaagcagaaatatgactacttcaggaagaaattaaagaaacctgctgatatccccaataggtttgaaatgaaacttcacagaaataacatatttgaagagtcctatcggagaattatgtccgtgaaaagaccagatgtcctaaaagctagactgtggattgagtttgaatcagagaaaggtcttgactatgggggtgtggccagagaatggttcttcttactgtccaaagagatgttcaacccctactacggcctctttgagtactctgccacggacaactacacccttcagatcaaccctaattcaggcctctgtaatgaggatcatttgtcctacttcacttttattggaagagttgctggtctggccgtatttcatgggaagctcttagatggtttcttcattagaccattttacaagatgatgttgggaaagcagataaccctgaatgacatggaatctgtggatagtgaatattacaactctttgaaatggatcctggagaatgaccctactgagctggacctcatgttctgcatagacgaagaaaactttggacagacatatcaagtggatttgaagcccaatgggtcagaaataatggtcacaaatgaaaacaaaagggaatatatcgacttagtcatccagtggagatttgtgaacagggtccagaagcagatgaacgccttcttggagggattcacagaactacttcctattgatttgattaaaatttttgatgaaaatgagctggagttgctcatgtgcggcctcggtgatgtggatgtgaatgactggagacagcattctatttacaagaacggctactgcccaaaccaccccgtcattcagtggttctggaaggctgtgctactcatggacgccgaaaagcgtatccggttactgcagtttgtcacagggacatcgcgagtacctatgaatggatttgccgaactttatggttccaatggtcctcagctgtttacaatagagcaatggggcagtcctgagaaactgcccagagctcacacatgctttaatcgccttgacttacctccatatgaaacctttgaagatttacgagagaaacttctcatggccgtggaaaatgctcaaggatttgaaggggtggattaagcaccctgtgcctcgggggtggttgttcttcaagcaagttctgcttgcacttttgcatttgcctaacagacttttgcagaggcgatggcagagagcagctgcaggcatggtccctggagccgagccttcaccacgcactcgtccaagttcggatgcgggaacctggtcccagcttgagttcctgcctttcccaccacaaattatcaactggttgatgtgtacactaattacatttcaggaggacttaatgctatttatgttgtgcctctgcaggcaaagcccttaataaatattttacatcctttctaatgacaatgaatggaattaatcactcaacaggtatagtattacgactcatgtttactttttaaaatgatttagaccgattttcagattttatttcgttatgattaaagatgtctcatgtacttggaaaagtgagcattttttttttttttgtatttcactttcataccaggcttaatgtcaatgacatttttatttttgaagtactctgacacctccaccctctactttattagaattggaaggcaaatttttgtccaaaaacctacagacaagtactttgagagaatttccaatataatattagacataatgataattttttccatactcagaatgaaaaactggatattacgtttttgttttggggtttttttgtacaaatttagctaatagctacaggctgagagaattgtaacatagcatgacaaattttgtgttgacttgaaaggaatcacaccattattccttagaagtaattacatgtgttctaacacatttgagacagggttggactcccatttctcatccgagaaattacttaacccttcctggcgctgtacagtcatcttttattctatttcctctttgctgtttgtagtagagacattttgaatgaaacttggcactgcttgattcaaaactgtggaaaccagatctgtttagtctcctgtttgtatgcgtttgctaatggtagctaaataaccagtttttgttgtaaatgcaccaattctgaaggcactttatgtactacatggaggtcatatctggttttgtttttatttttttatcatgaacattaaatgtgatgatgatttcttttccctgcacacatctttccggtgcaatatctatcaattgtgaatctggctgctggtgtataaaaacctggatgtaaagctgagcctacagacctgtcctcaccaactgttttgtgatttctactcaactacaaagatttatttaatgtactcttaatctaactgagttttgttaccaatgacctgttgcatgcttcaataccgtgtactgcctgagttgtgcctcttgtgtgctagattaaaagtgagacagagacttgacttgatcctctgagctcaagctattgagctggtagtggcagaggactgagggtacctgcacagtttgattcttttccacgtgtaagtctccattgcagaattgtcgtgctttgagaaaacacctgaggcagtgtgggagttgaacgaccctgctgtcctttttaacctgtgttgtcctagaccctgtcggggcagtcaggggacactagagatttgatctcatgcgagtcatcaataggacaaaaaagttgtggtttggggaggtctgtttgttacataaaaaggacctttcggtgtaagaaattgccgtttttaccctgccctggctggcatgtgagaagccatggaaggttgtggttgtaaatgagttgtctaaaggggtgcagaggcctgaggtttctaaaagaaggtagatttctacagagctgagtgttggttcctttttcttattggttgaaaattacctggtagtgatcagaaaacttagatgctatgtaactaaaaaaaaaaaaaaaaaaaaaaaaaaaaaaaaaaaaattcccgctcatgagttttgactattggtgagatgttttccgctacagttaacatgacaaatgtctcagtggcaaaaatcccctttttgtaagcccccatagtctagaggcagttttctttttaagaatcatgccagagcctgagtcgagcagtatgctttcttggtttttgagagtaattgtgtaattgtagagggagaaatccaattctaacctaagaactgggattcttctgtcatcttgtaaaccgtatattgaaaaaaacagaatgtcactaaatgcatattaagtcaagtattggaaagtataaaagaaaaatcattctgacaatttctaagccagaagcaaacaagaattactgaaatctaccccatgaatacttggaaggcagtaattgtgagtgacacctcagttcatcaaccccttaataatatcagcttaattttaatgacaactaaatatgctgaagtgaggatttagtattttttaaaaaagcaaaacaaggttcagtagtcctcagcaattctccaagtttctctctttgcctaaaatggtcatagatcttgatttctctgaatcgtgatgaccacacccagtcatcttcacagcataattgcaggtggcagtaaagagagtgtgctgggtaaggagcagttgctgggtcattccttgggccccgacctgcccggggagtagccctgggggagagagggcagtgttgcctatcccagaggtcccagcagtcacactgctctgcaggccgggctctctttatagccagagaaatcaccttaatgcagtctctttagttgtctgctgaagctgtagttattatgggccacttacatgaggctgagaagtacgtgccggagctcacacactgcctgttgcggttctcttaacatcagttatcacagctgcctgtgggtcccgggtatttccattcctgccccttgttggcccgaggaaggatgtggaaagagcacctggtgggatgaaggtccaacagcctgtgcctctccactgctggccctggagccggcagcagtgaggcattcattgtctgtgttgcggtgtattcccagcttcagtgctcttttcctttttgcctgaaatgtttatgcttctctgcagccagtcctctaacaaatctcaagaacaaaggtaagacacttggtttttgtttccaggacccttcagaaggtgacatcagatattccctaaattcagacaatgagggatacagagcgacttggcatgtattatttctcccatgtaaggacaaagggacagattattattgttatttctgagacagagtcttgctctgtagctcaggctggagtgcagtggctcaatctcagctcaccacaacctctgcctcctggcttcaagcgattcttctgcctcagcctccccgaatagttgggattacaggcacccaccaccacgcctggctaatttttgtatttttagtagagatggtttcaccatgctggccaggctggtcttgaactcctgacctcaggtgatcctcccgcctcagccttccaaagtgctgggattacaagcatgagccaccgcacccggcctcacagtgacagattctgagaaacagcatgcaaaacatttgaaccattttctacatctcccattgttgcatagagagtgtgcaccgctgctatcttgccagatccacactggtcctcccgaaagccaggttcatacacagcaactttttaattattctaacagttacccattaacagtcgactcctgtatttctgagagtcttgtactcacctctgaaatttaaaaacgtataaagagagcctgggttaatcagttctgcagcccctacgtgacactgtgctagttctccttcttctgtctcctccttaccctggccctgcacccctgtacttaagagggagaggtgggaggtgctgtctggtatcatttgctgcctcgccagtagagggtgccgctgtgcagggtaactgcccgcctgctcccttcctgacctcccctgaccccgaagatcactacctctgtcattcaggcattggggtacatcctgataagtcgtgtcagaactgccaatttcaggactgagatgtgtttttaaaaaacaaatccttataaactccactttgtactttagattttaaaactggggaaaaatgtgatattctttggaccacttttttaatttatataagccttaatgaacagtgtctatacatttgcatacacacacccccaccccagagtgttctcagtatgtcagagaaagtgccacagcattaggacgggagcttggagaacgttttctagaaaagggttagcttcctgttggcatgaaattttccaagcaaacctcattaaacatctgttgtttgttaaagatgttccactgaaagcaacgcatgtttcaaaggcacgtctttccgttcgttggttttctgtgtgtaaggagtagcattgctgttggcgcctaacctcgcgtgcactgcattctcaaccccgtaccagtgcatcatcagaagccttcctcgtgaccataactctgtgtctgcagatatgtgttcccgtgtaagccagttttccccttttactcagactgatttcacctagattgtcacggtttccttcatgttaactttgcgtgactttgttcttcctttactactctgtatgtaatatatatacatatatacgtacatatgctgtccaaatatatttgtatatatttgtatagcatttttacacctttattgagtaatctggtttcgaaaggaggtgagagtttagtcccttctgcagttttctccaagctgtgtcctgtgaatttcaacccttggagcctaagaaaaccctaggaagatgatgttaatttgctgtcatttcctaattcaggatctatcatcaaatgaaacatgaaaaaaacagtgacttttaaggtgaaaagagtttcaagcattccaaataaattatcaatgtttcataactttttattataaacccacctcctaataggaagccaagtactatttgatacagtggtaaaaaccaaactaccttgaatttttttaaggcaacttatgaataatgctcattttcacagtcagaatagctttaaaatatggttgaatttgatacacacaggaagttttcttgaagaacaatcctttcgcttttcttttttcttgagagatctaaagagaaactgtagattgttttcctgacagcaaaagactaatgtgacaaaatgaagtcattgtaaagaagcgatgcaacttgtcaaatatttaataaagaattatggaagctggaacattttctac

SEQ ID NO: 19812 - DNA, 3341 bp, Homo sapiens
  source 1..3341: mol_type = unassigned DNA
gggaggcgctgcgactgacaagcggctctgcccgggaccttctcgctttcatctagcgctgcactcaatggaggggcgggcaccgcagtgcttaatgctgtcttaactagtgtaggaaaacggctcaacccaccgctgccgaaatgaagtataagaatcttatggcaagggccttatatgacaatgtcccagagtgtgccgaggaactggcctttcgcaagggagacatcctgaccgtcatagagcagaacacagggggactggaaggatggtggctgtgctcattacacggtcggcaaggcattgtcccaggcaaccgggtgaagcttctgattggtcccatgcaggagactgcctccagtcacgagcagcctgcctctggactgatgcagcagacctttggccaacagaagctctatcaagtgccaaacccacaggctgctccccgagacaccatctaccaagtgccaccttcctaccaaaatcagggaatttaccaagtccccactggccacggcacccaagaacaagaggtatatcaggtgccaccatcagtgcagagaagcattgggggaaccagtgggccccacgtgggtaaaaaggtgttccagagagatgggcaagtgtcctatttcttagtgagagcctctaaacaaaccagcttgtgaacctccactgaaaagatctcatctgatgagcattttaataaagtgtcctgagtttggaggcttgccgtctttctcttggataaatatcttcatctcctagacttggaaaaacacattttctcctggggtttcccattggcgtgtcttgagctgctctggtgataaccgtaataatgccaatactgatacgaacagcagaaaacagtaaccccaagaactctacagatgatcatcaaggaccactgtctcttaccatttgctgctttggtttgaaattctcactgcctcgtagatctcattttgagcactatacattcctaaagattgatttctttctatctgacttaaatttaggaatgattaaatcttcatttctcccatgatttgatcctaaaacattttgaaaggaaacagccttgagatctgtgattactaagacatacataacattcttatcacattagaaagcaagaattgactgttgcttgtcttgttcctgttgtcttgtcccctgaattcctgtttatctttgattgtatgtgggacattgtattttcagtacatttgtagaaataatgtgaagcctataaagatgttctctgcctccagagagaattttgtttccttctgccagcctcataggcaagcatacatctgattccatgctttgagctgttctggcaaccctgatgtcttcagcctgtgcaagggtgggtttacttccagttaatccttattttggatacagtccttagggttccaacccaaagtcgggggtggtttggggtccctgccttggtgagccctatagtccaatgttcccccttacccaaagaagctgtagaaaacccagcacagcctcccaggcaccagtttcagatcagcaaaaaatagcaaatgcccccaggcttgaaaagcaatctcacctctattaactcttctcccaaagtttgacctagtaattctttattatccttgaactcttgacactattaagaagatcttttcggctgggcgcagtggctcacgcctgtaatcccagcactttcggaggccgaggcgggcggatcacgaggtcaggagatcgagatcgtcctggctaacacggtaaaaccccgtctctactaaaaatacaaaaaattagctgggcacggtggcgggcgcagtgggcgggtgcctgtagtcccagctactcggaaggctgaggcaggagaatggcgtgaactcaggaggcggagcttgcggtgagccgagatctcaccactgcactccagcctgggcgacagagtaagactctgtctcaaaaaaaaaaaaaaaaaaaaaaaaaaaaaaaaaaaaaaaaagatctttcctagcttttcttcatttttttaagttgtcttcagcaagatggttaatctcaattacctagtccatgatttctggaagtcaaagtcaaaaggtaaaatctatatagcctaggtgacaattacaataacaataacaatagctaaggcttattatggctttatgccaggtactttatgcacttgatctcatttaatactcatatagcctatgagggaagtataatttccattttacctatgagaaaacaggcttagaatggaacctttgttctcatagcttgtgagtggtagaaccgggatttagatccagctctgcctgagtccagcttctgtttgtcaattacttccctcttcagacctaattcttccaataagcaacagaaaaagacccagtggggccatggcctctggcacacagcttctcataaacgagcctatcacacatccccagaactaaagcaatcgtatgttccttctgatgttgaggtaaaaagcagggtttgttttggtttcccttttccaaaacactcccccacatgtttctggcttgtggttaagaagaacccaggtgttcatgtcacatacgagctcaactggggaaaaggaaaccatccagcagccctccttgcctgccaatagtggcttcacccaacttggggtgcattcttctacagtttctgatttctcaacttcacctaacattcccttgccttcttggatccctctcttgcccaacactaccatgcatggctgatagggcactgttctgccccatatcccatgggttctacttaacccagagctggcttacctggaaaccaagcttattctgtagtggcagacctcacgccatcttgcttaatagccttcagttttcctttagttgattaatgtatcactcaatagattatgcaagacctactctgctaggcactgtactaggccctgtggtttatatttaaatgaagagggaatgatctctgactttaaaatgctggaagaagagatgagatgcatcaagaccgtcaaaccacaagtgataagtgctgtcagagatgtgtggatcactggctcagggagttccaaggatagagacatattatctgtttgggaagggcttggtgggggaaaggcattcagccgggccttgaaaatcaattaaagtttgaatatgaggaaagaaagaagagcatctcagacaaggacatggcatggatgaaggcacagaggtatgggcgtgcagggcatctgtggaaatggacagctcagttctcgccgagggagggagttggtgcagagcctgggggccctgccttcagaagat

SEQ ID NO: 19813 - DNA, 4536 bp, Homo sapiens
  source 1..4536: mol_type = unassigned DNA
acaacagtgagctcagagacttgagggaggcgctgcgactgacaagcggctctgcccgggaccttctcgctttcatctagcgctgcactcaatggaggggcgggcaccgcagtgcttaatgctgtcttaactagtgtaggaaaacggctcaacccaccgctgccgaaatgaagtataagaatcttatggcaagggccttatatgacaatgtcccagagtgtgccgaggaactggcctttcgcaagggagacatcctgaccgtcatagagcagaacacagggggactggaaggatggtggctgtgctcattacacggtcggcaaggcattgtcccaggcaaccgggtgaagcttctgattggtcccatgcaggagactgcctccagtcacgagcagcctgcctctggactgatgcagcagacctttggccaacagaagctctatcaagtgccaaacccacaggctgctccccgagacaccatctaccaagtgccaccttcctaccaaaatcagggaatttaccaagtccccactggccacggcacccaagaacaagaggtatatcaggtgccaccatcagtgcagagaagcattgggggaaccagtgggccccacgtgggtaaaaaggtgataacccccgtgaggacaggccatggctacgtatacgagtacccatccagataccaaaaggacgtctatgatatccctccttctcataccactcaaggggtatacgacatccctccctcatcagcaaaaggccctgtgttttcagttccagtgggagagataaaacctcaaggggtgtatgacatcccgcctacaaaaggggtatatgccattccgccctctgcttgccgggatgaagcagggcttagggaaaaagactatgacttcccccctcccatgagacaagctggaaggccggacctcagaccggagggggtttatgacattcctccaacctgcaccaagccagcagggaaggaccttcatgtaaaatacaactgtgacattccaggagctgcagaaccggtggctcgaaggcaccagagcctgtccccgaatcacccacccccgcaactcggacagtcagtgggctctcagaacgacgcatatgatgtcccccgaggcgttcagtttcttgagccaccagcagaaaccagtgagaaagcaaacccccaggaaagggatggtgtttatgatgtccctctgcataacccgccagatgctaaaggctctcgggacttggtggatgggatcaaccgattgtctttctccagtacaggcagcacccggagtaacatgtccacgtcttccacctcctccaaggagtcctcactgtcagcctccccagctcaggacaaaaggctcttcctggatccagacacagctattgagagacttcagcggctccagcaggcccttgagatgggtgtctccagcctaatggcactggtcactaccgactggcggtgttacggatatatggaaagacacatcaatgaaatacgcacagcagtggacaaggtggagctgttcctgaaggagtacctccactttgtcaagggagctgttgcaaatgctgcctgcctcccggaactcatcctccacaacaagatgaagcgggagctgcaacgagttgaagactcccaccagatcctgagtcaaaccagccatgacttaaatgagtgcagctggtccctgaatatcttggccatcaacaagccccagaacaagtgtgacgatctggaccggtttgtgatggtggcaaagacggtgcccgatgacgccaagcagctcaccacaaccatcaacaccaacgcagaggccctcttcagacccggccctggcagcttgcatctgaagaatgggccggagagcatcatgaactcaacggagtacccacacggtggctcccagggacagctgctgcatcctggtgaccacaaggcccaggcccacaacaaggcactgcccccaggcctgagcaaggagcaggcccctgactgtagcagcagtgatggttctgagaggagctggatggatgactacgattacgtccacctacagggtaaggaggagtttgagaggcaacagaaagagctattggaaaaagagaatatcatgaaacagaacaagatgcagctggaacatcatcagctgagccagttccagctgttggaacaagagattacaaagcccgtggagaatgacatctcgaagtggaagccctctcagagcctacccaccacaaacagtggcgtgagtgctcaggatcggcagttgctgtgcttctactatgaccaatgtgagacccatttcatttcccttctcaacgccattgacgcactcttcagttgtgtcagctcagcccagcccccgcgaatcttcgtggcacacagcaagtttgtcatcctcagtgcacacaaactggtgttcattggagacacgctgacacggcaggtgactgcccaggacattcgcaacaaagtcatgaactccagcaaccagctctgcgagcagctcaagaccatagtcatggcaaccaagatggccgccctccattaccccagcaccacggccctgcaggaaatggtgcaccaagtgacagacctttctagaaatgcccagctgttcaagcgctctttgctggagatggcaacgttctgagaagaaaaaaaagaggaaggggactgcgttaacggttactaaggaaaactggaaatactgtctggtttttgtaaatgttatctatttttgtagatattttatataaaaatgaaatattttaacattttatgggtcagtcaactttcagaaattcagggagctggagagggaaatctttttttttccccctgagtggttcttatgtatacatagaagtatctgagacataaactgtacagaaaacttgtccacgtgcttttgtatgcccatgtattcatgtttgtttgtagatgtttgtctgatgcatttcattaaaaaaaaaaccatgaattacgaagcaccttagtaagcaccttctaatgctgcattttttttgttgttgttaaaaacataccagctggttataatattgttctccacgtccttgtgatgattctgagcctggcactcccaaatctgggaagcatagtttatttgcaagtgttcaccttccaaatcatgaggcatagcatgacttattcttgtttggaaaactcttttcaaaactgaccatcttaaacacatgatggccaagtgcccaaaagccctcttgcggagcaaatttcagaatatatatgtggatccaagctctgatagttcaggtgctggagggaagagagacctgtgtgtttagaggccaggaccacagttaggattgggttgtttcaatactgagagacagctacaataaaaggagagcaattgcctccctggggctgttcaatcttctgcatttgtgagtggttcagtcatgaggttttccaaaagatgtttttagagttgtaaaaaccatatttgcagcaaagatttacaaaggcgtatcagactatgattgttcaccaaaataggggaatggtttgatccgccagttgcaagtagaggcctttctgactcttaatattcactttggtgctactacccccattacctgagggaaactggccaggtccttgatcatggaactatagagctaccaggacatatcctgctctctaagggaatttattgctatcttgcaccttctttaaaactcacatatgcagacctgacactcaagagtggctagctacacagagtccatctaatttttgcaacttcctgtggccagtgtgtataaccccttccactatctcacagatagtcacagcgtccattccatagtctgtctcctcacatctgttagtattgacacagcacagacaccacaagccatcaggttcttcatggggcaggtgaaatacttctaccccatgggtaaatgtattcacatattaccaagagaagaagcacattatctatgatcttttggcccagttcttatttagcatttttattccagcctacttggaaacatgtttttatttgcaatatatgcctgactgaattaagcttgcttgttttaaacaaccaaatcattggaacagaaaaggatttaaaaaacaagaatgcatgatctcagagtgattaaaaaaaaatcagtggaaataaatgatcatagaaggtgcttttcaaaacaactgctattataattctcaaagtcctactctgccaaaagaagattaaaagtcatacattacattacaaggaaatgttcatgtgggaagagggttgctgaaaatcaacaacgcttgaagttaaaaagtgtgtctttgtagatttcattgtataatgtgtatttcttaggagatggctgacttgattgatctacgctaagtggagacatttcacatttttaaaaccaaatgttcaatctgtattactctttgccgtcttgtatgtagaggctatttttaaatcattaaatttttagatctctgttttcata

SEQ ID NO: 19814 - DNA, 470 bp, Homo sapiens
  source 1..470: mol_type = unassigned DNA
aaatgcttacagctgcctctagaagcaagtccgctcgctgcatggagagggaaacatgagcatgcagcaggactagctgtcacctcccgcccgcctgcccagagagggccagagcgtcggggaggcaagatgatccaccagcggttccatcctacacttggagagaatgaataatggggaaagaaactgaagagaaagtaacaggcaaggagatatttgcagattcagtaagctgtgaggtccgtaatgtcagacactggcaaacatcatatgttcttcaagtagagttatgaaaacgaagaaactggtcagaagagtaaaacgccggaattgtcctttccaacatccagagctgcatcattccttggggcaaaatgtggacaaggaatcttatggcaagggccttatatgacaatgtcccagagtgtgccgaggaactggcctttcgcaagggagacatcctgaccgtc

SEQ ID NO: 19815 - DNA, 3211 bp, Homo sapiens
  source 1..3211: mol_type = unassigned DNA
acacatacatatgccactcacatccgacgtgtgtggttgctcagtagggaaatgcttacagctgcctctagaagcaagtccgctcgctgcatggagagggaaacatgagcatgcagcaggactagctgtcacctcccgcccgcctgcccagagagggccagagcgtcggggaggcaagatgatccaccagcggttccatcctacacttggattcagtaagctgtgaggtccgtaatgtcagacactggcaaacatcatatgttcttcaagtagagttatgaaaacgaagaaactggtcagaagagtaaaacgccggaattgtcctttccaacatccagagctgcatcattccttggggcaaaatgtggacaaggaatcttatggcaagggccttatatgacaatgtcccagagtgtgccgaggaactggcctttcgcaagggagacatcctgaccgtcatagagcagaacacagggggactggaaggatggtggctgtgctcattacacggtcggcaaggcattgtcccaggcaaccgggtgaagcttctgattggtcccatgcaggagactgcctccagtcacgagcagcctgcctctggactgatgcagcagacctttggccaacagaagctctatcaagtgccaaacccacaggctgctccccgagacaccatctaccaagtgccaccttcctaccaaaatcagggaatttaccaagtccccactggccacggcacccaagaacaagaggtatatcaggtgccaccatcagtgcagagaagcattgggggaaccagtgggccccacgtgggtaaaaaggtgataacccccgtgaggacaggccatggctacgtatacgagtacccatccagataccaaaaggacgtctatgatatccctccttctcataccactcaaggggtatacgacatccctccctcatcagcaaaaggccctgtgttttcagttccagtgggagagataaaacctcaaggggtgtatgacatcccgcctacaaaaggggtatatgccattccgccctctgcttgccgggatgaagcagggcttagggaaaaagactatgacttcccccctcccatgagacaagctggaaggccggacctcagaccggagggggtttatgacattcctccaacctgcaccaagccagcagggaaggaccttcatgtaaaatacaactgtgacattccaggagctgcagaaccggtggctcgaaggcaccagagcctgtccccgaatcacccacccccgcaactcggacagtcagtgggctctcagaacgacgcatatgatgtcccccgaggcgttcagtttcttgagccaccagcagaaaccagtgagaaagcaaacccccaggaaagggatggtgtttatgatgtccctctgcataacccgccagatgctaaaggctctcgggacttggtggatgggatcaaccgattgtctttctccagtacaggcagcacccggagtaacatgtccacgtcttccacctcctccaaggagtcctcactgtcagcctccccagctcaggacaaaaggctcttcctggatccagacacagctattgagagacttcagcggctccagcaggcccttgagatgggtgtctccagcctaatggcactggtcactaccgactggcggtgttacggatatatggaaagacacatcaatgaaatacgcacagcagtggacaaggtggagctgttcctgaaggagtacctccactttgtcaagggagctgttgcaaatgctgcctgcctcccggaactcatcctccacaacaagatgaagcgggagctgcaacgagttgaagactcccaccagatcctgagtcaaaccagccatgacttaaatgagtgcagctggtccctgaatatcttggccatcaacaagccccagaacaagtgtgacgatctggaccggtttgtgatggtggcaaagacggtgcccgatgacgccaagcagctcaccacaaccatcaacaccaacgcagaggccctcttcagacccggccctggcagcttgcatctgaagaatgggccggagagcatcatgaactcaacggagtacccacacggtggctcccagggacagctgctgcatcctggtgaccacaaggcccaggcccacaacaaggcactgcccccaggcctgagcaaggagcaggcccctgactgtagcagcagtgatggttctgagaggagctggatggatgactacgattacgtccacctacagggtaaggaggagtttgagaggcaacagaaagagctattggaaaaagagaatatcatgaaacagaacaagatgcagctggaacatcatcagctgagccagttccagctgttggaacaagagattacaaagcccgtggagaatgacatctcgaagtggaagccctctcagagcctacccaccacaaacagtggcgtgagtgctcaggatcggcagttgctgtgcttctactatgaccaatgtgagacccatttcatttcccttctcaacgccattgacgcactcttcagttgtgtcagctcagcccagcccccgcgaatcttcgtggcacacagcaagtttgtcatcctcagtgcacacaaactggtgttcattggagacacgctgacacggcaggtgactgcccaggacattcgcaacaaagtcatgaactccagcaaccagctctgcgagcagctcaagaccatagtcatggcaaccaagatggccgccctccattaccccagcaccacggccctgcaggaaatggtgcaccaagtgacagacctttctagaaatgcccagctgttcaagcgctctttgctggagatggcaacgttctgagaagaaaaaaaagaggaaggggactgcgttaacggttactaaggaaaactggaaatactgtctggtttttgtaaatgttatctatttttgtagatattttatataaaaatgaaatattttaacattttatgggtcagtcaactttcagaaattcagggagctggagagggaaatctttttttttccccctgagtggttcttatgtatacatagaagtatctgagacataaactgtacagaaaacttgtccacgtgcttttgtatgcccatgtattcatgtttgtttgtagatgtttgtctgatgcatttcattaaaaaaaaaaccatgaattacgaagcacctt

SEQ ID NO: 19816 - DNA, 2187 bp, Homo sapiens
  source 1..2187: mol_type = unassigned DNA
gtgtgcagtgtggggctgggcagagaggaagagtcctggttagccagaggtgccaccgcagactccccaggcagggttgatggccctgctggggttcccctggctccactggcttgctgtgactggggacattccttagctttgaggcaactcagctatatcccagaggggaaactgaggcagagggccattgccccctcgccccgttctccagcaccaggataagactgattagccacatgtgtcagctggcaccgtggcctgggcccctcatcagcgagatgaaagtgtggttaggaactagggaactagggcctggcctgccatccccagcactgccaacctcggcctcctgaggccctcgggtgccacctggcccctgactgcagcccctggtgtggtggctttgggagtgacctgcctgggttctgtgtctgaggccagtgaggtcagcagactccatcttaggtgtcctcggtgcctgggggacaagccagaggctggaggagcagcatcccttccaggctgcacacttgtcagtgccgggttctggggagagccgcacgggaaggagaggtcgctggcggcatcgtttgctgctccccagagacagacctgggcccttccctctgggactcccaatctggacggggttcctggcttgctgtggggcatgttgaggccggaggctgggcttgtggggctgcacggccctgcccaggagaactcagcactgcctggacggcgagactcagcttctgagctgagggctctatcaggcctggaagtggaccctggggaggggtggggcagggtagttctgataagtcctaggactgttcgcttccgggttctgagccctggcgtcagggaggaagggcatgtccagaacaatggccagaaccaggcccggccagctcggggggtgacgggggcgggtggctggggcagcgctgccgtgtgcaggggccgagccctgcggggccgtgagccggccctgccttctgcttccttcccagatgtagccgcctgtcccgggagcctggactgtgccctgaagaggcgggcaaggtgtcctcctggtgcacatgcctgtgggccctgccttcagcccttccaggaggaccagcaagggctctgtgtgcccaggatgcgccggcctccaggcgggggccggccccagcccagactggaagatgagattgacttcctggcccaggagcttgcccggaaggagtctggacactcaactccgcccctacccaaggaccgacagcggctcccggagcctgccaccctgggcttctcggcacgggggcaggggctggagctgggcctcccctccactccaggaacccccacgcccacgccccacacctccctgggctcccctgtgtcatccgacccggtgcacatgtcgcccctggagccccggggagggcaaggcgacggcctcgcccttgtgctgatcctggcgttctgtgtggccggtgcagccgccctctccgtagcctccctctgctggtgcaggctgcagcgtgagatccgcctgactcagaaggccgactacgccactgcgaaggcccctggctcacctgcagctccccggatctcgcctggggaccagcggctggcacagagcgcggagatgtaccactaccagcaccaacggcaacagatgctgtgcctggagcggcataaagagccacccaaggagctggacacggcctcctcggatgaggagaatgaggacggagacttcacggtgtacgagtgcccgggcctggccccgaccggggaaatggaggtgcgcaaccctctgttcgaccacgccgcactgtccgcgcccctgccggcccccagctcaccgcctgcactgccatgacctggaggcagacagacgcccacctgctccccgacctcgaggcccccggggaggggcagggcctggagcttcccactaaaaacatgttttgatgctgtgtgcttttggctgggcctcgggctccaggccctgggaccccttgccagggagacccccgaacctttgtgccaggacacctcctggtcccctgcacctctcctgttcggtttagacccccaaactggagggggcatggagaaccgtagagcgcaggaacgggtgggtaattctagagacaaaagccaattaaagtccatttcaga

SEQ ID NO: 19817 - DNA, 1494 bp, Homo sapiens
  source 1..1494: mol_type = unassigned DNA
gcgcgcctcgccggcgcctccatcccggatccttgctgcagcgtcagcgccgccgcccgtgcctttcctcttcctcctcctcctccttggcatccgcctcttcttcctcctgcgtcctcccccgctgcctccgctgctcccgacgcggagcccggagcccgcgccgagcccctggcctcgcggtgccatgctgccccggcggcggcgctgaaggatggcgacgccgctgcctccgccctccccgcggcacctgcggctgctgcggctgctgctctccggcctcgtcctcggcgccgccctgcgtggagccgccgccggccacccggatgtagccgcctgtcccgggagcctggactgtgccctgaagaggcgggcaaggtgtcctcctggtgcacatgcctgtgggccctgccttcagcccttccaggaggaccagcaagggctctgtgtgcccaggatgcgccggcctccaggcgggggccggccccagcccagactggaagatgagattgacttcctggcccaggagcttgcccggaaggagtctggacactcaactccgcccctacccaaggaccgacagcggctcccggagcctgccaccctgggcttctcggcacgggggcaggggctggagctgggcctcccctccactccaggaacccccacgcccacgccccacacctccctgggctcccctgtgtcatccgacccggtgcacatgtcgcccctggagccccggggagggcaaggcgacggcctcgcccttgtgctgatcctggcgttctgtgtggccggtgcagccgccctctccgtagcctccctctgctggtgcaggctgcagcgtgagatccgcctgactcagaaggccgactacgccactgcgaaggcccctggctcacctgcagctccccggatctcgcctggggaccagcggctggcacagagcgcggagatgtaccactaccagcaccaacggcaacagatgctgtgcctggagcggcataaagagccacccaaggagctggacacggcctcctcggatgaggagaatgaggacggagacttcacggtgtacgagtgcccgggcctggccccgaccggggaaatggaggtgcgcaaccctctgttcgaccacgccgcactgtccgcgcccctgccggcccccagctcaccgcctgcactgccatgacctggaggcagacagacgcccacctgctccccgacctcgaggcccccggggaggggcagggcctggagcttcccactaaaaacatgttttgatgctgtgtgcttttggctgggcctcgggctccaggccctgggaccccttgccagggagacccccgaacctttgtgccaggacacctcctggtcccctgcacctctcctgttcggtttagacccccaaactggagggggcatggagaaccgtagagcgcaggaacgggtgggtaattctagagacaaaagccaattaaagtccatttcaga

SEQ ID NO: 19818 - DNA, 810 bp, Homo sapiens
  source 1..810: mol_type = unassigned DNA
ggagggttgggggctgtctgggtgcgggtccactggacacacccgggcctggagctggatgccggggatcccagagacgagcccggggtttaggtgcgcgacgggctcgcctgaccgtggccggccctgcaccgtggggcgcccgcctgactggagcaacggtcagctggggggcccggggagcgtcggggcctggggcgggctctggaccgaaacagactgcgtggaagggcgagccttccggtgaagctggcagagcggttttccgacgcggcgctggtctcgatgtctgtgcgggagctaaaccggcagctgcggggctgcgggcgcgacgaggcgctgcggctgaagcagaggcgccgcacgctgaagaaccgcggctacgcgcaggcctgtcgctccaagcggctgcagcagcggcgcgggctggaggccgagcgcgcccgcctggccgcccagctggacgcgctgcgggccgaggtggcccgcctggcccgggagcgcgatctctacaaggctcgctgtgaccggctaacctcgagcggccccgggtccggggacccctcccacctcttcctctgagccgttcagagcaccttgtggtgtagtgggggctgggtggggtggctccgcccaggaggcggctgcacggttctctgcatcgttaccagagcgccttctggtcctagccacgccctgtatgaccgcgcaaatatccccaaagcttttgggtcctcaagtcatgcccgaatttagatgctggtcattttctggagaggggtcccctccccttacgaacacagaaaccca

SEQ ID NO: 19819 - DNA, 1517 bp, Homo sapiens
  source 1..1517: mol_type = unassigned DNA
gcctcagagaataaataggagactaagaggacaggcagacaaacaggacgagcctgggggctccaggcctggacggaggaagaagccagctatacggggtttctccatgctggccaagctggtctccaactcctgacctcgtgatccgcctgccttggcctcccaaagtgctggaatttacaggcgtgagccaccacgcccggcctggtcattctttctctccacaatccaatgaggaaactcatctgcccacccaactaccatcataaagtcctcaggtgatttctcaagctatacctccattgggacatctctctccaacctgagaccactggatatcacccacaatgctatatagcacctcaaactcagcatatctatgatgggtgtctgctcagcatccactcgccttttctggtgcactcctcccagcccagctccagaatggccctgccccccagccccctggccatggaatatgtcaatgactttgacttgatgaagtttgaggtaaagcgggaaccctctgagggccgacctggcccccctacagcctcactgggctccacaccttacagctcagtgcctccttcacccaccttcagtgaaccaggcatggtgggggcaaccgagggcacccggccaggcctggaggagctgtactggctggctaccctgcagcagcagctgggggctggggaggcattggggctgagtcctgaagaggccatggagctgctgcagggtcagggcccagtccctgttgatgggccccatggctactacccagggagcccagaggagacaggagcccagcacgtccagctggcagagcggttttccgacgcggcgctggtctcgatgtctgtgcgggagctaaaccggcagctgcggggctgcgggcgcgacgaggcgctgcggctgaagcagaggcgccgcacgctgaagaaccgcggctacgcgcaggcctgtcgctccaagcggctgcagcagcggcgcgggctggaggccgagcgcgcccgcctggccgcccagctggacgcgctgcgggccgaggtggcccgcctggcccgggagcgcgatctctacaaggctcgctgtgaccggctaacctcgagcggccccgggtccggggacccctcccacctcttcctctgagccgttcagagcaccttgtggtgtagtgggggctgggtggggtggctccgcccaggaggcggctgcacggttctctgcatcgttaccagagcgccttctggtcctagccacgccctgtatgaccgcgcaaatatccccaaagcttttgggtcctcaagtcatgcccgaatttagatgctggtcattttctggagaggggtcccctccccttacgaacacagaaacccagcccacatgactagcacgctgagctctgcagggaccagtgccaggcactggggggtggaagtgtggtgacacagtgaatgggaggtggaggagggttgcagctcccacctcagtttagtttttaattcagg

SEQ ID NO: 19820 - DNA, 1976 bp, Homo sapiens
  source 1..1976: mol_type = unassigned DNA
gagctgagcagaggcaccaggccctgctccatggagccttcagtctcctgggaagctgtgcctgtctggctctggcactgaccacatcctctcggccatttctgaagtgcactcctcccagcccagctccagaatggccctgccccccagccccctggccatggaatatgtcaatgactttgacttgatgaagtttgaggtaaagcgggaaccctctgagggccgacctggcccccctacagcctcactgggctccacaccttacagctcagtgcctccttcacccaccttcagtgaaccaggcatggtgggggcaaccgagggcacccggccaggcctggaggagctgtactggctggctaccctgcagcagcagctgggggctggggaggcattggggctgagtcctgaagaggccatggagctgctgcagggtcagggcccagtccctgttgatgggccccatggctactacccagggagcccagaggagacaggagcccagcacgtccagctggcagagcggttttccgacgcggcgctggtctcgatgtctgtgcgggagctaaaccggcagctgcggggctgcgggcgcgacgaggcgctgcggctgaagcagaggcgccgcacgctgaagaaccgcggctacgcgcaggcctgtcgctccaagcggctgcagcagcggcgcgggctggaggccgagcgcgcccgcctggccgcccagctggacgcgctgcgggccgaggtggcccgcctggcccgggagcgcgatctctacaaggctcgctgtgaccggctaacctcgagcggccccgggtccggggacccctcccacctcttcctctgagccgttcagagcaccttgtggtgtagtgggggctgggtggggtggctccgcccaggaggcggctgcacggttctctgcatcgttaccagagcgccttctggtcctagccacgccctgtatgaccgcgcaaatatccccaaagcttttgggtcctcaagtcatgcccgaatttagatgctggtcattttctggagaggggtcccctccccttacgaacacagaaacccagcccacatgactagcacgctgagctctgcagggaccagtgccaggcactggggggtggaagtgtggtgacacagtgaatgggaggtggaggagggttgcagctcccacctcagtttagtttttaattcagggttttcaacctgtaacacattaaagctgtaattagcaatgaggctgtattttcattctgaagcttgtaacctccccattttagcactacagaattttcaagatttcaatatccaacaactagatagattaggacctctatccgagatgctttttccctgcccaaccctgtggccttcagggctcagagcagcaaaggcctgaagagtgagctctgggggttgttggtgtgggttgggagagagctgtgtgcagaagtctggaaacctgggtcctagtcccagctcttccatgggatccccctgtcaccctgagcaaatcagttgcttcctggacttgtgttacttcatctaattctcatgtggattggacgacttctgctccctttccagttctggcatctccccagtatggaagtcccggtggtctccccaagaagtccccaagacaatctcgccaaaggcacctcctatcctgctgcagtttcccagctgcagcctaggcaggggatgcacagcccaggcgaggaagcctggcttctctgtgagcacatacgtgggtcctcggcagctccctccaggctgtctgggcctccagacctgcacagggtgctcctgccacctcccacctctctgagggctgaggtgagacttctcctgggatgacaatttgctgagagagtgcagcttttgtgaattaaacttgaagtccaggcagaattctaatgcaataagctaaatgttcttgcaatttaagaagtgttcattcttta

SEQ ID NO: 19821 - DNA, 737 bp, Homo sapiens
  source 1..737: mol_type = unassigned DNA
gggggtgtgtacgccatgagggggaggaagccgagaagcacctcccactgaagccggcggtaaccgccccacgcgagaccacccaccagccaggagcggtcgcaggacccgcagcggcgcgaggccttgtttacaccgactgccgccactgcgttggccaaccgctcctccgtcacgcgcttcgctcgtcacgcatctcgcggcttcctggccggcgggctgcaaacgtcacacgacggccccgcccccttggccagccaactggacagcggagcacgatgattgataggccaataagatatgcaaatgatctccttaccttattggttggaggcctcaggaccacagatgacctcagagagctggccctttaagaatgccctttgggctctgtgcccacagccccctggagctgagcagaggcaccaggccctgctccatggagccttcagtctcctgggaagctgtgcctgtctggctctggcactgaccacatcctctcggccatttctgaagtgcactcctcccagcccagctccagaatggccctgccccccagccccctggccatggaatatgtcaatgactttgacttgatgaagtttgaggtaaagcgggaaccctctgagggccgacctggcccccctacagcctcactgggctccacaccttacagctcagtgcctccttcacccaccttcagtgaaccaggcatggtgggggcaaccgagggcacc

SEQ ID NO: 19822 - DNA, 788 bp, Homo sapiens
  source 1..788: mol_type = unassigned DNA
ccaaatcctgtgagggtcaccgggttgcaggcttcaggacagggaaacgcagcgcgttggagggttgggggctgtctgggtgcgggtccactggacacacccgggcctggagctggatgccggggatcccagagacgagcccggggtttaggtgcgcgacgggctcgcctgaccgtggccggccctgcaccgtggggcgcccgcctgactggagcaacgctggcagagcggttttccgacgcggcgctggtctcgatgtctgtgcgggagctaaaccggcagctgcggggctgcgggcgcgacgaggcgctgcggctgaagcagaggcgccgcacgctgaagaaccgcggctacgcgcaggcctgtcgctccaagcggctgcagcagcggcgcgggctggaggccgagcgcgcccgcctggccgcccagctggacgcgctgcgggccgaggtggcccgcctggcccgggagcgcgatctctacaaggctcgctgtgaccggctaacctcgagcggccccgggtccggggacccctcccacctcttcctctgagccgttcagagcaccttgtggtgtagtgggggctgggtggggtggctccgcccaggaggcggctgcacggttctctgcatcgttaccagagcgccttctggtcctagccacgccctgtatgaccgcgcaaatatccccaaagcttttgggtcctcaagtcatgcccgaatttagatgctggtcattttctggagaggggtcccctccccttacgaacacagaaacccagcccacat

SEQ ID NO: 19823 - DNA, 2103 bp, Homo sapiens
  source 1..2103: mol_type = unassigned DNA
cgccgggggtgtgtacgccatgagggggaggaagccgagaagcacctcccactgaagccggcggtaaccgccccacgcgagaccacccaccagccaggagcggtcgcaggacccgcagcggcgcgaggccttgtttacaccgactgccgccactgcgttggccaaccgctcctccgtcacgcgcttcgctcgtcacgcatctcgcggcttcctggccggcgggctgcaaacgtcacacgacggccccgcccccttggccagccaactggacagcggagcacgatgattgataggtgcactcctcccagcccagctccagaatggccctgccccccagccccctggccatggaatatgtcaatgactttgacttgatgaagtttgaggtaaagcgggaaccctctgagggccgacctggcccccctacagcctcactgggctccacaccttacagctcagtgcctccttcacccaccttcagtgaaccaggcatggtgggggcaaccgagggcacccggccaggcctggaggagctgtactggctggctaccctgcagcagcagctgggggctggggaggcattggggctgagtcctgaagaggccatggagctgctgcagggtcagggcccagtccctgttgatgggccccatggctactacccagggagcccagaggagacaggagcccagcacgtccagctggcagagcggttttccgacgcggcgctggtctcgatgtctgtgcgggagctaaaccggcagctgcggggctgcgggcgcgacgaggcgctgcggctgaagcagaggcgccgcacgctgaagaaccgcggctacgcgcaggcctgtcgctccaagcggctgcagcagcggcgcgggctggaggccgagcgcgcccgcctggccgcccagctggacgcgctgcgggccgaggtggcccgcctggcccgggagcgcgatctctacaaggctcgctgtgaccggctaacctcgagcggccccgggtccggggacccctcccacctcttcctctgagccgttcagagcaccttgtggtgtagtgggggctgggtggggtggctccgcccaggaggcggctgcacggttctctgcatcgttaccagagcgccttctggtcctagccacgccctgtatgaccgcgcaaatatccccaaagcttttgggtcctcaagtcatgcccgaatttagatgctggtcattttctggagaggggtcccctccccttacgaacacagaaacccagcccacatgactagcacgctgagctctgcagggaccagtgccaggcactggggggtggaagtgtggtgacacagtgaatgggaggtggaggagggttgcagctcccacctcagtttagtttttaattcagggttttcaacctgtaacacattaaagctgtaattagcaatgaggctgtattttcattctgaagcttgtaacctccccattttagcactacagaattttcaagatttcaatatccaacaactagatagattaggacctctatccgagatgctttttccctgcccaaccctgtggccttcagggctcagagcagcaaaggcctgaagagtgagctctgggggttgttggtgtgggttgggagagagctgtgtgcagaagtctggaaacctgggtcctagtcccagctcttccatgggatccccctgtcaccctgagcaaatcagttgcttcctggacttgtgttacttcatctaattctcatgtggattggacgacttctgctccctttccagttctggcatctccccagtatggaagtcccggtggtctccccaagaagtccccaagacaatctcgccaaaggcacctcctatcctgctgcagtttcccagctgcagcctaggcaggggatgcacagcccaggcgaggaagcctggcttctctgtgagcacatacgtgggtcctcggcagctccctccaggctgtctgggcctccagacctgcacagggtgctcctgccacctcccacctctctgagggctgaggtgagacttctcctgggatgacaatttgctgagagagtgcagcttttgtgaattaaacttgaagtcca

SEQ ID NO: 19824 - DNA, 3854 bp, Homo sapiens
  source 1..3854: mol_type = unassigned DNA
atggggggacagatcacccggagcactctccacgactctatcgggggccccttccccgtcacttctcaccgatgccaccacaagcagaagcactgtccggcagtgctgcccagcggggggctcccagccacgccgctgctcttccacccgcacaccaagggctcccagatcctcatggacctcagccacaaggctgtcaagaggcaggccagcttctgcaacgccatcaccttcagcaaccgcccggtcctcatctacgagcaagtcaggctgaagatcaccaagaagcagtgctgctggagcggggccctgcggctgggcttcaccagcaaggacccgtcccgcatccaccctgactcgctgcccaagtacgcctgccccgacctggtgtcccagagtggcttctgggccaaggcgctgcctgaggagtttgccaatgagggcaacatcatcgcattctgggtggacaagaagggccgtgtcttccaccgcatcaacgactcggctgttatgctgttcttcagcggggtccgcacggccgacccgctctgggccctggtggacgtctacggcctcacgcggggcgtccagctgcttgatagcgagctggtgctcccggactgtctgcggccgcgctccttcaccgccctgcggcggccgtcgctgcggcgcgaggcggacgacgcgcgcctctcggtgagcctatgcgacctcaacgtgccgggcgcggacggcgacgaggccgcgccggccgccggctgccccatcccgcagaactcactcaactcgcagcacagccgcgcgctgccggcgcagctcgacggcgacctgcgtttccacgccctgcgcgccggcgcgcacgtccgcatcctcgacgagcagacggtggcgcgcgtggagcacgggcgcgacgagcgcgcgctcgtcttcaccagccggcccgtgcgcgtggccgagaccatcttcgtcaaggtcacgcgctcgggtggcgcgcggcccggcgcgctgtcgttcggcgtcaccacgtgcgaccccggcacgctgcggccggccgacctgcctttcagccctgaggccctggtggaccgcaaggaattctgggccgtgtgccgcgtgcccgggcccctgcacagcggcgacatcctgggcctggtggtcaacgccgacggcgagctgcacctcagccacaatggcgcggccgccggcatgcagctgtgcgtggacgcctcgcagccgctttggatgctcttcggcctgcacgggaccatcacgcagatccgcatcctcggctccactatcctggccgagcggggtatcccatcactcccctgctcccctgcctccacgccaacctcgcccagtgccctgggcagccgcctgtctgaccccttgctcagcacgtgcagctctggccctctgggtagctctgctggtgggacagcccccaattcgccagtgagcctgcccgagtcgccagtgaccccaggtctgggccagtggagcgatgagtgcaccatttgctatgaacacgcggtggacacggtcatctacacatgtggccacatgtgcctctgctacgcctgtggcctgcgcctcaagaaggctctgcacgcctgctgccccatctgccgccgccccatcaaggacatcatcaagacctaccgcagctcctagcccgttgcggtggcccatcccgcatacccatcttctcgggcttcagcccagtcccagctgaggaacaagccagtggggccccttctcttcctcattttggaaacttttcctcctctattaaacatgggaaactgaagcccttgaaggtttggggagaggggggtatcaggcagggagggggcagaggcaaatcaccgggcagagggaggggaggagaggaggccgcactctccctgtctctcccgtctctgcacccagctcctctctgcatgctgagggctaaattgggatctcagcctgccctaatctttccccatctgaggcaggtttctaggaggtgtctgtagtccatgtggcacctttgtgagaattagaaaacatgtaccttcctctgggcagctgcagccctgagccaggacatgtggcctggctagtgcagcatggagtggattttaggctcatttgccctctcagccaactgcccttgagcagtgtacagcctgctcaacaaccgccctgggcaggccgctcctgagctgctgtctccctctctgacctatgcctaccttctctttcttcgttccctgcccactgggcatggcagctgggggtgagaggctggtggttgcctcccgtcctgggcaggctgcagcctcatgccatgtctctctcccactacctgatgggcacatggacaggctgcagagggctccaggttctgggcccctggctgagaaggggaggatcctgtcctggctgtagccttcctgccccaatcatctcgctggatgccattgcccaggggtagcccttcggtatgggctggggagaagggttggtcttctgccagggtccctaagaacaggtttgcagctaccctctctgaccttttccccatatcttgtgctgtccagggcctaggctgatagtcagagcctgtggcacacctgggatgggccagggccctgggtggggaggtgtgggttccctgggccaagaccagcctttttcctcagtttaattaatttatttatttggtttgtggttttgggttttttttgtttgtttgtttgtaggtgagttcccatcctctgggcccctagaaatgctgcctttgtgtgtggggtacctgggaaagggtgtggctgaggcagtcataatgcagtatcttcccctgactccagccacaaagctcatacccagccctaccaatcatgaactggaactccataaggaggggccaaattgggaggccttttggcaaacagtgtctattttacagagaggcaaaccaagcctccttagtgccctggggctgatggtcacccagagccatagagcacccttcctcctgggccagagctgggttatcatggttggcttaggtacctcaggtggcccaggaggtcccccctccataaggacgtcaaacttccaggagggccagtgttcctagtgtgggccaggaacaggacagggagaccttgtgatggcggggcagggagcctgttcgtagggaagatgaggaggcaagggctgcctctcacacctccaggttctctaagttctggggagggagcgccccacctgctgaggtcggtcctctcagccctgcctgccctggcctgggctctcccagcctcccagccctctgccccctcagatggctttttgtttttgtttttttttgcatccatcagagactgcacctctgtgtggcaggcagggcatgggttttagtcctggccactgaccagctgtgtggccctggccgagtcgtagccccctggagcccagcttccatttctataaaatggttgtttcgggagagaggggcaggctttctgtgtgactcgggagttcttccgtgagggctgccagggggtggtgtgccaggacctcaggctgggcctttgtgctggccttgcagtgggtgtgtggggaagtcactgtcccactatgggtctccactacccagtcactgaccctgggagaccccttctgtgtgggagggagcgggggctggctagcgggccccccagccagggatcccagaggctgagggttggggagaggaagccatcatctcattacctctgtcagtgcaggggtggctgctgcttcccttgtgcacttgggtcgctgtgattgtgaataaaagtgatttcgtaccagcctga

SEQ ID NO: 19825 - DNA, 4314 bp, Homo sapiens
  source 1..4314: mol_type = unassigned DNA
cgaacgcccacgccagcgaccctgactctatggccccgggggagcgcgccggagccgccgcgccgcccacccccagccggaaccctagcgtcccggggagcaagcggggagccccgggcgtccccggccccggcccagggccctgcttgtggcccccgctcccgccacggggcatgggaggcaggtagcccagcctgcgccaggacacccgtggcgggcggaacccgccaaggaccgcgaagtccagagaaaggaagctgaggagctgcccgcccgcccccggctgcagccccagcagggccctcccccggtggcgcgcacccgcgcgcgcacactcgcacaccgcacctcagcgcctgcccggcctcgcccccacccgcgagcgccgaacctcctggggccggatgccatgggtaacaacttctccagtatcccctcgctgccccgaggaaacccgagccgcgcgccgcggggccacccccagaacctcaaagactctatcgggggccccttccccgtcacttctcaccgatgccaccacaagcagaagcactgtccggcagtgctgcccagcggggggctcccagccacgccgctgctcttccacccgcacaccaagggctcccagatcctcatggacctcagccacaaggctgtcaagaggcaggccagcttctgcaacgccatcaccttcagcaaccgcccggtcctcatctacgagcaagtcaggctgaagatcaccaagaagcagtgctgctggagcggggccctgcggctgggcttcaccagcaaggacccgtcccgcatccaccctgactcgctgcccaagtacgcctgccccgacctggtgtcccagagtggcttctgggccaaggcgctgcctgaggagtttgccaatgagggcaacatcatcgcattctgggtggacaagaagggccgtgtcttccaccgcatcaacgactcggctgttatgctgttcttcagcggggtccgcacggccgacccgctctgggccctggtggacgtctacggcctcacgcggggcgtccagctgcttgatagcgagctggtgctcccggactgtctgcggccgcgctccttcaccgccctgcggcggccgtcgctgcggcgcgaggcggacgacgcgcgcctctcggtgagcctatgcgacctcaacgtgccgggcgcggacggcgacgaggccgcgccggccgccggctgccccatcccgcagaactcactcaactcgcagcacagccgcgcgctgccggcgcagctcgacggcgacctgcgtttccacgccctgcgcgccggcgcgcacgtccgcatcctcgacgagcagacggtggcgcgcgtggagcacgggcgcgacgagcgcgcgctcgtcttcaccagccggcccgtgcgcgtggccgagaccatcttcgtcaaggtcacgcgctcgggtggcgcgcggcccggcgcgctgtcgttcggcgtcaccacgtgcgaccccggcacgctgcggccggccgacctgcctttcagccctgaggccctggtggaccgcaaggaattctgggccgtgtgccgcgtgcccgggcccctgcacagcggcgacatcctgggcctggtggtcaacgccgacggcgagctgcacctcagccacaatggcgcggccgccggcatgcagctgtgcgtggacgcctcgcagccgctttggatgctcttcggcctgcacgggaccatcacgcagatccgcatcctcggctccactatcctggccgagcggggtatcccatcactcccctgctcccctgcctccacgccaacctcgcccagtgccctgggcagccgcctgtctgaccccttgctcagcacgtgcagctctggccctctgggtagctctgctggtgggacagcccccaattcgccagtgagcctgcccgagtcgccagtgaccccaggtctgggccagtggagcgatgagtgcaccatttgctatgaacacgcggtggacacggtcatctacacatgtggccacatgtgcctctgctacgcctgtggcctgcgcctcaagaaggctctgcacgcctgctgccccatctgccgccgccccatcaaggacatcatcaagacctaccgcagctcctagcccgttgcggtggcccatcccgcatacccatcttctcgggcttcagcccagtcccagctgaggaacaagccagtggggccccttctcttcctcattttggaaacttttcctcctctattaaacatgggaaactgaagcccttgaaggtttggggagaggggggtatcaggcagggagggggcagaggcaaatcaccgggcagagggaggggaggagaggaggccgcactctccctgtctctcccgtctctgcacccagctcctctctgcatgctgagggctaaattgggatctcagcctgccctaatctttccccatctgaggcaggtttctaggaggtgtctgtagtccatgtggcacctttgtgagaattagaaaacatgtaccttcctctgggcagctgcagccctgagccaggacatgtggcctggctagtgcagcatggagtggattttaggctcatttgccctctcagccaactgcccttgagcagtgtacagcctgctcaacaaccgccctgggcaggccgctcctgagctgctgtctccctctctgacctatgcctaccttctctttcttcgttccctgcccactgggcatggcagctgggggtgagaggctggtggttgcctcccgtcctgggcaggctgcagcctcatgccatgtctctctcccactacctgatgggcacatggacaggctgcagagggctccaggttctgggcccctggctgagaaggggaggatcctgtcctggctgtagccttcctgccccaatcatctcgctggatgccattgcccaggggtagcccttcggtatgggctggggagaagggttggtcttctgccagggtccctaagaacaggtttgcagctaccctctctgaccttttccccatatcttgtgctgtccagggcctaggctgatagtcagagcctgtggcacacctgggatgggccagggccctgggtggggaggtgtgggttccctgggccaagaccagcctttttcctcagtttaattaatttatttatttggtttgtggttttgggttttttttgtttgtttgtttgtaggtgagttcccatcctctgggcccctagaaatgctgcctttgtgtgtggggtacctgggaaagggtgtggctgaggcagtcataatgcagtatcttcccctgactccagccacaaagctcatacccagccctaccaatcatgaactggaactccataaggaggggccaaattgggaggccttttggcaaacagtgtctattttacagagaggcaaaccaagcctccttagtgccctggggctgatggtcacccagagccatagagcacccttcctcctgggccagagctgggttatcatggttggcttaggtacctcaggtggcccaggaggtcccccctccataaggacgtcaaacttccaggagggccagtgttcctagtgtgggccaggaacaggacagggagaccttgtgatggcggggcagggagcctgttcgtagggaagatgaggaggcaagggctgcctctcacacctccaggttctctaagttctggggagggagcgccccacctgctgaggtcggtcctctcagccctgcctgccctggcctgggctctcccagcctcccagccctctgccccctcagatggctttttgtttttgtttttttttgcatccatcagagactgcacctctgtgtggcaggcagggcatgggttttagtcctggccactgaccagctgtgtggccctggccgagtcgtagccccctggagcccagcttccatttctataaaatggttgtttcgggagagaggggcaggctttctgtgtgactcgggagttcttccgtgagggctgccagggggtggtgtgccaggacctcaggctgggcctttgtgctggccttgcagtgggtgtgtggggaagtcactgtcccactatgggtctccactacccagtcactgaccctgggagaccccttctgtgtgggagggagcgggggctggctagcgggccccccagccagggatcccagaggctgagggttggggagaggaagccatcatctcattacctctgtcagtgcaggggtggctgctgcttcccttgtgcacttgggtcgctgtgattgtgaataaaagtgatttcgtaccagcctga

SEQ ID NO: 19826 - DNA, 746 bp, Homo sapiens
  source 1..746: mol_type = unassigned DNA
gggggcgcgggaggggcctcggccctgccatgccggtctccgcccgcgggggaggagacgggggaggaggaggggagcagccggccggggcgactcggtgaccagccggccggcccagcagaggtggctgcactgcccgtcgccggagatggggggacagatcacccggagcactctccacgactctatcgggggccccttccccgtcacttctcaccgatgccaccacaagcagaagcactgtccggcagtgctgcccagcggggggctcccagccacgccgctgctcttccacccgcacaccaagggctcccagatcctcatggacctcagccacaaggctgtcaagaggcaggccagcttctgcaacgccatcaccttcagcaaccgcccggtcctcatctacgagcaagtcaggctgaagatcaccaagaagcagtgctgctggagcggggccctgcggctgggcttcaccagcaaggacccgtcccgcatccaccctgactcgctgcccaagtacgcctgccccgacctggtgtcccagagtggcttctgggccaaggcgctgcctgaggagtttgccaatgagggcaacatcatcgcattctgggtggacaagaagggccgtgtcttccaccgcatcaacgactcggctgttatgctgttcttcagcggggtccgcacggccgacccgctctgggccctggtggacgtctacggcctcacgcggggcgtccagctgcttg

SEQ ID NO: 19827 - DNA, 628 bp, Homo sapiens
  source 1..628: mol_type = unassigned DNA
ggtcaggctggtcttgaattcctgacctcgtgatccacctgtgtcggcctcccaaagtgctgggtttacaggtgtgagccaccgcgcttggctgattgtattttctttagggccttggactttcggcttgattcgggccaaacattttggattgctgcgttaaaactctatcgggggccccttccccgtcacttctcaccgatgccaccacaagcagaagcactgtccggcagtgctgcccagcggggggctcccagccacgccgctgctcttccacccgcacaccaagggctcccagatcctcatggacctcagccacaaggctgtcaagaggcaggccagcttctgcaacgccatcaccttcagcaaccgcccggtcctcatctacgagcaagtcaggctgaagatcaccaagaagcagtgctgctggagcggggccctgcggctgggcttcaccagcaaggacccgtcccgcatccaccctgactcgctgcccaagtacgcctgccccgacctggtgtcccagagtggcttctgggccaaggcgctgcctgaggagtttgccaatgagggcaacatcatcgcattctgggtggacaagaagggccgtgtcttccaccgcatcaac

SEQ ID NO: 19828 - DNA, 3020 bp, Homo sapiens
  source 1..3020: mol_type = unassigned DNA
cctccaggtcctggcgcacagggtgggagcgctgcgctgcgccgcgctgcgcatcgcggcccgcttgccgcctgccccctgccctagctgggccacctccccgggctgccggtggagggctaagaggcgctaacgttacgctgtttccggttttccagcgggctctgtttcccctcccaaggcggcggcggctgagcggcggagccccccaaatggcctggccagatgcggcaggtttgctgctcagcgctgccgccgccgccactggagaagggtcggtgcagcagctacagcgacagcagcagcagcagcagcgagaggagcagcagcagcagcagcagcagcagcgagagcggcagcagcagcaggagcagcagcaacaacagcagcatctctcgtcccgctgcgcccccagagccgcggccgcagcaacagccgcagccccgcagccccgcagcccggagagccgccgcccgttcgcgagccgcagccgccggcggcatgaggcgcgacccggcccccggcttctccatgctgctcttcggtgtgtcgctcgcctgctactcgcccagcctcaagtcagtgcaggaccaggcgtacaaggcacccgtggtggtggagggcaaggtacaggggctggtcccagccggcggctccagctccaacagcacccgagagccgcccgcctcgggtcgggtggcgttggtaaaggtgctggacaagtggccgctccggagcggggggctgcagcgcgagcaggtgatcagcgtgggctcctgtgtgccgctcgaaaggaaccagcgctacatctttttcctggagcccacggaacagcccttagtctttaagacggcctttgcccccctcgataccaacggcaaaaatctcaagaaagaggtgggcaagatcctgtgcactgactgcgccacccggcccaagttgaagaagatgaagagccagacgggacaggtgggtgagaagcaatcgctgaagtgtgaggcagcagccggtaatccccagccttcctaccgttggttcaaggatggcaaggagctcaaccgcagccgagacattcgcatcaaatatggcaacggcagaaagaactcacgactacagttcaacaaggtgaaggtggaggacgctggggagtatgtctgcgaggccgagaacatcctggggaaggacaccgtccggggccggctttacgtcaacagcgtgagcaccaccctgtcatcctggtcggggcacgcccggaagtgcaacgagacagccaagtcctattgcgtcaatggaggcgtctgctactacatcgagggcatcaaccagctctcctgcaaatgtccaaatggattcttcggacagagatgtttggagaaactgcctttgcgattgtacatgccagatcctaagcaaaaagccgaggagctgtaccagaagagggtcctgaccatcacgggcatctgcgtggctctgctggtcgtgggcatcgtctgtgtggtggcctactgcaagaccaaaaaacagcggaagcagatgcacaaccacctccggcagaacatgtgcccggcccatcagaaccggagcttggccaatgggcccagccacccccggctggacccagaggagatccagatggcagattatatttccaagaacgtgccagccacagaccatgtcatcaggagagaaactgagaccaccttctctgggagccactcctgttctccttctcaccactgctccacagccacacccacctccagccacagacacgagagccacacgtggagcctggaacgttctgagagcctgacttctgactcccagtcggggatcatgctatcatcagtgggtaccagcaaatgcaacagcccagcatgtgtggaggcccgggcaaggcgggcagcagcctacaacctggaggagcggcgcagggccaccgcgccaccctatcacgattccgtggactcccttcgcgactccccacacagcgagaggtacgtgtcggccctgaccacgcccgcgcgcctctcgcccgtggacttccactactcgctggccacgcaggtgccaactttcgagatcacgtcccccaactcggcgcacgccgtgtcgctgccgccggcggcgcccatcagttaccgcctggccgagcagcagccgttactgcggcacccggcgccccccggcccgggacccggacccgggcccgggcccgggcccggcgcagacatgcagcgcagctatgacagctactattaccccgcggcggggcccggaccgcggcgcgggacctgcgcgctcggcggcagcctgggcagcctgcctgccagccccttccgcatccccgaggacgacgagtacgagaccacgcaggagtgcgcgcccccgccgccgccgcggccgcgcgcgcgcggtgcgtcccgcaggacgtcggcggggccccggcgctggcgccgctcgcgcctcaacgggctggcggcgcagcgcgcacgggcggcgagggactcgctgtcgctgagcagcggctcgggcggcggctcagcctcggcgtcggacgacgacgcggacgacgcggacggggcgctggcggccgagagcacacctttcctgggcctgcgtggggcgcacgacgcgctgcgctcggactcgccgccactgtgcccggcggccgacagcaggacttactactcactggacagccacagcacgcgggccagcagcagacacagccgcgggccgcccccgcgggccaagcaggactcggcgccactctagggccccgccgcgcgcccctccgccccgcccgccccactatctttaaggagaccagagaccgcctactggagagaaaggaggaaaaaagaaataaaaatatttttattttctataaaaggaaaaaagtataacaaaatgttttattttcattttagcaaaaattgtcttataatactagctaacggcaaaggcgtttttatagggaaactatttatatgtaacatcctgatttacagcttcgg

SEQ ID NO: 19829 - DNA, 3079 bp, Homo sapiens
  source 1..3079: mol_type = unassigned DNA
cctccaggtcctggcgcacagggtgggagcgctgcgctgcgccgcgctgcgcatcgcggcccgcttgccgcctgccccctgccctagctgggccacctccccgggctgccggtggagggctaagaggcgctaacgttacgctgtttccggttttccagcgggctctgtttcccctcccaaggcggcggcggctgagcggcggagccccccaaatggcctggccagatgcggcaggtttgctgctcagcgctgccgccgccgccactggagaagggtcggtgcagcagctacagcgacagcagcagcagcagcagcgagaggagcagcagcagcagcagcagcagcagcgagagcggcagcagcagcaggagcagcagcaacaacagcagcatctctcgtcccgctgcgcccccagagccgcggccgcagcaacagccgcagccccgcagccccgcagcccggagagccgccgcccgttcgcgagccgcagccgccggcggcatgaggcgcgacccggcccccggcttctccatgctgctcttcggtgtgtcgctcgcctgctactcgcccagcctcaagtcagtgcaggaccaggcgtacaaggcacccgtggtggtggagggcaaggtacaggggctggtcccagccggcggctccagctccaacagcacccgagagccgcccgcctcgggtcgggtggcgttggtaaaggtgctggacaagtggccgctccggagcggggggctgcagcgcgagcaggtgatcagcgtgggctcctgtgtgccgctcgaaaggaaccagcgctacatctttttcctggagcccacggaacagcccttagtctttaagacggcctttgcccccctcgataccaacggcaaaaatctcaagaaagaggtgggcaagatcctgtgcactgactgcgccacccggcccaagttgaagaagatgaagagccagacgggacaggtgggtgagaagcaatcgctgaagtgtgaggcagcagccggtaatccccagccttcctaccgttggttcaaggatggcaaggagctcaaccgcagccgagacattcgcatcaaatatggcaacggcagaaagaactcacgactacagttcaacaaggtgaaggtggaggacgctggggagtatgtctgcgaggccgagaacatcctggggaaggacaccgtccggggccggctttacgtcaacagcgtgagcaccaccctgtcatcctggtcggggcacgcccggaagtgcaacgagacagccaagtcctattgcgtcaatggaggcgtctgctactacatcgagggcatcaaccagctctcctgcaaatgtccaaatggattcttcggacagagatgtttggagaaactgcctttgcgattgtacatgccagatcctaagcaaagtgtcctgtgggatacaccggggacaggtgtcagcagttcgcaatggtcaacttctccaaagccgaggagctgtaccagaagagggtcctgaccatcacgggcatctgcgtggctctgctggtcgtgggcatcgtctgtgtggtggcctactgcaagaccaaaaaacagcggaagcagatgcacaaccacctccggcagaacatgtgcccggcccatcagaaccggagcttggccaatgggcccagccacccccggctggacccagaggagatccagatggcagattatatttccaagaacgtgccagccacagaccatgtcatcaggagagaaactgagaccaccttctctgggagccactcctgttctccttctcaccactgctccacagccacacccacctccagccacagacacgagagccacacgtggagcctggaacgttctgagagcctgacttctgactcccagtcggggatcatgctatcatcagtgggtaccagcaaatgcaacagcccagcatgtgtggaggcccgggcaaggcgggcagcagcctacaacctggaggagcggcgcagggccaccgcgccaccctatcacgattccgtggactcccttcgcgactccccacacagcgagaggtacgtgtcggccctgaccacgcccgcgcgcctctcgcccgtggacttccactactcgctggccacgcaggtgccaactttcgagatcacgtcccccaactcggcgcacgccgtgtcgctgccgccggcggcgcccatcagttaccgcctggccgagcagcagccgttactgcggcacccggcgccccccggcccgggacccggacccgggcccgggcccgggcccggcgcagacatgcagcgcagctatgacagctactattaccccgcggcggggcccggaccgcggcgcgggacctgcgcgctcggcggcagcctgggcagcctgcctgccagccccttccgcatccccgaggacgacgagtacgagaccacgcaggagtgcgcgcccccgccgccgccgcggccgcgcgcgcgcggtgcgtcccgcaggacgtcggcggggccccggcgctggcgccgctcgcgcctcaacgggctggcggcgcagcgcgcacgggcggcgagggactcgctgtcgctgagcagcggctcgggcggcggctcagcctcggcgtcggacgacgacgcggacgacgcggacggggcgctggcggccgagagcacacctttcctgggcctgcgtggggcgcacgacgcgctgcgctcggactcgccgccactgtgcccggcggccgacagcaggacttactactcactggacagccacagcacgcgggccagcagcagacacagccgcgggccgcccccgcgggccaagcaggactcggcgccactctagggccccgccgcgcgcccctccgccccgcccgccccactatctttaaggagaccagagaccgcctactggagagaaaggaggaaaaaagaaataaaaatatttttattttctataaaaggaaaaaagtataacaaaatgttttattttcattttagcaaaaattgtcttataatactagctaacggcaaaggcgtttttatagggaaactatttatatgtaacatcctgatttacagcttcgg

SEQ ID NO: 19830 - DNA, 3044 bp, Homo sapiens
  source 1..3044: mol_type = unassigned DNA
cctccaggtcctggcgcacagggtgggagcgctgcgctgcgccgcgctgcgcatcgcggcccgcttgccgcctgccccctgccctagctgggccacctccccgggctgccggtggagggctaagaggcgctaacgttacgctgtttccggttttccagcgggctctgtttcccctcccaaggcggcggcggctgagcggcggagccccccaaatggcctggccagatgcggcaggtttgctgctcagcgctgccgccgccgccactggagaagggtcggtgcagcagctacagcgacagcagcagcagcagcagcgagaggagcagcagcagcagcagcagcagcagcgagagcggcagcagcagcaggagcagcagcaacaacagcagcatctctcgtcccgctgcgcccccagagccgcggccgcagcaacagccgcagccccgcagccccgcagcccggagagccgccgcccgttcgcgagccgcagccgccggcggcatgaggcgcgacccggcccccggcttctccatgctgctcttcggtgtgtcgctcgcctgctactcgcccagcctcaagtcagtgcaggaccaggcgtacaaggcacccgtggtggtggagggcaaggtacaggggctggtcccagccggcggctccagctccaacagcacccgagagccgcccgcctcgggtcgggtggcgttggtaaaggtgctggacaagtggccgctccggagcggggggctgcagcgcgagcaggtgatcagcgtgggctcctgtgtgccgctcgaaaggaaccagcgctacatctttttcctggagcccacggaacagcccttagtctttaagacggcctttgcccccctcgataccaacggcaaaaatctcaagaaagaggtgggcaagatcctgtgcactgactgcgccacccggcccaagttgaagaagatgaagagccagacgggacaggtgggtgagaagcaatcgctgaagtgtgaggcagcagccggtaatccccagccttcctaccgttggttcaaggatggcaaggagctcaaccgcagccgagacattcgcatcaaatatggcaacggcagaaagaactcacgactacagttcaacaaggtgaaggtggaggacgctggggagtatgtctgcgaggccgagaacatcctggggaaggacaccgtccggggccggctttacgtcaacagcgtgagcaccaccctgtcatcctggtcggggcacgcccggaagtgcaacgagacagccaagtcctattgcgtcaatggaggcgtctgctactacatcgagggcatcaaccagctctcctgcaaatgtccaaatggattcttcggacagagatgtttggagaaactgcctttgcgattgtacatgccagatcctaagcaaagttttctttcttttgaattgtcaaaagccgaggagctgtaccagaagagggtcctgaccatcacgggcatctgcgtggctctgctggtcgtgggcatcgtctgtgtggtggcctactgcaagaccaaaaaacagcggaagcagatgcacaaccacctccggcagaacatgtgcccggcccatcagaaccggagcttggccaatgggcccagccacccccggctggacccagaggagatccagatggcagattatatttccaagaacgtgccagccacagaccatgtcatcaggagagaaactgagaccaccttctctgggagccactcctgttctccttctcaccactgctccacagccacacccacctccagccacagacacgagagccacacgtggagcctggaacgttctgagagcctgacttctgactcccagtcggggatcatgctatcatcagtgggtaccagcaaatgcaacagcccagcatgtgtggaggcccgggcaaggcgggcagcagcctacaacctggaggagcggcgcagggccaccgcgccaccctatcacgattccgtggactcccttcgcgactccccacacagcgagaggtacgtgtcggccctgaccacgcccgcgcgcctctcgcccgtggacttccactactcgctggccacgcaggtgccaactttcgagatcacgtcccccaactcggcgcacgccgtgtcgctgccgccggcggcgcccatcagttaccgcctggccgagcagcagccgttactgcggcacccggcgccccccggcccgggacccggacccgggcccgggcccgggcccggcgcagacatgcagcgcagctatgacagctactattaccccgcggcggggcccggaccgcggcgcgggacctgcgcgctcggcggcagcctgggcagcctgcctgccagccccttccgcatccccgaggacgacgagtacgagaccacgcaggagtgcgcgcccccgccgccgccgcggccgcgcgcgcgcggtgcgtcccgcaggacgtcggcggggccccggcgctggcgccgctcgcgcctcaacgggctggcggcgcagcgcgcacgggcggcgagggactcgctgtcgctgagcagcggctcgggcggcggctcagcctcggcgtcggacgacgacgcggacgacgcggacggggcgctggcggccgagagcacacctttcctgggcctgcgtggggcgcacgacgcgctgcgctcggactcgccgccactgtgcccggcggccgacagcaggacttactactcactggacagccacagcacgcgggccagcagcagacacagccgcgggccgcccccgcgggccaagcaggactcggcgccactctagggccccgccgcgcgcccctccgccccgcccgccccactatctttaaggagaccagagaccgcctactggagagaaaggaggaaaaaagaaataaaaatatttttattttctataaaaggaaaaaagtataacaaaatgttttattttcattttagcaaaaattgtcttataatactagctaacggcaaaggcgtttttatagggaaactatttatatgtaacatcctgatttacagcttcgg

SEQ ID NO: 19831 - DNA, 3723 bp, Homo sapiens
  source 1..3723: mol_type = unassigned DNA
atcctcctccaggtcctggcgcacagggtgggagcgctgcgctgcgccgcgctgcgcatcgcggcccgcttgccgcctgccccctgccctagctgggccacctccccgggctgccggtggagggctaagaggcgctaacgttacgctgtttccggttttccagcgggctctgtttcccctcccaaggcggcggcggctgagcggcggagccccccaaatggcctggccagatgcggcaggtttgctgctcagcgctgccgccgccgccactggagaagggtcggtgcagcagctacagcgacagcagcagcagcagcagcgagaggagcagcagcagcagcagcagcagcagcgagagcggcagcagcagcaggagcagcagcaacaacagcagcatctctcgtcccgctgcgcccccagagccgcggccgcagcaacagccgcagccccgcagccccgcagcccggagagccgccgcccgttcgcgagccgcagccgccggcggcatgaggcgcgacccggcccccggcttctccatgctgctcttcggtgtgtcgctcgcctgctactcgcccagcctcaagtcagtgcaggaccaggcgtacaaggcacccgtggtggtggagggcaaggtacaggggctggtcccagccggcggctccagctccaacagcacccgagagccgcccgcctcgggtcgggtggcgttggtaaaggtgctggacaagtggccgctccggagcggggggctgcagcgcgagcaggtgatcagcgtgggctcctgtgtgccgctcgaaaggaaccagcgctacatctttttcctggagcccacggaacagcccttagtctttaagacggcctttgcccccctcgataccaacggcaaaaatctcaagaaagaggtgggcaagatcctgtgcactgactgcgccacccggcccaagttgaagaagatgaagagccagacgggacaggtgggtgagaagcaatcgctgaagtgtgaggcagcagccggtaatccccagccttcctaccgttggttcaaggatggcaaggagctcaaccgcagccgagacattcgcatcaaatatggcaacggcagaaagaactcacgactacagttcaacaaggtgaaggtggaggacgctggggagtatgtctgcgaggccgagaacatcctggggaaggacaccgtccggggccggctttacgtcaacagcgaagccgaggagctgtaccagaagagggtcctgaccatcacgggcatctgcgtggctctgctggtcgtgggcatcgtctgtgtggtggcctactgcaagaccaaaaaacagcggaagcagatgcacaaccacctccggcagaacatgtgcccggcccatcagaaccggagcttggccaatgggcccagccacccccggctggacccagaggagatccagatggcagattatatttccaagaacgtgccagccacagaccatgtcatcaggagagaaactgagaccaccttctctgggagccactcctgttctccttctcaccactgctccacagccacacccacctccagccacagacacgagagccacacgtggagcctggaacgttctgagagcctgacttctgactcccagtcggggatcatgctatcatcagtgggtaccagcaaatgcaacagcccagcatgtgtggaggcccgggcaaggcgggcagcagcctacaacctggaggagcggcgcagggccaccgcgccaccctatcacgattccgtggactcccttcgcgactccccacacagcgagaggtacgtgtcggccctgaccacgcccgcgcgcctctcgcccgtggacttccactactcgctggccacgcaggtgccaactttcgagatcacgtcccccaactcggcgcacgccgtgtcgctgccgccggcggcgcccatcagttaccgcctggccgagcagcagccgttactgcggcacccggcgccccccggcccgggacccggacccgggcccgggcccgggcccggcgcagacatgcagcgcagctatgacagctactattaccccgcggcggggcccggaccgcggcgcgggacctgcgcgctcggcggcagcctgggcagcctgcctgccagccccttccgcatccccgaggacgacgagtacgagaccacgcaggagtgcgcgcccccgccgccgccgcggccgcgcgcgcgcggtgcgtcccgcaggacgtcggcggggccccggcgctggcgccgctcgcgcctcaacgggctggcggcgcagcgcgcacgggcggcgagggactcgctgtcgctgagcagcggctcgggcggcggctcagcctcggcgtcggacgacgacgcggacgacgcggacggggcgctggcggccgagagcacacctttcctgggcctgcgtggggcgcacgacgcgctgcgctcggactcgccgccactgtgcccggcggccgacagcaggacttactactcactggacagccacagcacgcgggccagcagcagacacagccgcgggccgcccccgcgggccaagcaggactcggcgccactctagggccccgccgcgcgcccctccgccccgcccgccccactatctttaaggagaccagagaccgcctactggagagaaaggaggaaaaaagaaataaaaatatttttattttctataaaaggaaaaaagtataacaaaatgttttattttcattttagcaaaaattgtcttataatactagctaacggcaaaggcgtttttatagggaaactatttatatgtaacatcctgatttacagcttcggaaaaaaaaaagaaacaacaaaaaaaaaagagagatgggccaattttttgactctttaatagaaacctattttgtggtgccttttgctgtatgctcatctggggctccgggggacaggtctgggttgtggggtgctgagagtgacagctgggagagaagaggtgcgggttctgttgggggcgagggtggggggcggtggggggttggccctaaggaagaactgaggacggaagtagctttgctcccaggcaagagctgaagttcccgacccctgggaggagagggccaggaccctaggcttggagctggagctggggtaacttccagggggagataaagacacagctacccgaatggggaagccctggctactcacagctgttaaaggagggggggcagagaaacgtttccccaagagcctgagcccagggaggtggcagctctgccaggggcccaatgttggcggctcctgtcccccacagcctccaggacgcccctccgtcctctgcagcaccttcgtttacaggtcgtcttttctattttacacctgcatgtcctttgcatttcagattctttagattggatgcatggtcacgctgggaccgagaagagccactcgacagtgtattccccttttagcaataaagtaacaccatttccttctcacaggctgcctcctagcccccaacccacctatgacatccactcgtctccagtcctgccctcccacccccaaaaactgggtccactgctaatttgtcaaaaaggtaattgtttaaaaaaaaaaaaaatcccaaacagaaacagatgggaatcctgtcctgaaatgtctgaacacctgactgttgacacttgaacatttttatattataaataaaatcagaaataactcctgtt

SEQ ID NO: 19832 - DNA, 2613 bp, Homo sapiens
  source 1..2613: mol_type = unassigned DNA
atcctcctccaggtcctggcgcacagggtgggagcgctgcgctgcgccgcgctgcgcatcgcggcccgcttgccgcctgccccctgccctagctgggccacctccccgggctgccggtggagggctaagaggcgctaacgttacgctgtttccggttttccagcgggctctgtttcccctcccaaggcggcggcggctgagcggcggagccccccaaatggcctggccagatgcggcaggtttgctgctcagcgctgccgccgccgccactggagaagggtcggtgcagcagctacagcgacagcagcagcagcagcagcgagaggagcagcagcagcagcagcagcagcagcgagagcggcagcagcagcaggagcagcagcaacaacagcagcatcagccgccgcccgttcgcgagccgcagccgccggcggcatgaggcgcgacccggcccccggcttctccatgctgctcttcggtgtgtcgctcgcctgctactcgcccagcctcaagtcagtgcaggaccaggcgtacaaggcacccgtggtggtggagggcaaggtacaggggctggtcccagccggcggctccagctccaacagcacccgagagccgcccgcctcgggtcgggtggcgttggtaaaggtgctggacaagtggccgctccggagcggggggctgcagcgcgagcaggtgatcagcgtgggctcctgtgtgccgctcgaaaggaaccagcgctacatctttttcctggagcccacggaacagcccttagtctttaagacggcctttgcccccctcgataccaacggcaaaaatctcaagaaagaggtgggcaagatcctgtgcactgactgcgccacccggcccaagttgaagaagatgaagagccagacgggacaggtgggtgagaagcaatcgctgaagtgtgaggcagcagccggtaatccccagccttcctaccgttggttcaaggatggcaaggagctcaaccgcagccgagacattcgcatcaaatatggcaacggcagaaagaactcacgactacagttcaacaaggtgaaggtggaggacgctggggagtatgtctgcgaggccgagaacatcctggggaaggacaccgtccggggccggctttacgtcaacagcgtgagcaccaccctgtcatcctggtcggggcacgcccggaagtgcaacgagacagccaagtcctattgcgtcaatggaggcgtctgctactacatcgagggcatcaaccagctctcctgcaaatgtccaaatggattcttcggacagagatgtttggagaaactgcctttgcgattgtacatgccagatcctaagcaaagtgtcctgtgggatacaccggggacaggtgtcagcagttcgcaatggtcaacttctccaagcaccttggatttgaattaaaggaagccgaggagctgtaccagaagagggtcctgaccatcacgggcatctgcgtggctctgctggtcgtgggcatcgtctgtgtggtggcctactgcaagaccaaaaaacagcggaagcagatgcacaaccacctccggcagaacatgtgcccggcccatcagaaccggagcttggccaatgggcccagccacccccggctggacccagaggagatccagatggcagattatatttccaagaacgtgccagccacagaccatgtcatcaggagagaaactgagaccaccttctctgggagccactcctgttctccttctcaccactgctccacagccacacccacctccagccacagacacgagagccacacgtggagcctggaacgttctgagagcctgacttctgactcccagtcggggatcatgctatcatcagtgggtaccagcaaatgcaacagcccagcatgtgtggaggcccgggcaaggcgggcagcagcctacaacctggaggagcggcgcagggccaccgcgccaccctatcacgattccgtggactcccttcgcgactccccacacagcgagaggtcagttcctaccccctgacctattccccgcttagccagagggctggcaccactggcccaaggctgacccttagggcccctcagaaacactccaaagagcctcatctccatttttcatatgggaaaacaaggtcctagaaaaggtgaaatggcctgctcagagccatcggcatgttaatgacagactgggactagagttgggccagtggaccctggtggacagtgaccatctaatttaattgtcctcccaggacacttttcacactagaaaaaggacattattaatagttacactggaacatcaagaacaaacaggcagccgggcgcggtggctcacacctgtaatcccagcacttgggaggccaaggcggatggatcacctgaggtcaggagtttgagactagtctggccaacatggtgaaacccccatctttactaaaaatacaaaaattagccaggcatggtggcacatgcctgtaatcacagctacttgggaggctgaggcaagagcatcccttcacctgggaggcggaggttgcagtgagctgagatggcgccactgcactccaacctcagcaacagagcaagactccctttac

SEQ ID NO: 19833 - DNA, 3026 bp, Homo sapiens
  source 1..3026: mol_type = unassigned DNA
cctccaggtcctggcgcacagggtgggagcgctgcgctgcgccgcgctgcgcatcgcggcccgcttgccgcctgccccctgccctagctgggccacctccccgggctgccggtggagggctaagaggcgctaacgttacgctgtttccggttttccagcgggctctgtttcccctcccaaggcggcggcggctgagcggcggagccccccaaatggcctggccagatgcggcaggtttgctgctcagcgctgccgccgccgccactggagaagggtcggtgcagcagctacagcgacagcagcagcagcagcagcgagaggagcagcagcagcagcagcagcagcagcgagagcggcagcagcagcaggagcagcagcaacaacagcagcatctctcgtcccgctgcgcccccagagccgcggccgcagcaacagccgcagccccgcagccccgcagcccggagagccgccgcccgttcgcgagccgcagccgccggcggcatgaggcgcgacccggcccccggcttctccatgctgctcttcggtgtgtcgctcgcctgctactcgcccagcctcaagtcagtgcaggaccaggcgtacaaggcacccgtggtggtggagggcaaggtacaggggctggtcccagccggcggctccagctccaacagcacccgagagccgcccgcctcgggtcgggtggcgttggtaaaggtgctggacaagtggccgctccggagcggggggctgcagcgcgagcaggtgatcagcgtgggctcctgtgtgccgctcgaaaggaaccagcgctacatctttttcctggagcccacggaacagcccttagtctttaagacggcctttgcccccctcgataccaacggcaaaaatctcaagaaagaggtgggcaagatcctgtgcactgactgcgccacccggcccaagttgaagaagatgaagagccagacgggacaggtgggtgagaagcaatcgctgaagtgtgaggcagcagccggtaatccccagccttcctaccgttggttcaaggatggcaaggagctcaaccgcagccgagacattcgcatcaaatatggcaacggcagaaagaactcacgactacagttcaacaaggtgaaggtggaggacgctggggagtatgtctgcgaggccgagaacatcctggggaaggacaccgtccggggccggctttacgtcaacagcgtgagcaccaccctgtcatcctggtcggggcacgcccggaagtgcaacgagacagccaagtcctattgcgtcaatggaggcgtctgctactacatcgagggcatcaaccagctctcctgcaagtgtcctgtgggatacaccggggacaggtgtcagcagttcgcaatggtcaacttctccacaagactagggggagatgtagaggaagccgaggagctgtaccagaagagggtcctgaccatcacgggcatctgcgtggctctgctggtcgtgggcatcgtctgtgtggtggcctactgcaagaccaaaaaacagcggaagcagatgcacaaccacctccggcagaacatgtgcccggcccatcagaaccggagcttggccaatgggcccagccacccccggctggacccagaggagatccagatggcagattatatttccaagaacgtgccagccacagaccatgtcatcaggagagaaactgagaccaccttctctgggagccactcctgttctccttctcaccactgctccacagccacacccacctccagccacagacacgagagccacacgtggagcctggaacgttctgagagcctgacttctgactcccagtcggggatcatgctatcatcagtgggtaccagcaaatgcaacagcccagcatgtgtggaggcccgggcaaggcgggcagcagcctacaacctggaggagcggcgcagggccaccgcgccaccctatcacgattccgtggactcccttcgcgactccccacacagcgagaggtacgtgtcggccctgaccacgcccgcgcgcctctcgcccgtggacttccactactcgctggccacgcaggtgccaactttcgagatcacgtcccccaactcggcgcacgccgtgtcgctgccgccggcggcgcccatcagttaccgcctggccgagcagcagccgttactgcggcacccggcgccccccggcccgggacccggacccgggcccgggcccgggcccggcgcagacatgcagcgcagctatgacagctactattaccccgcggcggggcccggaccgcggcgcgggacctgcgcgctcggcggcagcctgggcagcctgcctgccagccccttccgcatccccgaggacgacgagtacgagaccacgcaggagtgcgcgcccccgccgccgccgcggccgcgcgcgcgcggtgcgtcccgcaggacgtcggcggggccccggcgctggcgccgctcgcgcctcaacgggctggcggcgcagcgcgcacgggcggcgagggactcgctgtcgctgagcagcggctcgggcggcggctcagcctcggcgtcggacgacgacgcggacgacgcggacggggcgctggcggccgagagcacacctttcctgggcctgcgtggggcgcacgacgcgctgcgctcggactcgccgccactgtgcccggcggccgacagcaggacttactactcactggacagccacagcacgcgggccagcagcagacacagccgcgggccgcccccgcgggccaagcaggactcggcgccactctagggccccgccgcgcgcccctccgccccgcccgccccactatctttaaggagaccagagaccgcctactggagagaaaggaggaaaaaagaaataaaaatatttttattttctataaaaggaaaaaagtataacaaaatgttttattttcattttagcaaaaattgtcttataatactagctaacggcaaaggcgtttttatagggaaactatttatatgtaacatcctgatttacagcttcgg

SEQ ID NO: 19834 - DNA, 2535 bp, Homo sapiens
  source 1..2535: mol_type = unassigned DNA
atgcggcaggtttgctgctcagcgctgccgccgccgccactggagaagggtcggtgcagcagctacagcgacagcagcagcagcagcagcgagaggagcagcagcagcagcagcagcagcagcgagagcggcagcagcagcaggagcagcagcaacaacagcagcatctctcgtcccgctgcgcccccagagccgcggccgcagcaacagccgcagccccgcagccccgcagcccggagagccgccgcccgttcgcgagccgcagccgccggcggcatgaggcgcgacccggcccccggcttctccatgctgctcttcggtgtgtcgctcgcctgctactcgcccagcctcaagtcagtgcaggaccaggcgtacaaggcacccgtggtggtggagggcaaggtacaggggctggtcccagccggcggctccagctccaacagcacccgagagccgcccgcctcgggtcgggtggcgttggtaaaggtgctggacaagtggccgctccggagcggggggctgcagcgcgagcaggtgatcagcgtgggctcctgtgtgccgctcgaaaggaaccagcgctacatctttttcctggagcccacggaacagcccttagtctttaagacggcctttgcccccctcgataccaacggcaaaaatctcaagaaagaggtgggcaagatcctgtgcactgactgcgccacccggcccaagttgaagaagatgaagagccagacgggacaggtgggtgagaagcaatcgctgaagtgtgaggcagcagccggtaatccccagccttcctaccgttggttcaaggatggcaaggagctcaaccgcagccgagacattcgcatcaaatatggcaacggcagaaagaactcacgactacagttcaacaaggtgaaggtggaggacgctggggagtatgtctgcgaggccgagaacatcctggggaaggacaccgtccggggccggctttacgtcaacagcgtgagcaccaccctgtcatcctggtcggggcacgcccggaagtgcaacgagacagccaagtcctattgcgtcaatggaggcgtctgctactacatcgagggcatcaaccagctctcctgcaagtgtcctgtgggatacaccggggacaggtgtcagcagttcgcaatggtcaacttctccaaagccgaggagctgtaccagaagagggtcctgaccatcacgggcatctgcgtggctctgctggtcgtgggcatcgtctgtgtggtggcctactgcaagaccaaaaaacagcggaagcagatgcacaaccacctccggcagaacatgtgcccggcccatcagaaccggagcttggccaatgggcccagccacccccggctggacccagaggagatccagatggcagattatatttccaagaacgtgccagccacagaccatgtcatcaggagagaaactgagaccaccttctctgggagccactcctgttctccttctcaccactgctccacagccacacccacctccagccacagacacgagagccacacgtggagcctggaacgttctgagagcctgacttctgactcccagtcggggatcatgctatcatcagtgggtaccagcaaatgcaacagcccagcatgtgtggaggcccgggcaaggcgggcagcagcctacaacctggaggagcggcgcagggccaccgcgccaccctatcacgattccgtggactcccttcgcgactccccacacagcgagaggtacgtgtcggccctgaccacgcccgcgcgcctctcgcccgtggacttccactactcgctggccacgcaggtgccaactttcgagatcacgtcccccaactcggcgcacgccgtgtcgctgccgccggcggcgcccatcagttaccgcctggccgagcagcagccgttactgcggcacccggcgccccccggcccgggacccggacccgggcccgggcccgggcccggcgcagacatgcagcgcagctatgacagctactattaccccgcggcggggcccggaccgcggcgcgggacctgcgcgctcggcggcagcctgggcagcctgcctgccagccccttccgcatccccgaggacgacgagtacgagaccacgcaggagtgcgcgcccccgccgccgccgcggccgcgcgcgcgcggtgcgtcccgcaggacgtcggcggggccccggcgctggcgccgctcgcgcctcaacgggctggcggcgcagcgcgcacgggcggcgagggactcgctgtcgctgagcagcggctcgggcggcggctcagcctcggcgtcggacgacgacgcggacgacgcggacggggcgctggcggccgagagcacacctttcctgggcctgcgtggggcgcacgacgcgctgcgctcggactcgccgccactgtgcccggcggccgacagcaggacttactactcactggacagccacagcacgcgggccagcagcagacacagccgcgggccgcccccgcgggccaagcaggactcggcgccactctag

SEQ ID NO: 19835 - DNA, 2923 bp, Homo sapiens
  source 1..2923: mol_type = unassigned DNA
cggttttccagcgggctctgtttcccctcccaaggcggcggcggctgagcggcggagccccccaaatggcctggccagatgcggcaggtttgctgctcagcgctgccgccgccgccactggagaagggtcggtgcagcagctacagcgacagcagcagcagcagcagcgagaggagcagcagcagcagcagcagcagcagcgagagcggcagcagcagcaggagcagcagcaacaacagcagcatctctcgtcccgctgcgcccccagagccgcggccgcagcaacagccgcagccccgcagccccgcagcccggagagccgccgcccgttcgcgagccgcagccgccggcggcatgaggcgcgacccggcccccggcttctccatgctgctcttcggtgtgtcgctcgcctgctactcgcccagcctcaagtcagtgcaggaccaggcgtacaaggcacccgtggtggtggagggcaaggtacaggggctggtcccagccggcggctccagctccaacagcacccgagagccgcccgcctcgggtcgggtggcgttggtaaaggtgctggacaagtggccgctccggagcggggggctgcagcgcgagcaggtgatcagcgtgggctcctgtgtgccgctcgaaaggaaccagcgctacatctttttcctggagcccacggaacagcccttagtctttaagacggcctttgcccccctcgataccaacggcaaaaatctcaagaaagaggtgggcaagatcctgtgcactgactgcgccacccggcccaagttgaagaagatgaagagccagacgggacaggtgggtgagaagcaatcgctgaagtgtgaggcagcagccggtaatccccagccttcctaccgttggttcaaggatggcaaggagctcaaccgcagccgagacattcgcatcaaatatggcaacggcagaaagaactcacgactacagttcaacaaggtgaaggtggaggacgctggggagtatgtctgcgaggccgagaacatcctggggaaggacaccgtccggggccggctttacgtcaacagcgtgagcaccaccctgtcatcctggtcggggcacgcccggaagtgcaacgagacagccaagtcctattgcgtcaatggaggcgtctgctactacatcgagggcatcaaccagctctcctgcaaatgtccaaatggattcttcggacagagatgtttggagaaactgcctttgcgattgtacatgccagatcctaagcaaaagcaccttggatttgaattaaaggaagccgaggagctgtaccagaagagggtcctgaccatcacgggcatctgcgtggctctgctggtcgtgggcatcgtctgtgtggtggcctactgcaagaccaaaaaacagcggaagcagatgcacaaccacctccggcagaacatgtgcccggcccatcagaaccggagcttggccaatgggcccagccacccccggctggacccagaggagatccagatggcagattatatttccaagaacgtgccagccacagaccatgtcatcaggagagaaactgagaccaccttctctgggagccactcctgttctccttctcaccactgctccacagccacacccacctccagccacagacacgagagccacacgtggagcctggaacgttctgagagcctgacttctgactcccagtcggggatcatgctatcatcagtgggtaccagcaaatgcaacagcccagcatgtgtggaggcccgggcaaggcgggcagcagcctacaacctggaggagcggcgcagggccaccgcgccaccctatcacgattccgtggactcccttcgcgactccccacacagcgagaggtacgtgtcggccctgaccacgcccgcgcgcctctcgcccgtggacttccactactcgctggccacgcaggtgccaactttcgagatcacgtcccccaactcggcgcacgccgtgtcgctgccgccggcggcgcccatcagttaccgcctggccgagcagcagccgttactgcggcacccggcgccccccggcccgggacccggacccgggcccgggcccgggcccggcgcagacatgcagcgcagctatgacagctactattaccccgcggcggggcccggaccgcggcgcgggacctgcgcgctcggcggcagcctgggcagcctgcctgccagccccttccgcatccccgaggacgacgagtacgagaccacgcaggagtgcgcgcccccgccgccgccgcggccgcgcgcgcgcggtgcgtcccgcaggacgtcggcggggccccggcgctggcgccgctcgcgcctcaacgggctggcggcgcagcgcgcacgggcggcgagggactcgctgtcgctgagcagcggctcgggcggcggctcagcctcggcgtcggacgacgacgcggacgacgcggacggggcgctggcggccgagagcacacctttcctgggcctgcgtggggcgcacgacgcgctgcgctcggactcgccgccactgtgcccggcggccgacagcaggacttactactcactggacagccacagcacgcgggccagcagcagacacagccgcgggccgcccccgcgggccaagcaggactcggcgccactctagggccccgccgcgcgcccctccgccccgcccgccccactatctttaaggagaccagagaccgcctactggagagaaaggaggaaaaaagaaataaaaatatttttattttctataaaaggaaaaaagtataacaaaatgttttattttcattttagcaaaaattgtcttataatactagctaacggcaaaggcgtttttatagggaaactatttatatgtaacatcctgatttacagcttcggaaaaaaaaaagaaacaacaaaaaaaa

SEQ ID NO: 19836 - DNA, 2158 bp, Homo sapiens
  source 1..2158: mol_type = unassigned DNA
gggcgaaggtgaagaccggctcctaggatgagtgaaggggcggccgctgcctcgccacctggtgccgcttcggcagccgccgcctcggccgaggagggcaccgcggcggctgcggcggcggcagcggcgggcgggggcccggacggcggcggcgaaggggcggccgagcccccccgggagttacgctgtagcgactgcatcgtgtggaaccggcagcagacgtggctgtgcgtggtacctctgttcatcggcttcatcggcctggggctcagcctcatgcttctcaaatggatcgtggtgggctccgtcaaggagtacgtgcccaccgacctagtggactccaaggggatgggccaggaccccttcttcctctccaagcccagctctttccccaaggccatggagaccaccaccactaccacttccaccacgtcccccgccaccccctccgccgggggtgccgcctcctccaggacgcccaaccggattagcactcgcctgaccaccatcacgcgggcgcccactcgcttccccgggcaccgggtgcccatccgggccagcccgcgctccaccacagcacggaacactgcggcccctgcgacggtcccgtccaccacggccccgttcttcagtagcagcacgctgggctcccgacccccggtgccaggaactccaagtacccaggcaatgccctcctggcctactgcggcatacgctacctcctcctaccttcacgattctactccctcctggaccctgtctccctttcaggatgctgcctcctcttcttcctcttcttcctcctccgctaccaccaccacaccagaaactagcaccagccccaaatttcatacgacgacatattccacagagcgatccgagcacttcaaaccctgccgagacaaggaccttgcatactgtctcaatgatggcgagtgctttgtgatcgaaaccctgaccggatcccataaacactgtcggtgcaaagaaggctaccaaggagtccgttgtgatcaatttctgccgaaaactgattccatcttatcggatccaacagaccacttggggattgaattcatggagagtgaagaagtttatcaaaggcaggtgctgtcaatttcatgtatcatctttggaattgtcatcgtgggcatgttctgtgcagcattctacttcaaaagcaagaaacaagctaaacaaatccaagagcagctgaaagtgccacaaaatggtaaaagctacagtctcaaagcatccagcacaatggcaaagtcagagaacttggtgaagagccatgtccagctgcaaaattattcaaaggtggaaaggcatcctgtgactgcattggagaaaatgatggagtcaagttttgtcggcccccagtcattccctgaggtcccttctcctgacagaggaagccagtctgtcaaacaccacaggagtctatcctcttgctgcagcccagggcaaagaagtggcatgctccataggaatgccttcagaaggacacccccgtcaccccgaagtaggctaggtggaattgtgggaccagcatatcagcaactcgaagaatcaaggatcccagaccaggatacgataccttgccaagggtattcatccagtggtttaaaaacccaacgaaatacatcaataaatatgcaactgccttcaagagagacaaacccctattttaatagcttggagcaaaaggacctggtgggctattcatccacaagggccagttctgtgcccatcatcccttcagtgggtttagaggaaacctgcctgcaaatgccagggatttctgaagtcaaaagcatcaaatggtgcaaaaactcctattcagctgacgttgtcaatgtgagtattccagtcagcgattgtcttatagcagaacaacaagaagtgaaaatattgctagaaactgtccaggagcagatccgaattctgactgatgccagacggtcagaagactacgaactggccagcgtagaaaccgaggacagtgcaagcgaaaacacagcctttctccccctgagtcccacagccaaatcagaacgagaggcgcaatttgtcttaagaaatgaaatacaaagagactctgcattgaccaagtgacttgagatgtaggaatctgtgcattctatgctttgctcaa

SEQ ID NO: 19837 - DNA, 3136 bp, Homo sapiens
  source 1..3136: mol_type = unassigned DNA
caggaaggagggaaggaaggaatctgccacaaaccagaatggcagtagagccagtaacttgctgcttctctctcctttggctgaagcagtcatttttgagagcacattttcccaggaggtgtttagagcctccactcaacaaatctagcttgtgttttgtagaaggataaaggattcatgagtgtatgtgtgaacatattcaatggattgaaaatgagtctaccctgaagaccccagatttttgatctgctcttttgatgcagttgatagaataatggagtgtggtatacctccaacccttgtatgcgttgggagaggagggggactacacacgatcaatataatcatctggtattattttccttctgcctggaggacttgctttaacatttcaagtagtgtgggtctgctgctgacgaattcatacaaattttatacgacgacatattccacagagcgatccgagcacttcaaaccctgccgagacaaggaccttgcatactgtctcaatgatggcgagtgctttgtgatcgaaaccctgaccggatcccataaacactgtcggtgcaaagaaggctaccaaggagtccgttgtgatcaatttctgccgaaaactgattccatcttatcggatccaacagaccacttggggattgaattcatggagagtgaagaagtttatcaaaggcaggtgctgtcaatttcatgtatcatctttggaattgtcatcgtgggcatgttctgtgcagcattctacttcaaaagcaagaaacaagctaaacaaatccaagagcagctgaaagtgccacaaaatggtaaaagctacagtctcaaagcatccagcacaatggcaaagtcagagaacttggtgaagagccatgtccagctgcaaaattattcaaaggtggaaaggcatcctgtgactgcattggagaaaatgatggagtcaagttttgtcggcccccagtcattccctgaggtcccttctcctgacagaggaagccagtctgtcaaacaccacaggagtctatcctcttgctgcagcccagggcaaagaagtggcatgctccataggaatgccttcagaaggacacccccgtcaccccgaagtaggctaggtggaattgtgggaccagcatatcagcaactcgaagaatcaaggatcccagaccaggatacgataccttgccaagggatagaggtcaggaagactatatcccacctgcctatacagctgtggtgtgttgaaagacccctggacttaaagtattcatccagtggtttaaaaacccaacgaaatacatcaataaatatgcaactgccttcaagagagacaaacccctattttaatagcttggagcaaaaggacctggtgggctattcatccacaagggccagttctgtgcccatcatcccttcagtgggtttagaggaaacctgcctgcaaatgccagggatttctgaagtcaaaagcatcaaatggtgcaaaaactcctattcagctgacgttgtcaatgtgagtattccagtcagcgattgtcttatagcagaacaacaagaagtgaaaatattgctagaaactgtccaggagcagatccgaattctgactgatgccagacggtcagaagactacgaactggccagcgtagaaaccgaggacagtgcaagcgaaaacacagcctttctccccctgagtcccacagccaaatcagaacgagaggcgcaatttgtcttaagaaatgaaatacaaagagactctgcattgaccaagtgacttgagatgtaggaatctgtgcattctatgctttgctcaacaggaaagagaggaaatcaaatacaaattatttatatgcattaatttaagagcatctacttagaagaaaccaaatagtctatcgccctcatatcatagtgttttttaacaaaatatttttttaagggaaagaaatgtttcaggagggataaagcttaccattaaagcttttgggtagaattctgaatccaatttcgtttagtcccaacactgtcctctttggctcttagaagatgtgggcaattcagacccttggccccacagtgccagtgtctcattaaaaaacactggcagttacctggtttcaaaaagaggagagctgcatcccgcaggtggatgcaccagtgagcaggtggctcttgccatttggcttgccagtcccaagccctaaatttctattcacccaatagcctcatcacaggttatgtcatgtcgacacatgtagtgttttctatttgatttttggagaatgccacaaaagactctgcaatgggaaggaggacaggagatagaaggagaaaccgggggcaatcttaactactcttgtgtgccaccttcctctgagatttgaatgcacagatctcagctggaggtatgaaattattacagaaaaagagacaaaaaaatccttatatcgtgtcactaaaatcatgctaatagaaatgtttttccttgagattgtttagaggctctggaggagcgtttctcagtttttgtgtgcctgtgtgcacatgtgtgtgcgagcgtgtgtgtgtgtggacttgctcacgcgggcacatatgctgtaagcacatgtgttcattgtgcgtatgtgtgtgcatgtgtgcgcgtattacgcttgctaaaatttgttctgaaacatcagggaatctactattcagaaaaattatttccctcttagatcttttcactttaaatttttccattaagtataaagttcagttagttcttaaatcaaggtcacttgcatggtggggtcgtataaaactcttgacactgtctagaccattttctgatgtgaatacttttgagaggatcaactattggctcattaatgatatcagtatcataaggtgagttcatcaaggatgtgtgtttattttgaatcatgcctacttaaattattaatacaagacaattaacaaattgacagttaccatttgctttctcatcatcctcattaccatttattttatagcaagtctgctatgtgtggaccaaggcttcggcttctgtggttagtatgggaagaataaattgttgaaataaaaatacccagactattcagttcacaagaagccccccaaaagaacagtaaattgt

SEQ ID NO: 19838 - DNA, 2163 bp, Homo sapiens
  source 1..2163: mol_type = unassigned DNA
atgagtgaaggggcggccgctgcctcgccacctggtgccgcttcggcagccgccgcctcggccgaggagggcaccgcggcggctgcggcggcggcagcggcgggcgggggcccggacggcggcggcgaaggggcggccgagcccccccgggagttacgctgtagcgactgcatcgtgtggaaccggcagcagacgtggctgtgcgtggtacctctgttcatcggcttcatcggcctggggctcagcctcatgcttctcaaatggatcgtggtgggctccgtcaaggagtacgtgcccaccgacctagtggactccaaggggatgggccaggaccccttcttcctctccaagcccagctctttccccaaggccatggagaccaccaccactaccacttccaccacgtcccccgccaccccctccgccgggggtgccgcctcctccaggacgcccaaccggattagcactcgcctgaccaccatcacgcgggcgcccactcgcttccccgggcaccgggtgcccatccgggccagcccgcgctccaccacagcacggaacactgcggcccctgcgacggtcccgtccaccacggccccgttcttcagtagcagcacgctgggctcccgacccccggtgccaggaactccaagtacccaggcaatgccctcctggcctactgcggcatacgctacctcctcctaccttcacgattctactccctcctggaccctgtctccctttcaggatgctgcctcctcttcttcctcttcttcctcctccgctaccaccaccacaccagaaactagcaccagccccaaatttcatacgacgacatattccacagagcgatccgagcacttcaaaccctgccgagacaaggaccttgcatactgtctcaatgatggcgagtgctttgtgatcgaaaccctgaccggatcccataaacactgtcggtgcaaagaaggctaccaaggagtccgttgtgatcaatttctgccgaaaactgattccatcttatcggatccaacagaccacttggggattgaattcatggagagtgaagaagtttatcaaaggcaggtgctgtcaatttcatgtatcatctttggaattgtcatcgtgggcatgttctgtgcagcattctacttcaaaagcaagaaacaagctaaacaaatccaagagcagctgaaagtgccacaaaatggtaaaagctacagtctcaaagcatccagcacaatggcaaagtcagagaacttggtgaagagccatgtccagctgcaaaattattcaaaggtggaaaggcatcctgtgactgcattggagaaaatgatggagtcaagttttgtcggcccccagtcattccctgaggtcccttctcctgacagaggaagccagtctgtcaaacaccacaggagtctatcctcttgctgcagcccagggcaaagaagtggcatgctccataggaatgccttcagaaggacacccccgtcaccccgaagtaggctaggtggaattgtgggaccagcatatcagcaactcgaagaatcaaggatcccagaccaggatacgataccttgccaagggatagaggtcaggaagactatatcccacctgcctatacagctgtggtgtgttgaaagacccctggacttaaagtattcatccagtggtttaaaaacccaacgaaatacatcaataaatatgcaactgccttcaagagagacaaacccctattttaatagcttggagcaaaaggacctggtgggctattcatccacaagggccagttctgtgcccatcatcccttcagtgggtttagaggaaacctgcctgcaaatgccagggatttctgaagtcaaaagcatcaaatggtgcaaaaactcctattcagctgacgttgtcaatgtgagtattccagtcagcgattgtcttatagcagaacaacaagaagtgaaaatattgctagaaactgtccaggagcagatccgaattctgactgatgccagacggtcagaagactacgaactggccagcgtagaaaccgaggacagtgcaagcgaaaacacagcctttctccccctgagtcccacagccaaatcagaacgagaggcgcaatttgtcttaagaaatgaaatacaaagagactctgcattgaccaagtga

SEQ ID NO: 19839 - DNA, 2088 bp, Homo sapiens
  source 1..2088: mol_type = unassigned DNA
atgagtgaaggggcggccgctgcctcgccacctggtgccgcttcggcagccgccgcctcggccgaggagggcaccgcggcggctgcggcggcggcagcggcgggcgggggcccggacggcggcggcgaaggggcggccgagcccccccgggagttacgctgtagcgactgcatcgtgtggaaccggcagcagacgtggctgtgcgtggtacctctgttcatcggcttcatcggcctggggctcagcctcatgcttctcaaatggatcgtggtgggctccgtcaaggagtacgtgcccaccgacctagtggactccaaggggatgggccaggaccccttcttcctctccaagcccagctctttccccaaggccatggagaccaccaccactaccacttccaccacgtcccccgccaccccctccgccgggggtgccgcctcctccaggacgcccaaccggattagcactcgcctgaccaccatcacgcgggcgcccactcgcttccccgggcaccgggtgcccatccgggccagcccgcgctccaccacagcacggaacactgcggcccctgcgacggtcccgtccaccacggccccgttcttcagtagcagcacgctgggctcccgacccccggtgccaggaactccaagtacccaggcaatgccctcctggcctactgcggcatacgctacctcctcctaccttcacgattctactccctcctggaccctgtctccctttcaggatgctgcctcctcttcttcctcttcttcctcctccgctaccaccaccacaccagaaactagcaccagccccaaatttcatacgacgacatattccacagagcgatccgagcacttcaaaccctgccgagacaaggaccttgcatactgtctcaatgatggcgagtgctttgtgatcgaaaccctgaccggatcccataaacactgtcggtgcaaagaaggctaccaaggagtccgttgtgatcaatttctgccgaaaactgattccatcttatcggatccaacccatataggaattatattcacagagagtgaagaagtttatcaaaggcaggtgctgtcaatttcatgtatcatctttggaattgtcatcgtgggcatgttctgtgcagcattctacttcaaaagcaagaaacaagctaaacaaatccaagagcagctgaaagtgccacaaaatggtaaaagctacagtctcaaagcatccagcacaatggcaaagtcagagaacttggtgaagagccatgtccagctgcaaaattattcaaaggtggaaaggcatcctgtgactgcattggagaaaatgatggagtcaagttttgtcggcccccagtcattccctgaggtcccttctcctgacagaggaagccagtctgtcaaacaccacaggagtctatcctcttgctgcagcccagggcaaagaagtggcatgctccataggaatgccttcagaaggacacccccgtcaccccgaagtaggctaggtggaattgtgggaccagcatatcagcaactcgaagaatcaaggatcccagaccaggatacgataccttgccaagggtattcatccagtggtttaaaaacccaacgaaatacatcaataaatatgcaactgccttcaagagagacaaacccctattttaatagcttggagcaaaaggacctggtgggctattcatccacaagggccagttctgtgcccatcatcccttcagtgggtttagaggaaacctgcctgcaaatgccagggatttctgaagtcaaaagcatcaaatggtgcaaaaactcctattcagctgacgttgtcaatgtgagtattccagtcagcgattgtcttatagcagaacaacaagaagtgaaaatattgctagaaactgtccaggagcagatccgaattctgactgatgccagacggtcagaagactacgaactggccagcgtagaaaccgaggacagtgcaagcgaaaacacagcctttctccccctgagtcccacagccaaatcagaacgagaggcgcaatttgtcttaagaaatgaaatacaaagagactctgcattgaccaagtga

SEQ ID NO: 19840 - DNA, 1174 bp, Homo sapiens
  source 1..1174: mol_type = unassigned DNA
actgtagcagacagtgtctccaggcagggtactgagcaaagaggatagtgaaaagggcagtgaaacatcggcctttttcactggcaacttcaagactcactgcctacaatcagaccacttggggattgaattcatggagagtgaagaagtttatcaaaggcaggtgctgtcaatttcatgtatcatctttggaattgtcatcgtgggcatgttctgtgcagcattctacttcaaaagcaagaaacaagctaaacaaatccaagagcagctgaaagtgccacaaaatggtaaaagctacagtctcaaagcatccagcacaatggcaaagtcagagaacttggtgaagagccatgtccagctgcaaaattattcaaaggtggaaaggcatcctgtgactgcattggagaaaatgatggagtcaagttttgtcggcccccagtcattccctgaggtcccttctcctgacagaggaagccagtctgtcaaacaccacaggagtctatcctcttgctgcagcccagggcaaagaagtggcatgctccataggaatgccttcagaaggacacccccgtcaccccgaagtaggctaggtggaattgtgggaccagcatatcagcaactcgaagaatcaaggatcccagaccaggatacgataccttgccaagggtattcatccagtggtttaaaaacccaacgaaatacatcaataaatatgcaactgccttcaagagagacaaacccctattttaatagcttggagcaaaaggacctggtgggctattcatccacaagggccagttctgtgcccatcatcccttcagtgggtttagaggaaacctgcctgcaaatgccagggatttctgaagtcaaaagcatcaaatggtgcaaaaactcctattcagctgacgttgtcaatgtgagtattccagtcagcgattgtcttatagcagaacaacaagaagtgaaaatattgctagaaactgtccaggagcagatccgaattctgactgatgccagacggtcagaagactacgaactggccagcgtagaaaccgaggacagtgcaagcgaaaacacagcctttctccccctgagtcccacagccaaatcagaacgagaggcgcaatttgtcttaagaaatgaaatacaaagagactctgcattgaccaagtga

SEQ ID NO: 19841 - DNA, 1491 bp, Homo sapiens
  source 1..1491: mol_type = unassigned DNA
actgtagcagacagtgtctccaggcagggtactgagcaaagaggatagtgaaaagggcagtgaaacatcggcctttttcactggcaacttcaagactcactgcctacaatagacggggtttcaccgtgttaaccaggatggtctcaatttcctgacctcgtgatccgcctacctcggcctcccaaagtgctgggattacagaccacttggggattgaattcatggagagtgaagaagtttatcaaaggcaggtgctgtcaatttcatgtatcatctttggaattgtcatcgtgggcatgttctgtgcagcattctacttcaaaagcaagaaacaagctaaacaaatccaagagcagctgaaagtgccacaaaatggtaaaagctacagtctcaaagcatccagcacaatggcaaagtcagagaacttggtgaagagccatgtccagctgcaaaattattcaaaggtggaaaggcatcctgtgactgcattggagaaaatgatggagtcaagttttgtcggcccccagtcattccctgaggtcccttctcctgacagaggaagccagtctgtcaaacaccacaggagtctatcctcttgctgcagcccagggcaaagaagtggcatgctccataggaatgccttcagaaggacacccccgtcaccccgaagtaggctaggtggaattgtgggaccagcatatcagcaactcgaagaatcaaggatcccagaccaggatacgataccttgccaagggtattcatccagtggtttaaaaacccaacgaaatacatcaataaatatgcaactgccttcaagagagacaaacccctattttaatagcttggagcaaaaggacctggtgggctattcatccacaagggccagttctgtgcccatcatcccttcagtgggtttagaggaaacctgcctgcaaatgccagggatttctgaagtcaaaagcatcaaatggtgcaaaaactcctattcagctgacgttgtcaatgtgagtattccagtcagcgattgtcttatagcagaacaacaagaagtgaaaatattgctagaaactgtccaggagcagatccgaattctgactgatgccagacggtcagaagactacgaactggccagcgtagaaaccgaggacagtgcaagcgaaaacacagcctttctccccctgagtcccacagccaaatcagaacgagaggcgcaatttgtcttaagaaatgaaatacaaagagactctgcattgaccaagtgacttgagatgtaggaatctgtgcattctatgctttgctcaacaggaaagagaggaaatcaaatacaaattatttatatgcattaatttaagagcatctacttagaagaaaccaaatagtctatcgccctcatatcatagtgttttttaacaaaatatttttttaagggaaagaaatgtttcaggagggataaagcttaccattaaagcttttgggtagaattctgaatcc

SEQ ID NO: 19842 - DNA, 506 bp, Homo sapiens
  source 1..506: mol_type = unassigned DNA
gagctgggcagggggcggaggcgggggctcggctgtctccggggctgccacgcagagcgggcttcgtggcgtggactaaaagtgaatcagaaaaataaagaaccagcatcaaatttgaagtggccacaaattctattaaagcagaagaaatagtggtgaaccataaaagagaaccagtttcctctctattctgcaatttagaggaaaaattttcatccaaggacagatcaggtggtggacctagatgggaaacccaaattataatcaagagatttcttggtactgtttttcaaccctactctcttgaccaagaatgaaactatttacaaattaagatgccaacagatcacgaagagccctgtggtcccagtcacaagtcgttttgcctgaatggggggctttgttatgtgatacctactattcccagcccattttgtagtctacacgaaaatgaaaatgacaacaatgaagacctttatgatgatctacttccacttaatgaatag

SEQ ID NO: 19843 - DNA, 1159 bp, Homo sapiens
  source 1..1159: mol_type = unassigned DNA
acactgcagccatataaatcagatttttgacatgttataaaatgcaagtcacagctgctgttgtctgcggtattcaaaaacttttgaaacactgcatgtccaacaaaatttattttttgtgtgaatgtactgtttttcaaccctactctcttgaccaagaatgaaactatttacaaattaagatgccaacagatcacgaagagccctgtggtcccagtcacaagtcgttttgcctgaatggggggctttgttatgtgatacctactattcccagcccattttgtaggtgcgttgaaaactatacaggagctcgttgtgaagaggtttttctcccaggctccagcatccaaactaaaagtaacctgtttgaagcttttgtggcattggcggtcctagtaacacttatcattggagccttctacttcctttgcaggaaaggccactttcagagagccagttcagtccagtatgatatcaacctggtagagacgagcagtaccagtgcccaccacagtcatgaacaacactgaagaaacgtcaaagtgaaccaaatcattgtttttattttacaaaggcagaaaatgaaacaccactaggtaaaagaattaaaaatctaatcctttatttcttaaataaaacgcttgtgtaactcgtatcatgaaccataatccattctgctgcaaggtgtgtgtgcttctgtaatgtgcatcagtccatcggcaactgctaagtagggggtgataccagtataattcgaagtcacattggttcaacatgactctccccagaaagctgatgtgctgaagcaaccagaggcaaatgttcacacacctagagagaaaccctaagggatatatgaagatcttatgaaaaaggatgaaaaccctttaaatgcaaggagtagctggcttagtggcttcaaaaccacctcattcctgctgttatctgagaagctgcaagtactgatgaaaaaactgagaagacatttcacctggcaattagaaaaaagcgctgactgatagatacctctgtatcattctttcaatattgatgaaaatgctttctactagaagtgactgatttcaaggatctgtctctcaaaggaagaaacaaaaacccaaaattttgactgcaaaagattgactaattctaggtgcaa

SEQ ID NO: 19844 - DNA, 388 bp, Homo sapiens
  source 1..388: mol_type = unassigned DNA
tttctgtttaggtcagaagtgttctttatagaacagaactgggagcttgtaatcataatgtactgtttttcaaccctactctcttgaccaagaatgaaactatttacaaattaagatgccaacagatcacgaagagccctgtggtcccagtcacaagtcgttttgcctgaatggggggctttgttatgtgatacctactattcccagcccattttgtaggtgcgttgaaaactatacaggagctcgttgtgaagaggtttttctcccaggctccagcatccaaactaaaagtaacctgtttgaagcttttgtggcattggcggtcctagtaacacttatcattggagccttctacttcctttgcaggtgtggtaacacatgcatgtag

SEQ ID NO: 19845 - DNA, 1047 bp, Homo sapiens
  source 1..1047: mol_type = unassigned DNA
ggacccgcctttgctcggcggagacagcaggcagagagtttctctctagggaaaaggacgcagttggtgtggagcagggcatcggtggtcctgtcaggaagagtggcgcgggtgccgatgaggaaactgagacccagaaaggtggaagcacttgtctaaggtcacgcctccaggaagcagtgtgtccacgactccagtccaagtggtcaggctccagagcccacagtcccaggggtccatgatgccgagctgcaatcgttcctgcagctgcagccgcggccccagcgtggaggatggcaagtggtatggggtccgctcctacctgcacctcttctatgaggactgtgcaggcactgctctcagcgacgaccctgagggacctccggtcctgtgcccccgccggccctggccctcactgtgttggaagatcagcctgtcctcggggaccctgcttctgctgctgggtgtggcggctctgaccactggctatgcagtgccccccaagctggagggcatcggtgagggtgagttcctggtgttggatcagcgggcagccgactacaaccaggccctgggcacctgtcgcctggcaggcacagcgctctgtgtggcagctggagttctgctcgccatctgcctcttctgggccatgataggctggctgagccaggacaccaaggcagagcccttggaccccgaagccgacagccacgtggaggtcttcggggatgagccagagcagcagttgtcacccattttccgcaatgccagtggccagtcatggttctcgccacccgccagcccctttgggcaatcttctgtgcagactatccagcccaagagggactcctgagctgcccacatggcctaagatgtgggtcctggatccttccccccttctcaccataaccccctctcagtgtttccccaacttctcccttttagcagggtccctttagagcccaactccaggtcaaatctggagctcaaatcccagtgctccctccccaggagtggggccccaactcttccaagataccagcattc

SEQ ID NO: 19846 - DNA, 2088 bp, Homo sapiens
  source 1..2088: mol_type = unassigned DNA
gcggccgccgtctgcagagccaggccctgaggcgggccggcgccccctcccccgccccgaactgcggcgcaggcgcgaaccggacccgcctttgctcggcggagacagcaggcagagagatgaggaaactgagacccagaaaggtggaagcacttgtctaaggtcacgcctccaggaagcagtgtgtccacgactccagtccaagtggtcaggctccagagcccacagtcccaggggtccatgatgccgagctgcaatcgttcctgcagctgcagccgcggccccagcgtggaggatggcaagtggtatggggtccgctcctacctgcacctcttctatgaggactgtgcaggcactgctctcagcgacgaccctgagggacctccggtcctgtgcccccgccggccctggccctcactgtgttggaagatcagcctgtcctcggggaccctgcttctgctgctgggtgtggcggctctgaccactggctatgcagtgccccccaagctggagggcatcggtgagggtgagttcctggtgttggatcagcgggcagccgactacaaccaggccctgggcacctgtcgcctggcaggcacagcgctctgtgtggcagctggagttctgctcgccatctgcctcttctgggccatgataggctggctgagccaggacaccaaggcagagcccttggaccccgaagccgacagccacgtggaggtcttcggggatgagccagagcagcagttgtcacccattttccgcaatgccagtggccagtcatggttctcgccacccgccagcccctttgggcaatcttctgtgcagactatccagcccaagagggactcctgagctgcccacatggcctaagatgtgggtcctggatccttccccccttctcaccataaccccctctcagtgtttccccaacttctcccttttagcagggtccctttagagcccaactccaggtcaaatctggagctcaaatcccagtgctccctccccaggagtggggccccaactcttccaagataccagcattcctcaagtcctcccaaaacttcctacccacaccctcttcccaaggccctcaggggcagaaaacatctccttcaacccgtccccactccttcctctgcatgaccttgggcaaacccttgccctttcaagccatcagctcctgcctctctgccatgagggctttggatcagattcctcttctcgccaggatgaggacacgcactgccctccatagacacagatgaaggggtgggggtcattcagctcgaatgggtcccagatgctcacttggcctttccctgcaggatgagtgaagacgtttgcctctcacagtgtgtcttctacctgcattttggcatcagagccccccagcccacccaccacaggcaattactagccctagttgataggtgaggtgggtgaagaaggctggaggtgacatgtccgaggtcacacaacaaagcagcatgcaggaactagaaacacatcttcagcctcctcctgggccagctcttgtgctacaggtggggcggagccagcccctcaccttcctggttccctgagggtcctcagggtggaggacaggtttggcccagaaagactagccagaggcctgatggtcccaggtggctctggatatactttggatatggatttaaatggtctctaagagccgggggtagggggcaggaaaagtgggttgtctttgcccctcaaagtccacctacctagaaaccaagcccacggtcttggccgtgaccctgataataaatgggctctctcagaggcgccagcccctccctccccagccggaggcgtcatctctcttctgtaccactagagggagctctgatgcagctggagagcagcgctcaaggctctcgcccctcccctccctaacccttaccttcagtctccaccagcctgaagggcctcctaggggatcctcaggcggcccccaccagggcacaccctactgtccttgtgcctcacgccccctcctcatcctgcaccccttccatcccaccttccctttcaataaacagctgggatggatactga

SEQ ID NO: 19847 - DNA, 5573 bp, Homo sapiens
  source 1..5573: mol_type = unassigned DNA
ttttttctttttctttttctttttctgtttctctcccttactccttcgtctgcatcttcttctcagctgcctttccgccgttcgattcccacttccttcagaagggcgcactcttccctctgaacccctcgccgggcgtaagtgtcaggaggcggcggacgcggagattgcctcgggagcaggcgatgcgcgccgctgctccgcgcgctgcccgggggaggctggcgctagcgggcgagccggccggggctgaatggagggaaggggcgcctggattccatggggtctgcttctgtcttgaaaggaggttgggccggcgaagtggcctccctagtccccgcacacaaagctaaatggatttacctagtggattcgcggtggatgtctgtcatgtagaagtgaggaccttccaggaggagctttaaacaatttctcggccccccacccgccggcacgcactctcgcccgaaactctttgggagtatctctcgagaacctggagccctggaaatctgggagcagccacccgctccgcgcttgctgttcccggggctgcctttccggacaagcccctctccagctgcattcgcctcggctatgtttcggattgtttggggtgctaggcacggcggactccaggaccccgagaagactgtccgaaggagggagaggatgggtgccctggcgcggtgaggcggccggcccctcagcccactccgcgccgcccgctcccctgcgccctctcctctccccgcgccccaaactttgcctcccgcggcggctgcccctcggcgggcgccccgccatgtaccagaggatgctccggtgcggcgccgagctgggctcgcccgggggcggcggcggcggcggcggcggcggcggcgcaggggggcgcctggccctgctttggatagtcccgctcaccctcagcggcctcctaggagtggcgtggggggcatccagtttgggagcgcaccacatccaccatttccatggcagcagcaagcatcattcagtgcctattgcaatctacaggtcaccggcatccttgcgaggcggacacgctgggacgacatatatctttagcaaaggtggtggacaaatcacgtataagtggcctcctaatgaccgacccagtacacgagcagacagactggccataggttttagcactgttcagaaagaagccgtattggtgcgagtggacagttcttcaggcttgggtgactacctagaactgcatatacaccagggaaaaattggagttaagtttaatgttgggacagatgacatcgccattgaagaatccaatgcaatcattaatgatgggaaataccatgtagttcgtttcacgaggagtggtggcaatgccacgttgcaggtggacagctggccagtgatcgagcgctaccctgcagggcgtcagctcacaatcttcaatagccaagcaaccataataattggcgggaaagagcagggccagcccttccagggccagctctctgggctgtactacaatggcttgaaagttctgaatatggcagccgaaaacgatgccaacatcgccatagtgggaaatgtgagactggttggtgaagtgccttcctctatgacaactgagtcaacagccactgccatgcaatcagagatgtccacatcaattatggagactaccacgaccctggctactagcacagccagaagaggaaagcccccgacaaaagaacccattagccagaccacagatgacatccttgtggcctcagcagagtgtcccagcgatgatgaggacattgacccctgtgagccgagctcaggtgggttagccaacccaacccgagcaggcggcagagagccgtatccaggctcagcagaagtgatccgggagtccagcagcaccacgggtatggtcgttgggatagtagccgctgccgccctgtgcatccttatcctcctctatgccatgtacaagtacagaaaccgggatgaaggctcataccatgtggacgagagtcgaaactacatcagtaactcagcacagtccaatggggctgttgtaaaggagaaacaacccagcagtgcgaaaagctccaacaaaaataagaaaaacaaggataaagagtattatgtctgatcccaagatcttaaatggacacttgtatagaaatagtcttcattttatctgagacataatataaacttatttactttcctttttatgaagcacatacaaaagaagacagggaatgcaatcaggaaggaaagactttttaaaaaataaaaacaagtatctcatgctcttgtttctcaaaaaagaaaaacaaaaaacaaaaaacaggggccaataaattccctaacatccacagtgttttcatttactctgcttgtctttatgttgctggaacatttctaaaagacagtgatgaccgcacgcattcataaagcaaaggagtactacagcatcaaggcacaacacaaaaaccaacacaaaacataacacaaaaaagaagctacctatgatcctggatttagccaaagtgctagcgctttcctgagaagtcagtccaattgccagagaagactgtccttttgagtgactcaacctgcaaacctttaagagtttgccgcctggtgcaactggagcagtggttggaacttgcatttgaaacaaagtgctggcttttttgaagacttgtgtaggaacacattcaaaaagcccctttctggttgtgagagaggaaaaaaaagtatggaggccttattttcaaaaatgtgaaatataaggcacgttttcacacaaaatttcaaaacaaaaacaagagggcatagatgcaatcattgggaaattttcatgcacgcttattatgttattacatatgtttatataaaatccatctctgtgtgctttctggactgtgataagtgacgttttatagcctgttgtatagaaaatgcaaaatatatctctgctcttcagccatttttggtaaattcaatgttataagtgttgctaagtatagggagttttatgacatcagagcaacaattatttcagttgggtttttctttttttttgccaccattataaattgccacaattacttttattttttaaagaaattacagtgtagtgtttattctaaggaagatatgtatgaatgtatatacaaagactcagctacttcttttcttatatgtacagccttcattctgttgcaattaagttttagtacttgtatgaaaggtgtgaattagaaagtcacatatatacatatgtatcttataatcttttctccctgaaatactcacattcccacatacattcactattttcacacacacacacacacacacacacacacacacacacacacacacacgaatccacagcaatccatcagatatgctggaagatccaaacgtgcatacagtagcaaatatttattgacaaattgaaaagcaggaaggaagagggttgtgccaaggtattgatgacaaatggggtgatttgcttcattgagatcttgctcccaggtaaccttaagaagattttagtccctaaagaaatgaacctttccttatcaaatagaatatcactgatatactgctgcatgaataagaaccattatgtgggcaggttatggaagcaaaattggttaatctacaccttaactctggctgctgcaattgaaaactttctttctaataaaataatatatatatctctgaatctgatgtgcatgatgaacatttctggaaagtaaacactttctctcgactaagaaagtatttttcagtaatttttgattctgtattactacccacttaaaaaatcattctctgttaattattgactatgttttaacttttctggttttacatatatatcattaaatatagttttagtttaacacattaagtagtggaaaagtatagattatacacttgttttgcatattattcaatgatgttcacagcaataaattactaatatgagaaggtagtgcaaaaaatgcattattacattgcaagttgatgtttcaggaaaaattggttgcattacttgaataccttctaaaagaacgataaaaaattttgtagaagagaagaatatctttccaattagctttaatcagcaaaggcaaaaaatgcaaaacatcttttgtgatactttagttgatgaaaaaaaagccaagaagtggcctggatttcagacatacagcaccttagaaatatgtataattcatagcaaatcaccactatctatggttgccaagtaattgttgtgtacaaagaaatttagtggctttttatgacccagaaagtagaaggtataaaatgaaaatttaatatccattgcttcttttctagattttcattttttttaatttgccacattaaataattcacgagtcttttcttttcccccgtctcattcagtcttactcagggaaagccagttaaataagaagggaagtgtaaaactactaatttacagcttgaagggtttttttttttaagattgcttttctattttatctattaagcttgaaccagtttccatctggaaagattctaaaatataatagaaaataaattgaataatggtaattttaagcagtatatctatgaaatgtgttgtttgggattgatttcaatgtttctccccagcgtaaattttaaagttacatgcaatgattgatatagtttattatcagcaaaattatttctaatattattggcttacacaaactctagcaaaaattattttttcctcaatggaaaaagaaaagagaggaacagagttagaaagagaaaatgacttgaatcccaagtatcttcataccaaacatatcagggttccctgcatagtttgcagttgattgaggatttcacacgacttggcataaatttgattacatctctagactgtaacttttctgattgattatgcttcttttttatccatgtaatgtgttgccttttttaaaagaacaaatactacaataacgtgtgaagtggtcaatccctaagacatcaaagaaaggccacataaccctacccttctagtgctttgtgtgattgggtatcaaaggggttttcttcttctttttttgtttgtttgtttttctgttgcaaggccaatttatccattattggaaatgctaagcaagtggaatttactgttttgttaataaaatatttcttaatacaactgtgatttattgattttaaaaattatatgcggcaccatttcgtgcttaagtgggaaagtaaagaaggctgcatttgaagggaagacccatccttatattatagaggaagaatgttgactctcttttttctggatttaactagtcattaaagacctctatattcatacacttaaagatgtagccattaaatgtacttttgttatatttgttcatcttgatatgccagaaaccataaactcatacagtattagttgcaaacaatattaaaatactaatttcataaatatgctttttctctataaaagacaatggaatccaagttaagtaaacctgtgattaaattccaacactatcaca

SEQ ID NO: 19848 - DNA, 5816 bp, Homo sapiens
  source 1..5816: mol_type = unassigned DNA
cctccttctcctcctcctcctcctcctgctcccctccgttgcctgttctcccctcccgcactcctggagatagacgctcaagcctgacgcctctgaaaaggcagcagcagtcgccttatccatagacctcaggaaattcgctttgaccgatgcatgcttcaggctctggctcgagctgaggggaataaccgggcagatgtctgagtccttaaaaaagacaagataaaaccaaaatgcatcaccaacacacaaccaattgatgtgctggcatcttagcttggccctgcagaggcagagagaaaagaagaggagctgttgcgatttccacatctaacagcttctggctatttcgcaactgctgggtttgagtcctactgttgccgtggctgaaaagagaagtaaaatccaacttgtgagaccacgcacaaggaattaggctttggctgcagcggtgctgaagcccatgctatgacagaagaagcaggcctttgaagctatcctcgggttaagaaatggtgccctaaagaggcaagcatccctttctccgttctgctgtaagacaccacatctgaaggagacagacttgaggcattcacaagcatccaaggatactggctcactgctggcttcctgtactttcttgagaaaagtgttttctttttactgactctcactgcttccttttggcctggtaccactggtggaacctggcagataatgggatttgaggagttaagtatctgttgacactgcagatactcttaaattagttaatcagactcaaatgggtcagtgctttcccttgatcttttgttgaagccttttccagaacgttgtctccaaagtgcatcctccctttggtctggaagttctgtggctaccctgtaccactggggtcaacgttttccagttggaagaggactacagggagagagggcggggttattggaagaagaagaagaaaaaaagaactagataaaggagggcacatccctctcactcccgcctttccccttacctttctgtctctcgggacccttatttcttcgtcacggtgtccaggaccattttgaccctgtcggccccggcacccccccgccgcaccccagccccgagcatggggacggcgctgctccagcgcgggggctgttttcttctgtgcctctcgctgctgctcctgggctgctgggcggagctgggcagcgggctggagtttccgggcgccgagggccaatggacgcgcttccccaagtggaacgcctgctgcgagagcgagatgagcttccagctcaagactcgcagcgcccgcggcctcgtgctctacttcgacgacgagggcttctgcgacttcctggagctgattctgacgcgcggcggccgcctgcagctcagcttctccatcttctgcgctgagcctgcgacgctcctggccgacacgccggttaacgacggcgcctggcacagcgtgcgcatccgccgccagttccgcaacaccacgctcttcatcgaccaggtggaggccaagtgggtggaggtcaagtccaagcgcagggacatgacggtgttcagcggccttttcgtcggggggctgcccccggaactgcgcgccgcggcgctcaagctcaccctggcctcggtgagggagcgggagcccttcaaggggtggattcgtgacgtgagggtcaactcctcgcaggtcctgcccgtggacagcggcgaggtgaagctggacgatgagccgcccaacagcggcgggggaagcccgtgcgaggcgggcgaggagggcgagggcggggtgtgcctcaacggaggtgtgtgctccgtggtggacgaccaggccgtgtgcgactgctcgcgaaccggcttccgcggcaaggactgcagccaagaagacaacaatgtggaaggtctggcgcacctgatgatgggcgaccaaggtaaaagtaaaggaaaagaagaatatattgccacgttcaaaggatctgaatacttctgctacgacttgtctcaaaaccccattcaaagcagcagtgatgaaataactctgtcatttaaaacccttcagaggaatggactgatgcttcacactgggaaatcggctgattatgtcaatcttgccctgaaaaatggagctgtctctctggtcattaatttgggatcaggggcctttgaagcactagtggagcctgtgaatggaaagtttaatgataatgcctggcatgatgtgaaagtcaccaggaatctgcgtcagcactcaggcattggacacgctatggtgacaatatcagtggatgggattcttaccacaacgggctacacgcaagaagattataccatgctggggtctgatgactttttctatgttggaggcagtcccagcacagccgaccttccagggtcaccagtcagtaacaactttatgggctgtctcaaagaggttgtatataaaaataatgatgtgaggctggaattatctcgacttgccaagcaaggagatcctaagatgaagatccatggagtggtggcatttaaatgtgagaatgttgcaactttagacccaatcacctttgaaaccccagagtctttcatctctttgcctaaatggaatgcaaagaaaactggctccatatcatttgatttccgtacaacagagccaaatggcctcatcttatttagccatggcaagccaagacatcagaaagatgccaagcacccacagatgataaaggtggacttctttgctattgagatgctagatggccacctctacctcctcctggacatggggtcaggtactataaaaataaaagccctgttgaagaaagtgaatgatggagaatggtatcatgtggacttccagagagacggacggtcaggtaccatttctgtcaacacgttgcgtactccctacactgctcctggtgagagtgagattctggacctggatgatgagttgtacctgggggggctgccagaaaataaagctggccttgtcttccccaccgaggtgtggactgctctgctcaactatggctacgtgggctgcatcagggatttgttcatcgatggccaaagcaaagatatccggcaaatggctgaagttcaaagtactgctggagtgaagccttcctgctcaaaggaaacagcaaaaccgtgccttagcaacccttgcaaaaacaatggcatgtgcagggatgggtggaacagatatgtctgtgattgttccggaacaggctatcttggcaggtcctgtgagagagaggcaacggttttgagctatgatgggagcatgtttatgaaaattcagctccccgtagtcatgcatacggaggctgaggatgtttccttacggttccgatcccagcgtgcatatggcattctgatggcaaccacttctagagactctgctgacaccctccgcctggagctagacgcaggacgtgtgaaactgacggtcaatctagattgtatcaggattaactgtaattccagcaaaggtcccgagactctttttgctggctataacctcaatgataacgagtggcacacagtgcgtgtagttcggcgtggaaaaagtttaaagttaacagtggatgaccaacaggccatgacaggtcaaatggcaggtgatcatactaggctggagttccataacatagagactggcatcatcacagaacgacggtatctttcttctgtcccctccaacttcattggacacctgcagagcttgacatttaatggaatggcatacattgacctgtgtaaaaatggcgacatagattactgtgagcttaatgccagatttggcttcaggaacatcatagcagatcctgtcaccttcaagaccaaatcgagctatgttgccttagctaccttgcaagcctacacttctatgcatctttttttccagttcaagacaacatccctagatggattaattctatataacagtggggatggaaatgactttattgtggttgaattagttaaagggtacttacattacgtgtttgatttgggaaatggtgctaacctcatcaaaggaagctcaaataaacctctcaatgacaatcagtggcacaacgtgatgatatcaagggacaccagcaacctccacactgtaaagattgacacaaaaatcacaacgcaaatcaccgccggagccaggaacttagacctcaagagtgacttatatataggaggagtagctaaagaaacatacaaatccttaccaaaacttgtacatgccaaagaaggctttcaaggctgcctggcatcagttgatttaaatggacggcttccggacctcatctccgatgctcttttctgcaacggacagatcgagagaggatgtgaagggcccagcacaacctgccaagaggactcatgttccaatcaaggtgtgtgcttgcaacaatgggatggcttcagctgtgactgtagtatgacttccttcagtggaccactctgcaatgaccctgggacgacatatatctttagcaaaggtggtggacaaatcacgtataagtggcctcctaatgaccgacccagtacacgagcagacagactggccataggttttagcactgttcagaaagaagccgtattggtgcgagtggacagttcttcaggcttgggtgactacctagaactgcatatacaccagggaaaaattggagttaagtttaatgttgggacagatgacatcgccattgaagaatccaatgcaatcattaatgatgggaaataccatgtagttcgtttcacgaggagtggtggcaatgccacgttgcaggtggacagctggccagtgatcgagcgctaccctgcaggaaacaatgataacgagcgcctggcgattgctagacagcgaattccatatcgacttggtcgagtagttgatgaatggctactcgacaaagggcgtcagctcacaatcttcaatagccaagcaaccataataattggcgggaaagagcagggccagcccttccagggccagctctctgggctgtactacaatggcttgaaagttctgaatatggcagccgaaaacgatgccaacatcgccatagtgggaaatgtgagactggttggtgaagtgccttcctctatgacaactgagtcaacagccactgccatgcaatcagagatgtccacatcaattatggagactaccacgaccctggctactagcacagccagaagaggaaagcccccgacaaaagaacccattagccagaccacagatgacatccttgtggcctcagcagagtgtcccagcgatgatgaggacattgacccctgtgagccgagctcaggtgggttagccaacccaacccgagcaggcggcagagagccgtatccaggctcagcagaagtgatccgggagtccagcagcaccacgggtatggtcgttgggatagtagccgctgccgccctgtgcatccttatcctcctctatgccatgtacaagtacagaaaccgggatgaaggctcataccatgtggacgagagtcgaaactacatcagtaactcagcacagtccaatggggctgttgtaaaggagaaacaacccagcagtgcgaaaagctccaacaaaaataagaaaaacaaggataaagagtattatgtctgatcccaagatcttaaatggacacttgtatagaaatagtcttcattttatctgagacataatataaacttatttactttcctttttatgaagcacatacaaaagaagacagggaatgcaatcaggaaggaaagactttttaaaaaataaaaacaagtatctcatgctcttgtttctc

SEQ ID NO: 19849 - DNA, 3157 bp, Homo sapiens
  source 1..3157: mol_type = unassigned DNA
gatttgggaaatggtgctaacctcatcaaaggaagctcaaataaacctctcaatgacaatcagtggcacaacgtgatgatatcaagggacaccagcaacctccacactgtaaagattgacacaaaaatcacaacgcaaatcaccgccggagccaggaacttagacctcaagagtgacttatatataggaggagtagctaaagaaacatacaaatccttaccaaaacttgtacatgccaaagaaggctttcaaggctgcctggcatcagttgatttaaatggacggcttccggacctcatctccgatgctcttttctgcaacggacagatcgagagaggatgtgaagttgcattgatgaaagctgacttgcaagggcccagcacaacctgccaagaggactcatgttccaatcaaggtgtgtgcttgcaacaatgggatggcttcagctgtgactgtagtatgacttccttcagtggaccactctgcaatgaccctgggacgacatatatctttagcaaaggtggtggacaaatcacgtataagtggcctcctaatgaccgacccagtacacgagcagacagactggccataggttttagcactgttcagaaagaagccgtattggtgcgagtggacagttcttcaggcttgggtgactacctagaactgcatatacaccagggaaaaattggagttaagtttaatgttgggacagatgacatcgccattgaagaatccaatgcaatcattaatgatgggaaataccatgtagttcgtttcacgaggagtggtggcaatgccacgttgcaggtggacagctggccagtgatcgagcgctaccctgcagggcgtcagctcacaatcttcaatagccaagcaaccataataattggcgggaaagagcagggccagcccttccagggccagctctctgggctgtactacaatggcttgaaagttctgaatatggcagccgaaaacgatgccaacatcgccatagtgggaaatgtgagactggttggtgaagtgccttcctctatgacaactgagtcaacagccactgccatgcaatcagagatgtccacatcaattatggagactaccacgaccctggctactagcacagccagaagaggaaagcccccgacaaaagaacccattagccagaccacagatgacatccttgtggcctcagcagagtgtcccagcgatgatgaggacattgacccctgtgagccgagctcaggtgggttagccaacccaacccgagcaggcggcagagagccgtatccaggctcagcagaagtgatccgggagtccagcagcaccacgggtatggtcgttgggatagtagccgctgccgccctgtgcatccttatcctcctctatgccatgtacaagtacagaaaccgggatgaaggctcataccatgtggacgagagtcgaaactacatcagtaactcagcacagtccaatggggctgttgtaaaggagaaacaacccagcagtgcgaaaagctccaacaaaaataagaaaaacaaggataaagagtattatgtctgatcccaagatcttaaatggacacttgtatagaaatagtcttcattttatctgagacataatataaacttatttactttcctttttatgaagcacatacaaaagaagacagggaatgcaatcaggaaggaaagactttttaaaaaataaaaacaagtatctcatgctcttgtttctcaaaaaagaaaaacaaaaaacaaaaaacaggggccaataaattccctaacatccacagtgttttcatttactctgcttgtctttatgttgctggaacatttctaaaagacagtgatgaccgcacgcattcataaagcaaaggagtactacagcatcaaggcacaacacaaaaaccaacacaaaacataacacaaaaaagaagctacctatgatcctggatttagccaaagtgctagcgctttcctgagaagtcagtccaattgccagagaagactgtccttttgagtgactcaacctgcaaacctttaagagtttgccgcctggtgcaactggagcagtggttggaacttgcatttgaaacaaagtgctggcttttttgaagacttgtgtaggaacacattcaaaaagcccctttctggttgtgagagaggaaaaaaaagtatggaggccttattttcaaaaatgtgaaatataaggcacgttttcacacaaaatttcaaaacaaaaacaagagggcatagatgcaatcattgggaaattttcatgcacgcttattatgttattacatatgtttatataaaatccatctctgtgtgctttctggactgtgataagtgacgttttatagcctgttgtatagaaaatgcaaaatatatctctgctcttcagccatttttggtaaattcaatgttataagtgttgctaagtatagggagttttatgacatcagagcaacaattatttcagttgggtttttctttttttttgccaccattataaattgccacaattacttttattttttaaagaaattacagtgtagtgtttattctaaggaagatatgtatgaatgtatatacaaagactcagctacttcttttcttatatgtacagccttcattctgttgcaattaagttttagtacttgtatgaaaggtgtgaattagaaagtcacatatatacatatgtatcttataatcttttctccctgaaatactcacattcccacatacattcactattttcacacacacacacacacacacacacacacacacacacacacacacacgaatccacagcaatccatcagatatgctggaagatccaaacgtgcatacagtagcaaatatttattgacaaattgaaaagcaggaaggaagagggttgtgccaaggtattgatgacaaatggggtgatttgcttcattgagatcttgctcccaggtaaccttaagaagattttagtccctaaagaaatgaacctttccttatcaaatagaatatcactgatatactgctgcatgaataagaaccattatgtgggcaggttatggaagcaaaattggttaatctacaccttaactctggctgctgcaattgaaaactttctttctaataaaataatatatatatctctg

SEQ ID NO: 19850 - DNA, 4500 bp, Homo sapiens
  source 1..4500: mol_type = unassigned DNA
atggggacggcgctgctccagcgcgggggctgttttcttctgtgcctctcgctgctgctcctgggctgctgggcggagctgggcagcgggctggagtttccgggcgccgagggccaatggacgcgcttccccaagtggaacgcctgctgcgagagcgagatgagcttccagctcaagactcgcagcgcccgcggcctcgtgctctacttcgacgacgagggcttctgcgacttcctggagctgattctgacgcgcggcggccgcctgcagctcagcttctccatcttctgcgctgagcctgcgacgctcctggccgacacgccggttaacgacggcgcctggcacagcgtgcgcatccgccgccagttccgcaacaccacgctcttcatcgaccaggtggaggccaagtgggtggaggtcaagtccaagcgcagggacatgacggtgttcagcggccttttcgtcggggggctgcccccggaactgcgcgccgcggcgctcaagctcaccctggcctcggtgagggagcgggagcccttcaaggggtggattcgtgacgtgagggtcaactcctcgcaggtcctgcccgtggacagcggcgaggtgaagctggacgatgagccgcccaacagcggcgggggaagcccgtgcgaggcgggcgaggagggcgagggcggggtgtgcctcaacggaggtgtgtgctccgtggtggacgaccaggccgtgtgcgactgctcgcgaaccggcttccgcggcaaggactgcagccaagctgatactaacttagagggtctggcgcacctgatgatgggcgaccaagcaaagtcaaaaagaaaagaagaatatattgccacgttcaaaggatctgaatacttctgctacgacttgtctcaaaaccccattcaaagcagcagtgatgaaataactctgtcatttaaaacccttcagaggaatggactgatgcttcacactgggaaatcggctgattatgtcaatcttgccctgaaaaatggagctgtctctctggtcattaatttgggatcaggggcctttgaagcactagtggagcctgtgaatggaaagtttaatgataatgcctggcatgatgtgaaagtcaccaggaatctgcgtcaggtgacaatatcagtggatgggattcttaccacaacgggctacacgcaagaagattataccatgctggggtctgatgactttttctatgttggaggcagtcccagcacagccgaccttccagggtcaccagtcagtaacaactttatgggctgtctcaaagaggttgtatataaaaataatgatgtgaggctggaattatctcgacttgccaagcaaggagatcctaagatgaagatccatggagtggtggcatttaaatgtgagaatgttgcaactttagacccaatcacctttgaaaccccagagtctttcatctctttgcctaaatggaatgcaaagaaaactggctccatatcatttgatttccgtacaacagagccaaatggcctcatcttatttagccatggcaagccaagacatcagaaagatgccaagcacccacagatgataaaggtggacttctttgctattgagatgctagatggccacctctacctcctcctggacatggggtcaggtactataaaaataaaagccctgttgaagaaagtgaatgatggagaatggtatcatgtggacttccagagagacggacggtcaggtaccatttctgtcaacacgttgcgtactccctacactgctcctggtgagagtgagattctggacctggatgatgagttgtacctgggggggctgccagaaaataaagctggccttgtcttccccaccgaggtgtggactgctctgctcaactatggctacgtgggctgcatcagggatttgttcatcgatggccaaagcaaagatatccggcaaatggctgaagttcaaagtactgctggagtgaagccttcctgctcaaaggaaacagcaaaaccgtgccttagcaacccttgcaaaaacaatggcatgtgcagggatgggtggaacagatatgtctgtgattgttccggaacaggctatcttggcaggtcctgtgagagagaggcaacggttttgagctatgatgggagcatgtttatgaaaattcagctccccgtagtcatgcatacggaggctgaggatgtttccttacggttccgatcccagcgtgcatatggcattctgatggcaaccacttctagagactctgctgacaccctccgcctggagctagacgcaggacgtgtgaaactgacggtcaatctagattgtatcaggattaactgtaattccagcaaaggtcccgagactctttttgctggctataacctcaatgataacgagtggcacacagtgcgtgtagttcggcgtggaaaaagtttaaagttaacagtggatgaccaacaggccatgacaggtcaaatggcaggtgatcatactaggctggagttccataacatagagactggcatcatcacagaacgacggtatctttcttctgtcccctccaacttcattggacacctgcagagcttgacatttaatggaatggcatacattgacctgtgtaaaaatggcgacatagattactgtgagcttaatgccagatttggcttcaggaacatcatagcagatcctgtcaccttcaagaccaaatcgagctatgttgccttagctaccttgcaagcctacacttctatgcatctttttttccagttcaagacaacatccctagatggattaattctatataacagtggggatggaaatgactttattgtggttgaattagttaaagggtacttacattacgtgtttgatttgggaaatggtgctaacctcatcaaaggaagctcaaataaacctctcaatgacaatcagtggcacaacgtgatgatatcaagggacaccagcaacctccacactgtaaagattgacacaaaaatcacaacgcaaatcaccgccggagccaggaacttagacctcaagagtgacttatatataggaggagtagctaaagaaacatacaaatccttaccaaaacttgtacatgccaaagaaggctttcaaggctgcctggcatcagttgatttaaatggacggcttccggacctcatctccgatgctcttttctgcaacggacagatcgagagaggatgtgaagggcccagcacaacctgccaagaggactcatgttccaatcaaggtgtgtgcttgcaacaatgggatggcttcagctgtgactgtagtatgacttccttcagtggaccactctgcaatgaccctgggacgacatatatctttagcaaaggtggtggacaaatcacgtataagtggcctcctaatgaccgacccagtacacgagcagacagactggccataggttttagcactgttcagaaagaagccgtattggtgcgagtggacagttcttcaggcttgggtgactacctagaactgcatatacaccagggaaaaattggagttaagtttaatgttgggacagatgacatcgccattgaagaatccaatgcaatcattaatgatgggaaataccatgtagttcgtttcacgaggagtggtggcaatgccacgttgcaggtggacagctggccagtgatcgagcgctaccctgcaggaaacaatgataacgagcgcctggcgattgctagacagcgaattccatatcgacttggtcgagtagttgatgaatggctactcgacaaagggcgtcagctcacaatcttcaatagccaagcaaccataataattggcgggaaagagcagggccagcccttccagggccagctctctgggctgtactacaatggcttgaaagttctgaatatggcagccgaaaacgatgccaacatcgccatagtgggaaatgtgagactggttggtgaagtgccttcctctatgacaactgagtcaacagccactgccatgcaatcagagatgtccacatcaattatggagactaccacgaccctggctactagcacagccagaagaggaaagcccccgacaaaagaacccattagccagaccacagatgacatccttgtggcctcagcagagtgtcccagcgatgatgaggacattgacccctgtgagccgagctcaggtgggttagccaacccaacccgagcaggcggcagagagccgtatccaggctcagcagaagtgatccgggagtccagcagcaccacgggtatggtcgttgggatagtagccgctgccgccctgtgcatccttatcctcctctatgccatgtacaagtacagaaaccgggatgaaggctcataccatgtggacgagagtcgaaactacatcagtaactcagcacagtccaatggggctgttgtaaaggagaaacaacccagcagtgcgaaaagctccaacaaaaataagaaaaacaaggataaagagtattatgtctga

SEQ ID NO: 19851 - DNA, 7578 bp, Homo sapiens
  source 1..7578: mol_type = unassigned DNA
gcacctcgctccgcagcatccagacctggaggggctgcgaccacgggccgagcccacccattccccagccaaaggacgggcccgccgctctccatggtactgcggagagctcagctccgcccttctctttcagaaggacagcacccggcgtcacgtaacccagccttctcaggctccaccaccgccttttccttcccagctctttccctctcctccccctcctcctccttctcctcctcctcctcctcctgctcccctccgttgcctgttctcccctcccgcactcctggagatagacgctcaagcctgacgcctctgaaaaggcagcagcagtcgccttatccatagacctcaggaaattcgctttgaccgatgcatgcttcaggctctggctcgagctgaggggaataaccgggcagatgtctgagtccttaaaaaagacaagataaaaccaaaatgcatcaccaacacacaaccaattgatgtgctggcatcttagcttggccctgcagaggcagagagaaaagaagaggagctgttgcgatttccacatctaacagcttctggctatttcgcaactgctgggtttgagtcctactgttgccgtggctgaaaagagaagtaaaatccaacttgtgagaccacgcacaaggaattaggctttggctgcagcggtgctgaagcccatgctatgacagaagaagcaggcctttgaagctatcctcgggttaagaaatggtgccctaaagaggcaagcatccctttctccgttctgctgtaagacaccacatctgaaggagacagacttgaggcattcacaagcatccaaggatactggctcactgctggcttcctgtactttcttgagaaaagtgttttctttttactgactctcactgcttccttttggcctggtaccactggtggaacctggcagataatgggatttgaggagttaagtatctgttgacactgcagatactcttaaattagttaatcagactcaaatgggtcagtgctttcccttgatcttttgttgaagccttttccagaacgttgtctccaaagtgcatcctccctttggtctggaagttctgtggctaccctgtaccactggggtcaacgttttccagttggaagaggactacagggagagagggcggggttattggaagaagaagaagaaaaaaagaactagataaaggagggcacatccctctcactcccgcctttccccttacctttctgtctctcgggacccttatttcttcgtcacggtgtccaggaccattttgaccctgtcggccccggcacccccccgccgcaccccagccccgagcatggggacggcgctgctccagcgcgggggctgttttcttctgtgcctctcgctgctgctcctgggctgctgggcggagctgggcagcgggctggagtttccgggcgccgagggccaatggacgcgcttccccaagtggaacgcctgctgcgagagcgagatgagcttccagctcaagactcgcagcgcccgcggcctcgtgctctacttcgacgacgagggcttctgcgacttcctggagctgattctgacgcgcggcggccgcctgcagctcagcttctccatcttctgcgctgagcctgcgacgctcctggccgacacgccggttaacgacggcgcctggcacagcgtgcgcatccgccgccagttccgcaacaccacgctcttcatcgaccaggtggaggccaagtgggtggaggtcaagtccaagcgcagggacatgacggtgttcagcggccttttcgtcggggggctgcccccggaactgcgcgccgcggcgctcaagctcaccctggcctcggtgagggagcgggagcccttcaaggggtggattcgtgacgtgagggtcaactcctcgcaggtcctgcccgtggacagcggcgaggtgaagctggacgatgagccgcccaacagcggcgggggaagcccgtgcgaggcgggcgaggagggcgagggcggggtgtgcctcaacggaggtgtgtgctccgtggtggacgaccaggccgtgtgcgactgctcgcgaaccggcttccgcggcaaggactgcagccaagaaataaaattcggtcttcagtgtgttttgccggtgctgttacatgacaatgaccaaggaaaatactgttgtataaatacagcaaagcctctaacagaaaaagacaacaatgtggaaggtctggcgcacctgatgatgggcgaccaaggtaaaagtaaaggaaaagaagaatatattgccacgttcaaaggatctgaatacttctgctacgacttgtctcaaaaccccattcaaagcagcagtgatgaaataactctgtcatttaaaacccttcagaggaatggactgatgcttcacactgggaaatcggctgattatgtcaatcttgccctgaaaaatggagctgtctctctggtcattaatttgggatcaggggcctttgaagcactagtggagcctgtgaatggaaagtttaatgataatgcctggcatgatgtgaaagtcaccaggaatctgcgtcagcactcaggcattggacacgctatggtaaacaaactacattgttcggtgacaatatcagtggatgggattcttaccacaacgggctacacgcaagaagattataccatgctggggtctgatgactttttctatgttggaggcagtcccagcacagccgaccttccagggtcaccagtcagtaacaactttatgggctgtctcaaagaggttgtatataaaaataatgatgtgaggctggaattatctcgacttgccaagcaaggagatcctaagatgaagatccatggagtggtggcatttaaatgtgagaatgttgcaactttagacccaatcacctttgaaaccccagagtctttcatctctttgcctaaatggaatgcaaagaaaactggctccatatcatttgatttccgtacaacagagccaaatggcctcatcttatttagccatggcaagccaagacatcagaaagatgccaagcacccacagatgataaaggtggacttctttgctattgagatgctagatggccacctctacctcctcctggacatggggtcaggtactataaaaataaaagccctgttgaagaaagtgaatgatggagaatggtatcatgtggacttccagagagacggacggtcaggtaccatttctgtcaacacgttgcgtactccctacactgctcctggtgagagtgagattctggacctggatgatgagttgtacctgggggggctgccagaaaataaagctggccttgtcttccccaccgaggtgtggactgctctgctcaactatggctacgtgggctgcatcagggatttgttcatcgatggccaaagcaaagatatccggcaaatggctgaagttcaaagtactgctggagtgaagccttcctgctcaaaggaaacagcaaaaccgtgccttagcaacccttgcaaaaacaatggcatgtgcagggatgggtggaacagatatgtctgtgattgttccggaacaggctatcttggcaggtcctgtgagagagaggcaacggttttgagctatgatgggagcatgtttatgaaaattcagctccccgtagtcatgcatacggaggctgaggatgtttccttacggttccgatcccagcgtgcatatggcattctgatggcaaccacttctagagactctgctgacaccctccgcctggagctagacgcaggacgtgtgaaactgacggtcaatctagattgtatcaggattaactgtaattccagcaaaggtcccgagactctttttgctggctataacctcaatgataacgagtggcacacagtgcgtgtagttcggcgtggaaaaagtttaaagttaacagtggatgaccaacaggccatgacaggtcaaatggcaggtgatcatactaggctggagttccataacatagagactggcatcatcacagaacgacggtatctttcttctgtcccctccaacttcattggacacctgcagagcttgacatttaatggaatggcatacattgacctgtgtaaaaatggcgacatagattactgtgagcttaatgccagatttggcttcaggaacatcatagcagatcctgtcaccttcaagaccaaatcgagctatgttgccttagctaccttgcaagcctacacttctatgcatctttttttccagttcaagacaacatccctagatggattaattctatataacagtggggatggaaatgactttattgtggttgaattagttaaagggtacttacattacgtgtttgatttgggaaatggtgctaacctcatcaaaggaagctcaaataaacctctcaatgacaatcagtggcacaacgtgatgatatcaagggacaccagcaacctccacactgtaaagattgacacaaaaatcacaacgcaaatcaccgccggagccaggaacttagacctcaagagtgacttatatataggaggagtagctaaagaaacatacaaatccttaccaaaacttgtacatgccaaagaaggctttcaaggctgcctggcatcagttgatttaaatggacggcttccggacctcatctccgatgctcttttctgcaacggacagatcgagagaggatgtgaagggcccagcacaacctgccaagaggactcatgttccaatcaaggtgtgtgcttgcaacaatgggatggcttcagctgtgactgtagtatgacttccttcagtggaccactctgcaatgaccctgggacgacatatatctttagcaaaggtggtggacaaatcacgtataagtggcctcctaatgaccgacccagtacacgagcagacagactggccataggttttagcactgttcagaaagaagccgtattggtgcgagtggacagttcttcaggcttgggtgactacctagaactgcatatacaccagggaaaaattggagttaagtttaatgttgggacagatgacatcgccattgaagaatccaatgcaatcattaatgatgggaaataccatgtagttcgtttcacgaggagtggtggcaatgccacgttgcaggtggacagctggccagtgatcgagcgctaccctgcaggaaacaatgataacgagcgcctggcgattgctagacagcgaattccatatcgacttggtcgagtagttgatgaatggctactcgacaaagggcgtcagctcacaatcttcaatagccaagcaaccataataattggcgggaaagagcagggccagcccttccagggccagctctctgggctgtactacaatggcttgaaagttctgaatatggcagccgaaaacgatgccaacatcgccatagtgggaaatgtgagactggttggtgaagtgccttcctctatgacaactgagtcaacagccactgccatgcaatcagagatgtccacatcaattatggagactaccacgaccctggctactagcacagccagaagaggaaagcccccgacaaaagaacccattagccagaccacagatgacatccttgtggcctcagcagagtgtcccagcgatgatgaggacattgacccctgtgagccgagctcaggtgggttagccaacccaacccgagcaggcggcagagagccgtatccaggctcagcagaagtgatccgggagtccagcagcaccacgggtatggtcgttgggatagtagccgctgccgccctgtgcatccttatcctcctctatgccatgtacaagtacagaaaccgggatgaaggctcataccatgtggacgagagtcgaaactacatcagtaactcagcacagtccaatggggctgttgtaaaggagaaacaacccagcagtgcgaaaagctccaacaaaaataagaaaaacaaggataaagagtattatgtctgatcccaagatcttaaatggacacttgtatagaaatagtcttcattttatctgagacataatataaacttatttactttcctttttatgaagcacatacaaaagaagacagggaatgcaatcaggaaggaaagactttttaaaaaataaaaacaagtatctcatgctcttgtttctcaaaaaagaaaaacaaaaaacaaaaaacaggggccaataaattccctaacatccacagtgttttcatttactctgcttgtctttatgttgctggaacatttctaaaagacagtgatgaccgcacgcattcataaagcaaaggagtactacagcatcaaggcacaacacaaaaaccaacacaaaacataacacaaaaaagaagctacctatgatcctggatttagccaaagtgctagcgctttcctgagaagtcagtccaattgccagagaagactgtccttttgagtgactcaacctgcaaacctttaagagtttgccgcctggtgcaactggagcagtggttggaacttgcatttgaaacaaagtgctggcttttttgaagacttgtgtaggaacacattcaaaaagcccctttctggttgtgagagaggaaaaaaaagtatggaggccttattttcaaaaatgtgaaatataaggcacgttttcacacaaaatttcaaaacaaaaacaagagggcatagatgcaatcattgggaaattttcatgcacgcttattatgttattacatatgtttatataaaatccatctctgtgtgctttctggactgtgataagtgacgttttatagcctgttgtatagaaaatgcaaaatatatctctgctcttcagccatttttggtaaattcaatgttataagtgttgctaagtatagggagttttatgacatcagagcaacaattatttcagttgggtttttctttttttttgccaccattataaattgccacaattacttttattttttaaagaaattacagtgtagtgtttattctaaggaagatatgtatgaatgtatatacaaagactcagctacttcttttcttatatgtacagccttcattctgttgcaattaagttttagtacttgtatgaaaggtgtgaattagaaagtcacatatatacatatgtatcttataatcttttctccctgaaatactcacattcccacatacattcactattttcacacacacacacacacacacacacacacacacacacacacacacacgaatccacagcaatccatcagatatgctggaagatccaaacgtgcatacagtagcaaatatttattgacaaattgaaaagcaggaaggaagagggttgtgccaaggtattgatgacaaatggggtgatttgcttcattgagatcttgctcccaggtaaccttaagaagattttagtccctaaagaaatgaacctttccttatcaaatagaatatcactgatatactgctgcatgaataagaaccattatgtgggcaggttatggaagcaaaattggttaatctacaccttaactctggctgctgcaattgaaaactttctttctaataaaataatatatatatctctg

SEQ ID NO: 19852 - DNA, 7505 bp, Homo sapiens
  source 1..7505: mol_type = unassigned DNA
ctctctctctctctctctctctctctttctttctttccgatggggaagagagggtggtgacaagttagaagcgcttgcggaaggtccccgcccccaggatcaggctccccctgcaaggggacgatgcaaaggtaaaagcacctcgctccgcagcatccagacctggaggggctgcgaccacgggccgagcccacccattccccagccaaaggacgggcccgccgctctccatggtactgcggagagctcagctccgcccttctctttcagaaggacagcacccggcgtcacgtaacccagccttctcaggctccaccaccgccttttccttcccagctctttccctctcctccccctcctcctccttctcctcctcctcctcctcctgctcccctccgttgcctgttctcccctcccgcactcctggagatagacgctcaagcctgacgcctctgaaaaggcagcagcagtcgccttatccatagacctcaggaaattcgctttgaccgatgcatgcttcaggctctggctcgagctgaggggaataaccgggcagatgtctgagtccttaaaaaagacaagataaaaccaaaatgcatcaccaacacacaaccaattgatgtgctggcatcttagcttggccctgcagaggcagagagaaaagaagaggagctgttgcgatttccacatctaacagcttctggctatttcgcaactgctgggtttgagtcctactgttgccgtggctgaaaagagaagtaaaatccaacttgtgagaccacgcacaaggaattaggctttggctgcagcggtgctgaagcccatgctatgacagaagaagcaggcctttgaagctatcctcgggttaagaaatggtgccctaaagaggcaagcatccctttctccgttctgctgtaagacaccacatctgaaggagacagacttgaggcattcacaagcatccaaggatactggctcactgctggcttcctgtactttcttgagaaaagtgttttctttttactgactctcactgcttccttttggcctggtaccactggtggaacctggcagataatgggatttgaggagttaagtatctgttgacactgcagatactcttaaattagttaatcagactcaaatgggtcagtgctttcccttgatcttttgttgaagccttttccagaacgttgtctccaaagtgcatcctccctttggtctggaagttctgtggctaccctgtaccactggggtcaacgttttccagttggaagaggactacagggagagagggcggggttattggaagaagaagaagaaaaaaagaactagataaaggagggcacatccctctcactcccgcctttccccttacctttctgtctctcgggacccttatttcttcgtcacggtgtccaggaccattttgaccctgtcggccccggcacccccccgccgcaccccagccccgagcatggggacggcgctgctccagcgcgggggctgttttcttctgtgcctctcgctgctgctcctgggctgctgggcggagctgggcagcgggctggagtttccgggcgccgagggccaatggacgcgcttccccaagtggaacgcctgctgcgagagcgagatgagcttccagctcaagactcgcagcgcccgcggcctcgtgctctacttcgacgacgagggcttctgcgacttcctggagctgattctgacgcgcggcggccgcctgcagctcagcttctccatcttctgcgctgagcctgcgacgctcctggccgacacgccggttaacgacggcgcctggcacagcgtgcgcatccgccgccagttccgcaacaccacgctcttcatcgaccaggtggaggccaagtgggtggaggtcaagtccaagcgcagggacatgacggtgttcagcggccttttcgtcggggggctgcccccggaactgcgcgccgcggcgctcaagctcaccctggcctcggtgagggagcgggagcccttcaaggggtggattcgtgacgtgagggtcaactcctcgcaggtcctgcccgtggacagcggcgaggtgaagctggacgatgagccgcccaacagcggcgggggaagcccgtgcgaggcgggcgaggagggcgagggcggggtgtgcctcaacggaggtgtgtgctccgtggtggacgaccaggccgtgtgcgactgctcgcgaaccggcttccgcggcaaggactgcagccaagaagacaacaatgtggaaggtctggcgcacctgatgatgggcgaccaaggtaaaagtaaaggaaaagaagaatatattgccacgttcaaaggatctgaatacttctgctacgacttgtctcaaaaccccattcaaagcagcagtgatgaaataactctgtcatttaaaacccttcagaggaatggactgatgcttcacactgggaaatcggctgattatgtcaatcttgccctgaaaaatggagctgtctctctggtcattaatttgggatcaggggcctttgaagcactagtggagcctgtgaatggaaagtttaatgataatgcctggcatgatgtgaaagtcaccaggaatctgcgtcagcactcaggcattggacacgctatggtgacaatatcagtggatgggattcttaccacaacgggctacacgcaagaagattataccatgctggggtctgatgactttttctatgttggaggcagtcccagcacagccgaccttccagggtcaccagtcagtaacaactttatgggctgtctcaaagaggttgtatataaaaataatgatgtgaggctggaattatctcgacttgccaagcaaggagatcctaagatgaagatccatggagtggtggcatttaaatgtgagaatgttgcaactttagacccaatcacctttgaaaccccagagtctttcatctctttgcctaaatggaatgcaaagaaaactggctccatatcatttgatttccgtacaacagagccaaatggcctcatcttatttagccatggcaagccaagacatcagaaagatgccaagcacccacagatgataaaggtggacttctttgctattgagatgctagatggccacctctacctcctcctggacatggggtcaggtactataaaaataaaagccctgttgaagaaagtgaatgatggagaatggtatcatgtggacttccagagagacggacggtcaggtaccatttctgtcaacacgttgcgtactccctacactgctcctggtgagagtgagattctggacctggatgatgagttgtacctgggggggctgccagaaaataaagctggccttgtcttccccaccgaggtgtggactgctctgctcaactatggctacgtgggctgcatcagggatttgttcatcgatggccaaagcaaagatatccggcaaatggctgaagttcaaagtactgctggagtgaagccttcctgctcaaaggaaacagcaaaaccgtgccttagcaacccttgcaaaaacaatggcatgtgcagggatgggtggaacagatatgtctgtgattgttccggaacaggctatcttggcaggtcctgtgagagagaggcaacggttttgagctatgatgggagcatgtttatgaaaattcagctccccgtagtcatgcatacggaggctgaggatgtttccttacggttccgatcccagcgtgcatatggcattctgatggcaaccacttctagagactctgctgacaccctccgcctggagctagacgcaggacgtgtgaaactgacggtcaatctagattgtatcaggattaactgtaattccagcaaaggtcccgagactctttttgctggctataacctcaatgataacgagtggcacacagtgcgtgtagttcggcgtggaaaaagtttaaagttaacagtggatgaccaacaggccatgacaggtcaaatggcaggtgatcatactaggctggagttccataacatagagactggcatcatcacagaacgacggtatctttcttctgtcccctccaacttcattggacacctgcagagcttgacatttaatggaatggcatacattgacctgtgtaaaaatggcgacatagattactgtgagcttaatgccagatttggcttcaggaacatcatagcagatcctgtcaccttcaagaccaaatcgagctatgttgccttagctaccttgcaagcctacacttctatgcatctttttttccagttcaagacaacatccctagatggattaattctatataacagtggggatggaaatgactttattgtggttgaattagttaaagggtacttacattacgtgtttgatttgggaaatggtgctaacctcatcaaaggaagctcaaataaacctctcaatgacaatcagtggcacaacgtgatgatatcaagggacaccagcaacctccacactgtaaagattgacacaaaaatcacaacgcaaatcaccgccggagccaggaacttagacctcaagagtgacttatatataggaggagtagctaaagaaacatacaaatccttaccaaaacttgtacatgccaaagaaggctttcaaggctgcctggcatcagttgatttaaatggacggcttccggacctcatctccgatgctcttttctgcaacggacagatcgagagaggatgtgaagggcccagcacaacctgccaagaggactcatgttccaatcaaggtgtgtgcttgcaacaatgggatggcttcagctgtgactgtagtatgacttccttcagtggaccactctgcaatgaccctgggacgacatatatctttagcaaaggtggtggacaaatcacgtataagtggcctcctaatgaccgacccagtacacgagcagacagactggccataggttttagcactgttcagaaagaagccgtattggtgcgagtggacagttcttcaggcttgggtgactacctagaactgcatatacaccagggaaaaattggagttaagtttaatgttgggacagatgacatcgccattgaagaatccaatgcaatcattaatgatgggaaataccatgtagttcgtttcacgaggagtggtggcaatgccacgttgcaggtggacagctggccagtgatcgagcgctaccctgcagggcgtcagctcacaatcttcaatagccaagcaaccataataattggcgggaaagagcagggccagcccttccagggccagctctctgggctgtactacaatggcttgaaagttctgaatatggcagccgaaaacgatgccaacatcgccatagtgggaaatgtgagactggttggtgaagtgccttcctctatgacaactgagtcaacagccactgccatgcaatcagagatgtccacatcaattatggagactaccacgaccctggctactagcacagccagaagaggaaagcccccgacaaaagaacccattagccagaccacagatgacatccttgtggcctcagcagagtgtcccagcgatgatgaggacattgacccctgtgagccgagctcaggtgggttagccaacccaacccgagcaggcggcagagagccgtatccaggctcagcagaagtgatccgggagtccagcagcaccacgggtatggtcgttgggatagtagccgctgccgccctgtgcatccttatcctcctctatgccatgtacaagtacagaaaccgggatgaaggctcataccatgtggacgagagtcgaaactacatcagtaactcagcacagtccaatggggctgttgtaaaggagaaacaacccagcagtgcgaaaagctccaacaaaaataagaaaaacaaggataaagagtattatgtctgatcccaagatcttaaatggacacttgtatagaaatagtcttcattttatctgagacataatataaacttatttactttcctttttatgaagcacatacaaaagaagacagggaatgcaatcaggaaggaaagactttttaaaaaataaaaacaagtatctcatgctcttgtttctcaaaaaagaaaaacaaaaaacaaaaaacaggggccaataaattccctaacatccacagtgttttcatttactctgcttgtctttatgttgctggaacatttctaaaagacagtgatgaccgcacgcattcataaagcaaaggagtactacagcatcaaggcacaacacaaaaaccaacacaaaacataacacaaaaaagaagctacctatgatcctggatttagccaaagtgctagcgctttcctgagaagtcagtccaattgccagagaagactgtccttttgagtgactcaacctgcaaacctttaagagtttgccgcctggtgcaactggagcagtggttggaacttgcatttgaaacaaagtgctggcttttttgaagacttgtgtaggaacacattcaaaaagcccctttctggttgtgagagaggaaaaaaaagtatggaggccttattttcaaaaatgtgaaatataaggcacgttttcacacaaaatttcaaaacaaaaacaagagggcatagatgcaatcattgggaaattttcatgcacgcttattatgttattacatatgtttatataaaatccatctctgtgtgctttctggactgtgataagtgacgttttatagcctgttgtatagaaaatgcaaaatatatctctgctcttcagccatttttggtaaattcaatgttataagtgttgctaagtatagggagttttatgacatcagagcaacaattatttcagttgggtttttctttttttttgccaccattataaattgccacaattacttttattttttaaagaaattacagtgtagtgtttattctaaggaagatatgtatgaatgtatatacaaagactcagctacttcttttcttatatgtacagccttcattctgttgcaattaagttttagtacttgtatgaaaggtgtgaattagaaagtcacatatatacatatgtatcttataatcttttctccctgaaatactcacattcccacatacattcactattttcacacacacacacacacacacacacacacacacacacacacacacacgaatccacagcaatccatcagatatgctggaagatccaaacgtgcatacagtagcaaatatttattgacaaattgaaaagcaggaaggaagagggttgtgccaaggtattgatgacaaatggggtgatttgcttcattgagatcttgctcccaggtaaccttaagaagattttagtccctaaagaaatgaacctttccttatcaaatagaatatcactgatatactgctgcatgaataagaaccattatgtgggcaggttatggaagcaaaattggttaatctacaccttaactctggctgctgcaattgaaaactttctttctaataaaataatatatatatctctg

SEQ ID NO: 19853 - DNA, 4434 bp, Homo sapiens
  source 1..4434: mol_type = unassigned DNA
atggggacggcgctgctccagcgcgggggctgttttcttctgtgcctctcgctgctgctcctgggctgctgggcggagctgggcagcgggctggagtttccgggcgccgagggccaatggacgcgcttccccaagtggaacgcctgctgcgagagcgagatgagcttccagctcaagactcgcagcgcccgcggcctcgtgctctacttcgacgacgagggcttctgcgacttcctggagctgattctgacgcgcggcggccgcctgcagctcagcttctccatcttctgcgctgagcctgcgacgctcctggccgacacgccggttaacgacggcgcctggcacagcgtgcgcatccgccgccagttccgcaacaccacgctcttcatcgaccaggtggaggccaagtgggtggaggtcaagtccaagcgcagggacatgacggtgttcagcggccttttcgtcggggggctgcccccggaactgcgcgccgcggcgctcaagctcaccctggcctcggtgagggagcgggagcccttcaaggggtggattcgtgacgtgagggtcaactcctcgcaggtcctgcccgtggacagcggcgaggtgaagctggacgatgagccgcccaacagcggcgggggaagcccgtgcgaggcgggcgaggagggcgagggcggggtgtgcctcaacggaggtgtgtgctccgtggtggacgaccaggccgtgtgcgactgctcgcgaaccggcttccgcggcaaggactgcagccaagctgatactaacttagagggtctggcgcacctgatgatgggcgaccaagcaaagtcaaaaagaaaagaagaatatattgccacgttcaaaggatctgaatacttctgctacgacttgtctcaaaaccccattcaaagcagcagtgatgaaataactctgtcatttaaaacccttcagaggaatggactgatgcttcacactgggaaatcggctgattatgtcaatcttgccctgaaaaatggagctgtctctctggtcattaatttgggatcaggggcctttgaagcactagtggagcctgtgaatggaaagtttaatgataatgcctggcatgatgtgaaagtcaccaggaatctgcgtcagcactcaggcattggacacgctatggtgacaatatcagtggatgggattcttaccacaacgggctacacgcaagaagattataccatgctggggtctgatgactttttctatgttggaggcagtcccagcacagccgaccttccagggtcaccagtcagtaacaactttatgggctgtctcaaagaggttgtatataaaaataatgatgtgaggctggaattatctcgacttgccaagcaaggagatcctaagatgaagatccatggagtggtggcatttaaatgtgagaatgttgcaactttagacccaatcacctttgaaaccccagagtctttcatctctttgcctaaatggaatgcaaagaaaactggctccatatcatttgatttccgtacaacagagccaaatggcctcatcttatttagccatggcaagccaagacatcagaaagatgccaagcacccacagatgataaaggtggacttctttgctattgagatgctagatggccacctctacctcctcctggacatggggtcaggtactataaaaataaaagccctgttgaagaaagtgaatgatggagaatggtatcatgtggacttccagagagacggacggtcaggtaccatttctgtcaacacgttgcgtactccctacactgctcctggtgagagtgagattctggacctggatgatgagttgtacctgggggggctgccagaaaataaagctggccttgtcttccccaccgaggtgtggactgctctgctcaactatggctacgtgggctgcatcagggatttgttcatcgatggccaaagcaaagatatccggcaaatggctgaagttcaaagtactgctggagtgaagccttcctgctcaaaggaaacagcaaaaccgtgccttagcaacccttgcaaaaacaatggcatgtgcagggatgggtggaacagatatgtctgtgattgttccggaacaggctatcttggcaggtcctgtgagagagaggcaacggttttgagctatgatgggagcatgtttatgaaaattcagctccccgtagtcatgcatacggaggctgaggatgtttccttacggttccgatcccagcgtgcatatggcattctgatggcaaccacttctagagactctgctgacaccctccgcctggagctagacgcaggacgtgtgaaactgacggtcaatctagattgtatcaggattaactgtaattccagcaaaggtcccgagactctttttgctggctataacctcaatgataacgagtggcacacagtgcgtgtagttcggcgtggaaaaagtttaaagttaacagtggatgaccaacaggccatgacaggtcaaatggcaggtgatcatactaggctggagttccataacatagagactggcatcatcacagaacgacggtatctttcttctgtcccctccaacttcattggacacctgcagagcttgacatttaatggaatggcatacattgacctgtgtaaaaatggcgacatagattactgtgagcttaatgccagatttggcttcaggaacatcatagcagatcctgtcaccttcaagaccaaatcgagctatgttgccttagctaccttgcaagcctacacttctatgcatctttttttccagttcaagacaacatccctagatggattaattctatataacagtggggatggaaatgactttattgtggttgaattagttaaagggtacttacattacgtgtttgatttgggaaatggtgctaacctcatcaaaggaagctcaaataaacctctcaatgacaatcagtggcacaacgtgatgatatcaagggacaccagcaacctccacactgtaaagattgacacaaaaatcacaacgcaaatcaccgccggagccaggaacttagacctcaagagtgacttatatataggaggagtagctaaagaaacatacaaatccttaccaaaacttgtacatgccaaagaaggctttcaaggctgcctggcatcagttgatttaaatggacggcttccggacctcatctccgatgctcttttctgcaacggacagatcgagagaggatgtgaagggcccagcacaacctgccaagaggactcatgttccaatcaaggtgtgtgcttgcaacaatgggatggcttcagctgtgactgtagtatgacttccttcagtggaccactctgcaatgaccctgggacgacatatatctttagcaaaggtggtggacaaatcacgtataagtggcctcctaatgaccgacccagtacacgagcagacagactggccataggttttagcactgttcagaaagaagccgtattggtgcgagtggacagttcttcaggcttgggtgactacctagaactgcatatacaccagggaaaaattggagttaagtttaatgttgggacagatgacatcgccattgaagaatccaatgcaatcattaatgatgggaaataccatgtagttcgtttcacgaggagtggtggcaatgccacgttgcaggtggacagctggccagtgatcgagcgctaccctgcagggcgtcagctcacaatcttcaatagccaagcaaccataataattggcgggaaagagcagggccagcccttccagggccagctctctgggctgtactacaatggcttgaaagttctgaatatggcagccgaaaacgatgccaacatcgccatagtgggaaatgtgagactggttggtgaagtgccttcctctatgacaactgagtcaacagccactgccatgcaatcagagatgtccacatcaattatggagactaccacgaccctggctactagcacagccagaagaggaaagcccccgacaaaagaacccattagccagaccacagatgacatccttgtggcctcagcagagtgtcccagcgatgatgaggacattgacccctgtgagccgagctcaggtgggttagccaacccaacccgagcaggcggcagagagccgtatccaggctcagcagaagtgatccgggagtccagcagcaccacgggtatggtcgttgggatagtagccgctgccgccctgtgcatccttatcctcctctatgccatgtacaagtacagaaaccgggatgaaggctcataccatgtggacgagagtcgaaactacatcagtaactcagcacagtccaatggggctgttgtaaaggagaaacaacccagcagtgcgaaaagctccaacaaaaataagaaaaacaaggataaagagtattatgtctga

SEQ ID NO: 19854 - DNA, 4647 bp, Homo sapiens
  source 1..4647: mol_type = unassigned DNA
atggggacggcgctgctccagcgcgggggctgttttcttctgtgcctctcgctgctgctcctgggctgctgggcggagctgggcagcgggctggagtttccgggcgccgagggccaatggacgcgcttccccaagtggaacgcctgctgcgagagcgagatgagcttccagctcaagactcgcagcgcccgcggcctcgtgctctacttcgacgacgagggcttctgcgacttcctggagctgattctgacgcgcggcggccgcctgcagctcagcttctccatcttctgcgctgagcctgcgacgctcctggccgacacgccggttaacgacggcgcctggcacagcgtgcgcatccgccgccagttccgcaacaccacgctcttcatcgaccaggtggaggccaagtgggtggaggtcaagtccaagcgcagggacatgacggtgttcagcggccttttcgtcggggggctgcccccggaactgcgcgccgcggcgctcaagctcaccctggcctcggtgagggagcgggagcccttcaaggggtggattcgtgacgtgagggtcaactcctcgcaggtcctgcccgtggacagcggcgaggtgaagctggacgatgagccgcccaacagcggcgggggaagcccgtgcgaggcgggcgaggagggcgagggcggggtgtgcctcaacggaggtgtgtgctccgtggtggacgaccaggccgtgtgcgactgctcgcgaaccggcttccgcggcaaggactgcagccaagaaataaaattcggtcttcagtgtgttttgccggtgctgttacatgacaatgaccaaggaaaatactgttgtataaatacagcaaagcctctaacagaaaagaaggacaatgactttgaaggtctggcgcacctgatgatgggcgaccaagcaaagtcaaaaagaaaagaagaatatattgccacgttcaaaggatctgaatacttctgctacgacttgtctcaaaaccccattcaaagcagcagtgatgaaataactctgtcatttaaaacccttcagaggaatggactgatgcttcacactgggaaatcggctgattatgtcaatcttgccctgaaaaatggagctgtctctctggtcattaatttgggatcaggggcctttgaagcactagtggagcctgtgaatggaaagtttaatgataatgcctggcatgatgtgaaagtcaccaggaatctgcgtcagcactcaggcattggacacgctatggtaaacaaactacattgttcggtgacaatatcagtggatgggattcttaccacaacgggctacacgcaagaagattataccatgctggggtctgatgactttttctatgttggaggcagtcccagcacagccgaccttccagggtcaccagtcagtaacaactttatgggctgtctcaaagaggttgtatataaaaataatgatgtgaggctggaattatctcgacttgccaagcaaggagatcctaagatgaagatccatggagtggtggcatttaaatgtgagaatgttgcaactttagacccaatcacctttgaaaccccagagtctttcatctctttgcctaaatggaatgcaaagaaaactggctccatatcatttgatttccgtacaacagagccaaatggcctcatcttatttagccatggcaagccaagacatcagaaagatgccaagcacccacagatgataaaggtggacttctttgctattgagatgctagatggccacctctacctcctcctggacatggggtcaggtactataaaaataaaagccctgttgaagaaagtgaatgatggagaatggtatcatgtggacttccagagagacggacggtcaggtaccatttctgtcaacacgttgcgtactccctacactgctcctggtgagagtgagattctggacctggatgatgagttgtacctgggggggctgccagaaaataaagctggccttgtcttccccaccgaggtgtggactgctctgctcaactatggctacgtgggctgcatcagggatttgttcatcgatggccaaagcaaagatatccggcaaatggctgaagttcaaagtactgctggagtgaagccttcctgctcaaaggaaacagcaaaaccgtgccttagcaacccttgcaaaaacaatggcatgtgcagggatgggtggaacagatatgtctgtgattgttccggaacaggctatcttggcaggtcctgtgagagagaggcaacggttttgagctatgatgggagcatgtttatgaaaattcagctccccgtagtcatgcatacggaggctgaggatgtttccttacggttccgatcccagcgtgcatatggcattctgatggcaaccacttctagagactctgctgacaccctccgcctggagctagacgcaggacgtgtgaaactgacggtcaatctagattgtatcaggattaactgtaattccagcaaaggtcccgagactctttttgctggctataacctcaatgataacgagtggcacacagtgcgtgtagttcggcgtggaaaaagtttaaagttaacagtggatgaccaacaggccatgacaggtcaaatggcaggtgatcatactaggctggagttccataacatagagactggcatcatcacagaacgacggtatctttcttctgtcccctccaacttcattggacacctgcagagcttgacatttaatggaatggcatacattgacctgtgtaaaaatggcgacatagattactgtgagcttaatgccagatttggcttcaggaacatcatagcagatcctgtcaccttcaagaccaaatcgagctatgttgccttagctaccttgcaagcctacacttctatgcatctttttttccagttcaagacaacatccctagatggattaattctatataacagtggggatggaaatgactttattgtggttgaattagttaaagggtacttacattacgtgtttgatttgggaaatggtgctaacctcatcaaaggaagctcaaataaacctctcaatgacaatcagtggcacaacgtgatgatatcaagggacaccagcaacctccacactgtaaagattgacacaaaaatcacaacgcaaatcaccgccggagccaggaacttagacctcaagagtgacttatatataggaggagtagctaaagaaacatacaaatccttaccaaaacttgtacatgccaaagaaggctttcaaggctgcctggcatcagttgatttaaatggacggcttccggacctcatctccgatgctcttttctgcaacggacagatcgagagaggatgtgaagggcccagcacaacctgccaagaggactcatgttccaatcaaggtgtgtgcttgcaacaatgggatggcttcagctgtgactgtagtatgacttccttcagtggaccactctgcaatgaccctgggacgacatatatctttagcaaaggtggtggacaaatcacgtataagtggcctcctaatgaccgacccagtacacgagcagacagactggccataggttttagcactgttcagaaagaagccgtattggtgcgagtggacagttcttcaggcttgggtgactacctagaactgcatatacaccagggaaaaattggagttaagtttaatgttgggacagatgacatcgccattgaagaatccaatgcaatcattaatgatgggaaataccatgtagttcgtttcacgaggagtggtggcaatgccacgttgcaggtggacagctggccagtgatcgagcgctaccctgcaggaaacaatgataacgagcgcctggcgattgctagacagcgaattccatatcgacttggtcgagtagttgatgaatggctactcgacaaagggcgtcagctcacaatcttcaatagccaagcaaccataataattggcgggaaagagcagggccagcccttccagggccagctctctgggctgtactacaatggcttgaaagttctgaatatggcagccgaaaacgatgccaacatcgccatagtgggaaatgtgagactggttggtgaagtgccttcctctatgacaactgagtcaacagccactgccatgcaatcagagatgtccacatcaattatggagactaccacgaccctggctactagcacagccagaagaggaaagcccccgacaaaagaacccattagccagaccacagatgacatccttgtggcctcagcagagtgtcccagcgatgatgaggacattgacccctgtgagccgagctcaggtgggttagccaacccaacccgagcaggcggcagagagccgtatccaggctcagcagaagtgatccgggagtccagcagcaccacgggtatggtcgttgggatagtagccgctgccgccctgtgcatccttatcctcctctatgccatgtacaagtacagaaaccgggatgaaggctcataccatgtggacgagagtcgaaactacatcagtaactcagcacagtccaatggggctgttgtaaaggagaaacaacccagcagtgcgaaaagctccaacaaaaataagaaaaacaaggataaagagtattatgtctga

SEQ ID NO: 19855 - DNA, 4627 bp, Homo sapiens
  source 1..4627: mol_type = unassigned DNA
gccctggaaatctgggagcagccacccgctccgcgcttgctgttcccggggctgcctttccggacaagcccctctccagctgcattctacaggtcaccggcatccttgcgaggcggacacgctgggacgacatatatctttagcaaaggtggtggacaaatcacgtataagtggcctcctaatgaccgacccagtacacgagcagacagactggccataggttttagcactgttcagaaagaagccgtattggtgcgagtggacagttcttcaggcttgggtgactacctagaactgcatatacaccagggaaaaattggagttaagtttaatgttgggacagatgacatcgccattgaagaatccaatgcaatcattaatgatgggaaataccatgtagttcgtttcacgaggagtggtggcaatgccacgttgcaggtggacagctggccagtgatcgagcgctaccctgcagggcgtcagctcacaatcttcaatagccaagcaaccataataattggcgggaaagagcagggccagcccttccagggccagctctctgggctgtactacaatggcttgaaagttctgaatatggcagccgaaaacgatgccaacatcgccatagtgggaaatgtgagactggttggtgaagtgccttcctctatgacaactgagtcaacagccactgccatgcaatcagagatgtccacatcaattatggagactaccacgaccctggctactagcacagccagaagaggaaagcccccgacaaaagaacccattagccagaccacagatgacatccttgtggcctcagcagagtgtcccagcgatgatgaggacattgacccctgtgagccgagctcaggtgggttagccaacccaacccgagcaggcggcagagagccgtatccaggctcagcagaagtgatccgggagtccagcagcaccacgggtatggtcgttgggatagtagccgctgccgccctgtgcatccttatcctcctctatgccatgtacaagtacagaaaccgggatgaaggctcataccatgtggacgagagtcgaaactacatcagtaactcagcacagtccaatggggctgttgtaaaggagaaacaacccagcagtgcgaaaagctccaacaaaaataagaaaaacaaggataaagagtattatgtctgatcccaagatcttaaatggacacttgtatagaaatagtcttcattttatctgagacataatataaacttatttactttcctttttatgaagcacatacaaaagaagacagggaatgcaatcaggaaggaaagactttttaaaaaataaaaacaagtatctcatgctcttgtttctcaaaaaagaaaaacaaaaaacaaaaaacaggggccaataaattccctaacatccacagtgttttcatttactctgcttgtctttatgttgctggaacatttctaaaagacagtgatgaccgcacgcattcataaagcaaaggagtactacagcatcaaggcacaacacaaaaaccaacacaaaacataacacaaaaaagaagctacctatgatcctggatttagccaaagtgctagcgctttcctgagaagtcagtccaattgccagagaagactgtccttttgagtgactcaacctgcaaacctttaagagtttgccgcctggtgcaactggagcagtggttggaacttgcatttgaaacaaagtgctggcttttttgaagacttgtgtaggaacacattcaaaaagcccctttctggttgtgagagaggaaaaaaaagtatggaggccttattttcaaaaatgtgaaatataaggcacgttttcacacaaaatttcaaaacaaaaacaagagggcatagatgcaatcattgggaaattttcatgcacgcttattatgttattacatatgtttatataaaatccatctctgtgtgctttctggactgtgataagtgacgttttatagcctgttgtatagaaaatgcaaaatatatctctgctcttcagccatttttggtaaattcaatgttataagtgttgctaagtatagggagttttatgacatcagagcaacaattatttcagttgggtttttctttttttttgccaccattataaattgccacaattacttttattttttaaagaaattacagtgtagtgtttattctaaggaagatatgtatgaatgtatatacaaagactcagctacttcttttcttatatgtacagccttcattctgttgcaattaagttttagtacttgtatgaaaggtgtgaattagaaagtcacatatatacatatgtatcttataatcttttctccctgaaatactcacattcccacatacattcactattttcacacacacacacacacacacacacacacacacacacacacacacacgaatccacagcaatccatcagatatgctggaagatccaaacgtgcatacagtagcaaatatttattgacaaattgaaaagcaggaaggaagagggttgtgccaaggtattgatgacaaatggggtgatttgcttcattgagatcttgctcccaggtaaccttaagaagattttagtccctaaagaaatgaacctttccttatcaaatagaatatcactgatatactgctgcatgaataagaaccattatgtgggcaggttatggaagcaaaattggttaatctacaccttaactctggctgctgcaattgaaaactttctttctaataaaataatatatatatctctgaatctgatgtgcatgatgaacatttctggaaagtaaacactttctctcgactaagaaagtatttttcagtaatttttgattctgtattactacccacttaaaaaatcattctctgttaattattgactatgttttaacttttctggttttacatatatatcattaaatatagttttagtttaacacattaagtagtggaaaagtatagattatacacttgttttgcatattattcaatgatgttcacagcaataaattactaatatgagaaggtagtgcaaaaaatgcattattacattgcaagttgatgtttcaggaaaaattggttgcattacttgaataccttctaaaagaacgataaaaaattttgtagaagagaagaatatctttccaattagctttaatcagcaaaggcaaaaaatgcaaaacatcttttgtgatactttagttgatgaaaaaaaagccaagaagtggcctggatttcagacatacagcaccttagaaatatgtataattcatagcaaatcaccactatctatggttgccaagtaattgttgtgtacaaagaaatttagtggctttttatgacccagaaagtagaaggtataaaatgaaaatttaatatccattgcttcttttctagattttcattttttttaatttgccacattaaataattcacgagtcttttcttttcccccgtctcattcagtcttactcagggaaagccagttaaataagaagggaagtgtaaaactactaatttacagcttgaagggtttttttttttaagattgcttttctattttatctattaagcttgaaccagtttccatctggaaagattctaaaatataatagaaaataaattgaataatggtaattttaagcagtatatctatgaaatgtgttgtttgggattgatttcaatgtttctccccagcgtaaattttaaagttacatgcaatgattgatatagtttattatcagcaaaattatttctaatattattggcttacacaaactctagcaaaaattattttttcctcaatggaaaaagaaaagagaggaacagagttagaaagagaaaatgacttgaatcccaagtatcttcataccaaacatatcagggttccctgcatagtttgcagttgattgaggatttcacacgacttggcataaatttgattacatctctagactgtaacttttctgattgattatgcttcttttttatccatgtaatgtgttgccttttttaaaagaacaaatactacaataacgtgtgaagtggtcaatccctaagacatcaaagaaaggccacataaccctacccttctagtgctttgtgtgattgggtatcaaaggggttttcttcttctttttttgtttgtttgtttttctgttgcaaggccaatttatccattattggaaatgctaagcaagtggaatttactgttttgttaataaaatatttcttaatacaactgtgatttattgattttaaaaattatatgcggcaccatttcgtgcttaagtgggaaagtaaagaaggctgcatttgaagggaagacccatccttatattatagaggaagaatgttgactctcttttttctggatttaactagtcattaaagacctctatattcatacacttaaagatgtagccattaaatgtacttttgttatatttgttcatcttgatatgccagaaaccataaactcatacagtattagttgcaaacaatattaaaatactaatttcataaatatgctttttctctataaaagacaatggaatccaagttaagtaaacctgtgattaaattccaacactatc

SEQ ID NO: 19856 - DNA, 6621 bp, Homo sapiens
  source 1..6621: mol_type = unassigned DNA
tgcagggatgcggcggcgggagcagccgccctgactcgcggagcatcctcctcggagaggcaccgcggcggggcgggcgggcgggcggggacgcggcggggagggagagaggcgcgaggcggcagacaccgctagccctggctctgccacccgtcggagacggggcggccctgtagctctgctacccaccctccagcttctggcgccccgagaaccaggcatccctccctgctcttctgtcggagcccgcggcgggggaggggcgccgccgccgccgcctgagggaagccggcatctgggcctctgcgcgcctcgccccgcggccgggcccatggcactgtgagcctgcaagggagccccgctcagcgcggggagcgcccggccccctcccgccccatgcgcccgcggctctgaagcctgagcgggggccgggggccgggcggggccggggccgccgtaggcatggcgtccgggagccggtggcggccgacaccgccgccgctgctgttgctgctgctgctggcgctggcggcgcgcgcggacggcctggagttcggcggcggccccgggcagtgggctcgctacgcgcgctgggcgggcgcggcgagcagcggcgagctcagcttcagcctgcgcaccaacgccacgcgcgcgctgctgctctacctggacgacggcggcgactgcgacttcctggagctgctgctggtggacggccgcctgcggctgcgcttcacgctttcgtgcgccgagccggccacgctgcagctggacacgccggtggccgacgaccgctggcacatggtgctgctgacccgcgacgcgcgccgcacggcgctggcggtggacggcgaggcccgcgccgccgaggtgcgctccaagcggcgcgagatgcaggtggccagcgacctgttcgtgggcggcatcccgcccgacgtgcgcctctcggcgcttacgctgagcaccgtcaagtacgagccgcccttccgcggcctcttggccaacctgaagctgggcgagcggccccccgcgctgctgggcagccagggcctgcgcggcgccaccgccgacccgctgtgcgcgcccgcgcgcaacccctgcgccaacggcggcctctgcaccgtgctggcccccggcgaggtgggctgcgactgcagccacacgggcttcggcggcaagttctgcagcgaagaggagcaccccatggaaggtccggctcacctgacgttaaacagcgaagtagggtccttactgttctccgaggggggggccgggagaggaggagccggcgatgtgcaccagccaacaaaaggcaaggaggagtttgtggcgaccttcaaaggcaatgagttcttctgctacgacctgtcacacaaccccatccagagcagcactgatgagatcacactggccttccgcaccctgcaacgcaacggcctgatgctgcatacaggcaagtcggccgactacgtcaacctgtccctcaagtctggggctgtctggctggtcatcaacctaggctcaggtgccttcgaggcccttgtggaacccgtcaatggcaagttcaacgacaacgcctggcacgacgtccgggtcacccgaaacctgcgccagcacgcagggattggacacgctatggtaaacaaactgcattatctggtgaccatctcggtggacgggatcctgaccaccacaggctacacgcaggaggattacaccatgctgggctctgatgacttcttctacattgggggcagccccaacacagctgacctgccgggctcgcccgtcagcaacaacttcatgggctgcctcaaggacgtggtctataagaacaatgacttcaaattggaactatcccgcctggcaaaggaaggggaccccaagatgaagctgcagggggacttgtcattccgctgtgaggatgtggctgccctggaccctgtgacctttgagagtcccgaggcctttgtggcgctgccccgctggagcgctaagcgcactggctccatctccctagacttccgcaccaccgagcccaatgggctgctgctcttcagccagggccggcgggctgggggtggagctggcagccacagctctgctcagcgggccgactactttgccatggagctattggacggccacctctatcttctgctggacatgggatctgggggcatcaagctgcgggcatccagccgcaaggtcaatgatggcgagtggtgtcacgtggacttccagagggatgggcgaaaaggctccatctcagtgaatagtcgcagcacgccgttcttggccactggagacagcgagattctggacctggagagtgagctgtacctgggcggtctccctgaggggggccgggtggacctgcccctgcccccagaggtgtggacagcagcactccgggcaggctacgtgggctgtgtgcgggacctcttcatagatgggcgtagccgagacctccggggcctggctgaggctcagggggctgtgggcgttgcccccttttgctcccgggagacgctgaagcagtgtgcatctgccccctgtcgcaatgggggcgtctgtcgagaaggctggaaccgcttcatctgtgactgcatcgggaccggctttcttgggcgggtctgtgagagagaggccacggtcctgagctacgatggctccatgtacatgaagatcatgctgcctaacgccatgcacacggaggcagaggatgtgtccctgcgtttcatgtcccagcgggcctacggactcatgatggccaccacttccagggagtctgccgacaccctacgcctggagctggatggggggcagatgaagctcactgtcaacctcgactgcctgcgcgtcggctgcgcacccagtaaaggccccgaaacgctgtttgcggggcacaagctcaatgacaatgagtggcacacggtgagggtggtccggcgtggcaagagcctgcagctgtctgtggacaacgtgactgtggagggacagatggcaggagcccatatgcggctggagttccacaacattgagacgggcatcatgacggagcggcggtttatctccgtggtgccctccaacttcatcgggcatctgagtgggctcgtgttcaatggccagccctacatggaccagtgcaaggatggtgacatcacctactgtgagctcaatgctcgctttggcctgcgtgccatcgtggccgatcccgtcaccttcaagagtcgcagcagctacctggcactcgccacgctccaagcctatgcttccatgcacctcttcttccagttcaagaccacggcccctgatgggcttcttctgttcaactcgggcaacggcaatgacttcattgtcatcgagctggtcaaggggtacatccactacgtgtttgacctggggaatggcccgtccttgatgaaggggaactcagacaaaccagtcaatgacaaccagtggcacaacgtggtggtgtccagggacccaggcaacgtgcacacgctcaagattgactcccgcactgtcacgcagcactccaatggcgcccgaaacctcgatctcaaaggggagttgtacattggcggtctgagcaagaatatgttcagcaacctgcccaagctggtggcctcccgggatggctttcagggctgcctggcctcagtggacctcaacggacgtctcccagacctcatcgccgacgccctgcaccgcattgggcaggtggagaggggctgtgatggccccagcaccacctgcactgaagagtcctgtgccaaccagggcgtctgcttgcagcagtgggatggcttcacctgcgactgcaccatgacttcctatggaggccctgtctgcaatgatcccgggaccacatacatctttgggaaggggggagcgctcatcacctacacgtggccccccaatgacaggcccagcacgaggatggatcgcctggccgtgggcttcagcacccaccagcggagcgctgtgctggtgcgggtggacagcgcctccggccttggagactacctgcagctgcacatcgaccagggcaccgtgggggtgatctttaacgtgggcacggacgacattaccatcgacgagcccaacgccatagtaagcgacggcaaataccacgtggtgcgcttcactcgaagcggcggcaacgccaccctgcaggtggacagctggccggtcaacgagcggtacccggcaggaaactttgataacgagcgcctggcgattgctagacagagaatcccctaccggcttggtcgagtagtagatgagtggctgctcgacaaaggccgccagctgaccatcttcaacagccaggctgccatcaagatcgggggccgggatcagggccgccccttccagggccaggtgtccggcctctactacaatgggctcaaggtgctggcgctggccgccgagagcgaccccaatgtgcggactgagggtcacctgcgcctggtgggggaggggccgtccgtgctgctcagtgcggagaccacggccaccaccctgctggctgacatggccaccaccatcatggagactaccaccaccatggccactaccaccacgcgccggggccgctcccccacactgagggacagcaccacccagaacacagatgacctgctggtggcctctgctgagtgtccaagcgatgatgaggacctggaggagtgtgagcccagtactggaggagagttaatattgcccattatcacggaggactccttagacccccctcccgtggccacccgatcccccttcgtgcccccgccccctaccttctaccccttcctcacgggagtgggcgccacccaagacacgctgcccccgcccgccgcgcgccgcccgccctctgggggcccgtgccaggccgagcgggacgacagcgactgcgaggagcccatcgaggcctcgggcttcgcctccggggaggtctttgactccagcctcccccccacggacgacgaggacttttacaccacctttcccctggtcacggaccgcaccaccctcctgtcaccccgcaaacccgctccccggcccaacctcaggacagatggggccacgggcgcccctggggtgctgtttgccccctccgccccggcccccaacctgccggcgggcaaaatgaaccaccgagacccgcttcagcccttgctggagaacccgcccttggggcccggggcccccacgtcctttgagccgcggaggccccctcccctgcgccccggcgtgacctcagcccccggcttcccccatctgcccacagccaaccccacagggcctggggagcggggcccgccgggcgcagtggaggtgatccgggagtccagcagcaccacgggcatggtggtgggcattgtggcggcggcggcgctctgcatcctcatcctcctctacgccatgtataagtaccgcaatcgtgatgagggctcctaccaggtggaccagagccgaaactacatcagtaactcggcccagagcaatggggcggtggtgaaagagaaggccccggctgcccccaagacgcccagcaaggccaagaagaacaaagacaaggagtattatgtctgagcccccggcactgcgccccactgccagctgcccctcctgggagggcccgggaggagggtgccaccctctccctgccaggggcctggggaccctctccctggctgcctcaggcttctcttacgaagaggaaacgcaaaaaaagaaaaggaaaaaccccgtgctcgcccccttcctcctgccgtccactgcgcggcctcgtcagtcccggggctgactgtccctctcagctctgcgcctgccaggcagggcacgtgctcacagccctgggttgatttatttttttaagggggtagttttattttggtggggttgggtgggaaggaaggctgggggttttgtaaagtgtccactgctcgtcctgttaattttcctcaatttttcttcttcttccttctgtccctcctgccttccttctcttcccaagccctccaatccccatcccaggcttgctgtgtctcactgtccccaccctccttccctacttctttttttgtgtgtctggtttctcccttcctttcctccctttgggtttccagagtcggtgggagaagggcgggagggtgggcccgagtggcccagtgggtgggtggggtggggtggggcaagtgccccaactcccctcaccaggagaggcacctgcttggtgccgcccagggaaggggctcaggcctgacggaaggcctgttctgtgtgtgccgccgggcgacgtgcattgatggggaagctgctggaggagcaggggtggggggtgggagggaggggaaaggcaaatgcagatatatattacagacaaatactctagattccacgagcagcagcctgtggcacccgctgggcgcgggcagcagggaagagggagcaaggcattgtccacagactgctggggtcacttctttgcccacgggctccctgctcccccagttttttttctctctttgttaacaaatgtgtctgagtcttggaaaacaccccaaccccggaaatgtgtgggaaaaagaaaacaaaaactttccaaattcc

SEQ ID NO: 19857 - DNA, 6411 bp, Homo sapiens
  source 1..6411: mol_type = unassigned DNA
tgcagggatgcggcggcgggagcagccgccctgactcgcggagcatcctcctcggagaggcaccgcggcggggcgggcgggcgggcggggacgcggcggggagggagagaggcgcgaggcggcagacaccgctagccctggctctgccacccgtcggagacggggcggccctgtagctctgctacccaccctccagcttctggcgccccgagaaccaggcatccctccctgctcttctgtcggagcccgcggcgggggaggggcgccgccgccgccgcctgagggaagccggcatctgggcctctgcgcgcctcgccccgcggccgggcccatggcactgtgagcctgcaagggagccccgctcagcgcggggagcgcccggccccctcccgccccatgcgcccgcggctctgaagcctgagcgggggccgggggccgggcggggccggggccgccgtaggcatggcgtccgggagccggtggcggccgacaccgccgccgctgctgttgctgctgctgctggcgctggcggcgcgcgcggacggcctggagttcggcggcggccccgggcagtgggctcgctacgcgcgctgggcgggcgcggcgagcagcggcgagctcagcttcagcctgcgcaccaacgccacgcgcgcgctgctgctctacctggacgacggcggcgactgcgacttcctggagctgctgctggtggacggccgcctgcggctgcgcttcacgctttcgtgcgccgagccggccacgctgcagctggacacgccggtggccgacgaccgctggcacatggtgctgctgacccgcgacgcgcgccgcacggcgctggcggtggacggcgaggcccgcgccgccgaggtgcgctccaagcggcgcgagatgcaggtggccagcgacctgttcgtgggcggcatcccgcccgacgtgcgcctctcggcgcttacgctgagcaccgtcaagtacgagccgcccttccgcggcctcttggccaacctgaagctgggcgagcggccccccgcgctgctgggcagccagggcctgcgcggcgccaccgccgacccgctgtgcgcgcccgcgcgcaacccctgcgccaacggcggcctctgcaccgtgctggcccccggcgaggtgggctgcgactgcagccacacgggcttcggcggcaagttctgcagcgaagctccttcccctttccaaggtccggctcacctgacgttaaacagcgaaggcaaggaggagtttgtggcgaccttcaaaggcaatgagttcttctgctacgacctgtcacacaaccccatccagagcagcactgatgagatcacactggccttccgcaccctgcaacgcaacggcctgatgctgcatacaggcaagtcggccgactacgtcaacctgtccctcaagtctggggctgtctggctggtcatcaacctaggctcaggtgccttcgaggcccttgtggaacccgtcaatggcaagttcaacgacaacgcctggcacgacgtccgggtcacccgaaacctgcgccagcacgcagggattggacacgctatggtgaccatctcggtggacgggatcctgaccaccacaggctacacgcaggaggattacaccatgctgggctctgatgacttcttctacattgggggcagccccaacacagctgacctgccgggctcgcccgtcagcaacaacttcatgggctgcctcaaggacgtggtctataagaacaatgacttcaaattggaactatcccgcctggcaaaggaaggggaccccaagatgaagctgcagggggacttgtcattccgctgtgaggatgtggctgccctggaccctgtgacctttgagagtcccgaggcctttgtggcgctgccccgctggagcgctaagcgcactggctccatctccctagacttccgcaccaccgagcccaatgggctgctgctcttcagccagggccggcgggctgggggtggagctggcagccacagctctgctcagcgggccgactactttgccatggagctattggacggccacctctatcttctgctggacatgggatctgggggcatcaagctgcgggcatccagccgcaaggtcaatgatggcgagtggtgtcacgtggacttccagagggatgggcgaaaaggctccatctcagtgaatagtcgcagcacgccgttcttggccactggagacagcgagattctggacctggagagtgagctgtacctgggcggtctccctgaggggggccgggtggacctgcccctgcccccagaggtgtggacagcagcactccgggcaggctacgtgggctgtgtgcgggacctcttcatagatgggcgtagccgagacctccggggcctggctgaggctcagggggctgtgggcgttgcccccttttgctcccgggagacgctgaagcagtgtgcatctgccccctgtcgcaatgggggcgtctgtcgagaaggctggaaccgcttcatctgtgactgcatcgggaccggctttcttgggcgggtctgtgagagagaggccacggtcctgagctacgatggctccatgtacatgaagatcatgctgcctaacgccatgcacacggaggcagaggatgtgtccctgcgtttcatgtcccagcgggcctacggactcatgatggccaccacttccagggagtctgccgacaccctacgcctggagctggatggggggcagatgaagctcactgtcaacctcggtaaaggccccgaaacgctgtttgcggggcacaagctcaatgacaatgagtggcacacggtgagggtggtccggcgtggcaagagcctgcagctgtctgtggacaacgtgactgtggagggacagatggcaggagcccatatgcggctggagttccacaacattgagacgggcatcatgacggagcggcggtttatctccgtggtgccctccaacttcatcgggcatctgagtgggctcgtgttcaatggccagccctacatggaccagtgcaaggatggtgacatcacctactgtgagctcaatgctcgctttggcctgcgtgccatcgtggccgatcccgtcaccttcaagagtcgcagcagctacctggcactcgccacgctccaagcctatgcttccatgcacctcttcttccagttcaagaccacggcccctgatgggcttcttctgttcaactcgggcaacggcaatgacttcattgtcatcgagctggtcaaggggtacatccactacgtgtttgacctggggaatggcccgtccttgatgaaggggaactcagacaaaccagtcaatgacaaccagtggcacaacgtggtggtgtccagggacccaggcaacgtgcacacgctcaagattgactcccgcactgtcacgcagcactccaatggcgcccgaaacctcgatctcaaaggggagttgtacattggcggtctgagcaagaatatgttcagcaacctgcccaagctggtggcctcccgggatggctttcagggctgcctggcctcagtggacctcaacggacgtctcccagacctcatcgccgacgccctgcaccgcattgggcaggtggagaggggctgtgatggccccagcaccacctgcactgaagagtcctgtgccaaccagggcgtctgcttgcagcagtgggatggcttcacctgcgactgcaccatgacttcctatggaggccctgtctgcaatgatcccgggaccacatacatctttgggaaggggggagcgctcatcacctacacgtggccccccaatgacaggcccagcacgaggatggatcgcctggccgtgggcttcagcacccaccagcggagcgctgtgctggtgcgggtggacagcgcctccggccttggagactacctgcagctgcacatcgaccagggcaccgtgggggtgatctttaacgtgggcacggacgacattaccatcgacgagcccaacgccatagtaagcgacggcaaataccacgtggtgcgcttcactcgaagcggcggcaacgccaccctgcaggtggacagctggccggtcaacgagcggtacccggcaggccgccagctgaccatcttcaacagccaggctgccatcaagatcgggggccgggatcagggccgccccttccagggccaggtgtccggcctctactacaatgggctcaaggtgctggcgctggccgccgagagcgaccccaatgtgcggactgagggtcacctgcgcctggtgggggaggggccgtccgtgctgctcagtgcggagaccacggccaccaccctgctggctgacatggccaccaccatcatggagactaccaccaccatggccactaccaccacgcgccggggccgctcccccacactgagggacagcaccacccagaacacagatgacctgctggtggcctctgctgagtgtccaagcgatgatgaggacctggaggagtgtgagcccagtactggaggagagttaatattgcccattatcacggaggactccttagacccccctcccgtggccacccgatcccccttcgtgcccccgccccctaccttctaccccttcctcacgggagtgggcgccacccaagacacgctgcccccgcccgccgcgcgccgcccgccctctgggggcccgtgccaggccgagcgggacgacagcgactgcgaggagcccatcgaggcctcgggcttcgcctccggggaggtctttgactccagcctcccccccacggacgacgaggacttttacaccacctttcccctggtcacggaccgcaccaccctcctgtcaccccgcaaacccgctccccggcccaacctcaggacagatggggccacgggcgcccctggggtgctgtttgccccctccgccccggcccccaacctgccggcgggcaaaatgaaccaccgagacccgcttcagcccttgctggagaacccgcccttggggcccggggcccccacgtcctttgagccgcggaggccccctcccctgcgccccggcgtgacctcagcccccggcttcccccatctgcccacagccaaccccacagggcctggggagcggggcccgccgggcgcagtggaggtgatccgggagtccagcagcaccacgggcatggtggtgggcattgtggcggcggcggcgctctgcatcctcatcctcctctacgccatgtataagtaccgcaatcgtgatgagggctcctaccaggtggaccagagccgaaactacatcagtaactcggcccagagcaatggggcggtggtgaaagagaaggccccggctgcccccaagacgcccagcaaggccaagaagaacaaagacaaggagtattatgtctgagcccccggcactgcgccccactgccagctgcccctcctgggagggcccgggaggagggtgccaccctctccctgccaggggcctggggaccctctccctggctgcctcaggcttctcttacgaagaggaaacgcaaaaaaagaaaaggaaaaaccccgtgctcgcccccttcctcctgccgtccactgcgcggcctcgtcagtcccggggctgactgtccctctcagctctgcgcctgccaggcagggcacgtgctcacagccctgggttgatttatttttttaagggggtagttttattttggtggggttgggtgggaaggaaggctgggggttttgtaaagtgtccactgctcgtcctgttaattttcctcaatttttcttcttcttccttctgtccctcctgccttccttctcttcccaagccctccaatccccatcccaggcttgctgtgtctcactgtccccaccctccttccctacttctttttttgtgtgtctggtttctcccttcctttcctccctttgggtttccagagtcggtgggagaagggcgggagggtgggcccgagtggcccagtgggtgggtggggtggggtggggcaagtgccccaactcccctcaccaggagaggcacctgcttggtgccgcccagggaaggggctcaggcctgacggaaggcctgttctgtgtgtgccgccgggcgacgtgcattgatggggaagctgctggaggagcaggggtggggggtgggagggaggggaaaggcaaatgcagatatatattacagacaaatactctagattccacgagcagcagcctgtggcacccgctgggcgcgggcagcagggaagagggagcaaggcattgtccacagactgctggggtcacttctttgcccacgggctccctgctcccccagttttttttctctctttgttaacaaatgtgtctgagtcttggaaaacaccccaaccccggaaatgtgtgggaaaaagaaaacaaaaactttccaaattcc

SEQ ID NO: 19858 - DNA, 6373 bp, Homo sapiens
  source 1..6373: mol_type = unassigned DNA
ggcgggggaggggcgccgccgccgccgcctgagggaagccggcatctgggcctctgcgcgcctcgccccgcggccgggcccatggcactgtgagcctgcaagggagccccgctcagcgcggggagcgcccggccccctcccgccccatgcgcccgcggctctgaagcctgagcgggggccgggggccgggcggggccggggccgccgtaggcatggcgtccgggagccggtggcggccgacaccgccgccgctgctgttgctgctgctgctggcgctggcggcgcgcgcggacggcctggagttcggcggcggccccgggcagtgggctcgctacgcgcgctgggcgggcgcggcgagcagcggcgagctcagcttcagcctgcgcaccaacgccacgcgcgcgctgctgctctacctggacgacggcggcgactgcgacttcctggagctgctgctggtggacggccgcctgcggctgcgcttcacgctttcgtgcgccgagccggccacgctgcagctggacacgccggtggccgacgaccgctggcacatggtgctgctgacccgcgacgcgcgccgcacggcgctggcggtggacggcgaggcccgcgccgccgaggtgcgctccaagcggcgcgagatgcaggtggccagcgacctgttcgtgggcggcatcccgcccgacgtgcgcctctcggcgcttacgctgagcaccgtcaagtacgagccgcccttccgcggcctcttggccaacctgaagctgggcgagcggccccccgcgctgctgggcagccagggcctgcgcggcgccaccgccgacccgctgtgcgcgcccgcgcgcaacccctgcgccaacggcggcctctgcaccgtgctggcccccggcgaggtgggctgcgactgcagccacacgggcttcggcggcaagttctgcagcgaagaggagcaccccatggaaggtccggctcacctgacgttaaacagcgaagtagggtccttactgttctccgaggggggggccgggagaggaggagccggcgatgtgcaccagccaacaaaaggcaaggaggagtttgtggcgaccttcaaaggcaatgagttcttctgctacgacctgtcacacaaccccatccagagcagcactgatgagatcacactggccttccgcaccctgcaacgcaacggcctgatgctgcatacaggcaagtcggccgactacgtcaacctgtccctcaagtctggggctgtctggctggtcatcaacctaggctcaggtgccttcgaggcccttgtggaacccgtcaatggcaagttcaacgacaacgcctggcacgacgtccgggtcacccgaaacctgcgccagcacgcagggattggacacgctatggtaaacaaactgcattatctggtgaccatctcggtggacgggatcctgaccaccacaggctacacgcaggaggattacaccatgctgggctctgatgacttcttctacattgggggcagccccaacacagctgacctgccgggctcgcccgtcagcaacaacttcatgggctgcctcaaggacgtggtctataagaacaatgacttcaaattggaactatcccgcctggcaaaggaaggggaccccaagatgaagctgcagggggacttgtcattccgctgtgaggatgtggctgccctggaccctgtgacctttgagagtcccgaggcctttgtggcgctgccccgctggagcgctaagcgcactggctccatctccctagacttccgcaccaccgagcccaatgggctgctgctcttcagccagggccggcgggctgggggtggagctggcagccacagctctgctcagcgggccgactactttgccatggagctattggacggccacctctatcttctgctggacatgggatctgggggcatcaagctgcgggcatccagccgcaaggtcaatgatggcgagtggtgtcacgtggacttccagagggatgggcgaaaaggctccatctcagtgaatagtcgcagcacgccgttcttggccactggagacagcgagattctggacctggagagtgagctgtacctgggcggtctccctgaggggggccgggtggacctgcccctgcccccagaggtgtggacagcagcactccgggcaggctacgtgggctgtgtgcgggacctcttcatagatgggcgtagccgagacctccggggcctggctgaggctcagggggctgtgggcgttgcccccttttgctcccgggagacgctgaagcagtgtgcatctgccccctgtcgcaatgggggcgtctgtcgagaaggctggaaccgcttcatctgtgactgcatcgggaccggctttcttgggcgggtctgtgagagagaggccacggtcctgagctacgatggctccatgtacatgaagatcatgctgcctaacgccatgcacacggaggcagaggatgtgtccctgcgtttcatgtcccagcgggcctacggactcatgatggccaccacttccagggagtctgccgacaccctacgcctggagctggatggggggcagatgaagctcactgtcaacctcgactgcctgcgcgtcggctgcgcacccagtaaaggccccgaaacgctgtttgcggggcacaagctcaatgacaatgagtggcacacggtgagggtggtccggcgtggcaagagcctgcagctgtctgtggacaacgtgactgtggagggacagatggcaggagcccatatgcggctggagttccacaacattgagacgggcatcatgacggagcggcggtttatctccgtggtgccctccaacttcatcgggcatctgagtgggctcgtgttcaatggccagccctacatggaccagtgcaaggatggtgacatcacctactgtgagctcaatgctcgctttggcctgcgtgccatcgtggccgatcccgtcaccttcaagagtcgcagcagctacctggcactcgccacgctccaagcctatgcttccatgcacctcttcttccagttcaagaccacggcccctgatgggcttcttctgttcaactcgggcaacggcaatgacttcattgtcatcgagctggtcaaggggtacatccactacgtgtttgacctggggaatggcccgtccttgatgaaggggaactcagacaaaccagtcaatgacaaccagtggcacaacgtggtggtgtccagggacccaggcaacgtgcacacgctcaagattgactcccgcactgtcacgcagcactccaatggcgcccgaaacctcgatctcaaaggggagttgtacattggcggtctgagcaagaatatgttcagcaacctgcccaagctggtggcctcccgggatggctttcagggctgcctggcctcagtggacctcaacggacgtctcccagacctcatcgccgacgccctgcaccgcattgggcaggtggagaggggctgtgatggccccagcaccacctgcactgaagagtcctgtgccaaccagggcgtctgcttgcagcagtgggatggcttcacctgcgactgcaccatgacttcctatggaggccctgtctgcaatgatcccgggaccacatacatctttgggaaggggggagcgctcatcacctacacgtggccccccaatgacaggcccagcacgaggatggatcgcctggccgtgggcttcagcacccaccagcggagcgctgtgctggtgcgggtggacagcgcctccggccttggagactacctgcagctgcacatcgaccagggcaccgtgggggtgatctttaacgtgggcacggacgacattaccatcgacgagcccaacgccatagtaagcgacggcaaataccacgtggtgcgcttcactcgaagcggcggcaacgccaccctgcaggtggacagctggccggtcaacgagcggtacccggcaggaaactttgataacgagcgcctggcgattgctagacagagaatcccctaccggcttggtcgagtagtagatgagtggctgctcgacaaaggccgccagctgaccatcttcaacagccaggctgccatcaagatcgggggccgggatcagggccgccccttccagggccaggtgtccggcctctactacaatgggctcaaggtgctggcgctggccgccgagagcgaccccaatgtgcggactgagggtcacctgcgcctggtgggggaggggccgtccgtgctgctcagtgcggagaccacggccaccaccctgctggctgacatggccaccaccatcatggagactaccaccaccatggccactaccaccacgcgccggggccgctcccccacactgagggacagcaccacccagaacacagatgacctgctggtggcctctgctgagtgtccaagcgatgatgaggacctggaggagtgtgagcccagtactggaggagagttaatattgcccattatcacggaggactccttagacccccctcccgtggccacccgatcccccttcgtgcccccgccccctaccttctaccccttcctcacgggagtgggcgccacccaagacacgctgcccccgcccgccgcgcgccgcccgccctctgggggcccgtgccaggccgagcgggacgacagcgactgcgaggagcccatcgaggcctcgggcttcgcctccggggaggtctttgactccagcctcccccccacggacgacgaggacttttacaccacctttcccctggtcacggaccgcaccaccctcctgtcaccccgcaaacccgctccccggcccaacctcaggacagatggggccacgggcgcccctggggtgctgtttgccccctccgccccggcccccaacctgccggcgggcaaaatgaaccaccgagacccgcttcagcccttgctggagaacccgcccttggggcccggggcccccacgtcctttgagccgcggaggccccctcccctgcgccccggcgtgacctcagcccccggcttcccccatctgcccacagccaaccccacagggcctggggagcggggcccgccgggcgcagtggaggtgatccgggagtccagcagcaccacgggcatggtggtgggcattgtggcggcggcggcgctctgcatcctcatcctcctctacgccatgtataagtaccgcaatcgtgatgagggctcctaccaggtggaccagagccgaaactacatcagtaactcggcccagagcaatggggcggtggtgaaagagaaggccccggctgcccccaagacgcccagcaaggccaagaagaacaaagacaaggagtattatgtctgagcccccggcactgcgccccactgccagctgcccctcctgggagggcccgggaggagggtgccaccctctccctgccaggggcctggggaccctctccctggctgcctcaggcttctcttacgaagaggaaacgcaaaaaaagaaaaggaaaaaccccgtgctcgcccccttcctcctgccgtccactgcgcggcctcgtcagtcccggggctgactgtccctctcagctctgcgcctgccaggcagggcacgtgctcacagccctgggttgatttatttttttaagggggtagttttattttggtggggttgggtgggaaggaaggctgggggttttgtaaagtgtccactgctcgtcctgttaattttcctcaatttttcttcttcttccttctgtccctcctgccttccttctcttcccaagccctccaatccccatcccaggcttgctgtgtctcactgtccccaccctccttccctacttctttttttgtgtgtctggtttctcccttcctttcctccctttgggtttccagagtcggtgggagaagggcgggagggtgggcccgagtggcccagtgggtgggtggggtggggtggggcaagtgccccaactcccctcaccaggagaggcacctgcttggtgccgcccagggaaggggctcaggcctgacggaaggcctgttctgtgtgtgccgccgggcgacgtgcattgatggggaagctgctggaggagcaggggtggggggtgggagggaggggaaaggcaaatgcagatatatattacagacaaatactctagattccacgagcagcagcctgtggcacccgctgggcgcgggcagcagggaagagggagcaaggcattgtccacagactgctggggtcacttctttgcccacgggctccctgctcccccagttttttttctctctttgttaacaaatgtgtctgagtcttggaaaacaccccaaccccggaaatgtgtgggaaaaagaaaacaaaaactttccaaattccaa

SEQ ID NO: 19859 - DNA, 6413 bp, Homo sapiens
  source 1..6413: mol_type = unassigned DNA
tgcagggatgcggcggcgggagcagccgccctgactcgcggagcatcctcctcggagaggcaccgcggcggggcgggcgggcgggcggggacgcggcggggagggagagaggcgcgaggcggcagacaccgctagccctggctctgccacccgtcggagacggggcggccctgtagctctgctacccaccctccagcttctggcgccccgagaaccaggcatccctccctgctcttctgtcggagcccgcggcgggggaggggcgccgccgccgccgcctgagggaagccggcatctgggcctctgcgcgcctcgccccgcggccgggcccatggcactgtgagcctgcaagggagccccgctcagcgcggggagcgcccggccccctcccgccccatgcgcccgcggctctgaagcctgagcgggggccgggggccgggcggggccggggccgccgtaggcatggcgtccgggagccggtggcggccgacaccgccgccgctgctgttgctgctgctgctggcgctggcggcgcgcgcggacggcctggagttcggcggcggccccgggcagtgggctcgctacgcgcgctgggcgggcgcggcgagcagcggcgagctcagcttcagcctgcgcaccaacgccacgcgcgcgctgctgctctacctggacgacggcggcgactgcgacttcctggagctgctgctggtggacggccgcctgcggctgcgcttcacgctttcgtgcgccgagccggccacgctgcagctggacacgccggtggccgacgaccgctggcacatggtgctgctgacccgcgacgcgcgccgcacggcgctggcggtggacggcgaggcccgcgccgccgaggtgcgctccaagcggcgcgagatgcaggtggccagcgacctgttcgtgggcggcatcccgcccgacgtgcgcctctcggcgcttacgctgagcaccgtcaagtacgagccgcccttccgcggcctcttggccaacctgaagctgggcgagcggccccccgcgctgctgggcagccagggcctgcgcggcgccaccgccgacccgctgtgcgcgcccgcgcgcaacccctgcgccaacggcggcctctgcaccgtgctggcccccggcgaggtgggctgcgactgcagccacacgggcttcggcggcaagttctgcagcgaagaggagcaccccatggaaggtccggctcacctgacgttaaacagcgaaggcaaggaggagtttgtggcgaccttcaaaggcaatgagttcttctgctacgacctgtcacacaaccccatccagagcagcactgatgagatcacactggccttccgcaccctgcaacgcaacggcctgatgctgcatacaggcaagtcggccgactacgtcaacctgtccctcaagtctggggctgtctggctggtcatcaacctaggctcaggtgccttcgaggcccttgtggaacccgtcaatggcaagttcaacgacaacgcctggcacgacgtccgggtcacccgaaacctgcgccagcacgcagggattggacacgctatggtgaccatctcggtggacgggatcctgaccaccacaggctacacgcaggaggattacaccatgctgggctctgatgacttcttctacattgggggcagccccaacacagctgacctgccgggctcgcccgtcagcaacaacttcatgggctgcctcaaggacgtggtctataagaacaatgacttcaaattggaactatcccgcctggcaaaggaaggggaccccaagatgaagctgcagggggacttgtcattccgctgtgaggatgtggctgccctggaccctgtgacctttgagagtcccgaggcctttgtggcgctgccccgctggagcgctaagcgcactggctccatctccctagacttccgcaccaccgagcccaatgggctgctgctcttcagccagggccggcgggctgggggtggagctggcagccacagctctgctcagcgggccgactactttgccatggagctattggacggccacctctatcttctgctggacatgggatctgggggcatcaagctgcgggcatccagccgcaaggtcaatgatggcgagtggtgtcacgtggacttccagagggatgggcgaaaaggctccatctcagtgaatagtcgcagcacgccgttcttggccactggagacagcgagattctggacctggagagtgagctgtacctgggcggtctccctgaggggggccgggtggacctgcccctgcccccagaggtgtggacagcagcactccgggcaggctacgtgggctgtgtgcgggacctcttcatagatgggcgtagccgagacctccggggcctggctgaggctcagggggctgtgggcgttgcccccttttgctcccgggagacgctgaagcagtgtgcatctgccccctgtcgcaatgggggcgtctgtcgagaaggctggaaccgcttcatctgtgactgcatcgggaccggctttcttgggcgggtctgtgagagagaggccacggtcctgagctacgatggctccatgtacatgaagatcatgctgcctaacgccatgcacacggaggcagaggatgtgtccctgcgtttcatgtcccagcgggcctacggactcatgatggccaccacttccagggagtctgccgacaccctacgcctggagctggatggggggcagatgaagctcactgtcaacctcggtaaaggccccgaaacgctgtttgcggggcacaagctcaatgacaatgagtggcacacggtgagggtggtccggcgtggcaagagcctgcagctgtctgtggacaacgtgactgtggagggacagatggcaggagcccatatgcggctggagttccacaacattgagacgggcatcatgacggagcggcggtttatctccgtggtgccctccaacttcatcgggcatctgagtgggctcgtgttcaatggccagccctacatggaccagtgcaaggatggtgacatcacctactgtgagctcaatgctcgctttggcctgcgtgccatcgtggccgatcccgtcaccttcaagagtcgcagcagctacctggcactcgccacgctccaagcctatgcttccatgcacctcttcttccagttcaagaccacggcccctgatgggcttcttctgttcaactcgggcaacggcaatgacttcattgtcatcgagctggtcaaggggtacatccactacgtgtttgacctggggaatggcccgtccttgatgaaggggaactcagacaaaccagtcaatgacaaccagtggcacaacgtggtggtgtccagggacccaggcaacgtgcacacgctcaagattgactcccgcactgtcacgcagcactccaatggcgcccgaaacctcgatctcaaaggggagttgtacattggcggtctgagcaagaatatgttcagcaacctgcccaagctggtggcctcccgggatggctttcagggctgcctggcctcagtggacctcaacggacgtctcccagacctcatcgccgacgccctgcaccgcattgggcaggtggagaggggctgtgatggccccagcaccacctgcactgaagagtcctgtgccaaccagggcgtctgcttgcagcagtgggatggcttcacctgcgactgcaccatgacttcctatggaggccctgtctgcaatgatcccgggaccacatacatctttgggaaggggggagcgctcatcacctacacgtggccccccaatgacaggcccagcacgaggatggatcgcctggccgtgggcttcagcacccaccagcggagcgctgtgctggtgcgggtggacagcgcctccggccttggagactacctgcagctgcacatcgaccagggcaccgtgggggtgatctttaacgtgggcacggacgacattaccatcgacgagcccaacgccatagtaagcgacggcaaataccacgtggtgcgcttcactcgaagcggcggcaacgccaccctgcaggtggacagctggccggtcaacgagcggtacccggcaggccgccagctgaccatcttcaacagccaggctgccatcaagatcgggggccgggatcagggccgccccttccagggccaggtgtccggcctctactacaatgggctcaaggtgctggcgctggccgccgagagcgaccccaatgtgcggactgagggtcacctgcgcctggtgggggaggggccgtccgtgctgctcagtgcggagaccacggccaccaccctgctggctgacatggccaccaccatcatggagactaccaccaccatggccactaccaccacgcgccggggccgctcccccacactgagggacagcaccacccagaacacagatgacctgctggtggcctctgctgagtgtccaagcgatgatgaggacctggaggagtgtgagcccagtactggaggagagttaatattgcccattatcacggaggactccttagacccccctcccgtggccacccgatcccccttcgtgcccccgccccctaccttctaccccttcctcacgggagtgggcgccacccaagacacgctgcccccgcccgccgcgcgccgcccgccctctgggggcccgtgccaggccgagcgggacgacagcgactgcgaggagcccatcgaggcctcgggcttcgcctccggggaggtctttgactccagcctcccccccacggacgacgaggacttttacaccacctttcccctggtcacggaccgcaccaccctcctgtcaccccgcaaacccgctccccggcccaacctcaggacagatggggccacgggcgcccctggggtgctgtttgccccctccgccccggcccccaacctgccggcgggcaaaatgaaccaccgagacccgcttcagcccttgctggagaacccgcccttggggcccggggcccccacgtcctttgagccgcggaggccccctcccctgcgccccggcgtgacctcagcccccggcttcccccatctgcccacagccaaccccacagggcctggggagcggggcccgccgggcgcagtggaggtgatccgggagtccagcagcaccacgggcatggtggtgggcattgtggcggcggcggcgctctgcatcctcatcctcctctacgccatgtataagtaccgcaatcgtgatgagggctcctaccaggtggaccagagccgaaactacatcagtaactcggcccagagcaatggggcggtggtgaaagagaaggccccggctgcccccaagacgcccagcaaggccaagaagaacaaagacaaggagtattatgtctgagcccccggcactgcgccccactgccagctgcccctcctgggagggcccgggaggagggtgccaccctctccctgccaggggcctggggaccctctccctggctgcctcaggcttctcttacgaagaggaaacgcaaaaaaagaaaaggaaaaaccccgtgctcgcccccttcctcctgccgtccactgcgcggcctcgtcagtcccggggctgactgtccctctcagctctgcgcctgccaggcagggcacgtgctcacagccctgggttgatttatttttttaagggggtagttttattttggtggggttgggtgggaaggaaggctgggggttttgtaaagtgtccactgctcgtcctgttaattttcctcaatttttcttcttcttccttctgtccctcctgccttccttctcttcccaagccctccaatccccatcccaggcttgctgtgtctcactgtccccaccctccttccctacttctttttttgtgtgtctggtttctcccttcctttcctccctttgggtttccagagtcggtgggagaagggcgggagggtgggcccgagtggcccagtgggtgggtggggtggggtggggcaagtgccccaactcccctcaccaggagaggcacctgcttggtgccgcccagggaaggggctcaggcctgacggaaggcctgttctgtgtgtgccgccgggcgacgtgcattgatggggaagctgctggaggagcaggggtggggggtgggagggaggggaaaggcaaatgcagatatatattacagacaaatactctagattccacgagcagcagcctgtggcacccgctgggcgcgggcagcagggaagagggagcaaggcattgtccacagactgctggggtcacttctttgcccacgggctccctgctcccccagttttttttctctctttgttaacaaatgtgtctgagtcttggaaaacaccccaaccccggaaatgtgtgggaaaaagaaaacaaaaactttccaaattccaa

SEQ ID NO: 19860 - DNA, 6381 bp, Homo sapiens
  source 1..6381: mol_type = unassigned DNA
gcatccctccctgctcttctgtcggagcccgcggcgggggaggggcgccgccgccgccgcctgagggaagccggcatctgggcctctgcgcgcctcgccccgcggccgggcccatggcactgtgagcctgcaagggagccccgctcagcgcggggagcgcccggccccctcccgccccatgcgcccgcggctctgaagcctgagcgggggccgggggccgggcggggccggggccgccgtaggcatggcgtccgggagccggtggcggccgacaccgccgccgctgctgttgctgctgctgctggcgctggcggcgcgcgcggacggcctggagttcggcggcggccccgggcagtgggctcgctacgcgcgctgggcgggcgcggcgagcagcggcgagctcagcttcagcctgcgcaccaacgccacgcgcgcgctgctgctctacctggacgacggcggcgactgcgacttcctggagctgctgctggtggacggccgcctgcggctgcgcttcacgctttcgtgcgccgagccggccacgctgcagctggacacgccggtggccgacgaccgctggcacatggtgctgctgacccgcgacgcgcgccgcacggcgctggcggtggacggcgaggcccgcgccgccgaggtgcgctccaagcggcgcgagatgcaggtggccagcgacctgttcgtgggcggcatcccgcccgacgtgcgcctctcggcgcttacgctgagcaccgtcaagtacgagccgcccttccgcggcctcttggccaacctgaagctgggcgagcggccccccgcgctgctgggcagccagggcctgcgcggcgccaccgccgacccgctgtgcgcgcccgcgcgcaacccctgcgccaacggcggcctctgcaccgtgctggcccccggcgaggtgggctgcgactgcagccacacgggcttcggcggcaagttctgcagcgaagaggagcaccccatggaaggtccggctcacctgacgttaaacagcgaagtagggtccttactgttctccgaggggggggccgggagaggaggagccggcgatgtgcaccagccaacaaaaggcaaggaggagtttgtggcgaccttcaaaggcaatgagttcttctgctacgacctgtcacacaaccccatccagagcagcactgatgagatcacactggccttccgcaccctgcaacgcaacggcctgatgctgcatacaggcaagtcggccgactacgtcaacctgtccctcaagtctggggctgtctggctggtcatcaacctaggctcaggtgccttcgaggcccttgtggaacccgtcaatggcaagttcaacgacaacgcctggcacgacgtccgggtcacccgaaacctgcgccagcacgcagggattggacacgctatggtgaccatctcggtggacgggatcctgaccaccacaggctacacgcaggaggattacaccatgctgggctctgatgacttcttctacattgggggcagccccaacacagctgacctgccgggctcgcccgtcagcaacaacttcatgggctgcctcaaggacgtggtctataagaacaatgacttcaaattggaactatcccgcctggcaaaggaaggggaccccaagatgaagctgcagggggacttgtcattccgctgtgaggatgtggctgccctggaccctgtgacctttgagagtcccgaggcctttgtggcgctgccccgctggagcgctaagcgcactggctccatctccctagacttccgcaccaccgagcccaatgggctgctgctcttcagccagggccggcgggctgggggtggagctggcagccacagctctgctcagcgggccgactactttgccatggagctattggacggccacctctatcttctgctggacatgggatctgggggcatcaagctgcgggcatccagccgcaaggtcaatgatggcgagtggtgtcacgtggacttccagagggatgggcgaaaaggctccatctcagtgaatagtcgcagcacgccgttcttggccactggagacagcgagattctggacctggagagtgagctgtacctgggcggtctccctgaggggggccgggtggacctgcccctgcccccagaggtgtggacagcagcactccgggcaggctacgtgggctgtgtgcgggacctcttcatagatgggcgtagccgagacctccggggcctggctgaggctcagggggctgtgggcgttgcccccttttgctcccgggagacgctgaagcagtgtgcatctgccccctgtcgcaatgggggcgtctgtcgagaaggctggaaccgcttcatctgtgactgcatcgggaccggctttcttgggcgggtctgtgagagagaggccacggtcctgagctacgatggctccatgtacatgaagatcatgctgcctaacgccatgcacacggaggcagaggatgtgtccctgcgtttcatgtcccagcgggcctacggactcatgatggccaccacttccagggagtctgccgacaccctacgcctggagctggatggggggcagatgaagctcactgtcaacctcgactgcctgcgcgtcggctgcgcacccagtaaaggccccgaaacgctgtttgcggggcacaagctcaatgacaatgagtggcacacggtgagggtggtccggcgtggcaagagcctgcagctgtctgtggacaacgtgactgtggagggacagatggcaggagcccatatgcggctggagttccacaacattgagacgggcatcatgacggagcggcggtttatctccgtggtgccctccaacttcatcgggcatctgagtgggctcgtgttcaatggccagccctacatggaccagtgcaaggatggtgacatcacctactgtgagctcaatgctcgctttggcctgcgtgccatcgtggccgatcccgtcaccttcaagagtcgcagcagctacctggcactcgccacgctccaagcctatgcttccatgcacctcttcttccagttcaagaccacggcccctgatgggcttcttctgttcaactcgggcaacggcaatgacttcattgtcatcgagctggtcaaggggtacatccactacgtgtttgacctggggaatggcccgtccttgatgaaggggaactcagacaaaccagtcaatgacaaccagtggcacaacgtggtggtgtccagggacccaggcaacgtgcacacgctcaagattgactcccgcactgtcacgcagcactccaatggcgcccgaaacctcgatctcaaaggggagttgtacattggcggtctgagcaagaatatgttcagcaacctgcccaagctggtggcctcccgggatggctttcagggctgcctggcctcagtggacctcaacggacgtctcccagacctcatcgccgacgccctgcaccgcattgggcaggtggagaggggctgtgatggccccagcaccacctgcactgaagagtcctgtgccaaccagggcgtctgcttgcagcagtgggatggcttcacctgcgactgcaccatgacttcctatggaggccctgtctgcaatgatcccgggaccacatacatctttgggaaggggggagcgctcatcacctacacgtggccccccaatgacaggcccagcacgaggatggatcgcctggccgtgggcttcagcacccaccagcggagcgctgtgctggtgcgggtggacagcgcctccggccttggagactacctgcagctgcacatcgaccagggcaccgtgggggtgatctttaacgtgggcacggacgacattaccatcgacgagcccaacgccatagtaagcgacggcaaataccacgtggtgcgcttcactcgaagcggcggcaacgccaccctgcaggtggacagctggccggtcaacgagcggtacccggcaggaaactttgataacgagcgcctggcgattgctagacagagaatcccctaccggcttggtcgagtagtagatgagtggctgctcgacaaaggccgccagctgaccatcttcaacagccaggctgccatcaagatcgggggccgggatcagggccgccccttccagggccaggtgtccggcctctactacaatgggctcaaggtgctggcgctggccgccgagagcgaccccaatgtgcggactgagggtcacctgcgcctggtgggggaggggccgtccgtgctgctcagtgcggagaccacggccaccaccctgctggctgacatggccaccaccatcatggagactaccaccaccatggccactaccaccacgcgccggggccgctcccccacactgagggacagcaccacccagaacacagatgacctgctggtggcctctgctgagtgtccaagcgatgatgaggacctggaggagtgtgagcccagtactggaggagagttaatattgcccattatcacggaggactccttagacccccctcccgtggccacccgatcccccttcgtgcccccgccccctaccttctaccccttcctcacgggagtgggcgccacccaagacacgctgcccccgcccgccgcgcgccgcccgccctctgggggcccgtgccaggccgagcgggacgacagcgactgcgaggagcccatcgaggcctcgggcttcgcctccggggaggtctttgactccagcctcccccccacggacgacgaggacttttacaccacctttcccctggtcacggaccgcaccaccctcctgtcaccccgcaaacccgctccccggcccaacctcaggacagatggggccacgggcgcccctggggtgctgtttgccccctccgccccggcccccaacctgccggcgggcaaaatgaaccaccgagacccgcttcagcccttgctggagaacccgcccttggggcccggggcccccacgtcctttgagccgcggaggccccctcccctgcgccccggcgtgacctcagcccccggcttcccccatctgcccacagccaaccccacagggcctggggagcggggcccgccgggcgcagtggaggtgatccgggagtccagcagcaccacgggcatggtggtgggcattgtggcggcggcggcgctctgcatcctcatcctcctctacgccatgtataagtaccgcaatcgtgatgagggctcctaccaggtggaccagagccgaaactacatcagtaactcggcccagagcaatggggcggtggtgaaagagaaggccccggctgcccccaagacgcccagcaaggccaagaagaacaaagacaaggagtattatgtctgagcccccggcactgcgccccactgccagctgcccctcctgggagggcccgggaggagggtgccaccctctccctgccaggggcctggggaccctctccctggctgcctcaggcttctcttacgaagaggaaacgcaaaaaaagaaaaggaaaaaccccgtgctcgcccccttcctcctgccgtccactgcgcggcctcgtcagtcccggggctgactgtccctctcagctctgcgcctgccaggcagggcacgtgctcacagccctgggttgatttatttttttaagggggtagttttattttggtggggttgggtgggaaggaaggctgggggttttgtaaagtgtccactgctcgtcctgttaattttcctcaatttttcttcttcttccttctgtccctcctgccttccttctcttcccaagccctccaatccccatcccaggcttgctgtgtctcactgtccccaccctccttccctacttctttttttgtgtgtctggtttctcccttcctttcctccctttgggtttccagagtcggtgggagaagggcgggagggtgggcccgagtggcccagtgggtgggtggggtggggtggggcaagtgccccaactcccctcaccaggagaggcacctgcttggtgccgcccagggaaggggctcaggcctgacggaaggcctgttctgtgtgtgccgccgggcgacgtgcattgatggggaagctgctggaggagcaggggtggggggtgggagggaggggaaaggcaaatgcagatatatattacagacaaatactctagattccacgagcagcagcctgtggcacccgctgggcgcgggcagcagggaagagggagcaaggcattgtccacagactgctggggtcacttctttgcccacgggctccctgctcccccagttttttttctctctttgttaacaaatgtgtctgagtcttggaaaacaccccaaccccggaaatgtgtgggaaaaagaaaacaaaaactttccaaattc

SEQ ID NO: 19861 - DNA, 3535 bp, Homo sapiens
  source 1..3535: mol_type = unassigned DNA
ggcagcagcggcgcggccggccccagtcgccgtcggtctcccgccttcgggggaaccaggtctccgtccctcttctctcctccagcccgcaccgccccgctccccagctcggtttttccgcaggatttccctcgctctcccctccctgcttggcccccgcgctcccctccctctccactcggcaccatgccccctcccccgggcgctcccccgggtttctgacggccctctgcgccgctccgaccccgccgggatgcagagagacccctagctcctcgcgatggacccaggcatcctggaccttggcgttgccgctccgcggacccccgatttcccggcgggatccagttgattttgttggctccggaccgaggcttgggccctggtttacctccgcttcatccctaccccgctcccggagctcggagccggaggggggcttcgcggggctgcgcagccccgcgtccccgcccccggccatggggctgtgaggcggtcgcccccgggccgaaatgccccccggggggagcgggccgggggggtgcccgcgccgccccccggccctggctgggcccctgccgccgcctccaccgccgccgccgccacctctgctgccgctgttgccgctgttgctgctgttgctgctgggggcggccgagggggcccgggtctcctccagcctcagcaccacccaccacgtccaccacttccacagcaagcacggcaccgtgcccatcgccatcaaccgcatgcccttcctcacccgcggcggccacgccgggaccacatacatctttgggaaggggggagcgctcatcacctacacgtggccccccaatgacaggcccagcacgaggatggatcgcctggccgtgggcttcagcacccaccagcggagcgctgtgctggtgcgggtggacagcgcctccggccttggagactacctgcagctgcacatcgaccagggcaccgtgggggtgatctttaacgtgggcacggacgacattaccatcgacgagcccaacgccatagtaagcgacggcaaataccacgtggtgcgcttcactcgaagcggcggcaacgccaccctgcaggtggacagctggccggtcaacgagcggtacccggcaggaaactttgataacgagcgcctggcgattgctagacagagaatcccctaccggcttggtcgagtagtagatgagtggctgctcgacaaaggccgccagctgaccatcttcaacagccaggctgccatcaagatcgggggccgggatcagggccgccccttccagggccaggtgtccggcctctactacaatgggctcaaggtgctggcgctggccgccgagagcgaccccaatgtgcggactgagggtcacctgcgcctggtgggggaggggccgtccgtgctgctcagtgcggagaccacggccaccaccctgctggctgacatggccaccaccatcatggagactaccaccaccatggccactaccaccacgcgccggggccgctcccccacactgagggacagcaccacccagaacacagatgacctgctggtggcctctgctgagtgtccaagcgatgatgaggacctggaggagtgtgagcccagtactggaggagagttaatattgcccattatcacggaggactccttagacccccctcccgtggccacccgatcccccttcgtgcccccgccccctaccttctaccccttcctcacgggagtgggcgccacccaagacacgctgcccccgcccgccgcgcgccgcccgccctctgggggcccgtgccaggccgagcgggacgacagcgactgcgaggagcccatcgaggcctcgggcttcgcctccggggaggtctttgactccagcctcccccccacggacgacgaggacttttacaccacctttcccctggtcacggaccgcaccaccctcctgtcaccccgcaaacccgctccccggcccaacctcaggacagatggggccacgggcgcccctggggtgctgtttgccccctccgccccggcccccaacctgccggcgggcaaaatgaaccaccgagacccgcttcagcccttgctggagaacccgcccttggggcccggggcccccacgtcctttgagccgcggaggccccctcccctgcgccccggcgtgacctcagcccccggcttcccccatctgcccacagccaaccccacagggcctggggagcggggcccgccgggcgcagtggaggtgatccgggagtccagcagcaccacgggcatggtggtgggcattgtggcggcggcggcgctctgcatcctcatcctcctctacgccatgtataagtaccgcaatcgtgatgagggctcctaccaggtggaccagagccgaaactacatcagtaactcggcccagagcaatggggcggtggtgaaagagaaggccccggctgcccccaagacgcccagcaaggccaagaagaacaaagacaaggagtattatgtctgagcccccggcactgcgccccactgccagctgcccctcctgggagggcccgggaggagggtgccaccctctccctgccaggggcctggggaccctctccctggctgcctcaggcttctcttacgaagaggaaacgcaaaaaaagaaaaggaaaaaccccgtgctcgcccccttcctcctgccgtccactgcgcggcctcgtcagtcccggggctgactgtccctctcagctctgcgcctgccaggcagggcacgtgctcacagccctgggttgatttatttttttaagggggtagttttattttggtggggttgggtgggaaggaaggctgggggttttgtaaagtgtccactgctcgtcctgttaattttcctcaatttttcttcttcttccttctgtccctcctgccttccttctcttcccaagccctccaatccccatcccaggcttgctgtgtctcactgtccccaccctccttccctacttctttttttgtgtgtctggtttctcccttcctttcctccctttgggtttccagagtcggtgggagaagggcgggagggtgggcccgagtggcccagtgggtgggtggggtggggtggggcaagtgccccaactcccctcaccaggagaggcacctgcttggtgccgcccagggaaggggctcaggcctgacggaaggcctgttctgtgtgtgccgccgggcgacgtgcattgatggggaagctgctggaggagcaggggtggggggtgggagggaggggaaaggcaaatgcagatatatattacagacaaatactctagattccacgagcagcagcctgtggcacccgctgggcgcgggcagcagggaagagggagcaaggcattgtccacagactgctggggtcacttctttgcccacgggctccctgctcccccagttttttttctctctttgttaacaaatgtgtctgagtcttggaaaacaccccaaccccggaaatgtgtgggaaaaagaaaacaaaaactttccaaattccaa

SEQ ID NO: 19862 - DNA, 4633 bp, Homo sapiens
  source 1..4633: mol_type = unassigned DNA
acttcgcaggcgcccgcccgcctctcggccacctctgcagcctgccaggcacctcctcttgcgctctcgctgatttcgcccacccacctccctccaccccgtgccacgttggtttgggtggctgctccgcaccgggttcctcctcctctcctctttccctccagtccttcttattctcttcctctggctgcggtggctgctgctgctgctggttttcatccagttgggaaacccaggaagccggcggctgctccgtggcgctagtccagcacgcccagggttaaaagcctcgcgcccttccgcggagactcccaggaacacccgaagaactcttccacctgcagcccccttttgcctggcagttctgcattgcatctcatggaagtggaaacaggaaaataaaaatgttcaaactccttggatgttgggataaactcacctgaacccacttgggttcgggctgcctccttctcttccttcattgccacctttcctctgtgtggctcccgggagtgtgcggttaagtcatcagactcgaagtgcctagagatccggaggaagccgcgccggtcttcccctgacatgcgtggcatgccggggctccgtaggaggtttgctatacctgggaggaccctggcattctaaatttcagctccgggaaagagaaggggctttttgccttttatcttttttttttctttctttaagtagtaattttttaactgattcattgtttggaaagcgcatattgcttccctcttccccgaattctggcaactcttcctcctgctatgatgggcccttgggcatcatgaacttcattactcctcactggctggaattcaaactgcccatctgtagtggtcccgtgcgttgaccatgcacctgagaatccacgcgagacggagccctcctcgccggccggcctggacgcttgggatctggttcctgttctggggatgtatcgtcagctctgtatggagttcttctaatgtagcttcctcctcctccacctcttcctcgccggggtctcactctcagcacgagcaccatttccatggcagcaagcatcactcagtgcctatttctatctatcgttcccctgtttcccttcgaggaggacacgctggcgctacgtacatctttgggaaaagtggtgggcttatcctctacacctggccagccaatgacaggcccagcacgcggtctgaccgccttgccgtgggcttcagcaccactgtgaaggatggcatcttggtccgcatcgacagtgctccaggacttggtgacttcctccagcttcacatagaacaggggaaaattggagttgtcttcaacattggcacagttgacatctccatcaaagaggagagaacccctgtaaatgacggcaaataccatgtggtacgcttcaccaggaacggcggcaacgccaccctgcaggtggacaactggccagtgaatgaacattatcctacaggccggcagttaaccatcttcaacactcaggcgcaaatagccattggtggaaaggacaaaggacgcctcttccaaggccaactctctgggctctattatgatggtttgaaagtactgaacatggcggctgagaacaaccccaatattaaaatcaatggaagtgttcggctggttggagaagtcccatcaattttgggaacaacacagacgacctccatgccaccagaaatgtctactactgtcatggaaaccactactacaatggcgactaccacaacccgtaagaatcgctctacagccagcattcagccaacatcagatgatcttgtttcatctgctgaatgttcaagtgatgatgaagactttgttgaatgtgagccgagtacaggtaggtcagcaaaccccacggagccgggaatcagacgggttccgggggcctcagaggtgatccgggagtcgagcagcacaacagggatggtcgtcggcattgtggctgctgccgccctctgcatcttgatcctcctgtacgccatgtacaagtacaggaacagggacgaggggtcctatcaagtggacgagacgcggaactacatcagcaactccgcccagagcaacggcacgctcatgaaggagaagcagcagagctcgaagagcggccacaagaaacagaaaaacaaggacagggagtattacgtgtaaacatgcgaacactgctcacacgcgagttttcacagttatttctatccacgcctatgaatctttggacggtgagatctcacagatgtcagaactgctggaactatgaaatggggtatataaccacgactctggtggggaaaaccgttttttaaaggacacacacacacacagcgatgcatctctctctaaagctcagccacggctgcggcaaggtcccagcggtcgctgggagacagaaggttttgtgccctgctgtatcataaagcacacacttagcgctctggagccggacggtggctccaccacttccgcaggcctggaaacttccttctccggaggaccttttactaaaaggtagaagacttcatggcttacttgttccataactccaagtgagtctgtaatgtttgtgaagcttgactgtaaccatgttttttctgtttaattatgtaaaaaacaaaactacaacaacaaaaaaagaaaaaagttaaaaaagaaaaaaacaccaaaaaacaaaaacaaacaaaaaaaaaaacccacaacccttatctggttctgaccagtgtgcgtgtaactttatgatctgaggggaaaaatggcttttgggtttttgtttatttttttgataatgactggacatcagaagaggaaaaaaactcaaaacaaaagcgagagagactattgccatatgaactcaaaagctatcatggtgttcactctacatatcaggttatggtgtctctagaatctgttgtttgtttcctataagatgctttgctgaacacatagcaaaattcatgtgacggatgataaattgattcgaaaagctggtcccccaggatctaatttcagaatttaccacccaaacccggaacagatgggtttagggctggtgttatcagagctattggctttacgtaacaatattgttcctgtccattcacccagccaaattgtgttaaagaggaaagccccacaaactaaaacagcctttcctagggaagaggaaggggaggtgggctggatctgtgactgattgaaatgcatgcaaataaaaaagacaatattaaagtctgttatcaaaccagacagtaggggagttcaactcgtgatggaaccacaaaaggtcacacaagccaaccatgtcatgccagagtacaaaacacatagttctttccccgccccgaatgtgacaatggttttcatagtggtttaattttgtagcctgacatttatggataactctgtccttccatttgctcacttctctcttcacccatcttttttaaaaacaaataaatgaataaagctgctgtgacacacacacaaaaggaatttaatagtataatatatatataaataaatatatatacagatatatttatcatggtatgtttgatgggatgactgacacaggaaatctgttaaagtcttaaaatggaatgagaatgttgttttaaaagaaaatagcaaaacaacaaaaaagcaaaccttaaaatgtgaagaaagtgtgaattttagttttgtcacagttaactgtgtcaaagagaattaaaaaaaaaaacttcagattttgtttacatattttactacatttttgctggtataattccttagccacctatgtacatactgctttaagaaatgtttttttcctgtttatttctgtttggtttatattctggttgtctttttctttttgtaaagaggaaacaatgtacagaaaaacaataaactggttgtatggccatagctatccgaaaagcaagagacaaagcaagacaaatattcacacaaaaatgaagtgtgtcctctggagggtcagatatacaatttcttttgtacagatgaaaatcaatcagctgcttagatttagaaatctactcttgctggtctttgtaagttgcatgaatatttgactttgaaaaaatatcttaacgacatggggcaaaaagtgcaatctaaatggtagcctttactaatgtgtgtggaaagaggtgttcctcattatctaatatttcaatgtgttaagagtttaatttttttgttatcattaaaaaagacaggattataaagagatatcaaagcacgattttagataacctaaacggcccagcctatacgaagttgattatatctcgatgtctgtaaaagattgctgttcttggagtcttgaggtcttgtgaattgatttcctgctttctttcatttttttcaatttaagtaataatacatttgttatattcctttcagtgtaagtttctatttggacaattttatgggaacatgtgcattctctatgtgagcttctatcatattcctgttttattagcagaacctaaaggaatttatttaatgatgttgtgacattactgctttttcttttttcttttcttagttcatatttgcattttcgttcaaggatatgcttagcaataaaatgttcttcccaaaa

SEQ ID NO: 19863 - DNA, 4932 bp, Homo sapiens
  source 1..4932: mol_type = unassigned DNA
atgagctccacactccactcggttttcttcaccctgaaggtcagcatcctgctggggtccctgctggggctctgcctgggccttgagttcatgggcctccccaaccagtgggcccgctacctccgctgggatgccagcacacgcagtgacctgagtttccagttcaagaccaacgtctctacggggctgctcctctacctggatgatggcggcgtctgcgacttcctatgcctctccctggtggatggccgcgttcagctccgcttcagcatggactgtgccgagactgccgtgctgtccaacaagcaggtgaatgacagcagctggcacttcctcatggtgagccgtgaccgcctgcgcacggtgctgatgcttgatggcgagggccagtctggggagctgcagccccagcggccctacatggatgtggtcagtgacttgttccttggtggagtccctactgacatacgaccttctgccctgacccttgatggagttcaggccatgcccggcttcaaggggttaattctggatctcaagtatggaaactcggagcctcggcttctggggagccggggtgtccagatggatgccgagggaccctgtggtgagcgtccctgtgaaaatggtgggatctgctttctcctggacggccaccccacctgtgactgttctaccactggctatggtggcaagctctgctcagaaggaagctcgggggacccctgcctctcccacctcatgatgagtgaacaagctcgagaggagaatgtggccactttccgaggctcagagtatctgtgctacgacctgtctcagaacccgatccagagcagcagtgatgaaatcaccctctcctttaagacctggcagcgtaacggcctcatcctgcacacgggcaagtcggctgactatgtcaacctggctctgaaggatggtgcggtctccttggtcattaacctggggtccggggcctttgaggccattgtggagccagtgaatggaaaattcaacgacaacgcctggcatgatgtcaaagtgacacgcaacctccggcaggtgacaatctctgtggatggcattcttaccacgacgggctacactcaagaggactataccatgctgggctcggacgacttcttctatgtaggaggaagcccaagtaccgctgacttgcctggctcccctgtcagcaacaacttcatgggctgccttaaagaggttgtttataagaataatgacatccgtctggagctgtctcgcctggcccggattgcggacaccaagatgaaaatctatggcgaagttgtgtttaagtgtgagaatgtggccacactggaccccatcaactttgagaccccagaggcttacatcagcttgcccaagtggaacactaaacgtatgggctccatctcctttgacttccgcaccacagagcccaatggcctgatcctcttcactcatggaaagccccaagagaggaaggatgctcggagccagaagaatacaaaagtagacttctttgccgtggaactcctcgatggcaacctgtacttgctgcttgacatgggctctggcaccatcaaagtgaaagccactcagaagaaagccaatgatggggaatggtaccatgtggacattcagcgagatggcagatcaggtactatatcagtgaacagcaggcgcacgccattcaccgccagtggggagagcgagatcctggacctggaaggagacatgtacctgggagggctgccggagaaccgtgctggccttattctccccaccgagctgtggactgccatgctcaactatggctacgtgggctgcatccgcgacctattcattgatgggcgcagcaagaacattcgacagctggcagagatgcagaatgctgcgggtgtcaagtcctcctgttcacggatgagtgccaagcagtgtgacagctacccctgcaagaataatgctgtgtgcaaggacggctggaaccgcttcatctgcgactgcaccggcaccggatactggggaagaacctgcgaaagggaggcatccatcctgagctatgatggtagcatgtacatgaagatcatcatgcccatggtcatgcatactgaggcagaggatgtgtccttccgcttcatgtcccagcgagcttatgggctgctggtggctacgacctccagggactctgccgacaccctgcgtctggagctggatggggggcgtgtcaagctcatggttaacctagactgtatcaggataaactgtaactccagcaaaggaccagagaccttgtatgcagggcagaagctcaatgacaacgagtggcacaccgttcgggtggtgcggagaggaaaaagccttaagttaaccgtggatgatgatgtggctgagggtacaatggtgggagaccatacccgtttggagttccacaacattgaaacgggaatcatgactgagaaacgctacatctccgttgtcccctccagctttattggccatctgcagagcctcatgtttaatggccttctctacattgacttgtgcaaaaatggtgacattgattattgtgagctgaaggctcgttttggactgaggaacatcatcgctgaccctgtcacctttaagaccaagagcagctacctgagccttgccactcttcaggcttacacctccatgcacctcttcttccagttcaagaccacctcaccagatggcttcattctcttcaatagtggtgatggcaatgacttcattgcagtcgagcttgtcaaggggtatatacactacgtttttgacctcggaaacggtcccaatgtgatcaaaggcaacagtgaccgccccctgaatgacaaccagtggcacaatgtcgtcatcactcgggacaatagtaacactcatagcctgaaagtggacaccaaagtggtcactcaggttatcaatggtgccaaaaatctggatttgaaaggtgatctctatatggctggtctggcccaaggcatgtacagcaacctcccaaagctcgtggcctctcgagatggctttcagggctgtctagcatcagtggacttgaatggacgcctgccagacctcatcaatgatgctcttcatcggagcggacagatcgagcgtggctgtgaaggacccagtaccacctgccaggaagattcatgtgccaaccagggggtctgcatgcaacaatgggagggcttcacctgtgattgttctatgacctcttattctggaaaccagtgcaatgatcctggcgctacgtacatctttgggaaaagtggtgggcttatcctctacacctggccagccaatgacaggcccagcacgcggtctgaccgccttgccgtgggcttcagcaccactgtgaaggatggcatcttggtccgcatcgacagtgctccaggacttggtgacttcctccagcttcacatagaacaggggaaaattggagttgtcttcaacattggcacagttgacatctccatcaaagaggagagaacccctgtaaatgacggcaaataccatgtggtacgcttcaccaggaacggcggcaacgccaccctgcaggtggacaactggccagtgaatgaacattatcctacaggccggcagttaaccatcttcaacactcaggcgcaaatagccattggtggaaaggacaaaggacgcctcttccaaggccaactctctgggctctattatgatggtttgaaagtactgaacatggcggctgagaacaaccccaatattaaaatcaatggaagtgttcggctggttggagaagtcccatcaattttgggaacaacacagacgacctccatgccaccagaaatgtctactactgtcatggaaaccactactacaatggcgactaccacaacccgtaagaatcgctctacagccagcattcagccaacatcagatgatcttgtttcatctgctgaatgttcaagtgatgatgaagactttgttgaatgtgagccgagtacagcaagaggtgaattagttatccctcttcttgtagaagaccctttagctacccctcctattgctactcgtgcaccttccattacactcccccctacctttcgccccctcctcaccattattgagaccaccaaagattccctgtccatgacctctgaggcggggttaccttgcttgtcggaccaaggcagcgatggttgtgatgatgatggcttggtgatatctgggtatggctcaggggaaacctttgactctaacctgccccctactgatgatgaagatttttacaccaccttctccttggtaacagataagagtctttccacttcaatcttcgaaggtggctacaaagcacatgcgcccaagtgggaatccaaggactttagacctaacaaagtctccgaaactagtaggactactaccacatctttatcccctgagctgatccgcttcacagcttcctcctcgtctgggatggtgcccaaattgccagctggcaaaatgaataaccgtgatctcaaaccccagcctgatatagtcttgcttccgttgcccactgcctatgagctagacagcaccaaactgaagagcccactaattacttcccccatgttccgtaatgtgcccacagcaaaccccacggagccgggaatcagacgggttccgggggcctcagaggtgatccgggagtcgagcagcacaacagggatggtcgtcggcattgtggctgctgccgccctctgcatcttgatcctcctgtacgccatgtacaagtacaggaacagggacgaggggtcctatcaagtggacgagacgcggaactacatcagcaactccgcccagagcaacggcacgctcatgaaggagaagcagcagagctcgaagagcggccacaagaaacagaaaaacaaggacagggagtattacgtgtaa

SEQ ID NO: 19864 - DNA, 4179 bp, Homo sapiens
  source 1..4179: mol_type = unassigned DNA
atgagctccacactccactcggttttcttcaccctgaaggtcagcatcctgctggggtccctgctggggctctgcctgggccttgagttcatgggcctccccaaccagtgggcccgctacctccgctgggatgccagcacacgcagtgacctgagtttccagttcaagaccaacgtctctacggggctgctcctctacctggatgatggcggcgtctgcgacttcctatgcctctccctggtggatggccgcgttcagctccgcttcagcatggactgtgccgagactgccgtgctgtccaacaagcaggtgaatgacagcagctggcacttcctcatggtgagccgtgaccgcctgcgcacggtgctgatgcttgatggcgagggccagtctggggagctgcagccccagcggccctacatggatgtggtcagtgacttgttccttggtggagtccctactgacatacgaccttctgccctgacccttgatggagttcaggccatgcccggcttcaaggggttaattctggatctcaagtatggaaactcggagcctcggcttctggggagccggggtgtccagatggatgccgagggaccctgtggtgagcgtccctgtgaaaatggtgggatctgctttctcctggacggccaccccacctgtgactgttctaccactggctatggtggcaagctctgctcagaaggcctctcccacctcatgatgagtgaacaaggtaggtggaaagctcgagaggagaatgtggccactttccgaggctcagagtatctgtgctacgacctgtctcagaacccgatccagagcagcagtgatgaaatcaccctctcctttaagacctggcagcgtaacggcctcatcctgcacacgggcaagtcggctgactatgtcaacctggctctgaaggatggtgcggtctccttggtcattaacctggggtccggggcctttgaggccattgtggagccagtgaatggaaaattcaacgacaacgcctggcatgatgtcaaagtgacacgcaacctccggcaggtgacaatctctgtggatggcattcttaccacgacgggctacactcaagaggactataccatgctgggctcggacgacttcttctatgtaggaggaagcccaagtaccgctgacttgcctggctcccctgtcagcaacaacttcatgggctgccttaaagaggttgtttataagaataatgacatccgtctggagctgtctcgcctggcccggattgcggacaccaagatgaaaatctatggcgaagttgtgtttaagtgtgagaatgtggccacactggaccccatcaactttgagaccccagaggcttacatcagcttgcccaagtggaacactaaacgtatgggctccatctcctttgacttccgcaccacagagcccaatggcctgatcctcttcactcatggaaagccccaagagaggaaggatgctcggagccagaagaatacaaaagtagacttctttgccgtggaactcctcgatggcaacctgtacttgctgcttgacatgggctctggcaccatcaaagtgaaagccactcagaagaaagccaatgatggggaatggtaccatgtggacattcagcgagatggcagatcaggtactatatcagtgaacagcaggcgcacgccattcaccgccagtggggagagcgagatcctggacctggaaggagacatgtacctgggagggctgccggagaaccgtgctggccttattctccccaccgagctgtggactgccatgctcaactatggctacgtgggctgcatccgcgacctattcattgatgggcgcagcaagaacattcgacagctggcagagatgcagaatgctgcgggtgtcaagtcctcctgttcacggatgagtgccaagcagtgtgacagctacccctgcaagaataatgctgtgtgcaaggacggctggaaccgcttcatctgcgactgcaccggcaccggatactggggaagaacctgcgaaagggaggcatccatcctgagctatgatggtagcatgtacatgaagatcatcatgcccatggtcatgcatactgaggcagaggatgtgtccttccgcttcatgtcccagcgagcttatgggctgctggtggctacgacctccagggactctgccgacaccctgcgtctggagctggatggggggcgtgtcaagctcatggttaacttaggcaaaggaccagagaccttgtatgcagggcagaagctcaatgacaacgagtggcacaccgttcgggtggtgcggagaggaaaaagccttaagttaaccgtggatgatgatgtggctgagggtacaatggtgggagaccatacccgtttggagttccacaacattgaaacgggaatcatgactgagaaacgctacatctccgttgtcccctccagctttattggccatctgcagagcctcatgtttaatggccttctctacattgacttgtgcaaaaatggtgacattgattattgtgagctgaaggctcgttttggactgaggaacatcatcgctgaccctgtcacctttaagaccaagagcagctacctgagccttgccactcttcaggcttacacctccatgcacctcttcttccagttcaagaccacctcaccagatggcttcattctcttcaatagtggtgatggcaatgacttcattgcagtcgagcttgtcaaggggtatatacactacgtttttgacctcggaaacggtcccaatgtgatcaaaggcaacagtgaccgccccctgaatgacaaccagtggcacaatgtcgtcatcactcgggacaatagtaacactcatagcctgaaagtggacaccaaagtggtcactcaggttatcaatggtgccaaaaatctggatttgaaaggtgatctctatatggctggtctggcccaaggcatgtacagcaacctcccaaagctcgtggcctctcgagatggctttcagggctgtctagcatcagtggacttgaatggacgcctgccagacctcatcaatgatgctcttcatcggagcggacagatcgagcgtggctgtgaaggacccagtaccacctgccaggaagattcatgtgccaaccagggggtctgcatgcaacaatgggagggcttcacctgtgattgttctatgacctcttattctggaaaccagtgcaatgatcctggcgctacgtacatctttgggaaaagtggtgggcttatcctctacacctggccagccaatgacaggcccagcacgcggtctgaccgccttgccgtgggcttcagcaccactgtgaaggatggcatcttggtccgcatcgacagtgctccaggacttggtgacttcctccagcttcacatagaacaggggaaaattggagttgtcttcaacattggcacagttgacatctccatcaaagaggagagaacccctgtaaatgacggcaaataccatgtggtacgcttcaccaggaacggcggcaacgccaccctgcaggtggacaactggccagtgaatgaacattatcctacaggcaacactgataatgaacgcttccaaatggtaaaacagaaaatccccttcaaatataatcggcctgtagaggagtggctgcaggaaaaaggccggcagttaaccatcttcaacactcaggcgcaaatagccattggtggaaaggacaaaggacgcctcttccaaggccaactctctgggctctattatgatggtttgaaagtactgaacatggcggctgagaacaaccccaatattaaaatcaatggaagtgttcggctggttggagaagtcccatcaattttgggaacaacacagacgacctccatgccaccagaaatgtctactactgtcatggaaaccactactacaatggcgactaccacaacccgtaagaatcgctctacagccagcattcagccaacatcagatgatcttgtttcatctgctgaatgttcaagtgatgatgaagactttgttgaatgtgagccgagtacaggtaggtcagccagaagctctaatgcagctagatcactccgtgccgcccttacatggacatggcgactcacttacacatttactcctatcatcttcatctcctgtgtagttcactcatag

SEQ ID NO: 19865 - DNA, 3649 bp, Homo sapiens
  source 1..3649: mol_type = unassigned DNA
ttcttcagtgcccagttttctgccgtgggatggtgttaggcccgggaagaacagagcctaaatgcacccctctacccacttccaccgggatcttgacgaagctcgagaggagaatgtggccactttccgaggctcagagtatctgtgctacgacctgtctcagaacccgatccagagcagcagtgatgaaatcaccctctcctttaagacctggcagcgtaacggcctcatcctgcacacgggcaagtcggctgactatgtcaacctggctctgaaggatggtgcggtctccttggtcattaacctggggtccggggcctttgaggccattgtggagccagtgaatggaaaattcaacgacaacgcctggcatgatgtcaaagtgacacgcaacctccggcaggtgacaatctctgtggatggcattcttaccacgacgggctacactcaagaggactataccatgctgggctcggacgacttcttctatgtaggaggaagcccaagtaccgctgacttgcctggctcccctgtcagcaacaacttcatgggctgccttaaagaggttgtttataagaataatgacatccgtctggagctgtctcgcctggcccggattgcggacaccaagatgaaaatctatggcgaagttgtgtttaagtgtgagaatgtggccacactggaccccatcaactttgagaccccagaggcttacatcagcttgcccaagtggaacactaaacgtatgggctccatctcctttgacttccgcaccacagagcccaatggcctgatcctcttcactcatggaaagccccaagagaggaaggatgctcggagccagaagaatacaaaagtagacttctttgccgtggaactcctcgatggcaacctgtacttgctgcttgacatgggctctggcaccatcaaagtgaaagccactcagaagaaagccaatgatggggaatggtaccatgtggacattcagcgagatggcagatcaggtactatatcagtgaacagcaggcgcacgccattcaccgccagtggggagagcgagatcctggacctggaaggagacatgtacctgggagggctgccggagaaccgtgctggccttattctccccaccgagctgtggactgccatgctcaactatggctacgtgggctgcatccgcgacctattcattgatgggcgcagcaagaacattcgacagctggcagagatgcagaatgctgcgggtgtcaagtcctcctgttcacggatgagtgccaagcagtgtgacagctacccctgcaagaataatgctgtgtgcaaggacggctggaaccgcttcatctgcgactgcaccggcaccggatactggggaagaacctgcgaaagggaggcatccatcctgagctatgatggtagcatgtacatgaagatcatcatgcccatggtcatgcatactgaggcagaggatgtgtccttccgcttcatgtcccagcgagcttatgggctgctggtggctacgacctccagggactctgccgacaccctgcgtctggagctggatggggggcgtgtcaagctcatggttaacttagactgtatcaggataaactgtaactccagcaaaggaccagagaccttgtatgcagggcagaagctcaatgacaacgagtggcacaccgttcgggtggtgcggagaggaaaaagccttaagttaaccgtggatgatgatgtggctgagggtacaatggtgggagaccatacccgtttggagttccacaacattgaaacgggaatcatgactgagaaacgctacatctccgttgtcccctccagctttattggccatctgcagagcctcatgtttaatggccttctctacattgacttgtgcaaaaatggtgacattgattattgtgagctgaaggctcgttttggactgaggaacatcatcgctgaccctgtcacctttaagaccaagagcagctacctgagccttgccactcttcaggcttacacctccatgcacctcttcttccagttcaagaccacctcaccagatggcttcattctcttcaatagtggtgatggcaatgacttcattgcagtcgagcttgtcaaggggtatatacactacgtttttgacctcggaaacggtcccaatgtgatcaaaggcaacagtgaccgccccctgaatgacaaccagtggcacaatgtcgtcatcactcgggacaatagtaacactcatagcctgaaagtggacaccaaagtggtcactcaggttatcaatggtgccaaaaatctggatttgaaaggtgatctctatatggctggtctggcccaaggcatgtacagcaacctcccaaagctcgtggcctctcgagatggctttcagggctgtctagcatcagtggacttgaatggacgcctgccagacctcatcaatgatgctcttcatcggagcggacagatcgagcgtggctgtgaaggacccagtaccacctgccaggaagattcatgtgccaaccagggggtctgcatgcaacaatgggagggcttcacctgtgattgttctatgacctcttattctggaaaccagtgcaatgatcctggcgctacgtacatctttgggaaaagtggtgggcttatcctctacacctggccagccaatgacaggcccagcacgcggtctgaccgccttgccgtgggcttcagcaccactgtgaaggatggcatcttggtccgcatcgacagtgctccaggacttggtgacttcctccagcttcacatagaacaggggaaaattggagttgtcttcaacattggcacagttgacatctccatcaaagaggagagaacccctgtaaatgacggcaaataccatgtggtacgcttcaccaggaacggcggcaacgccaccctgcaggtggacaactggccagtgaatgaacattatcctacaggccggcagttaaccatcttcaacactcaggcgcaaatagccattggtggaaaggacaaaggacgcctcttccaaggccaactctctgggctctattatgatggtttgaaagtactgaacatggcggctgagaacaaccccaatattaaaatcaatggaagtgttcggctggttggagaagtcccatcaattttgggaacaacacagacgacctccatgccaccagaaatgtctactactgtcatggaaaccactactacaatggcgactaccacaacccgtaagaatcgctctacagccagcattcagccaacatcagatgatcttgtttcatctgctgaatgttcaagtgatgatgaagactttgttgaatgtgagccgagtacagcaaaccccacggagccgggaatcagacgggttccgggggcctcagaggtgatccgggagtcgagcagcacaacagggatggtcgtcggcattgtggctgctgccgccctctgcatcttgatcctcctgtacgccatgtacaagtacaggaacagggacgaggggtcctatcaagtggacgagacgcggaactacatcagcaactccgcccagagcaacggcacgctcatgaaggagaagcagcagagctcgaagagcggccacaagaaacagaaaaacaaggacagggagtattacgtgtaa

SEQ ID NO: 19866 - DNA, 4219 bp, Homo sapiens
  source 1..4219: mol_type = unassigned DNA
ctctgtgtggctcccgggagtgtgcggttaagtcatcagactcgaagtgcctagagatccggaggaagccgcgccggtcttcccctgacatgcgtggcatgccggggctccgtaggaggtttgctatacctgggaggaccctggcattctaaatttcagctccgggaaagagaaggggctttttgccttttatcttttttttttctttctttaagtagtaattttttaactgattcattgtttggaaagcgcatattgcttccctcttccccgaattctggcaactcttcctcctgctatgatgggcccttgggcatcatgaacttcattactcctcactggctggaattcaaactgcccatctgtagtggtcccgtgcgttgaccatgcacctgagaatccacgcgagacggagccctcctcgccggccggcctggacgcttgggatctggttcctgttctggggatgtatcgtcagctctgtatggagttcttctaatgtagcttcctcctcctccacctcttcctcgccggggtctcactctcagcacgagcaccatttccatggcagcaagcatcactcagtgcctatttctatctatcgttcccctgtttcccttcgaggaggacacgctggcgctacgtacatctttgggaaaagtggtgggcttatcctctacacctggccagccaatgacaggcccagcacgcggtctgaccgccttgccgtgggcttcagcaccactgtgaaggatggcatcttggtccgcatcgacagtgctccaggacttggtgacttcctccagcttcacatagaacaggggaaaattggagttgtcttcaacattggcacagttgacatctccatcaaagaggagagaacccctgtaaatgacggcaaataccatgtggtacgcttcaccaggaacggcggcaacgccaccctgcaggtggacaactggccagtgaatgaacattatcctacaggcaacactgataatgaacgcttccaaatggtaaaacagaaaatccccttcaaatataatcggcctgtagaggagtggctgcaggaaaaaggccggcagttaaccatcttcaacactcaggcgcaaatagccattggtggaaaggacaaaggacgcctcttccaaggccaactctctgggctctattatgatggtttgaaagtactgaacatggcggctgagaacaaccccaatattaaaatcaatggaagtgttcggctggttggagaagtcccatcaattttgggaacaacacagacgacctccatgccaccagaaatgtctactactgtcatggaaaccactactacaatggcgactaccacaacccgtaagaatcgctctacagccagcattcagccaacatcagatgatcttgtttcatctgctgaatgttcaagtgatgatgaagactttgttgaatgtgagccgagtacagcaaaccccacggagccgggaatcagacgggttccgggggcctcagaggtgatccgggagtcgagcagcacaacagggatggtcgtcggcattgtggctgctgccgccctctgcatcttgatcctcctgtacgccatgtacaagtacaggaacagggacgaggggtcctatcaagtggacgagacgcggaactacatcagcaactccgcccagagcaacggcacgctcatgaaggagaagcagcagagctcgaagagcggccacaagaaacagaaaaacaaggacagggagtattacgtgtaaacatgcgaacactgctcacacgcgagttttcacagttatttctatccacgcctatgaatctttggacggtgagatctcacagatgtcagaactgctggaactatgaaatggggtatataaccacgactctggtggggaaaaccgttttttaaaggacacacacacacacagcgatgcatctctctctaaagctcagccacggctgcggcaaggtcccagcggtcgctgggagacagaaggttttgtgccctgctgtatcataaagcacacacttagcgctctggagccggacggtggctccaccacttccgcaggcctggaaacttccttctccggaggaccttttactaaaaggtagaagacttcatggcttacttgttccataactccaagtgagtctgtaatgtttgtgaagcttgactgtaaccatgttttttctgtttaattatgtaaaaaacaaaactacaacaacaaaaaaagaaaaaagttaaaaaagaaaaaaacaccaaaaaacaaaaacaaacaaaaaaaaaaacccacaacccttatctggttctgaccagtgtgcgtgtaactttatgatctgaggggaaaaatggcttttgggtttttgtttatttttttgataatgactggacatcagaagaggaaaaaaactcaaaacaaaagcgagagagactattgccatatgaactcaaaagctatcatggtgttcactctacatatcaggttatggtgtctctagaatctgttgtttgtttcctataagatgctttgctgaacacatagcaaaattcatgtgacggatgataaattgattcgaaaagctggtcccccaggatctaatttcagaatttaccacccaaacccggaacagatgggtttagggctggtgttatcagagctattggctttacgtaacaatattgttcctgtccattcacccagccaaattgtgttaaagaggaaagccccacaaactaaaacagcctttcctagggaagaggaaggggaggtgggctggatctgtgactgattgaaatgcatgcaaataaaaaagacaatattaaagtctgttatcaaaccagacagtaggggagttcaactcgtgatggaaccacaaaaggtcacacaagccaaccatgtcatgccagagtacaaaacacatagttctttccccgccccgaatgtgacaatggttttcatagtggtttaattttgtagcctgacatttatggataactctgtccttccatttgctcacttctctcttcacccatcttttttaaaaacaaataaatgaataaagctgctgtgacacacacacaaaaggaatttaatagtataatatatatataaataaatatatatacagatatatttatcatggtatgtttgatgggatgactgacacaggaaatctgttaaagtcttaaaatggaatgagaatgttgttttaaaagaaaatagcaaaacaacaaaaaagcaaaccttaaaatgtgaagaaagtgtgaattttagttttgtcacagttaactgtgtcaaagagaattaaaaaaaaaaacttcagattttgtttacatattttactacatttttgctggtataattccttagccacctatgtacatactgctttaagaaatgtttttttcctgtttatttctgtttggtttatattctggttgtctttttctttttgtaaagaggaaacaatgtacagaaaaacaataaactggttgtatggccatagctatccgaaaagcaagagacaaagcaagacaaatattcacacaaaaatgaagtgtgtcctctggagggtcagatatacaatttcttttgtacagatgaaaatcaatcagctgcttagatttagaaatctactcttgctggtctttgtaagttgcatgaatatttgactttgaaaaaatatcttaacgacatggggcaaaaagtgcaatctaaatggtagcctttactaatgtgtgtggaaagaggtgttcctcattatctaatatttcaatgtgttaagagtttaatttttttgttatcattaaaaaagacaggattataaagagatatcaaagcacgattttagataacctaaacggcccagcctatacgaagttgattatatctcgatgtctgtaaaagattgctgttcttggagtcttgaggtcttgtgaattgatttcctgctttctttcatttttttcaatttaagtaataatacatttgttatattcctttcagtgtaagtttctatttggacaattttatgggaacatgtgcattctctatgtgagcttctatcatattcctgttttattagcagaacctaaaggaatttatttaatgatgttgtgacattactgctttttcttttttcttttcttagttcatatttgcattttcgttcaaggatatgcttagcaataaaatgttcttcccaa

SEQ ID NO: 19867 - DNA, 4156 bp, Homo sapiens
  source 1..4156: mol_type = unassigned DNA
caggactggagggcttgaggaatgtggtggtccctctcttcgttgtttctgccccctgaggttgtgctttctcagggatatgcactctgcacttccattcctgcagtgaaattaactcgagcttggcagctcgagaggagaatgtggccactttccgaggctcagagtatctgtgctacgacctgtctcagaacccgatccagagcagcagtgatgaaatcaccctctcctttaagacctggcagcgtaacggcctcatcctgcacacgggcaagtcggctgactatgtcaacctggctctgaaggatggtgcggtctccttggtcattaacctggggtccggggcctttgaggccattgtggagccagtgaatggaaaattcaacgacaacgcctggcatgatgtcaaagtgacacgcaacctccggcaggtgacaatctctgtggatggcattcttaccacgacgggctacactcaagaggactataccatgctgggctcggacgacttcttctatgtaggaggaagcccaagtaccgctgacttgcctggctcccctgtcagcaacaacttcatgggctgccttaaagaggttgtttataagaataatgacatccgtctggagctgtctcgcctggcccggattgcggacaccaagatgaaaatctatggcgaagttgtgtttaagtgtgagaatgtggccacactggaccccatcaactttgagaccccagaggcttacatcagcttgcccaagtggaacactaaacgtatgggctccatctcctttgacttccgcaccacagagcccaatggcctgatcctcttcactcatggaaagccccaagagaggaaggatgctcggagccagaagaatacaaaagtagacttctttgccgtggaactcctcgatggcaacctgtacttgctgcttgacatgggctctggcaccatcaaagtgaaagccactcagaagaaagccaatgatggggaatggtaccatgtggacattcagcgagatggcagatcaggtactatatcagtgaacagcaggcgcacgccattcaccgccagtggggagagcgagatcctggacctggaaggagacatgtacctgggagggctgccggagaaccgtgctggccttattctccccaccgagctgtggactgccatgctcaactatggctacgtgggctgcatccgcgacctattcattgatgggcgcagcaagaacattcgacagctggcagagatgcagaatgctgcgggtgtcaagtcctcctgttcacggatgagtgccaagcagtgtgacagctacccctgcaagaataatgctgtgtgcaaggacggctggaaccgcttcatctgcgactgcaccggcaccggatactggggaagaacctgcgaaagggaggcatccatcctgagctatgatggtagcatgtacatgaagatcatcatgcccatggtcatgcatactgaggcagaggatgtgtccttccgcttcatgtcccagcgagcttatgggctgctggtggctacgacctccagggactctgccgacaccctgcgtctggagctggatggggggcgtgtcaagctcatggttaacttagactgtatcaggataaactgtaactccagcaaaggaccagagaccttgtatgcagggcagaagctcaatgacaacgagtggcacaccgttcgggtggtgcggagaggaaaaagccttaagttaaccgtggatgatgatgtggctgagggtacaatggtgggagaccatacccgtttggagttccacaacattgaaacgggaatcatgactgagaaacgctacatctccgttgtcccctccagctttattggccatctgcagagcctcatgtttaatggccttctctacattgacttgtgcaaaaatggtgacattgattattgtgagctgaaggctcgttttggactgaggaacatcatcgctgaccctgtcacctttaagaccaagagcagctacctgagccttgccactcttcaggcttacacctccatgcacctcttcttccagttcaagaccacctcaccagatggcttcattctcttcaatagtggtgatggcaatgacttcattgcagtcgagcttgtcaaggggtatatacactacgtttttgacctcggaaacggtcccaatgtgatcaaaggcaacagtgaccgccccctgaatgacaaccagtggcacaatgtcgtcatcactcgggacaatagtaacactcatagcctgaaagtggacaccaaagtggtcactcaggttatcaatggtgccaaaaatctggatttgaaaggtgatctctatatggctggtctggcccaaggcatgtacagcaacctcccaaagctcgtggcctctcgagatggctttcagggctgtctagcatcagtggacttgaatggacgcctgccagacctcatcaatgatgctcttcatcggagcggacagatcgagcgtggctgtgaaggacccagtaccacctgccaggaagattcatgtgccaaccagggggtctgcatgcaacaatgggagggcttcacctgtgattgttctatgacctcttattctggaaaccagtgcaatgatcctggcgctacgtacatctttgggaaaagtggtgggcttatcctctacacctggccagccaatgacaggcccagcacgcggtctgaccgccttgccgtgggcttcagcaccactgtgaaggatggcatcttggtccgcatcgacagtgctccaggacttggtgacttcctccagcttcacatagaacaggggaaaattggagttgtcttcaacattggcacagttgacatctccatcaaagaggagagaacccctgtaaatgacggcaaataccatgtggtacgcttcaccaggaacggcggcaacgccaccctgcaggtggacaactggccagtgaatgaacattatcctacaggccggcagttaaccatcttcaacactcaggcgcaaatagccattggtggaaaggacaaaggacgcctcttccaaggccaactctctgggctctattatgatggtttgaaagtactgaacatggcggctgagaacaaccccaatattaaaatcaatggaagtgttcggctggttggagaagtcccatcaattttgggaacaacacagacgacctccatgccaccagaaatgtctactactgtcatggaaaccactactacaatggcgactaccacaacccgtaagaatcgctctacagccagcattcagccaacatcagatgatcttgtttcatctgctgaatgttcaagtgatgatgaagactttgttgaatgtgagccgagtacagcaaaccccacggagccgggaatcagacgggttccgggggcctcagaggtgatccgggagtcgagcagcacaacagggatggtcgtcggcattgtggctgctgccgccctctgcatcttgatcctcctgtacgccatgtacaagtacaggaacagggacgaggggtcctatcaagtggacgagacgcggaactacatcagcaactccgcccagagcaacggcacgctcatgaaggagaagcagcagagctcgaagagcggccacaagaaacagaaaaacaaggacagggagtattacgtgtaaacatgcgaacactgctcacacgcgagttttcacagttatttctatccacgcctatgaatctttggacggtgagatctcacagatgtcagaactgctggaactatgaaatggggtatataaccacgactctggtggggaaaaccgttttttaaaggacacacacacacacagcgatgcatctctctctaaagctcagccacggctgcggcaaggtcccagcggtcgctgggagacagaaggttttgtgccctgctgtatcataaagcacacacttagcgctctggagccggacggtggctccaccacttccgcaggcctggaaacttccttctccggaggaccttttactaaaaggtagaagacttcatggcttacttgttccataactccaagtgagtctgtaatgtttgtgaagcttgactgtaaccatgttttttctgtttaattatgtaaaaaacaaaactacaacaacaaaaaaa

SEQ ID NO: 19868 - DNA, 3381 bp, Homo sapiens
  source 1..3381: mol_type = unassigned DNA
atatgacttgcccatttgtgaatttggctccccaactcctcgcttcacttcacctgtgcctccctggtccgcgcacttcgcaggcgcccgcccgcctctcggccacctctgcagcctgccaggcacctcctcttgcgctctcgctgatttcgcccacccacctccctccaccccgtgccacgttggtttgggtggctgctccgcaccgggttcctcctcctctcctctttccctccagtccttcttattctcttcctctggctgcggtggctgctgctgctgctggttttcatccagttgggaaacccaggaagccggcggctgctccgtggcgctagtccagcacgcccagggttaaaagcctcgcgcccttccgcggagactcccaggaacacccgaagaactcttccacctgcagcccccttttgcctggcagttctgcattgcatctcatggaagtggaaacaggaaaataaaaatgttcaaactccttggatgttgggataaactcacctgaacccacttgggttcgggctgcctccttctcttccttcattgccacctttcctctgtgtggctcccgggagtgtgcggttaagtcatcagactcgaagtgcctagagatccggaggaagccgcgccggtcttcccctgacatgcgtggcatgccggggctccgtaggaggtttgctatacctgggaggaccctggcattctaaatttcagctccgggaaagagaaggggctttttgccttttatcttttttttttctttctttaagtagtaattttttaactgattcattgtttggaaagcgcatattgcttccctcttccccgaattctggcaactcttcctcctgctatgatgggcccttgggcatcatgaacttcattactcctcactggctggaattcaaactgcccatctgtagtggtcccgtgcgttgaccatgcacctgagaatccacgcgagacggagccctcctcgccggccggcctggacgcttgggatctggttcctgttctggggatgtatcgtcagctctgtatggagttcttctaatgtagcttcctcctcctccacctcttcctcgccggggtctcactctcagcacgagcaccatttccatggcagcaagcatcactcagtgcctatttctatctatcgttcccctgtttcccttcgaggaggacacgctggcgctacgtacatctttgggaaaagtggtgggcttatcctctacacctggccagccaatgacaggcccagcacgcggtctgaccgccttgccgtgggcttcagcaccactgtgaaggatggcatcttggtccgcatcgacagtgctccaggacttggtgacttcctccagcttcacatagaacaggggaaaattggagttgtcttcaacattggcacagttgacatctccatcaaagaggagagaacccctgtaaatgacggcaaataccatgtggtacgcttcaccaggaacggcggcaacgccaccctgcaggtggacaactggccagtgaatgaacattatcctacaggccggcagttaaccatcttcaacactcaggcgcaaatagccattggtggaaaggacaaaggacgcctcttccaaggccaactctctgggctctattatgatggtttgaaagtactgaacatggcggctgagaacaaccccaatattaaaatcaatggaagtgttcggctggttggagaagtcccatcaattttgggaacaacacagacgacctccatgccaccagaaatgtctactactgtcatggaaaccactactacaatggcgactaccacaacccgtaagaatcgctctacagccagcattcagccaacatcagatgatcttgtttcatctgctgaatgttcaagtgatgatgaagactttgttgaatgtgagccgagtacaggaggtgaattagttatccctcttcttgtagaagaccctttagctacccctcctattgctactcgtgcaccttccattacactcccccctacctttcgccccctcctcaccattattgagaccaccaaagattccctgtccatgacctctgaggcggggttaccttgcttgtcggaccaaggcagcgatggttgtgatgatgatggcttggtgatatctgggtatggctcaggggaaacctttgactctaacctgccccctactgatgatgaagatttttacaccaccttctccttggtaacagataagagtctttccacttcaatcttcgaaggtggctacaaagcacatgcgcccaagtgggaatccaaggactttagacctaacaaagtctccgaaactagtaggactactaccacatctttatcccctgagctgatccgcttcacagcttcctcctcgtctgggatggtgcccaaattgccagctggcaaaatgaataaccgtgatctcaaaccccagcctgatatagtcttgcttccgttgcccactgcctatgagctagacagcaccaaactgaagagcccactaattacttcccccatgttccgtaatgtgcccacagcaaaccccacggagccgggaatcagacgggttccgggggcctcagaggtgatccgggagtcgagcagcacaacagggatggtcgtcggcattgtggctgctgccgccctctgcatcttgatcctcctgtacgccatgtacaagtacaggaacagggacgaggggtcctatcaagtggacgagacgcggaactacatcagcaactccgcccagagcaacggcacgctcatgaaggagaagcagcagagctcgaagagcggccacaagaaacagaaaaacaaggacagggagtattacgtgtaaacatgcgaacactgctcacacgcgagttttcacagttatttctatccacgcctatgaatctttggacggtgagatctcacagatgtcagaactgctggaactatgaaatggggtatataaccacgactctggtggggaaaaccgttttttaaaggacacacacacacacagcgatgcatctctctctaaagctcagccacggctgcggcaaggtcccagcggtcgctgggagacagaaggttttgtgccctgctgtatcataaagcacacacttagcgctctggagccggacggtggctccaccacttccgcaggcctggaaacttccttctccggaggaccttttactaaaaggtagaagacttcatggcttacttgttccataactccaagtgagtctgtaatgtttgtgaagcttgactgtaaccatgttttttctgtttaattatgtaaaaaacaaaactacaacaacaaaaaaagaaaaaagttaaaaaagaaaaaaacaccaaaaaac

SEQ ID NO: 19869 - DNA, 1624 bp, Homo sapiens
  source 1..1624: mol_type = unassigned DNA
ccccctcagcctctctctctctctctctttctctctctctctctctttctgtctcttcctcgctccctctctttctctcctccctctgccttcccagtgcataaagtctctgtcgctcccggaacttgttggcaatgcctattttttggctttcccccgcgttctctaaactaactatttaaaggtctgcggtcgcaaatggtttgactaaacgtaggatgggacttaagttgaacggcagatatatttcactgatcctcgcggtgcaaatagcgtatctggtgcaggccgtgagagcagcgggcaagtgcgatgcggtcttcaagggcttttcggactgtttgctcaagctgggcgacagcatggccaactacccgcagggcctggacgacaagacgaacatcaagaccgtgtgcacatactgggaggatttccacagctgcacggtcacagcccttacggattgccaggaaggggcgaaagatatgtgggataaactgagaaaagaatccaaaaacctcaacatccaaggcagcttattcgaactctgcggcagcggcaacggggcggcggggtccctgctcccggcgttcccggtgctcctggtgtctctctcggcagctttagcgacctggctttccttctgagcgtggggccagctccccccgcgcgcccacccacactcactccatgctcccggaaatcgagaggaagatccattagttctttggggacgttgtgattctctgtgatgctgaaaacactcatataggattgtgggaaatcctgattctcttttttatttcgtttgatttcttgtgttttatttgccaaatgttaccaatcagtgagcaagcaagcacagccaaaatcggacctcagctttagtccgtcttcacacacaaataagaaaacggcaaacccaccccattttttaattttattattattaattttttttgttggcaaaagaatctcaggaacggccctgggccacctactatattaatcatgctagtaacatgaaaaatgatgggctcctcctaataggaaggcgaggagaggagaaggccaggggaatgaattcaagagagatgtccacggacgaaacatacggtgaataattcacgctcacgtcgttcttccacagtatcttgttttgatcatttccactgcacatttctcctcaagaaaagcgaaaggacagactgttggctttgtgtttggaggataggagggagagagggaaggggctgaggaaatctctggggtaagagtaaaggcttccagaagacatgctgctatggtcactgaggggttagctttatctgctgttgttgatgcatccgtccaagttcactgcctttattttccctcctccctcttgttttagctgttacacacacagtaatacctgaatatccaacggtatagatcacaagggggggatgttaaatgttaatctaaaatatagctaaaaaaagattttgacataaaagagccttgattttaaaaaaaaaagagagagagatgtaatttaaaaagtttattataaattaaattcagcaaaaaaagatttgctacaaagtatagagaagtataaaataaaagttattgtttgaaa

SEQ ID NO: 19870 - DNA, 10791 bp, Homo sapiens
  source 1..10791: mol_type = unassigned DNA
gcggcgtcggggcttcacaacaacagtggtggccgtagcagcggccgggccgggctgaggcgcaggcggggagcgggcccggcgccgcggcgctggtggatgctggggctccgaggcgacggccggggggcgggggccgaggcaggtataacggtaccggcggcggcagcgccgctgctcttcccttctcctcaggaggggggccaatggctagcgagaagccgggcccgggcccggggctcgagcctcagcccgtggggctcattgccgtcggggccgctggcggaggcggcgggggcagcggtggtggcggcaccgggggcagcgggatgggggagctaaggggggcgtccggctccggctcggtgatgctccccgcggggatgattaacccttcggtgccgatccgcaacatccggatgaaattcgcagtgttgattggactcatacaggtcggagaggtcagcaacagggacatcgtggagacggtgctcaacctgctggttggtggagaatttgacttggagatgaactttattatccaggatgctgagagtataacatgtatgacagagcttttggagcactgtgatgtaacatgtcaagcagaaatatggagcatgtttacagccattctacgaaaaagtgttcggaatttacagactagcacagaagttgggctaattgaacaagtattgctgaaaatgagtgctgtagatgacatgatagcagatcttctagttgatatgttgggggttcttgccagctacagcatcactgtcaaggagttgaagcttttgttcagcatgcttcgaggagaaagtggaatctggccaagacatgcagtaaaattattatcagttcttaatcagatgccacagagacacggtcctgatacttttttcaatttccctggttgtagcgctgcggcaattgccttgcctcctattgcaaagtggccttatcagaatggcttcaccttaaacacttggtttcgtatggatccattaaataatattaatgttgataaggataaaccttatctttattgttttcgtactagcaaaggagttggttactctgctcattttgttggcaactgtttaatagtcacatcattgaagtccaaaggaaaaggttttcagcattgtgtgaaatatgattttcaaccacgcaagtggtacatgatcagcattgtccacatttacaatcgatggaggaacagtgaaattcggtgttatgttaatggacaactggtatcttatggtgatatggcttggcatgttaacacaaatgatagctatgacaagtgctttcttggatcatcagaaactgctgatgcaaatagggtattctgtggtcaacttggtgccgtgtatgtgttcagtgaagcactcaacccagcacagatatttgcaattcatcagttaggacctggatataagagtaccttcaagtttaaatctgagagtgatattcatttggcagaacatcataaacaggtgttatatgatgggaaacttgcaagtagcattgcctttacatataatgctaaggccactgatgctcagctctgcctggaatcatcaccaaaagagaatgcatcaatttttgtgcattccccacatgctctaatgcttcaggatgtgaaagcgatagtaacacattcaattcatagtgcaattcattcaattggagggattcaagtgctttttccactttttgcccaattggataataggcagctcaatgacagtcaagtggaaacaactgtctgtgctactctgttggcattcctggttgaactacttaaaagttcagtagccatgcaagaacagatgctgggtggaaaaggctttttagtcattggctacttacttgaaaagtcatcaagagttcatataactagagctgtcctggagcaatttttatcttttgcaaaataccttgatggtttatctcatggagcacctttgctgaagcagctttgtgatcacattttatttaacccagccatctggatacatacacctgcaaaggttcagctttccctatacacatatttgtctgctgaatttattggaactgctaccatctacaccaccatacgcagagtaggaacagtattacagctaatgcacaccttaaaatattactactgggttattaatcctgctgacagtagtggcattacacctaaaggattagatggtccccggccatcacaaaaagaaattatatcactgagggcatttatgctactttttctgaaacagctgatactaaaggatcgaggggtcaaggaagatgaacttcagagtatattaaattacctacttacgatgcatgaggatgaaaatattcatgatgtgctacagttactggtggctttaatgtcggaacacccagcctcaatgataccagcatttgatcaaagaaatggaataagggtgatctacaaattattggcttctaaaagtgaaagtatttgggttcaagctttgaaggttctgggatactttctgaagcatttaggtcacaagagaaaagttgaaattatgcacacccatagtcttttcactcttcttggagaaaggctgatgttgcatacaaacactgtgactgtcaccacatacaacacactttatgagatcttgacagaacaagtatgtactcaggtcgtacacaaaccacatccagagccagattctacagtgaaaattcagaatccaatgattcttaaagtggtggcaactttgttaaaaaactctacaccaagtgcagagctgatggaagttcgtcgtttatttttatctgatatgataaaacttttcagtaacagccgtgaaaatagaagatgcttattgcagtgttcagtgtggcaggattggatgttttctcttggctatatcaatcctaaaaattctgaggaacagaagattaccgaaatggtctacaatatcttccggattcttttgtatcatgcaataaaatatgaatggggaggctggagagtctgggtggataccctctcaatagcccattccaaggtcacttatgaagctcataaggaatacctagccaaaatgtatgaggaatatcaaagacaagaggaggaaaacattaaaaagggaaagaaagggaatgtgagcaccatctctggtctttcatcacagacaacaggagcaaaaggtggaatggaaattcgagagatagaagatctttcacaaagccagagcccagaaagtgagaccgattaccctgtcagcacagatactcgagacttactcatgtcaacaaaagtgtcagatgatattcttggaaattcagatagaccaggaagtggtgtacatgtggaagtacatgatcttttagtagatataaaagcagagaaagtggaagcaacagaagtaaagctcgatgatatggatttatcaccggagactttagtaggtggagagaatggtgcccttgtggaggttgaatctctgttggataatgtatatagtgctgctgttgagaaactccagaacaatgtacatggaagtgttggtatcattaaaaaaaatgaagaaaaggataatggtccattgataacattagcagatgagaaagaagaccttcccaatagtagtacatcatttctctttgataaaatacccaaacaggaggaaaaactacttcctgaactttctagcaatcacattattccaaatattcaggacacacaagtacatcttggtgttagtgatgatcttggattgcttgctcacatgaccggtagcgtagacttaacttgtacatccagtataatagaagaaaaagaattcaaaatccatacaacttcagatggaatgagcagtatttctgaaagagacttagcgtcatcaactaaggggctggagtatgctgaaatgactgctacaactctggaaactgagtcttctagtagcaaaattgtaccaaatattgatgcaggaagtataatttcagatactgaaaggtctgacgatggcaaagaatcaggaaaagaaatccgaaaaatccaaacaactactacgacacaagctgtgcagggtcggtctatcacccaacaagaccgagatctccgagttgatttaggatttcgaggaatgccaatgactgaggaacagcgacgccagtttagcccaggtccacggactacaatgtttcgtattcctgagtttaaatggtctccaatgcaccagcggcttctcactgatttactatttgcattagaaactgatgtacatgtttggaggagccattctacaaagtctgtaatggattttgtcaatagcaatgaaaatattatttttgtacataacacaattcacctcatttcccaaatggtagacaacatcatcattgcttgtggaggaattttacctttgctctctgctgctacatcaccaactgtaagtaaaacggaattggaaaatattgaagtgacacaaggcatgtcagctgagacagcagtaactttcctcagccggctgatggctatggttgatgtacttgtgtttgcaagctctctaaattttagtgagattgaagctgagaaaaacatgtcttctggaggtttaatgcgacagtgcctaagattagtttgttgtgttgctgtgagaaactgtttagaatgtcggcaaagacagagagacaggggaaataaatcttcccatggaagcagtaaacctcaggaagttcctcaaagtgtgactgctacagcagcttcgaagactccattggaaaatgttccaggtaacctttctcctattaaggatccggatagacttcttcaggatgttgatatcaatcgccttcgtgctgttgtctttcgggatgtggatgatagcaaacaagcacagttcttagctctggctgttgtttacttcatttcggttctgatggtttccaagtatcgtgacatattagaaccccagagagagactacaagaactggaagccaaccaggtagaaacatcaggcaagaaataaattcaccaacaagtacagttgtggtcataccatctatccctcatccaagtttgaaccatggattccttgccaagttaattcctgagcagagctttggccactcattttacaaagaaacacctgctgcatttccagacaccataaaagaaaaagaaacaccaactcctggtgaagatattcaggtagaaagttcaattccccatacagattcaggaattggagaggagcaagtggctagcatcctgaatggggcagaattagaaacaagtacaggccctgatgccatgagtgaactcttatccactttgtcatccgaagtgaagaaatcacaagagagcttaactgaaaatcctagtgaaacgttgaagcctgcaacatccatatctagcattagtcaaaccaaaggcatcaatgtgaaggaaatactgaaaagtcttgtggctgctccagttgaaatagcagaatgtggccctgaacctatcccatacccagatccagcattgaagagagaaacacaagctattcttcctatgcagtttcattcctttgacaggagtgttgtggtgcctgtaaagaaaccacctccaggtagtttagctgtaaccactgtgggagccactactgctggaagtgggctgccaacaggcagtacctctaatatatttgctgctactggagctacaccaaaaagtatgattaatacaacaggtgccgtggattcagggtcctcctcctcttcctcctcttctagttttgtgaatggtgctactagcaaaaaccttccagctgtacaaactgttgctccaatgccagaagattcagctgaaaatatgagcatcactgcaaaacttgaaagagcgttagaaaaagttgctcctcttcttcgtgaaatttttgtagactttgccccattcctatctcgtacacttcttggcagtcatggacaagagctattgatagaaggccttgtttgtatgaagtccagcacatctgtggttgagcttgttatgctgctttgttctcaggaatggcaaaactctattcagaagaatgcaggacttgcatttattgagctcatcaatgaaggaagattactgtgccatgctatgaaggaccatatagtccgtgttgcaaatgaagctgagtttattttgaacagacaaagagccgaggatgtacataaacatgcagagtttgagtcacagtgtgcccaatatgctgctgatagaagagaggaagaaaagatgtgtgaccatcttatcagtgctgctaaacatcgagatcatgtaacagcaaatcagctgaaacagaagattctcaatattctcacaaataaacatggtgcttggggagcagtttctcatagccaattgcatgatttctggcgtttggattactgggaagatgatcttcgtcgaaggagacgatttgttcgcaatgcatttggctccactcatgctgaagcattgctgaaagctgcaatagaatatggcacggaagaagatgtagtaaagtcaaagaaaacattcagaagtcaagcaatagtgaaccaaaatgcagagacagaacttatgctggaaggagacgatgatgcagtcagtctgctacaggagaaagaaattgacaaccttgcaggcccagtggttctcagcacccctgcccagctcatcgctcccgtggtggtggccaaggggactctctccatcaccacgacagaaatctacttcgaggtagatgaggatgattctgccttcaagaagatcgacacgaaagttcttgcatacactgagggacttcacggaaaatggatgttcagcgagatacgagctgtattttcaagacgttaccttctacaaaacactgctttggaagtatttatggcaaaccgaacctcagttatgtttaatttccctgatcaagcaacagtaaaaaaagttgtctatagcttgcctcgggttggagtagggaccagctatggtctgccacaagccaggaggatatcattggccactcctcgacagctttataaatcttccaatatgactcagcgctggcaaagaagggaaatttcaaacttcgaatatttgatgttccttaatactattgcaggacggacatataatgatctgaaccaatatccagtgtttccgtgggtgttaaccaactatgaatcagaagagttggacctgactcttccaggaaacttcagggatctatcaaagccaattggtgctttgaaccccaagagagctgtgttttatgcagagcgttatgagacatgggaagatgatcaaagcccaccctaccattataatacccattattcaacagcaacatctactttatcctggcttgttcgaattgaacctttcacaaccttcttcctcaatgcaaatgatggaaaatttgatcatccagatcgaaccttctcatccgttgcaaggtcttggagaactagtcagagagatacttctgatgtaaaggaactaattccagagttctactacctaccagagatgtttgtcaacagtaatggatataatcttggagtcagagaagatgaagtagtggtaaatgatgttgatcttcccccttgggcaaaaaaacctgaagactttgtgcggatcaacaggatggccctagaaagtgaatttgtttcttgccaacttcatcagtggatcgaccttatatttggctataagcagcgaggaccagaagcagttcgtgctctgaatgtttttcactacttgacttatgaaggctctgtgaacctggatagtatcactgatcctgtgctcagggaggccatggaggcacagatacagaactttggacagacgccatctcagttgcttattgagccacatccgcctcggagctctgccatgcacctgtgtttccttccacagagtccgctcatgtttaaagatcagatgcaacaggatgtgataatggtgctgaagtttccttcaaattctccagtaacccatgtggcagccaacactctgccccacttgaccatccccgcagtggtgacagtgacttgcagccgactctttgcagtgaatagatggcacaacacagtaggcctcagaggagctccaggatactccttggatcaagcccaccatcttcccattgaaatggatccattaatagccaataattcaggtgtaaacaaacggcagatcacagacctcgttgaccagagtatacaaatcaatgcacattgttttgtggtaacagcagataatcgctatattcttatctgtggattctgggataagagcttcagagtttattctacagaaacagggaaattgactcagattgtatttggccattgggatgtggtcacttgcttggccaggtccgagtcatacattggtggggactgctacatcgtgtccggatctcgagatgccaccctgctgctctggtactggagtgggcggcaccatatcataggagacaaccctaacagcagtgactatccggcaccaagagccgtcctcacaggccatgaccatgaagttgtctgtgtttctgtctgtgcagaacttgggcttgttatcagtggtgctaaagagggcccttgccttgtccacaccatcactggagatttgctgagagcccttgaaggaccagaaaactgcttattcccacgcttgatatctgtctccagcgaaggccactgtatcatatactatgaacgagggcgattcagtaatttcagcattaatgggaaacttttggctcaaatggagatcaatgattcaacacgggccattctcctgagcagtgacggccagaacctggtcaccggaggggacaatggggtagtagaggtctggcaggcctgtgacttcaagcaactgtacatttaccctggatgtgatgctggcattagagcaatggacttgtcccatgaccagaggactctgatcactggcatggcttctggtagcattgtagcttttaatatagattttaatcggtggcattatgagcatcagaacagatactgaagataaaggaagaaccaaaagccaagttaaagctgagagcacaagtgctgcatggaaaggcaatatctctggtggaaaaaactcgtctacatcgacctccgtttgtacattccatcacacccagcaatagctgtacattgtagtcagcaaccattttactttgtgtgttttttcacgactgaacaccagctgctatcaagcaagcttatatcatgtaaattatatgaattaggagatgttttggtaattatttcatatattgttgtttattgagaaaaggttgtaggatgtgtcacaagagacttttgacaattctgaggaaccttgtgtccagttgttacaaagtttaagctttgaacctaacctgcatcccatttccagcctcttttcaagctgagaaaaaaaaaaaaaaacacgtttgatactttgtacatcagatgcatcttatttaaaagggatacttttgtaaaagtaaaaccttgtataaagaacaaaatgtttcttaattttattgtggagttacaacttgcatgttccttactcctgttggcttgatggaacaggtgcattcacactatgaaacagaaagatctgtccaaggacacagcttgtatgaaagggttgaatttgggctccatcagtaatttttgacattttcaccaaaatatagtttgcactttttaatctaaagtcatcccttctgagtgaaatttgctcataaagcatttggatactaagccattatttgccattttgggtactttatacaaagaaaattcagccctaccctgcataatttgaagacacagcagaaagggggcttagggatgaggtcctggtttttcttgtataaataggagtcatgggcgttagttctgtagtaataacttcccagcacctggacatctcttccagagttatcccactggcttggtgtgtatacattaggggaggataatctgatgctaactttttttttctctttggttcttgaatagcttagtttctttaataacaagtcaaactttattacaacaataactgaagttattcttttaggttctcgtgaaattctcactgaaagccacattcttagcctaaggcatttcatcttttatgatataaaatgatggctatcaaatgattttccatacattgtactgatcaagttatacacccaggggtatatacactttcttcatgtttcttctttgtatatttggtgactgtatcgtcatagatgtacatattgtgtcggtagggctatgaggcatgttacaggaatgtaattttctcagaatttacactcactcgcagtcatttatttaaaaagataaaacaagataatgggttctttgtattggcactttgcaccagaaacatatcattatttattgatgtgattacttatttgttatccaccttgtactagtaagttttagcactgaattccttcttcactgttgtttgtatttatgaaattctgaaattatggggaatcagcgtaatgattaagttattcatcaccaggctgtaagcaatatcttgagtttgtagcttagaattgggaggatacttaacatctggaagacaagttcatttcatcttgagatcatggtgaaatattttggatatataaattccttaagctattgtaaccatgttttattgcaaagatgtaaaatatgccagatgtgtgtgagttggaaatcaaaaaaagaaaaataaaatatgcaaagaattc

SEQ ID NO: 19871 - DNA, 3794 bp, Homo sapiens
  source 1..3794: mol_type = unassigned DNA
attcgaaagaaaaatccaacttatgaattgtcattaatgcaaaattatttatcagaaaatcgtagagcactggaaccccatcatttcacagatgagaagaccagaagcaaaatgacctgccagagttgcagactgacaactgctgccttggcctagtcaagcccagacaggcatctcctactgccttaatttgggggcatctttctaggaccctgatctgcctccacatcttgaaggattttcaagatagccatgtttcacaaaggaacgagggcagctgtgtttagagtggtcaaatttctgattctgtttttttgcttaggaacctttcacaaccttcttcctcaatgcaaatgatggaaaatttgatcatccagatcgaaccttctcatccgttgcaaggtcttggagaactagtcagagagatacttctgatgtaaaggaactaattccagagttctactacctaccagagatgtttgtcaacagtaatggatataatcttggagtcagagaagatgaagtagtggtaaatgatgttgatcttcccccttgggcaaaaaaacctgaagactttgtgcggatcaacaggatggccctagaaagtgaatttgtttcttgccaacttcatcagtggatcgaccttatatttggctataagcagcgaggaccagaagcagttcgtgctctgaatgtttttcactacttgacttatgaaggctctgtgaacctggatagtatcactgatcctgtgctcagggagattccagaagcttatttcattagagacccccacactttccttcttacaaaggactttattaaggccatggaggcacagatacagaactttggacagacgccatctcagttgcttattgagccacatccgcctcggagctctgccatgcacctgtgtttccttccacagagtccgctcatgtttaaagatcagatgcaacaggatgtgataatggtgctgaagtttccttcaaattctccagtaacccatgtggcagccaacactctgccccacttgaccatccccgcagtggtgacagtgacttgcagccgactctttgcagtgaatagatggcacaacacagtaggcctcagaggagctccaggatactccttggatcaagcccaccatcttcccattgaaatggatccattaatagccaataattcaggtgtaaacaaacggcagatcacagacctcgttgaccagagtatacaaatcaatgcacattgttttgtggtaacagcagataatcgctatattcttatctgtggattctgggataagagcttcagagtttattctacagaaacagggaaattgactcagattgtatttggccattgggatgtggtcacttgcttggccaggtccgagtcatacattggtggggactgctacatcgtgtccggatctcgagatgccaccctgctgctctggtactggagtgggcggcaccatatcataggagacaaccctaacagcagtgactatccggcaccaagagccgtcctcacaggccatgaccatgaagttgtctgtgtttctgtctgtgcagaacttgggcttgttatcagtggtgctaaagagggcccttgccttgtccacaccatcactggagatttgctgagagcccttgaaggaccagaaaactgcttattcccacgcttgatatctgtctccagcgaaggccactgtatcatatactatgaacgagggcgattcagtaatttcagcattaatgggaaacttttggctcaaatggagatcaatgattcaacacgggccattctcctgagcagtgacggccagaacctggtcaccggaggggacaatggggtagtagaggtctggcaggcctgtgacttcaagcaactgtacatttaccctggatgtgatgctggcattagagcaatggacttgtcccatgaccagaggactctgatcactggcatggcttctggtagcattgtagcttttaatatagattttaatcggtggcattatgagcatcagaacagatactgaagataaaggaagaaccaaaagccaagttaaagctgagagcacaagtgctgcatggaaaggcaatatctctggtggaaaaaactcgtctacatcgacctccgtttgtacattccatcacacccagcaatagctgtacattgtagtcagcaaccattttactttgtgtgttttttcacgactgaacaccagctgctatcaagcaagcttatatcatgtaaattatatgaattaggagatgttttggtaattatttcatatattgttgtttattgagaaaaggttgtaggatgtgtcacaagagacttttgacaattctgaggaaccttgtgtccagttgttacaaagtttaagctttgaacctaacctgcatcccatttccagcctcttttcaagctgagaaaaaaaaaaaaaaacacgtttgatactttgtacatcagatgcatcttatttaaaagggatacttttgtaaaagtaaaaccttgtataaagaacaaaatgtttcttaattttattgtggagttacaacttgcatgttccttactcctgttggcttgatggaacaggtgcattcacactatgaaacagaaagatctgtccaaggacacagcttgtatgaaagggttgaatttgggctccatcagtaatttttgacattttcaccaaaatatagtttgcactttttaatctaaagtcatcccttctgagtgaaatttgctcataaagcatttggatactaagccattatttgccattttgggtactttatacaaagaaaattcagccctaccctgcataatttgaagacacagcagaaagggggcttagggatgaggtcctggtttttcttgtataaataggagtcatgggcgttagttctgtagtaataacttcccagcacctggacatctcttccagagttatcccactggcttggtgtgtatacattaggggaggataatctgatgctaactttttttttctctttggttcttgaatagcttagtttctttaataacaagtcaaactttattacaacaataactgaagttattcttttaggttctcgtgaaattctcactgaaagccacattcttagcctaaggcatttcatcttttatgatataaaatgatggctatcaaatgattttccatacattgtactgatcaagttatacacccaggggtatatacactttcttcatgtttcttctttgtatatttggtgactgtatcgtcatagatgtacatattgtgtcggtagggctatgaggcatgttacaggaatgtaattttctcagaatttacactcactcgcagtcatttatttaaaaagataaaacaagataatgggttctttgtattggcactttgcaccagaaacatatcattatttattgatgtgattacttatttgttatccaccttgtactagtaagttttagcactgaattccttcttcactgttgtttgtatttatgaaattctgaaattatggggaatcagcgtaatgattaagttattcatcaccaggctgtaagcaatatcttgagtttgtagcttagaattgggaggatacttaacatctggaagacaagttcatttcatcttgagatcatggtgaaatattttggatatataaattccttaagctattgtaaccatgttttattgcaaagatgtaaaatatgccagatgtgtgtgagttggaaatcaaaaaaagaaaaataaaatatgcaaagaattc

SEQ ID NO: 19872 - DNA, 10783 bp, Homo sapiens
  source 1..10783: mol_type = unassigned DNA
gcggcgtcggggcttcacaacaacagtggtggccgtagcagcggccgggccgggctgaggcgcaggcggggagcgggcccggcgccgcggcgctggtggatgctggggctccgaggcgacggccggggggcgggggccgaggcaggtataacggtaccggcggcggcagcgccgctgctcttcccttctcctcaggaggggggccaatggctagcgagaagccgggcccgggcccggggctcgagcctcagcccgtggggctcattgccgtcggggccgctggcggaggcggcgggggcagcggtggtggcggcaccgggggcagcgggatgggggagctaaggggggcgtccggctccggctcggtgatgctccccgcggggatgattaacccttcggtgccgatccgcaacatccggatgaaattcgcagtgttgattggactcatacaggtcggagaggtcagcaacagggacatcgtggagacggtgctcaacctgctggttggtggagaatttgacttggagatgaactttattatccaggatgctgagagtataacatgtatgacagagcttttggagcactgtgatgtaacatgtcaagcagaaatatggagcatgtttacagccattctacgaaaaagtgttcggaatttacagactagcacagaagttgggctaattgaacaagtattgctgaaaatgagtgctgtagatgacatgatagcagatcttctagttgatatgttgggggttcttgccagctacagcatcactgtcaaggagttgaagcttttgttcagcatgcttcgaggagaaagtggaatctggccaagacatgcagtaaaattattatcagttcttaatcagatgccacagagacacggtcctgatacttttttcaatttccctggttgtagcgctgcggcaattgccttgcctcctattgcaaagtggccttatcagaatggcttcaccttaaacacttggtttcgtatggatccattaaataatattaatgttgataaggataaaccttatctttattgttttcgtactagcaaaggagttggttactctgctcattttgttggcaactgtttaatagtcacatcattgaagtccaaaggaaaaggttttcagcattgtgtgaaatatgattttcaaccacgcaagtggtacatgatcagcattgtccacatttacaatcgatggaggaacagtgaaattcggtgttatgttaatggacaactggtatcttatggtgatatggcttggcatgttaacacaaatgatagctatgacaagtgctttcttggatcatcagaaactgctgatgcaaatagggtattctgtggtcaacttggtgccgtgtatgtgttcagtgaagcactcaacccagcacagatatttgcaattcatcagttaggacctggatataagagtaccttcaagtttaaatctgagagtgatattcatttggcagaacatcataaacaggtgttatatgatgggaaacttgcaagtagcattgcctttacatataatgctaaggccactgatgctcagctctgcctggaatcatcaccaaaagagaatgcatcaatttttgtgcattccccacatgctctaatgcttcaggatgtgaaagcgatagtaacacattcaattcatagtgcaattcattcaattggagggattcaagtgctttttccactttttgcccaattggataataggcagctcaatgacagtcaagtggaaacaactgtctgtgctactctgttggcattcctggttgaactacttaaaagttcagtagccatgcaagaacagatgctgggtggaaaaggctttttagtcattggctacttacttgaaaagtcatcaagagttcatataactagagctgtcctggagcaatttttatcttttgcaaaataccttgatggtttatctcatggagcacctttgctgaagcagctttgtgatcacattttatttaacccagccatctggatacatacacctgcaaaggttcagctttccctatacacatatttgtctgctgaatttattggaactgctaccatctacaccaccatacgcagagtaggaacagtattacagctaatgcacaccttaaaatattactactgggttattaatcctgctgacagtagtggcattacacctaaaggattagatggtccccggccatcacaaaaagaaattatatcactgagggcatttatgctactttttctgaaacagctgatactaaaggatcgaggggtcaaggaagatgaacttcagagtatattaaattacctacttacgatgcatgaggatgaaaatattcatgatgtgctacagttactggtggctttaatgtcggaacacccagcctcaatgataccagcatttgatcaaagaaatggaataagggtgatctacaaattattggcttctaaaagtgaaagtatttgggttcaagctttgaaggttctgggatactttctgaagcatttaggtcacaagagaaaagttgaaattatgcacacccatagtcttttcactcttcttggagaaaggctgatgttgcatacaaacactgtgactgtcaccacatacaacacactttatgagatcttgacagaacaagtatgtactcaggtcgtacacaaaccacatccagagccagattctacagtgaaaattcagaatccaatgattcttaaagtggtggcaactttgttaaaaaactctacaccaagtgcagagctgatggaagttcgtcgtttatttttatctgatatgataaaacttttcagtaacagccgtgaaaatagaagatgcttattgcagtgttcagtgtggcaggattggatgttttctcttggctatatcaatcctaaaaattctgaggaacagaagattaccgaaatggtctacaatatcttccggattcttttgtatcatgcaataaaatatgaatggggaggctggagagtctgggtggataccctctcaatagcccattccaaggtcacttatgaagctcataaggaatacctagccaaaatgtatgaggaatatcaaagacaagaggaggaaaacattaaaaagggaaagaaagggaatgtgagcaccatctctggtctttcatcacagacaacaggagcaaaaggtggaatggaaattcgagagatagaagatctttcacaaagccagagcccagaaagtgagaccgattaccctgtcagcacagatactcgagacttactcatgtcaacaaaagtgtcagatgatattcttggaaattcagatagaccaggaagtggtgtacatgtggaagtacatgatcttttagtagatataaaagcagagaaagtggaagcaacagaagtaaagctcgatgatatggatttatcaccggagactttagtaggtggagagaatggtgcccttgtggaggttgaatctctgttggataatgtatatagtgctgctgttgagaaactccagaacaatgtacatggaagtgttggtatcattaaaaaaaatgaagaaaaggataatggtccattgataacattagcagatgagaaagaagaccttcccaatagtagtacatcatttctctttgataaaatacccaaacaggaggaaaaactacttcctgaactttctagcaatcacattattccaaatattcaggacacacaagtacatcttggtgttagtgatgatcttggattgcttgctcacatgaccggtagcgtagacttaacttgtacatccagtataatagaagaaaaagaattcaaaatccatacaacttcagatggaatgagcagtatttctgaaagagacttagcgtcatcaactaaggggctggagtatgctgaaatgactgctacaactctggaaactgagtcttctagtagcaaaattgtaccaaatattgatgcaggaagtataatttcagatactgaaaggtctgacgatggcaaagaatcaggaaaagaaatccgaaaaatccaaacaactactacgacacaagctgtgcagggtcggtctatcacccaacaagaccgagatctccgagttgatttaggatttcgaggaatgccaatgactgaggaacagcgacgccagtttagcccaggtccacggactacaatgtttcgtattcctgagtttaaatggtctccaatgcaccagcggcttctcactgatttactatttgcattagaaactgatgtacatgtttggaggagccattctacaaagtctgtaatggattttgtcaatagcaatgaaaatattatttttgtacataacacaattcacctcatttcccaaatggtagacaacatcatcattgcttgtggaggaattttacctttgctctctgctgctacatcaccaactacggaattggaaaatattgaagtgacacaaggcatgtcagctgagacagcagtaactttcctcagccggctgatggctatggttgatgtacttgtgtttgcaagctctctaaattttagtgagattgaagctgagaaaaacatgtcttctggaggtttaatgcgacagtgcctaagattagtttgttgtgttgctgtgagaaactgtttagaatgtcggcaaagacagagagacaggggaaataaatcttcccatggaagcagtaaacctcaggaagttcctcaaagtgtgactgctacagcagcttcgaagactccattggaaaatgttccaggtaacctttctcctattaaggatccggatagacttcttcaggatgttgatatcaatcgccttcgtgctgttgtctttcgggatgtggatgatagcaaacaagcacagttcttagctctggctgttgtttacttcatttcggttctgatggtttccaagtatcgtgacatattagaaccccagagagagactacaagaactggaagccaaccaggtagaaacatcaggcaagaaataaattcaccaacaagtacagttgtggtcataccatctatccctcatccaagtttgaaccatggattccttgccaagttaattcctgagcagagctttggccactcattttacaaagaaacacctgctgcatttccagacaccataaaagaaaaagaaacaccaactcctggtgaagatattcaggtagaaagttcaattccccatacagattcaggaattggagaggagcaagtggctagcatcctgaatggggcagaattagaaacaagtacaggccctgatgccatgagtgaactcttatccactttgtcatccgaagtgaagaaatcacaagagagcttaactgaaaatcctagtgaaacgttgaagcctgcaacatccatatctagcattagtcaaaccaaaggcatcaatgtgaaggaaatactgaaaagtcttgtggctgctccagttgaaatagcagaatgtggccctgaacctatcccatacccagatccagcattgaagagagaaacacaagctattcttcctatgcagtttcattcctttgacaggagtgttgtggtgcctgtaaagaaaccacctccaggtagtttagctgtaaccactgtgggagccactactgctggaagtgggctgccaacaggcagtacctctaatatatttgctgctactggagctacaccaaaaagtatgattaatacaacaggtgccgtggattcagggtcctcctcctcttcctcctcttctagttttgtgaatggtgctactagcaaaaaccttccagctgtacaaactgttgctccaatgccagaagattcagctgaaaatatgagcatcactgcaaaacttgaaagagcgttagaaaaagttgctcctcttcttcgtgaaatttttgtagactttgccccattcctatctcgtacacttcttggcagtcatggacaagagctattgatagaaggccttgtttgtatgaagtccagcacatctgtggttgagcttgttatgctgctttgttctcaggaatggcaaaactctattcagaagaatgcaggacttgcatttattgagctcatcaatgaaggaagattactgtgccatgctatgaaggaccatatagtccgtgttgcaaatgaagctgagtttattttgaacagacaaagagccgaggatgtacataaacatgcagagtttgagtcacagtgtgcccaatatgctgctgatagaagagaggaagaaaagatgtgtgaccatcttatcagtgctgctaaacatcgagatcatgtaacagcaaatcagctgaaacagaagattctcaatattctcacaaataaacatggtgcttggggagcagtttctcatagccaattgcatgatttctggcgtttggattactgggaagatgatcttcgtcgaaggagacgatttgttcgcaatgcatttggctccactcatgctgaagcattgctgaaagctgcaatagaatatggcacggaagaagatgtagtaaagtcaaagaaaacattcagaagtcaagcaatagtgaaccaaaatgcagagacagaacttatgctggaaggagacgatgatgcagtcagtctgctacaggagaaagaaattgacaaccttgcaggcccagtggttctcagcacccctgcccagctcatcgctcccgtggtggtggccaaggggactctctccatcaccacgacagaaatctacttcgaggtagatgaggatgattctgccttcaagaagatcgacacgaaagttcttgcatacactgagggacttcacggaaaatggatgttcagcgagatacgagctgtattttcaagacgttaccttctacaaaacactgctttggaagtatttatggcaaaccgaacctcagttatgtttaatttccctgatcaagcaacagtaaaaaaagttgtctatagcttgcctcgggttggagtagggaccagctatggtctgccacaagccaggaggatatcattggccactcctcgacagctttataaatcttccaatatgactcagcgctggcaaagaagggaaatttcaaacttcgaatatttgatgttccttaatactattgcaggacggacatataatgatctgaaccaatatccagtgtttccgtgggtgttaaccaactatgaatcagaagagttggacctgactcttccaggaaacttcagggatctatcaaagccaattggtgctttgaaccccaagagagctgtgttttatgcagagcgttatgagacatgggaagatgatcaaagcccaccctaccattataatacccattattcaacagcaacatctactttatcctggcttgttcgaattgaacctttcacaaccttcttcctcaatgcaaatgatggaaaatttgatcatccagatcgaaccttctcatccgttgcaaggtcttggagaactagtcagagagatacttctgatgtaaaggaactaattccagagttctactacctaccagagatgtttgtcaacagtaatggatataatcttggagtcagagaagatgaagtagtggtaaatgatgttgatcttcccccttgggcaaaaaaacctgaagactttgtgcggatcaacaggatggccctagaaagtgaatttgtttcttgccaacttcatcagtggatcgaccttatatttggctataagcagcgaggaccagaagcagttcgtgctctgaatgtttttcactacttgacttatgaaggctctgtgaacctggatagtatcactgatcctgtgctcagggaggccatggaggcacagatacagaactttggacagacgccatctcagttgcttattgagccacatccgcctcggagctctgccatgcacctgtgtttccttccacagagtccgctcatgtttaaagatcagatgcaacaggatgtgataatggtgctgaagtttccttcaaattctccagtaacccatgtggcagccaacactctgccccacttgaccatccccgcagtggtgacagtgacttgcagccgactctttgcagtgaatagatggcacaacacagtaggcctcagaggagctccaggatactccttggatcaagcccaccatcttcccattgaaatggatccattaatagccaataattcaggtgtaaacaaacggcagatcacagacctcgttgaccagagtatacaaatcaatgcacattgttttgtggtaacagcagataatcgctatattcttatctgtggattctgggataagagcttcagagtttattctacagaaacagggaaattgactcagattgtatttggccattgggatgtggtcacttgcttggccaggtccgagtcatacattggtggggactgctacatcgtgtccggatctcgagatgccaccctgctgctctggtactggagtgggcggcaccatatcataggagacaaccctaacagcagtgactatccggcaccaagagccgtcctcacaggccatgaccatgaagttgtctgtgtttctgtctgtgcagaacttgggcttgttatcagtggtgctaaagagggcccttgccttgtccacaccatcactggagatttgctgagagcccttgaaggaccagaaaactgcttattcccacgcttgatatctgtctccagcgaaggccactgtatcatatactatgaacgagggcgattcagtaatttcagcattaatgggaaacttttggctcaaatggagatcaatgattcaacacgggccattctcctgagcagtgacggccagaacctggtcaccggaggggacaatggggtagtagaggtctggcaggcctgtgacttcaagcaactgtacatttaccctggatgtgatgctggcattagagcaatggacttgtcccatgaccagaggactctgatcactggcatggcttctggtagcattgtagcttttaatatagattttaatcggtggcattatgagcatcagaacagatactgaagataaaggaagaaccaaaagccaagttaaagctgagagcacaagtgctgcatggaaaggcaatatctctggtggaaaaaactcgtctacatcgacctccgtttgtacattccatcacacccagcaatagctgtacattgtagtcagcaaccattttactttgtgtgttttttcacgactgaacaccagctgctatcaagcaagcttatatcatgtaaattatatgaattaggagatgttttggtaattatttcatatattgttgtttattgagaaaaggttgtaggatgtgtcacaagagacttttgacaattctgaggaaccttgtgtccagttgttacaaagtttaagctttgaacctaacctgcatcccatttccagcctcttttcaagctgagaaaaaaaaaaaaaaacacgtttgatactttgtacatcagatgcatcttatttaaaagggatacttttgtaaaagtaaaaccttgtataaagaacaaaatgtttcttaattttattgtggagttacaacttgcatgttccttactcctgttggcttgatggaacaggtgcattcacactatgaaacagaaagatctgtccaaggacacagcttgtatgaaagggttgaatttgggctccatcagtaatttttgacattttcaccaaaatatagtttgcactttttaatctaaagtcatcccttctgagtgaaatttgctcataaagcatttggatactaagccattatttgccattttgggtactttatacaaagaaaattcagccctaccctgcataatttgaagacacagcagaaagggggcttagggatgaggtcctggtttttcttgtataaataggagtcatgggcgttagttctgtagtaataacttcccagcacctggacatctcttccagagttatcccactggcttggtgtgtatacattaggggaggataatctgatgctaactttttttttctctttggttcttgaatagcttagtttctttaataacaagtcaaactttattacaacaataactgaagttattcttttaggttctcgtgaaattctcactgaaagccacattcttagcctaaggcatttcatcttttatgatataaaatgatggctatcaaatgattttccatacattgtactgatcaagttatacacccaggggtatatacactttcttcatgtttcttctttgtatatttggtgactgtatcgtcatagatgtacatattgtgtcggtagggctatgaggcatgttacaggaatgtaattttctcagaatttacactcactcgcagtcatttatttaaaaagataaaacaagataatgggttctttgtattggcactttgcaccagaaacatatcattatttattgatgtgattacttatttgttatccaccttgtactagtaagttttagcactgaattccttcttcactgttgtttgtatttatgaaattctgaaattatggggaatcagcgtaatgattaagttattcatcaccaggctgtaagcaatatcttgagtttgtagcttagaattgggaggatacttaacatctggaagacaagttcatttcatcttgagatcatggtgaaatattttggatatataaattccttaagctattgtaaccatgttttattgcaaagatgtaaaatatgccagatgtgtgtgagttggaaatcaaaaaaagaaaaataaaatatgcaaagaattca

SEQ ID NO: 19873 - DNA, 11119 bp, Homo sapiens
  source 1..11119: mol_type = unassigned DNA
aggcagggggcggcaacatggcggagtgagcggcggcgtcggggcttcacaacaacagtggtggccgtagcagcggcggcagcagcgtcaatagcatcggccacagcctgagcttcagcaccggccagcgtcgtggccagctgctcgcgtcctcgggcttctcggagcggctgcagcatctccgcggggggcgggccgggccggacagaccgggagagggagagagcagaggcagcggcggcggcagcggcagcggcagcggcacacctgctgggcgggcacagccgcttgcccggcagcggttagcggtaccgccaccgccgagaataagcctgcggatcccccgccgcctccgcgggggagagcgccggagcgggccgggctgaggcgcaggcggggagcgggcccggcgccgcggcgctggtggatgctggggctccgaggcgacggccggggggcgggggccgaggcaggtataacggtaccggcggcggcagcgccgctgctcttcccttctcctcaggaggggggccaatggctagcgagaagccgggcccgggcccggggctcgagcctcagcccgtggggctcattgccgtcggggccgctggcggaggcggcgggggcagcggtggtggcggcaccgggggcagcgggatgggggagctaaggggggcgtccggctccggctcggtgatgctccccgcggggatgattaacccttcggtgccgatccgcaacatccggatgaaattcgcagtgttgattggactcatacaggtcggagaggtcagcaacagggacatcgtggagacggtgctcaacctgctggttggtggagaatttgacttggagatgaactttattatccaggatgctgagagtataacatgtatgacagagcttttggagcactgtgatgtaacatgtcaagcagaaatatggagcatgtttacagccattctacgaaaaagtgttcggaatttacagactagcacagaagttgggctaattgaacaagtattgctgaaaatgagtgctgtagatgacatgatagcagatcttctagttgatatgttgggggttcttgccagctacagcatcactgtcaaggagttgaagcttttgttcagcatgcttcgaggagaaagtggaatctggccaagacatgcagtaaaattattatcagttcttaatcagatgccacagagacacggtcctgatacttttttcaatttccctggttgtagcgctgcggcaattgccttgcctcctattgcaaagtggccttatcagaatggcttcaccttaaacacttggtttcgtatggatccattaaataatattaatgttgataaggataaaccttatctttattgttttcgtactagcaaaggagttggttactctgctcattttgttggcaactgtttaatagtcacatcattgaagtccaaaggaaaaggttttcagcattgtgtgaaatatgattttcaaccacgcaagtggtacatgatcagcattgtccacatttacaatcgatggaggaacagtgaaattcggtgttatgttaatggacaactggtatcttatggtgatatggcttggcatgttaacacaaatgatagctatgacaagtgctttcttggatcatcagaaactgctgatgcaaatagggtattctgtggtcaacttggtgccgtgtatgtgttcagtgaagcactcaacccagcacagatatttgcaattcatcagttaggacctggatataagagtaccttcaagtttaaatctgagagtgatattcatttggcagaacatcataaacaggtgttatatgatgggaaacttgcaagtagcattgcctttacatataatgctaaggccactgatgctcagctctgcctggaatcatcaccaaaagagaatgcatcaatttttgtgcattccccacatgctctaatgcttcaggatgtgaaagcgatagtaacacattcaattcatagtgcaattcattcaattggagggattcaagtgctttttccactttttgcccaattggataataggcagctcaatgacagtcaagtggaaacaactgtctgtgctactctgttggcattcctggttgaactacttaaaagttcagtagccatgcaagaacagatgctgggtggaaaaggctttttagtcattggctacttacttgaaaagtcatcaagagttcatataactagagctgtcctggagcaatttttatcttttgcaaaataccttgatggtttatctcatggagcacctttgctgaagcagctttgtgatcacattttatttaacccagccatctggatacatacacctgcaaaggttcagctttccctatacacatatttgtctgctgaatttattggaactgctaccatctacaccaccatacgcagagtaggaacagtattacagctaatgcacaccttaaaatattactactgggttattaatcctgctgacagtagtggcattacacctaaaggattagatggtccccggccatcacaaaaagaaattatatcactgagggcatttatgctactttttctgaaacagctgatactaaaggatcgaggggtcaaggaagatgaacttcagagtatattaaattacctacttacgatgcatgaggatgaaaatattcatgatgtgctacagttactggtggctttaatgtcggaacacccagcctcaatgataccagcatttgatcaaagaaatggaataagggtgatctacaaattattggcttctaaaagtgaaagtatttgggttcaagctttgaaggttctgggatactttctgaagcatttaggtcacaagagaaaagttgaaattatgcacacccatagtcttttcactcttcttggagaaaggctgatgttgcatacaaacactgtgactgtcaccacatacaacacactttatgagatcttgacagaacaagtatgtactcaggtcgtacacaaaccacatccagagccagattctacagtgaaaattcagaatccaatgattcttaaagtggtggcaactttgttaaaaaactctacaccaagtgcagagctgatggaagttcgtcgtttatttttatctgatatgataaaacttttcagtaacagccgtgaaaatagaagatgcttattgcagtgttcagtgtggcaggattggatgttttctcttggctatatcaatcctaaaaattctgaggaacagaagattaccgaaatggtctacaatatcttccggattcttttgtatcatgcaataaaatatgaatggggaggctggagagtctgggtggataccctctcaatagcccattccaaggtcacttatgaagctcataaggaatacctagccaaaatgtatgaggaatatcaaagacaagaggaggaaaacattaaaaagggaaagaaagggaatgtgagcaccatctctggtctttcatcacagacaacaggagcaaaaggtggaatggaaattcgagagatagaagatctttcacaaagccagagcccagaaagtgagaccgattaccctgtcagcacagatactcgagacttactcatgtcaacaaaagtgtcagatgatattcttggaaattcagatagaccaggaagtggtgtacatgtggaagtacatgatcttttagtagatataaaagcagagaaagtggaagcaacagaagtaaagctcgatgatatggatttatcaccggagactttagtaggtggagagaatggtgcccttgtggaggttgaatctctgttggataatgtatatagtgctgctgttgagaaactccagaacaatgtacatggaagtgttggtatcattaaaaaaaatgaagaaaaggataatggtccattgataacattagcagatgagaaagaagaccttcccaatagtagtacatcatttctctttgataaaatacccaaacaggaggaaaaactacttcctgaactttctagcaatcacattattccaaatattcaggacacacaagtacatcttggtgttagtgatgatcttggattgcttgctcacatgaccggtagcgtagacttaacttgtacatccagtataatagaagaaaaagaattcaaaatccatacaacttcagatggaatgagcagtatttctgaaagagacttagcgtcatcaactaaggggctggagtatgctgaaatgactgctacaactctggaaactgagtcttctagtagcaaaattgtaccaaatattgatgcaggaagtataatttcagatactgaaaggtctgacgatggcaaagaatcaggaaaagaaatccgaaaaatccaaacaactactacgacacaagctgtgcagggtcggtctatcacccaacaagaccgagatctccgagttgatttaggatttcgaggaatgccaatgactgaggaacagcgacgccagtttagcccaggtccacggactacaatgtttcgtattcctgagtttaaatggtctccaatgcaccagcggcttctcactgatttactatttgcattagaaactgatgtacatgtttggaggagccattctacaaagtctgtaatggattttgtcaatagcaatgaaaatattatttttgtacataacacaattcacctcatttcccaaatggtagacaacatcatcattgcttgtggaggaattttacctttgctctctgctgctacatcaccaactggttctaagacggaattggaaaatattgaagtgacacaaggcatgtcagctgagacagcagtaactttcctcagccggctgatggctatggttgatgtacttgtgtttgcaagctctctaaattttagtgagattgaagctgagaaaaacatgtcttctggaggtttaatgcgacagtgcctaagattagtttgttgtgttgctgtgagaaactgtttagaatgtcggcaaagacagagagacaggggaaataaatcttcccatggaagcagtaaacctcaggaagttcctcaaagtgtgactgctacagcagcttcgaagactccattggaaaatgttccaggtaacctttctcctattaaggatccggatagacttcttcaggatgttgatatcaatcgccttcgtgctgttgtctttcgggatgtggatgatagcaaacaagcacagttcttagctctggctgttgtttacttcatttcggttctgatggtttccaagtatcgtgacatattagaaccccagagagagactacaagaactggaagccaaccaggtagaaacatcaggcaagaaataaattcaccaacaagtacagttgtggtcataccatctatccctcatccaagtttgaaccatggattccttgccaagttaattcctgagcagagctttggccactcattttacaaagaaacacctgctgcatttccagacaccataaaagaaaaagaaacaccaactcctggtgaagatattcaggtagaaagttcaattccccatacagattcaggaattggagaggagcaagtggctagcatcctgaatggggcagaattagaaacaagtacaggccctgatgccatgagtgaactcttatccactttgtcatccgaagtgaagaaatcacaagagagcttaactgaaaatcctagtgaaacgttgaagcctgcaacatccatatctagcattagtcaaaccaaaggcatcaatgtgaaggaaatactgaaaagtcttgtggctgctccagttgaaatagcagaatgtggccctgaacctatcccatacccagatccagcattgaagagagaaacacaagctattcttcctatgcagtttcattcctttgacaggagtgttgtggtgcctgtaaagaaaccacctccaggtagtttagctgtaaccactgtgggagccactactgctggaagtgggctgccaacaggcagtacctctaatatatttgctgctactggagctacaccaaaaagtatgattaatacaacaggtgccgtggattcagggtcctcctcctcttcctcctcttctagttttgtgaatggtgctactagcaaaaaccttccagctgtacaaactgttgctccaatgccagaagattcagctgaaaatatgagcatcactgcaaaacttgaaagagcgttagaaaaagttgctcctcttcttcgtgaaatttttgtagactttgccccattcctatctcgtacacttcttggcagtcatggacaagagctattgatagaaggccttgtttgtatgaagtccagcacatctgtggttgagcttgttatgctgctttgttctcaggaatggcaaaactctattcagaagaatgcaggacttgcatttattgagctcatcaatgaaggaagattactgtgccatgctatgaaggaccatatagtccgtgttgcaaatgaagctgagtttattttgaacagacaaagagccgaggatgtacataaacatgcagagtttgagtcacagtgtgcccaatatgctgctgatagaagagaggaagaaaagatgtgtgaccatcttatcagtgctgctaaacatcgagatcatgtaacagcaaatcagctgaaacagaagattctcaatattctcacaaataaacatggtgcttggggagcagtttctcatagccaattgcatgatttctggcgtttggattactgggaagatgatcttcgtcgaaggagacgatttgttcgcaatgcatttggctccactcatgctgaagcattgctgaaagctgcaatagaatatggcacggaagaagatgtagtaaagtcaaagaaaacattcagaagtcaagcaatagtgaaccaaaatgcagagacagaacttatgctggaaggagacgatgatgcagtcagtctgctacaggagaaagaaattgacaaccttgcaggcccagtggttctcagcacccctgcccagctcatcgctcccgtggtggtggccaaggggactctctccatcaccacgacagaaatctacttcgaggtagatgaggatgattctgccttcaagaagatcgacacgaaagttcttgcatacactgagggacttcacggaaaatggatgttcagcgagatacgagctgtattttcaagacgttaccttctacaaaacactgctttggaagtatttatggcaaaccgaacctcagttatgtttaatttccctgatcaagcaacagtaaaaaaagttgtctatagcttgcctcgggttggagtagggaccagctatggtctgccacaagccaggaggatatcattggccactcctcgacagctttataaatcttccaatatgactcagcgctggcaaagaagggaaatttcaaacttcgaatatttgatgttccttaatactattgcaggacggacatataatgatctgaaccaatatccagtgtttccgtgggtgttaaccaactatgaatcagaagagttggacctgactcttccaggaaacttcagggatctatcaaagccaattggtgctttgaaccccaagagagctgtgttttatgcagagcgttatgagacatgggaagatgatcaaagcccaccctaccattataatacccattattcaacagcaacatctactttatcctggcttgttcgaattgaacctttcacaaccttcttcctcaatgcaaatgatggaaaatttgatcatccagatcgaaccttctcatccgttgcaaggtcttggagaactagtcagagagatacttctgatgtaaaggaactaattccagagttctactacctaccagagatgtttgtcaacagtaatggatataatcttggagtcagagaagatgaagtagtggtaaatgatgttgatcttcccccttgggcaaaaaaacctgaagactttgtgcggatcaacaggatggccctagaaagtgaatttgtttcttgccaacttcatcagtggatcgaccttatatttggctataagcagcgaggaccagaagcagttcgtgctctgaatgtttttcactacttgacttatgaaggctctgtgaacctggatagtatcactgatcctgtgctcagggaggccatggaggcacagatacagaactttggacagacgccatctcagttgcttattgagccacatccgcctcggagctctgccatgcacctgtgtttccttccacagagtccgctcatgtttaaagatcagatgcaacaggatgtgataatggtgctgaagtttccttcaaattctccagtaacccatgtggcagccaacactctgccccacttgaccatccccgcagtggtgacagtgacttgcagccgactctttgcagtgaatagatggcacaacacagtaggcctcagaggagctccaggatactccttggatcaagcccaccatcttcccattgaaatggatccattaatagccaataattcaggtgtaaacaaacggcagatcacagacctcgttgaccagagtatacaaatcaatgcacattgttttgtggtaacagcagataatcgctatattcttatctgtggattctgggataagagcttcagagtttattctacagaaacagggaaattgactcagattgtatttggccattgggatgtggtcacttgcttggccaggtccgagtcatacattggtggggactgctacatcgtgtccggatctcgagatgccaccctgctgctctggtactggagtgggcggcaccatatcataggagacaaccctaacagcagtgactatccggcaccaagagccgtcctcacaggccatgaccatgaagttgtctgtgtttctgtctgtgcagaacttgggcttgttatcagtggtgctaaagagggcccttgccttgtccacaccatcactggagatttgctgagagcccttgaaggaccagaaaactgcttattcccacgcttgatatctgtctccagcgaaggccactgtatcatatactatgaacgagggcgattcagtaatttcagcattaatgggaaacttttggctcaaatggagatcaatgattcaacacgggccattctcctgagcagtgacggccagaacctggtcaccggaggggacaatggggtagtagaggtctggcaggcctgtgacttcaagcaactgtacatttaccctggatgtgatgctggcattagagcaatggacttgtcccatgaccagaggactctgatcactggcatggcttctggtagcattgtagcttttaatatagattttaatcggtggcattatgagcatcagaacagatactgaagataaaggaagaaccaaaagccaagttaaagctgagagcacaagtgctgcatggaaaggcaatatctctggtggaaaaaactcgtctacatcgacctccgtttgtacattccatcacacccagcaatagctgtacattgtagtcagcaaccattttactttgtgtgttttttcacgactgaacaccagctgctatcaagcaagcttatatcatgtaaattatatgaattaggagatgttttggtaattatttcatatattgttgtttattgagaaaaggttgtaggatgtgtcacaagagacttttgacaattctgaggaaccttgtgtccagttgttacaaagtttaagctttgaacctaacctgcatcccatttccagcctcttttcaagctgagaaaaaaaaaaaaaaacacgtttgatactttgtacatcagatgcatcttatttaaaagggatacttttgtaaaagtaaaaccttgtataaagaacaaaatgtttcttaattttattgtggagttacaacttgcatgttccttactcctgttggcttgatggaacaggtgcattcacactatgaaacagaaagatctgtccaaggacacagcttgtatgaaagggttgaatttgggctccatcagtaatttttgacattttcaccaaaatatagtttgcactttttaatctaaagtcatcccttctgagtgaaatttgctcataaagcatttggatactaagccattatttgccattttgggtactttatacaaagaaaattcagccctaccctgcataatttgaagacacagcagaaagggggcttagggatgaggtcctggtttttcttgtataaataggagtcatgggcgttagttctgtagtaataacttcccagcacctggacatctcttccagagttatcccactggcttggtgtgtatacattaggggaggataatctgatgctaactttttttttctctttggttcttgaatagcttagtttctttaataacaagtcaaactttattacaacaataactgaagttattcttttaggttctcgtgaaattctcactgaaagccacattcttagcctaaggcatttcatcttttatgatataaaatgatggctatcaaatgattttccatacattgtactgatcaagttatacacccaggggtatatacactttcttcatgtttcttctttgtatatttggtgactgtatcgtcatagatgtacatattgtgtcggtagggctatgaggcatgttacaggaatgtaattttctcagaatttacactcactcgcagtcatttatttaaaaagataaaacaagataatgggttctttgtattggcactttgcaccagaaacatatcattatttattgatgtgattacttatttgttatccaccttgtactagtaagttttagcactgaattccttcttcactgttgtttgtatttatgaaattctgaaattatggggaatcagcgtaatgattaagttattcatcaccaggctgtaagcaatatcttgagtttgtagcttagaattgggaggatacttaacatctggaagacaagttcatttcatcttgagatcatggtgaaatattttggatatataaattccttaagctattgtaaccatgttttattgcaaagatgtaaaatatgccagatgtgtgtgagttggaaatcaaaaaaagaaaaataaaatatgcaaagaattc

SEQ ID NO: 19874 - DNA, 10857 bp, Homo sapiens
  source 1..10857: mol_type = unassigned DNA
gcggcgtcggggcttcacaacaacagtggtggccgtagcagcggccgggccgggctgaggcgcaggcggggagcgggcccggcgccgcggcgctggtggatgctggggctccgaggcgacggccggggggcgggggccgaggcaggtataacggtaccggcggcggcagcgccgctgctcttcccttctcctcaggaggggggccaatggctagcgagaagccgggcccgggcccggggctcgagcctcagcccgtggggctcattgccgtcggggccgctggcggaggcggcgggggcagcggtggtggcggcaccgggggcagcgggatgggggagctaaggggggcgtccggctccggctcggtgatgctccccgcggggatgattaacccttcggtgccgatccgcaacatccggatgaaattcgcagtgttgattggactcatacaggtcggagaggtcagcaacagggacatcgtggagacggtgctcaacctgctggttggtggagaatttgacttggagatgaactttattatccaggatgctgagagtataacatgtatgacagagcttttggagcactgtgatgtaacatgtcaagcagaaatatggagcatgtttacagccattctacgaaaaagtgttcggaatttacagactagcacagaagttgggctaattgaacaagtattgctgaaaatgagtgctgtagatgacatgatagcagatcttctagttgatatgttgggggttcttgccagctacagcatcactgtcaaggagttgaagcttttgttcagcatgcttcgaggagaaagtggaatctggccaagacatgcagtaaaattattatcagttcttaatcagatgccacagagacacggtcctgatacttttttcaatttccctggttgtagcgctgcggcaattgccttgcctcctattgcaaagtggccttatcagaatggcttcaccttaaacacttggtttcgtatggatccattaaataatattaatgttgataaggataaaccttatctttattgttttcgtactagcaaaggagttggttactctgctcattttgttggcaactgtttaatagtcacatcattgaagtccaaaggaaaaggttttcagcattgtgtgaaatatgattttcaaccacgcaagtggtacatgatcagcattgtccacatttacaatcgatggaggaacagtgaaattcggtgttatgttaatggacaactggtatcttatggtgatatggcttggcatgttaacacaaatgatagctatgacaagtgctttcttggatcatcagaaactgctgatgcaaatagggtattctgtggtcaacttggtgccgtgtatgtgttcagtgaagcactcaacccagcacagatatttgcaattcatcagttaggacctggatataagagtaccttcaagtttaaatctgagagtgatattcatttggcagaacatcataaacaggtgttatatgatgggaaacttgcaagtagcattgcctttacatataatgctaaggccactgatgctcagctctgcctggaatcatcaccaaaagagaatgcatcaatttttgtgcattccccacatgctctaatgcttcaggatgtgaaagcgatagtaacacattcaattcatagtgcaattcattcaattggagggattcaagtgctttttccactttttgcccaattggataataggcagctcaatgacagtcaagtggaaacaactgtctgtgctactctgttggcattcctggttgaactacttaaaagttcagtagccatgcaagaacagatgctgggtggaaaaggctttttagtcattggctacttacttgaaaagtcatcaagagttcatataactagagctgtcctggagcaatttttatcttttgcaaaataccttgatggtttatctcatggagcacctttgctgaagcagctttgtgatcacattttatttaacccagccatctggatacatacacctgcaaaggttcagctttccctatacacatatttgtctgctgaatttattggaactgctaccatctacaccaccatacgcagagtaggaacagtattacagctaatgcacaccttaaaatattactactgggttattaatcctgctgacagtagtggcattacacctaaaggattagatggtccccggccatcacaaaaagaaattatatcactgagggcatttatgctactttttctgaaacagctgatactaaaggatcgaggggtcaaggaagatgaacttcagagtatattaaattacctacttacgatgcatgaggatgaaaatattcatgatgtgctacagttactggtggctttaatgtcggaacacccagcctcaatgataccagcatttgatcaaagaaatggaataagggtgatctacaaattattggcttctaaaagtgaaagtatttgggttcaagctttgaaggttctgggatactttctgaagcatttaggtcacaagagaaaagttgaaattatgcacacccatagtcttttcactcttcttggagaaaggctgatgttgcatacaaacactgtgactgtcaccacatacaacacactttatgagatcttgacagaacaagtatgtactcaggtcgtacacaaaccacatccagagccagattctacagtgaaaattcagaatccaatgattcttaaagtggtggcaactttgttaaaaaactctacaccaagtgcagagctgatggaagttcgtcgtttatttttatctgatatgataaaacttttcagtaacagccgtgaaaatagaagatgcttattgcagtgttcagtgtggcaggattggatgttttctcttggctatatcaatcctaaaaattctgaggaacagaagattaccgaaatggtctacaatatcttccggattcttttgtatcatgcaataaaatatgaatggggaggctggagagtctgggtggataccctctcaatagcccattccaaggtcacttatgaagctcataaggaatacctagccaaaatgtatgaggaatatcaaagacaagaggaggaaaacattaaaaagggaaagaaagggaatgtgagcaccatctctggtctttcatcacagacaacaggagcaaaaggtggaatggaaattcgagagatagaagatctttcacaaagccagagcccagaaagtgagaccgattaccctgtcagcacagatactcgagacttactcatgtcaacaaaagtgtcagatgatattcttggaaattcagatagaccaggaagtggtgtacatgtggaagtacatgatcttttagtagatataaaagcagagaaagtggaagcaacagaagtaaagctcgatgatatggatttatcaccggagactttagtaggtggagagaatggtgcccttgtggaggttgaatctctgttggataatgtatatagtgctgctgttgagaaactccagaacaatgtacatggaagtgttggtatcattaaaaaaaatgaagaaaaggataatggtccattgataacattagcagatgagaaagaagaccttcccaatagtagtacatcatttctctttgataaaatacccaaacaggaggaaaaactacttcctgaactttctagcaatcacattattccaaatattcaggacacacaagtacatcttggtgttagtgatgatcttggattgcttgctcacatgaccggtagcgtagacttaacttgtacatccagtataatagaagaaaaagaattcaaaatccatacaacttcagatggaatgagcagtatttctgaaagagacttagcgtcatcaactaaggggctggagtatgctgaaatgactgctacaactctggaaactgagtcttctagtagcaaaattgtaccaaatattgatgcaggaagtataatttcagatactgaaaggtctgacgatggcaaagaatcaggaaaagaaatccgaaaaatccaaacaactactacgacacaagctgtgcagggtcggtctatcacccaacaagaccgagatctccgagttgatttaggatttcgaggaatgccaatgactgaggaacagcgacgccagtttagcccaggtccacggactacaatgtttcgtattcctgagtttaaatggtctccaatgcaccagcggcttctcactgatttactatttgcattagaaactgatgtacatgtttggaggagccattctacaaagtctgtaatggattttgtcaatagcaatgaaaatattatttttgtacataacacaattcacctcatttcccaaatggtagacaacatcatcattgcttgtggaggaattttacctttgctctctgctgctacatcaccaactgtaagtactaagacggaattggaaaatattgaagtgacacaaggcatgtcagctgagacagcagtaactttcctcagccggctgatggctatggttgatgtacttgtgtttgcaagctctctaaattttagtgagattgaagctgagaaaaacatgtcttctggaggtttaatgcgacagtgcctaagattagtttgttgtgttgctgtgagaaactgtttagaatgtcggcaaagacagagagacaggggaaataaatcttcccatggaagcagtaaacctcaggaagttcctcaaagtgtgactgctacagcagcttcgaagactccattggaaaatgttccaggtaacctttctcctattaaggatccggatagacttcttcaggatgttgatatcaatcgccttcgtgctgttgtctttcgggatgtggatgatagcaaacaagcacagttcttagctctggctgttgtttacttcatttcggttctgatggtttccaagtatcgtgacatattagaaccccagagagagactacaagaactggaagccaaccaggtagaaacatcaggcaagaaataaattcaccaacaagtacagttgtggtcataccatctatccctcatccaagtttgaaccatggattccttgccaagttaattcctgagcagagctttggccactcattttacaaagaaacacctgctgcatttccagacaccataaaagaaaaagaaacaccaactcctggtgaagatattcaggtagaaagttcaattccccatacagattcaggaattggagaggagcaagtggctagcatcctgaatggggcagaattagaaacaagtacaggccctgatgccatgagtgaactcttatccactttgtcatccgaagtgaagaaatcacaagagagcttaactgaaaatcctagtgaaacgttgaagcctgcaacatccatatctagcattagtcaaaccaaaggcatcaatgtgaaggaaatactgaaaagtcttgtggctgctccagttgaaatagcagaatgtggccctgaacctatcccatacccagatccagcattgaagagagaaacacaagctattcttcctatgcagtttcattcctttgacaggagtgttgtggtgcctgtaaagaaaccacctccaggtagtttagctgtaaccactgtgggagccactactgctggaagtgggctgccaacaggcagtacctctaatatatttgctgctactggagctacaccaaaaagtatgattaatacaacaggtgccgtggattcagggtcctcctcctcttcctcctcttctagttttgtgaatggtgctactagcaaaaaccttccagctgtacaaactgttgctccaatgccagaagattcagctgaaaatatgagcatcactgcaaaacttgaaagagcgttagaaaaagttgctcctcttcttcgtgaaatttttgtagactttgccccattcctatctcgtacacttcttggcagtcatggacaagagctattgatagaaggccttgtttgtatgaagtccagcacatctgtggttgagcttgttatgctgctttgttctcaggaatggcaaaactctattcagaagaatgcaggacttgcatttattgagctcatcaatgaaggaagattactgtgccatgctatgaaggaccatatagtccgtgttgcaaatgaagctgagtttattttgaacagacaaagagccgaggatgtacataaacatgcagagtttgagtcacagtgtgcccaatatgctgctgatagaagagaggaagaaaagatgtgtgaccatcttatcagtgctgctaaacatcgagatcatgtaacagcaaatcagctgaaacagaagattctcaatattctcacaaataaacatggtgcttggggagcagtttctcatagccaattgcatgatttctggcgtttggattactgggaagatgatcttcgtcgaaggagacgatttgttcgcaatgcatttggctccactcatgctgaagcattgctgaaagctgcaatagaatatggcacggaagaagatgtagtaaagtcaaagaaaacattcagaagtcaagcaatagtgaaccaaaatgcagagacagaacttatgctggaaggagacgatgatgcagtcagtctgctacaggagaaagaaattgacaaccttgcaggcccagtggttctcagcacccctgcccagctcatcgctcccgtggtggtggccaaggggactctctccatcaccacgacagaaatctacttcgaggtagatgaggatgattctgccttcaagaagatcgacacgaaagttcttgcatacactgagggacttcacggaaaatggatgttcagcgagatacgagctgtattttcaagacgttaccttctacaaaacactgctttggaagtatttatggcaaaccgaacctcagttatgtttaatttccctgatcaagcaacagtaaaaaaagttgtctatagcttgcctcgggttggagtagggaccagctatggtctgccacaagccaggaggatatcattggccactcctcgacagctttataaatcttccaatatgactcagcgctggcaaagaagggaaatttcaaacttcgaatatttgatgttccttaatactattgcaggacggacatataatgatctgaaccaatatccagtgtttccgtgggtgttaaccaactatgaatcagaagagttggacctgactcttccaggaaacttcagggatctatcaaagccaattggtgctttgaaccccaagagagctgtgttttatgcagagcgttatgagacatgggaagatgatcaaagcccaccctaccattataatacccattattcaacagcaacatctactttatcctggcttgttcgaattgaacctttcacaaccttcttcctcaatgcaaatgatggaaaatttgatcatccagatcgaaccttctcatccgttgcaaggtcttggagaactagtcagagagatacttctgatgtaaaggaactaattccagagttctactacctaccagagatgtttgtcaacagtaatggatataatcttggagtcagagaagatgaagtagtggtaaatgatgttgatcttcccccttgggcaaaaaaacctgaagactttgtgcggatcaacaggatggccctagaaagtgaatttgtttcttgccaacttcatcagtggatcgaccttatatttggctataagcagcgaggaccagaagcagttcgtgctctgaatgtttttcactacttgacttatgaaggctctgtgaacctggatagtatcactgatcctgtgctcagggagattccagaagcttatttcattagagacccccacactttccttcttacaaaggactttattaaggccatggaggcacagatacagaactttggacagacgccatctcagttgcttattgagccacatccgcctcggagctctgccatgcacctgtgtttccttccacagagtccgctcatgtttaaagatcagatgcaacaggatgtgataatggtgctgaagtttccttcaaattctccagtaacccatgtggcagccaacactctgccccacttgaccatccccgcagtggtgacagtgacttgcagccgactctttgcagtgaatagatggcacaacacagtaggcctcagaggagctccaggatactccttggatcaagcccaccatcttcccattgaaatggatccattaatagccaataattcaggtgtaaacaaacggcagatcacagacctcgttgaccagagtatacaaatcaatgcacattgttttgtggtaacagcagataatcgctatattcttatctgtggattctgggataagagcttcagagtttattctacagaaacagggaaattgactcagattgtatttggccattgggatgtggtcacttgcttggccaggtccgagtcatacattggtggggactgctacatcgtgtccggatctcgagatgccaccctgctgctctggtactggagtgggcggcaccatatcataggagacaaccctaacagcagtgactatccggcaccaagagccgtcctcacaggccatgaccatgaagttgtctgtgtttctgtctgtgcagaacttgggcttgttatcagtggtgctaaagagggcccttgccttgtccacaccatcactggagatttgctgagagcccttgaaggaccagaaaactgcttattcccacgcttgatatctgtctccagcgaaggccactgtatcatatactatgaacgagggcgattcagtaatttcagcattaatgggaaacttttggctcaaatggagatcaatgattcaacacgggccattctcctgagcagtgacggccagaacctggtcaccggaggggacaatggggtagtagaggtctggcaggcctgtgacttcaagcaactgtacatttaccctggatgtgatgctggcattagagcaatggacttgtcccatgaccagaggactctgatcactggcatggcttctggtagcattgtagcttttaatatagattttaatcggtggcattatgagcatcagaacagatactgaagataaaggaagaaccaaaagccaagttaaagctgagagcacaagtgctgcatggaaaggcaatatctctggtggaaaaaactcgtctacatcgacctccgtttgtacattccatcacacccagcaatagctgtacattgtagtcagcaaccattttactttgtgtgttttttcacgactgaacaccagctgctatcaagcaagcttatatcatgtaaattatatgaattaggagatgttttggtaattatttcatatattgttgtttattgagaaaaggttgtaggatgtgtcacaagagacttttgacaattctgaggaaccttgtgtccagttgttacaaagtttaagctttgaacctaacctgcatcccatttccagcctcttttcaagctgagaaaaaaaaaaaaaaacacgtttgatactttgtacatcagatgcatcttatttaaaagggatacttttgtaaaagtaaaaccttgtataaagaacaaaatgtttcttaattttattgtggagttacaacttgcatgttccttactcctgttggcttgatggaacaggtgcattcacactatgaaacagaaagatctgtccaaggacacagcttgtatgaaagggttgaatttgggctccatcagtaatttttgacattttcaccaaaatatagtttgcactttttaatctaaagtcatcccttctgagtgaaatttgctcataaagcatttggatactaagccattatttgccattttgggtactttatacaaagaaaattcagccctaccctgcataatttgaagacacagcagaaagggggcttagggatgaggtcctggtttttcttgtataaataggagtcatgggcgttagttctgtagtaataacttcccagcacctggacatctcttccagagttatcccactggcttggtgtgtatacattaggggaggataatctgatgctaactttttttttctctttggttcttgaatagcttagtttctttaataacaagtcaaactttattacaacaataactgaagttattcttttaggttctcgtgaaattctcactgaaagccacattcttagcctaaggcatttcatcttttatgatataaaatgatggctatcaaatgattttccatacattgtactgatcaagttatacacccaggggtatatacactttcttcatgtttcttctttgtatatttggtgactgtatcgtcatagatgtacatattgtgtcggtagggctatgaggcatgttacaggaatgtaattttctcagaatttacactcactcgcagtcatttatttaaaaagataaaacaagataatgggttctttgtattggcactttgcaccagaaacatatcattatttattgatgtgattacttatttgttatccaccttgtactagtaagttttagcactgaattccttcttcactgttgtttgtatttatgaaattctgaaattatggggaatcagcgtaatgattaagttattcatcaccaggctgtaagcaatatcttgagtttgtagcttagaattgggaggatacttaacatctggaagacaagttcatttcatcttgagatcatggtgaaatattttggatatataaattccttaagctattgtaaccatgttttattgcaaagatgtaaaatatgccagatgtgtgtgagttggaaatcaaaaaaagaaaaataaaatatgcaaagaattc

SEQ ID NO: 19875 - DNA, 10692 bp, Homo sapiens
  source 1..10692: mol_type = unassigned DNA
gcggcgtcggggcttcacaacaacagtggtggccgtagcagcggccgggccgggctgaggcgcaggcggggagcgggcccggcgccgcggcgctggtggatgctggggctccgaggcgacggccggggggcgggggccgaggcaggtataacggtaccggcggcggcagcgccgctgctcttcccttctcctcaggaggggggccaatggctagcgagaagccgggcccgggcccggggctcgagcctcagcccgtggggctcattgccgtcggggccgctggcggaggcggcgggggcagcggtggtggcggcaccgggggcagcgggatgggggagctaaggggggcgtccggctccggctcggtgatgctccccgcggggatgattaacccttcggtgccgatccgcaacatccggatgaaattcgcagtgttgattggactcatacaggtcggagaggtcagcaacagggacatcgtggagacggtgctcaacctgctggttggtggagaatttgacttggagatgaactttattatccaggatgctgagagtataacatgtatgacagagcttttggagcactgtgatgtaacatgtcaagcagaaatatggagcatgtttacagccattctacgaaaaagtgttcggaatttacagactagcacagaagttgggctaattgaacaagtattgctgaaaatgagtgctgtagatgacatgatagcagatcttctagttgatatgttgggggttcttgccagctacagcatcactgtcaaggagttgaagcttttgttcagcatgcttcgaggagaaagtggaatctggccaagacatgcagtaaaattattatcagttcttaatcagatgccacagagacacggtcctgatacttttttcaatttccctggttgtagcgctgcggcaattgccttgcctcctattgcaaagtggccttatcagaatggcttcaccttaaacacttggtttcgtatggatccattaaataatattaatgttgataaggataaaccttatctttattgttttcgtactagcaaaggagttggttactctgctcattttgttggcaactgtttaatagtcacatcattgaagtccaaaggaaaaggttttcagcattgtgtgaaatatgattttcaaccacgcaagtggtacatgatcagcattgtccacatttacaatcgatggaggaacagtgaaattcggtgttatgttaatggacaactggtatcttatggtgatatggcttggcatgttaacacaaatgatagctatgacaagtgctttcttggatcatcagaaactgctgatgcaaatagggtattctgtggtcaacttggtgccgtgtatgtgttcagtgaagcactcaacccagcacagatatttgcaattcatcagttaggacctggatataagagtaccttcaagtttaaatctgagagtgatattcatttggcagaacatcataaacaggtgttatatgatgggaaacttgcaagtagcattgcctttacatataatgctaaggccactgatgctcagctctgcctggaatcatcaccaaaagagaatgcatcaatttttgtgcattccccacatgctctaatgcttcaggatgtgaaagcgatagtaacacattcaattcatagtgcaattcattcaattggagggattcaagtgctttttccactttttgcccaattggataataggcagctcaatgacagtcaagtggaaacaactgtctgtgctactctgttggcattcctggttgaactacttaaaagttcagtagccatgcaagaacagatgctgggtggaaaaggctttttagtcattggctacttacttgaaaagtcatcaagagttcatataactagagctgtcctggagcaatttttatcttttgcaaaataccttgatggtttatctcatggagcacctttgctgaagcagctttgtgatcacattttatttaacccagccatctggatacatacacctgcaaaggttcagctttccctatacacatatttgtctgctgaatttattggaactgctaccatctacaccaccatacgcagagtaggaacagtattacagctaatgcacaccttaaaatattactactgggttattaatcctgctgacagtagtggcattacacctaaaggattagatggtccccggccatcacaaaaagaaattatatcactgagggcatttatgctactttttctgaaacagctgatactaaaggatcgaggggtcaaggaagatgaacttcagagtatattaaattacctacttacgatgcatgaggatgaaaatattcatgatgtgctacagttactggtggctttaatgtcggaacacccagcctcaatgataccagcatttgatcaaagaaatggaataagggtgatctacaaattattggcttctaaaagtgaaagtatttgggttcaagctttgaaggttctgggatactttctgaagcatttaggtcacaagagaaaagttgaaattatgcacacccatagtcttttcactcttcttggagaaaggctgatgttgcatacaaacactgtgactgtcaccacatacaacacactttatgagatcttgacagaacaagtatgtactcaggtcgtacacaaaccacatccagagccagattctacagtgaaaattcagaatccaatgattcttaaagtggtggcaactttgttaaaaaactctacaccaagtgcagagctgatggaagttcgtcgtttatttttatctgatatgataaaacttttcagtaacagccgtgaaaatagaagatgcttattgcagtgttcagtgtggcaggattggatgttttctcttggctatatcaatcctaaaaattctgaggaacagaagattaccgaaatggtctacaatatcttccggattcttttgtatcatgcaataaaatatgaatggggaggctggagagtctgggtggataccctctcaatagcccattccaaggtcacttatgaagctcataaggaatacctagccaaaatgtatgaggaatatcaaagacaagaggaggaaaacattaaaaagggaaagaaagggaatgtgagcaccatctctggtctttcatcacagacaacaggagcaaaaggtggaatggaaattcgagagatagaagatctttcacaaagccagagcccagaaagtgagaccgattaccctgtcagcacagatactcgagacttactcatgtcaacaaaagtgtcagatgatattcttggaaattcagatagaccaggaagtggtgtacatgtggaagtacatgatcttttagtagatataaaagcagagaaagtggaagcaacagaagtaaagctcgatgatatggatttatcaccggagactttagtaggtggagagaatggtgcccttgtggaggttgaatctctgttggataatgtatatagtgctgctgttgagaaactccagaacaatgtacatggaagtgttggtatcattaaaaaaaatgaagaaaaggataatggtccattgataacattagcagatgagaaagaagaccttcccaatagtagtacatcatttctctttgataaaatacccaaacaggaggaaaaactacttcctgaactttctagcaatcacattattccaaatattcaggacacacaagtacatcttggtgttagtgatgatcttggattgcttgctcacatgaccggtagcgtagacttaacttgtacatccagtataatagaagaaaaagaattcaaaatccatacaacttcagatggaatgagcagtatttctgaaagagacttagcgtcatcaactaaggggctggagtatgctgaaatgactgctacaactctggaaactgagtcttctagtagcaaaattgtaccaaatattgatgcaggaagtataatttcagatactgaaaggtctgacgatggcaaagaatcaggaaaagaaatccgaaaaatccaaacaactactacgacacaagctgtgcagggtcggtctatcacccaacaagaccgagatctccgagttgatttaggatttcgaggaatgccaatgactgaggaacagcgacgccagtttagcccaggtccacggactacaatgtttcgtattcctgagtttaaatggtctccaatgcaccagcggcttctcactgatttactatttgcattagaaactgatgtacatgtttggaggagccattctacaaagtctgtaatggattttgtcaatagcaatgaaaatattatttttgtacataacacaattcacctcatttcccaaatggtagacaacatcatcattgcttgtggaggaattttacctttgctctctgctgctacatcaccaactacggaattggaaaatattgaagtgacacaaggcatgtcagctgagacagcagtaactttcctcagccggctgatggctatggttgatgtacttgtgtttgcaagctctctaaattttagtgagattgaagctgagaaaaacatgtcttctggaggtttaatgcgacagtgcctaagattagtttgttgtgttgctgtgagaaactgtttagaatgtcggcaaagacagagagacaggggaaataaatcttcccatggaagcagtaaacctcaggaagttcctcaaagtgtgactgctacagcagcttcgaagactccattggaaaatgttccaggtaacctttctcctattaaggatccggatagacttcttcaggatgttgatatcaatcgccttcgtgctgttgtctttcgggatgtggatgatagcaaacaagcacagttcttagctctggctgttgtttacttcatttcggttctgatggtttccaagtatcgtgacatattagaaccccagagagagactacaagaactggaagccaaccaggtagaaacatcaggcaagaaataaattcaccaacaagtacagaaacacctgctgcatttccagacaccataaaagaaaaagaaacaccaactcctggtgaagatattcaggtagaaagttcaattccccatacagattcaggaattggagaggagcaagtggctagcatcctgaatggggcagaattagaaacaagtacaggccctgatgccatgagtgaactcttatccactttgtcatccgaagtgaagaaatcacaagagagcttaactgaaaatcctagtgaaacgttgaagcctgcaacatccatatctagcattagtcaaaccaaaggcatcaatgtgaaggaaatactgaaaagtcttgtggctgctccagttgaaatagcagaatgtggccctgaacctatcccatacccagatccagcattgaagagagaaacacaagctattcttcctatgcagtttcattcctttgacaggagtgttgtggtgcctgtaaagaaaccacctccaggtagtttagctgtaaccactgtgggagccactactgctggaagtgggctgccaacaggcagtacctctaatatatttgctgctactggagctacaccaaaaagtatgattaatacaacaggtgccgtggattcagggtcctcctcctcttcctcctcttctagttttgtgaatggtgctactagcaaaaaccttccagctgtacaaactgttgctccaatgccagaagattcagctgaaaatatgagcatcactgcaaaacttgaaagagcgttagaaaaagttgctcctcttcttcgtgaaatttttgtagactttgccccattcctatctcgtacacttcttggcagtcatggacaagagctattgatagaaggccttgtttgtatgaagtccagcacatctgtggttgagcttgttatgctgctttgttctcaggaatggcaaaactctattcagaagaatgcaggacttgcatttattgagctcatcaatgaaggaagattactgtgccatgctatgaaggaccatatagtccgtgttgcaaatgaagctgagtttattttgaacagacaaagagccgaggatgtacataaacatgcagagtttgagtcacagtgtgcccaatatgctgctgatagaagagaggaagaaaagatgtgtgaccatcttatcagtgctgctaaacatcgagatcatgtaacagcaaatcagctgaaacagaagattctcaatattctcacaaataaacatggtgcttggggagcagtttctcatagccaattgcatgatttctggcgtttggattactgggaagatgatcttcgtcgaaggagacgatttgttcgcaatgcatttggctccactcatgctgaagcattgctgaaagctgcaatagaatatggcacggaagaagatgtagtaaagtcaaagaaaacattcagaagtcaagcaatagtgaaccaaaatgcagagacagaacttatgctggaaggagacgatgatgcagtcagtctgctacaggagaaagaaattgacaaccttgcaggcccagtggttctcagcacccctgcccagctcatcgctcccgtggtggtggccaaggggactctctccatcaccacgacagaaatctacttcgaggtagatgaggatgattctgccttcaagaagatcgacacgaaagttcttgcatacactgagggacttcacggaaaatggatgttcagcgagatacgagctgtattttcaagacgttaccttctacaaaacactgctttggaagtatttatggcaaaccgaacctcagttatgtttaatttccctgatcaagcaacagtaaaaaaagttgtctatagcttgcctcgggttggagtagggaccagctatggtctgccacaagccaggaggatatcattggccactcctcgacagctttataaatcttccaatatgactcagcgctggcaaagaagggaaatttcaaacttcgaatatttgatgttccttaatactattgcaggacggacatataatgatctgaaccaatatccagtgtttccgtgggtgttaaccaactatgaatcagaagagttggacctgactcttccaggaaacttcagggatctatcaaagccaattggtgctttgaaccccaagagagctgtgttttatgcagagcgttatgagacatgggaagatgatcaaagcccaccctaccattataatacccattattcaacagcaacatctactttatcctggcttgttcgaattgaacctttcacaaccttcttcctcaatgcaaatgatggaaaatttgatcatccagatcgaaccttctcatccgttgcaaggtcttggagaactagtcagagagatacttctgatgtaaaggaactaattccagagttctactacctaccagagatgtttgtcaacagtaatggatataatcttggagtcagagaagatgaagtagtggtaaatgatgttgatcttcccccttgggcaaaaaaacctgaagactttgtgcggatcaacaggatggccctagaaagtgaatttgtttcttgccaacttcatcagtggatcgaccttatatttggctataagcagcgaggaccagaagcagttcgtgctctgaatgtttttcactacttgacttatgaaggctctgtgaacctggatagtatcactgatcctgtgctcagggaggccatggaggcacagatacagaactttggacagacgccatctcagttgcttattgagccacatccgcctcggagctctgccatgcacctgtgtttccttccacagagtccgctcatgtttaaagatcagatgcaacaggatgtgataatggtgctgaagtttccttcaaattctccagtaacccatgtggcagccaacactctgccccacttgaccatccccgcagtggtgacagtgacttgcagccgactctttgcagtgaatagatggcacaacacagtaggcctcagaggagctccaggatactccttggatcaagcccaccatcttcccattgaaatggatccattaatagccaataattcaggtgtaaacaaacggcagatcacagacctcgttgaccagagtatacaaatcaatgcacattgttttgtggtaacagcagataatcgctatattcttatctgtggattctgggataagagcttcagagtttattctacagaaacagggaaattgactcagattgtatttggccattgggatgtggtcacttgcttggccaggtccgagtcatacattggtggggactgctacatcgtgtccggatctcgagatgccaccctgctgctctggtactggagtgggcggcaccatatcataggagacaaccctaacagcagtgagtgtgactatccggcaccaagagccgtcctcacaggccatgaccatgaagttgtctgtgtttctgtctgtgcagaacttgggcttgttatcagtggtgctaaagagggcccttgccttgtccacaccatcactggagatttgctgagagcccttgaaggaccagaaaactgcttattcccacgcttgatatctgtctccagcgaaggccactgtatcatatactatgaacgagggcgattcagtaatttcagcattaatgggaaacttttggctcaaatggagatcaatgattcaacacgggccattctcctgagcagtgacggccagaacctggtcaccggaggggacaatggggtagtagaggtctggcaggcctgtgacttcaagcaactgtacatttaccctggatgtgatgctggcattagagcaatggacttgtcccatgaccagaggactctgatcactggcatggcttctggtagcattgtagcttttaatatagattttaatcggtggcattatgagcatcagaacagatactgaagataaaggaagaaccaaaagccaagttaaagctgagagcacaagtgctgcatggaaaggcaatatctctggtggaaaaaactcgtctacatcgacctccgtttgtacattccatcacacccagcaatagctgtacattgtagtcagcaaccattttactttgtgtgttttttcacgactgaacaccagctgctatcaagcaagcttatatcatgtaaattatatgaattaggagatgttttggtaattatttcatatattgttgtttattgagaaaaggttgtaggatgtgtcacaagagacttttgacaattctgaggaaccttgtgtccagttgttacaaagtttaagctttgaacctaacctgcatcccatttccagcctcttttcaagctgagaaaaaaaaaaaaaaacacgtttgatactttgtacatcagatgcatcttatttaaaagggatacttttgtaaaagtaaaaccttgtataaagaacaaaatgtttcttaattttattgtggagttacaacttgcatgttccttactcctgttggcttgatggaacaggtgcattcacactatgaaacagaaagatctgtccaaggacacagcttgtatgaaagggttgaatttgggctccatcagtaatttttgacattttcaccaaaatatagtttgcactttttaatctaaagtcatcccttctgagtgaaatttgctcataaagcatttggatactaagccattatttgccattttgggtactttatacaaagaaaattcagccctaccctgcataatttgaagacacagcagaaagggggcttagggatgaggtcctggtttttcttgtataaataggagtcatgggcgttagttctgtagtaataacttcccagcacctggacatctcttccagagttatcccactggcttggtgtgtatacattaggggaggataatctgatgctaactttttttttctctttggttcttgaatagcttagtttctttaataacaagtcaaactttattacaacaataactgaagttattcttttaggttctcgtgaaattctcactgaaagccacattcttagcctaaggcatttcatcttttatgatataaaatgatggctatcaaatgattttccatacattgtactgatcaagttatacacccaggggtatatacactttcttcatgtttcttctttgtatatttggtgactgtatcgtcatagatgtacatattgtgtcggtagggctatgaggcatgttacaggaatgtaattttctcagaatttacactcactcgcagtcatttatttaaaaagataaaacaagataatgggttctttgtattggcactttgcaccagaaacatatcattatttattgatgtgattacttatttgttatccaccttgtactagtaagttttagcactgaattccttcttcactgttgtttgtatttatgaaattctgaaattatggggaatcagcgtaatgattaagttattcatcaccaggctgtaagcaatatcttgagtttgtagcttagaattgggaggatacttaacatctggaagacaagttcatttcatcttgagatcatggtgaaatattttggatatataaattccttaagctattgtaaccatgttttattgcaaagatgtaaaatatgccagatgtgtgtgagttggaaatcaaaaaaagaaaaataaaatatgcaaagaattc

SEQ ID NO: 19876 - DNA, 2888 bp, Homo sapiens
  source 1..2888: mol_type = unassigned DNA
aatcgccactgggctcgtcacgacagcctccttcagctccaacccggctaattaatccccactcatggatataggcacacaaactaaaggttcttgcatacactgagggacttcacggaaaatggatgttcagcgagatacgagctgtattttcaagacgttaccttctacaaaacactgctttggaagtatttatggcaaaccgaacctcagttatgtttaatttccctgatcaagcaacagtaaaaaaagttgtctatagcttgcctcgggttggagtagggaccagctatggtctgccacaagccaggaggatatcattggccactcctcgacagctttataaatcttccaatatgactcagcgctggcaaagaagggaaatttcaaacttcgaatatttgatgttccttaatactattgcaggacggacatataatgatctgaaccaatatccagtgtttccgtgggtgttaaccaactatgaatcagaagagttggacctgactcttccaggaaacttcagggatctatcaaagccaattggtgctttgaaccccaagagagctgtgttttatgcagagcgttatgagacatgggaagatgatcaaagcccaccctaccattataatacccattattcaacagcaacatctactttatcctggcttgttcgaattgaacctttcacaaccttcttcctcaatgcaaatgatggaaaatttgatcatccagatcgaaccttctcatccgttgcaaggtcttggagaactagtcagagagatacttctgatgtaaaggaactaattccagagttctactacctaccagagatgtttgtcaacagtaatggatataatcttggagtcagagaagatgaagtagtggtaaatgatgttgatcttcccccttgggcaaaaaaacctgaagactttgtgcggatcaacaggatggccctagaaagtgaatttgtttcttgccaacttcatcagtggatcgaccttatatttggctataagcagcgaggaccagaagcagttcgtgctctgaatgtttttcactacttgacttatgaaggctctgtgaacctggatagtatcactgatcctgtgctcagggaggccatggaggcacagatacagaactttggacagacgccatctcagttgcttattgagccacatccgcctcggagctctgccatgcacctgtgtttccttccacagagtccgctcatgtttaaagatcagatgcaacaggatgtgataatggtgctgaagtttccttcaaattctccagtaacccatgtggcagccaacactctgccccacttgaccatccccgcagtggtgacagtgacttgcagccgactctttgcagtgaatagatggcacaacacagtaggcctcagaggagctccaggatactccttggatcaagcccaccatcttcccattgaaatggatccattaatagccaataattcaggtgtaaacaaacggcagatcacagacctcgttgaccagagtatacaaatcaatgcacattgttttgtggtaacagcagataatcgctatattcttatctgtggattctgggataagagcttcagagtttattctacagaaacagggaaattgactcagattgtatttggccattgggatgtggtcacttgcttggccaggtccgagtcatacattggtggggactgctacatcgtgtccggatctcgagatgccaccctgctgctctggtactggagtgggcggcaccatatcataggagacaaccctaacagcagtgactatccggcaccaagagccgtcctcacaggccatgaccatgaagttgtctgtgtttctgtctgtgcagaacttgggcttgttatcagtggtgctaaagagggcccttgccttgtccacaccatcactggagatttgctgagagcccttgaaggaccagaaaactgcttattcccacgcttgatatctgtctccagcgaaggccactgtatcatatactatgaacgagggcgattcagtaatttcagcattaatgggaaacttttggctcaaatggagatcaatgattcaacacgggccattctcctgagcagtgacggccagaacctggtcaccggaggggacaatggggtagtagaggtctggcaggcctgtgacttcaagcaactgtacatttaccctggatgtgatgctggcattagagcaatggacttgtcccatgaccagaggactctgatcactggcatggcttctggtagcattgtagcttttaatatagattttaatcggtggcattatgagcatcagaacagatactgaagataaaggaagaaccaaaagccaagttaaagctgagagcacaagtgctgcatggaaaggcaatatctctggtggaaaaaactcgtctacatcgacctccgtttgtacattccatcacacccagcaatagctgtacattgtagtcagcaaccattttactttgtgtgttttttcacgactgaacaccagctgctatcaagcaagcttatatcatgtaaattatatgaattaggagatgttttggtaattatttcatatattgttgtttattgagaaaaggttgtaggatgtgtcacaagagacttttgacaattctgaggaaccttgtgtccagttgttacaaagtttaagctttgaacctaacctgcatcccatttccagcctcttttcaagctgagaaaaaaaaaaaaaaacacgtttgatactttgtacatcagatgcatcttatttaaaagggatacttttgtaaaagtaaaaccttgtataaagaacaaaatgtttcttaattttattgtggagttacaacttgcatgttccttactc

SEQ ID NO: 19877 - DNA, 11119 bp, Homo sapiens
  source 1..11119: mol_type = unassigned DNA
aggcagggggcggcaacatggcggagtgagcggcggcgtcggggcttcacaacaacagtggtggccgtagcagcggcggcagcagcgtcaatagcatcggccacagcctgagcttcagcaccggccagcgtcgtggccagctgctcgcgtcctcgggcttctcggagcggctgcagcatctccgcggggggcgggccgggccggacagaccgggagagggagagagcagaggcagcggcggcggcagcggcagcggcagcggcacacctgctgggcgggcacagccgcttgcccggcagcggttagcggtaccgccaccgccgagaataagcctgcggatcccccgccgcctccgcgggggagagcgccggagcgggccgggctgaggcgcaggcggggagcgggcccggcgccgcggcgctggtggatgctggggctccgaggcgacggccggggggcgggggccgaggcaggtataacggtaccggcggcggcagcgccgctgctcttcccttctcctcaggaggggggccaatggctagcgagaagccgggcccgggcccggggctcgagcctcagcccgtggggctcattgccgtcggggccgctggcggaggcggcgggggcagcggtggtggcggcaccgggggcagcgggatgggggagctaaggggggcgtccggctccggctcggtgatgctccccgcggggatgattaacccttcggtgccgatccgcaacatccggatgaaattcgcagtgttgattggactcatacaggtcggagaggtcagcaacagggacatcgtggagacggtgctcaacctgctggttggtggagaatttgacttggagatgaactttattatccaggatgctgagagtataacatgtatgacagagcttttggagcactgtgatgtaacatgtcaagcagaaatatggagcatgtttacagccattctacgaaaaagtgttcggaatttacagactagcacagaagttgggctaattgaacaagtattgctgaaaatgagtgctgtagatgacatgatagcagatcttctagttgatatgttgggggttcttgccagctacagcatcactgtcaaggagttgaagcttttgttcagcatgcttcgaggagaaagtggaatctggccaagacatgcagtaaaattattatcagttcttaatcagatgccacagagacacggtcctgatacttttttcaatttccctggttgtagcgctgcggcaattgccttgcctcctattgcaaagtggccttatcagaatggcttcaccttaaacacttggtttcgtatggatccattaaataatattaatgttgataaggataaaccttatctttattgttttcgtactagcaaaggagttggttactctgctcattttgttggcaactgtttaatagtcacatcattgaagtccaaaggaaaaggttttcagcattgtgtgaaatatgattttcaaccacgcaagtggtacatgatcagcattgtccacatttacaatcgatggaggaacagtgaaattcggtgttatgttaatggacaactggtatcttatggtgatatggcttggcatgttaacacaaatgatagctatgacaagtgctttcttggatcatcagaaactgctgatgcaaatagggtattctgtggtcaacttggtgccgtgtatgtgttcagtgaagcactcaacccagcacagatatttgcaattcatcagttaggacctggatataagagtaccttcaagtttaaatctgagagtgatattcatttggcagaacatcataaacaggtgttatatgatgggaaacttgcaagtagcattgcctttacatataatgctaaggccactgatgctcagctctgcctggaatcatcaccaaaagagaatgcatcaatttttgtgcattccccacatgctctaatgcttcaggatgtgaaagcgatagtaacacattcaattcatagtgcaattcattcaattggagggattcaagtgctttttccactttttgcccaattggataataggcagctcaatgacagtcaagtggaaacaactgtctgtgctactctgttggcattcctggttgaactacttaaaagttcagtagccatgcaagaacagatgctgggtggaaaaggctttttagtcattggctacttacttgaaaagtcatcaagagttcatataactagagctgtcctggagcaatttttatcttttgcaaaataccttgatggtttatctcatggagcacctttgctgaagcagctttgtgatcacattttatttaacccagccatctggatacatacacctgcaaaggttcagctttccctatacacatatttgtctgctgaatttattggaactgctaccatctacaccaccatacgcagagtaggaacagtattacagctaatgcacaccttaaaatattactactgggttattaatcctgctgacagtagtggcattacacctaaaggattagatggtccccggccatcacaaaaagaaattatatcactgagggcatttatgctactttttctgaaacagctgatactaaaggatcgaggggtcaaggaagatgaacttcagagtatattaaattacctacttacgatgcatgaggatgaaaatattcatgatgtgctacagttactggtggctttaatgtcggaacacccagcctcaatgataccagcatttgatcaaagaaatggaataagggtgatctacaaattattggcttctaaaagtgaaagtatttgggttcaagctttgaaggttctgggatactttctgaagcatttaggtcacaagagaaaagttgaaattatgcacacccatagtcttttcactcttcttggagaaaggctgatgttgcatacaaacactgtgactgtcaccacatacaacacactttatgagatcttgacagaacaagtatgtactcaggtcgtacacaaaccacatccagagccagattctacagtgaaaattcagaatccaatgattcttaaagtggtggcaactttgttaaaaaactctacaccaagtgcagagctgatggaagttcgtcgtttatttttatctgatatgataaaacttttcagtaacagccgtgaaaatagaagatgcttattgcagtgttcagtgtggcaggattggatgttttctcttggctatatcaatcctaaaaattctgaggaacagaagattaccgaaatggtctacaatatcttccggattcttttgtatcatgcaataaaatatgaatggggaggctggagagtctgggtggataccctctcaatagcccattccaaggtcacttatgaagctcataaggaatacctagccaaaatgtatgaggaatatcaaagacaagaggaggaaaacattaaaaagggaaagaaagggaatgtgagcaccatctctggtctttcatcacagacaacaggagcaaaaggtggaatggaaattcgagagatagaagatctttcacaaagccagagcccagaaagtgagaccgattaccctgtcagcacagatactcgagacttactcatgtcaacaaaagtgtcagatgatattcttggaaattcagatagaccaggaagtggtgtacatgtggaagtacatgatcttttagtagatataaaagcagagaaagtggaagcaacagaagtaaagctcgatgatatggatttatcaccggagactttagtaggtggagagaatggtgcccttgtggaggttgaatctctgttggataatgtatatagtgctgctgttgagaaactccagaacaatgtacatggaagtgttggtatcattaaaaaaaatgaagaaaaggataatggtccattgataacattagcagatgagaaagaagaccttcccaatagtagtacatcatttctctttgataaaatacccaaacaggaggaaaaactacttcctgaactttctagcaatcacattattccaaatattcaggacacacaagtacatcttggtgttagtgatgatcttggattgcttgctcacatgaccggtagcgtagacttaacttgtacatccagtataatagaagaaaaagaattcaaaatccatacaacttcagatggaatgagcagtatttctgaaagagacttagcgtcatcaactaaggggctggagtatgctgaaatgactgctacaactctggaaactgagtcttctagtagcaaaattgtaccaaatattgatgcaggaagtataatttcagatactgaaaggtctgacgatggcaaagaatcaggaaaagaaatccgaaaaatccaaacaactactacgacacaagctgtgcagggtcggtctatcacccaacaagaccgagatctccgagttgatttaggatttcgaggaatgccaatgactgaggaacagcgacgccagtttagcccaggtccacggactacaatgtttcgtattcctgagtttaaatggtctccaatgcaccagcggcttctcactgatttactatttgcattagaaactgatgtacatgtttggaggagccattctacaaagtctgtaatggattttgtcaatagcaatgaaaatattatttttgtacataacacaattcacctcatttcccaaatggtagacaacatcatcattgcttgtggaggaattttacctttgctctctgctgctacatcaccaactgtaagtaaaacggaattggaaaatattgaagtgacacaaggcatgtcagctgagacagcagtaactttcctcagccggctgatggctatggttgatgtacttgtgtttgcaagctctctaaattttagtgagattgaagctgagaaaaacatgtcttctggaggtttaatgcgacagtgcctaagattagtttgttgtgttgctgtgagaaactgtttagaatgtcggcaaagacagagagacaggggaaataaatcttcccatggaagcagtaaacctcaggaagttcctcaaagtgtgactgctacagcagcttcgaagactccattggaaaatgttccaggtaacctttctcctattaaggatccggatagacttcttcaggatgttgatatcaatcgccttcgtgctgttgtctttcgggatgtggatgatagcaaacaagcacagttcttagctctggctgttgtttacttcatttcggttctgatggtttccaagtatcgtgacatattagaaccccagagagagactacaagaactggaagccaaccaggtagaaacatcaggcaagaaataaattcaccaacaagtacagttgtggtcataccatctatccctcatccaagtttgaaccatggattccttgccaagttaattcctgagcagagctttggccactcattttacaaagaaacacctgctgcatttccagacaccataaaagaaaaagaaacaccaactcctggtgaagatattcaggtagaaagttcaattccccatacagattcaggaattggagaggagcaagtggctagcatcctgaatggggcagaattagaaacaagtacaggccctgatgccatgagtgaactcttatccactttgtcatccgaagtgaagaaatcacaagagagcttaactgaaaatcctagtgaaacgttgaagcctgcaacatccatatctagcattagtcaaaccaaaggcatcaatgtgaaggaaatactgaaaagtcttgtggctgctccagttgaaatagcagaatgtggccctgaacctatcccatacccagatccagcattgaagagagaaacacaagctattcttcctatgcagtttcattcctttgacaggagtgttgtggtgcctgtaaagaaaccacctccaggtagtttagctgtaaccactgtgggagccactactgctggaagtgggctgccaacaggcagtacctctaatatatttgctgctactggagctacaccaaaaagtatgattaatacaacaggtgccgtggattcagggtcctcctcctcttcctcctcttctagttttgtgaatggtgctactagcaaaaaccttccagctgtacaaactgttgctccaatgccagaagattcagctgaaaatatgagcatcactgcaaaacttgaaagagcgttagaaaaagttgctcctcttcttcgtgaaatttttgtagactttgccccattcctatctcgtacacttcttggcagtcatggacaagagctattgatagaaggccttgtttgtatgaagtccagcacatctgtggttgagcttgttatgctgctttgttctcaggaatggcaaaactctattcagaagaatgcaggacttgcatttattgagctcatcaatgaaggaagattactgtgccatgctatgaaggaccatatagtccgtgttgcaaatgaagctgagtttattttgaacagacaaagagccgaggatgtacataaacatgcagagtttgagtcacagtgtgcccaatatgctgctgatagaagagaggaagaaaagatgtgtgaccatcttatcagtgctgctaaacatcgagatcatgtaacagcaaatcagctgaaacagaagattctcaatattctcacaaataaacatggtgcttggggagcagtttctcatagccaattgcatgatttctggcgtttggattactgggaagatgatcttcgtcgaaggagacgatttgttcgcaatgcatttggctccactcatgctgaagcattgctgaaagctgcaatagaatatggcacggaagaagatgtagtaaagtcaaagaaaacattcagaagtcaagcaatagtgaaccaaaatgcagagacagaacttatgctggaaggagacgatgatgcagtcagtctgctacaggagaaagaaattgacaaccttgcaggcccagtggttctcagcacccctgcccagctcatcgctcccgtggtggtggccaaggggactctctccatcaccacgacagaaatctacttcgaggtagatgaggatgattctgccttcaagaagatcgacacgaaagttcttgcatacactgagggacttcacggaaaatggatgttcagcgagatacgagctgtattttcaagacgttaccttctacaaaacactgctttggaagtatttatggcaaaccgaacctcagttatgtttaatttccctgatcaagcaacagtaaaaaaagttgtctatagcttgcctcgggttggagtagggaccagctatggtctgccacaagccaggaggatatcattggccactcctcgacagctttataaatcttccaatatgactcagcgctggcaaagaagggaaatttcaaacttcgaatatttgatgttccttaatactattgcaggacggacatataatgatctgaaccaatatccagtgtttccgtgggtgttaaccaactatgaatcagaagagttggacctgactcttccaggaaacttcagggatctatcaaagccaattggtgctttgaaccccaagagagctgtgttttatgcagagcgttatgagacatgggaagatgatcaaagcccaccctaccattataatacccattattcaacagcaacatctactttatcctggcttgttcgaattgaacctttcacaaccttcttcctcaatgcaaatgatggaaaatttgatcatccagatcgaaccttctcatccgttgcaaggtcttggagaactagtcagagagatacttctgatgtaaaggaactaattccagagttctactacctaccagagatgtttgtcaacagtaatggatataatcttggagtcagagaagatgaagtagtggtaaatgatgttgatcttcccccttgggcaaaaaaacctgaagactttgtgcggatcaacaggatggccctagaaagtgaatttgtttcttgccaacttcatcagtggatcgaccttatatttggctataagcagcgaggaccagaagcagttcgtgctctgaatgtttttcactacttgacttatgaaggctctgtgaacctggatagtatcactgatcctgtgctcagggaggccatggaggcacagatacagaactttggacagacgccatctcagttgcttattgagccacatccgcctcggagctctgccatgcacctgtgtttccttccacagagtccgctcatgtttaaagatcagatgcaacaggatgtgataatggtgctgaagtttccttcaaattctccagtaacccatgtggcagccaacactctgccccacttgaccatccccgcagtggtgacagtgacttgcagccgactctttgcagtgaatagatggcacaacacagtaggcctcagaggagctccaggatactccttggatcaagcccaccatcttcccattgaaatggatccattaatagccaataattcaggtgtaaacaaacggcagatcacagacctcgttgaccagagtatacaaatcaatgcacattgttttgtggtaacagcagataatcgctatattcttatctgtggattctgggataagagcttcagagtttattctacagaaacagggaaattgactcagattgtatttggccattgggatgtggtcacttgcttggccaggtccgagtcatacattggtggggactgctacatcgtgtccggatctcgagatgccaccctgctgctctggtactggagtgggcggcaccatatcataggagacaaccctaacagcagtgactatccggcaccaagagccgtcctcacaggccatgaccatgaagttgtctgtgtttctgtctgtgcagaacttgggcttgttatcagtggtgctaaagagggcccttgccttgtccacaccatcactggagatttgctgagagcccttgaaggaccagaaaactgcttattcccacgcttgatatctgtctccagcgaaggccactgtatcatatactatgaacgagggcgattcagtaatttcagcattaatgggaaacttttggctcaaatggagatcaatgattcaacacgggccattctcctgagcagtgacggccagaacctggtcaccggaggggacaatggggtagtagaggtctggcaggcctgtgacttcaagcaactgtacatttaccctggatgtgatgctggcattagagcaatggacttgtcccatgaccagaggactctgatcactggcatggcttctggtagcattgtagcttttaatatagattttaatcggtggcattatgagcatcagaacagatactgaagataaaggaagaaccaaaagccaagttaaagctgagagcacaagtgctgcatggaaaggcaatatctctggtggaaaaaactcgtctacatcgacctccgtttgtacattccatcacacccagcaatagctgtacattgtagtcagcaaccattttactttgtgtgttttttcacgactgaacaccagctgctatcaagcaagcttatatcatgtaaattatatgaattaggagatgttttggtaattatttcatatattgttgtttattgagaaaaggttgtaggatgtgtcacaagagacttttgacaattctgaggaaccttgtgtccagttgttacaaagtttaagctttgaacctaacctgcatcccatttccagcctcttttcaagctgagaaaaaaaaaaaaaaacacgtttgatactttgtacatcagatgcatcttatttaaaagggatacttttgtaaaagtaaaaccttgtataaagaacaaaatgtttcttaattttattgtggagttacaacttgcatgttccttactcctgttggcttgatggaacaggtgcattcacactatgaaacagaaagatctgtccaaggacacagcttgtatgaaagggttgaatttgggctccatcagtaatttttgacattttcaccaaaatatagtttgcactttttaatctaaagtcatcccttctgagtgaaatttgctcataaagcatttggatactaagccattatttgccattttgggtactttatacaaagaaaattcagccctaccctgcataatttgaagacacagcagaaagggggcttagggatgaggtcctggtttttcttgtataaataggagtcatgggcgttagttctgtagtaataacttcccagcacctggacatctcttccagagttatcccactggcttggtgtgtatacattaggggaggataatctgatgctaactttttttttctctttggttcttgaatagcttagtttctttaataacaagtcaaactttattacaacaataactgaagttattcttttaggttctcgtgaaattctcactgaaagccacattcttagcctaaggcatttcatcttttatgatataaaatgatggctatcaaatgattttccatacattgtactgatcaagttatacacccaggggtatatacactttcttcatgtttcttctttgtatatttggtgactgtatcgtcatagatgtacatattgtgtcggtagggctatgaggcatgttacaggaatgtaattttctcagaatttacactcactcgcagtcatttatttaaaaagataaaacaagataatgggttctttgtattggcactttgcaccagaaacatatcattatttattgatgtgattacttatttgttatccaccttgtactagtaagttttagcactgaattccttcttcactgttgtttgtatttatgaaattctgaaattatggggaatcagcgtaatgattaagttattcatcaccaggctgtaagcaatatcttgagtttgtagcttagaattgggaggatacttaacatctggaagacaagttcatttcatcttgagatcatggtgaaatattttggatatataaattccttaagctattgtaaccatgttttattgcaaagatgtaaaatatgccagatgtgtgtgagttggaaatcaaaaaaagaaaaataaaatatgcaaagaattc

SEQ ID NO: 19878 - DNA, 1560 bp, Homo sapiens
  source 1..1560: mol_type = unassigned DNA
aggattgcgaagaatggctccctttggggagactttacagaaaacatttaggcccagtggttctcagcacccctgcccagctcatcgctcccgtggtggtggccaaggggactctctccatcaccacgacagaaatctacttcgaggtagatgaggatgattctgccttcaagaagatcgacacgaaagttcttgcatacactgagggacttcacggaaaatggatgttcagcgagatacgagctgtattttcaagacgttaccttctacaaaacactgctttggaagtatttatggcaaaccgaacctcagttatgtttaatttccctgatcaagcaacagtaaaaaaagttgtctatagcttgcctcgggttggagtagggaccagctatggtctgccacaagccaggaggatatcattggccactcctcgacagctttataaatcttccaatatgactcagcgctggcaaagaagggaaatttcaaacttcgaatatttgatgttccttaatactattgcaggacggacatataatgatctgaaccaatatccagtgtttccgtgggtgttaaccaactatgaatcagaagagttggacctgactcttccaggaaacttcagggatctatcaaagccaattggtgctttgaaccccaagagagctgtgttttatgcagagcgttatgagacatgggaagatgatcaaagcccaccctaccattataatacccattattcaacagcaacatctactttatcctggcttgttcgaattgaacctttcacaaccttcttcctcaatgcaaatgatggaaaatttgatcatccagatcgaaccttctcatccgttgcaaggtcttggagaactagtcagagagatacttctgatgtaaaggaactaattccagagttctactacctaccagagatgtttgtcaacagtaatggatataatcttggagtcagagaagatgaagtagtggtaaatgatgttgatcttcccccttgggcaaaaaacctgaagactttgtgcggatcaacaggatggccctagaaagtgaatttgtttcttgccaacttcatcagtggatcgaccttatatttggctataagcagcgaggaccagaagcagttcgtgctctgaatgtttttcactacttgacttatgaaggctctgtgaacctggatagtatcactgatcctgtgctcagggaggccatggaggcacagatacagaactttggacagacgccatctcagttgcttattgagccacatccgcctcggagctctgccatgcacctgtgtttccttccacagagtccgctcatgtttaaagatcagatgcaacaggatgtgataatggtgctgaagtttccttcaaattctccagtaacccatgtggcagccaacactctgccccacttgaccatccccgcagtggtgacagtgacttgcagccgactctttgcagtgaatagatggcacaacacagtaggcctcagaggagctccaggatactccttggatcaagcccaccatcttcccattgaaat

SEQ ID NO: 19879 - DNA, 8788 bp, Homo sapiens
  source 1..8788: mol_type = unassigned DNA
gctcgtctgcctggctgcggggtgacacggggcttcgccttgggaaggggtcgagggaagcagttagacggctgccgggcggcggctgccgcgcggcacacaatatttatttaattgcccaactaccactgatgaagatatattggagtgactgctgaaattgcctttttgtttttaaccagaggacagtccatttgtttcacttctttttgctttctttactgctatgagctttactgaacggctgaaaaacttggaaaataaaatggacatgctgtagtcttgaacataatttttttaaggaaaacttaaagtgccagagtgaaagccagaatggcatccagagagaggctctttgaactttggatgctttattgtacaaagaaagatccagattacctgaagctgtggttggacacttttgtttctagctatgaacaatttttagacgttgactttgaaaagctgcctaccagggtagatgatatgcctccaggaatatctctgcttcctgataatattctgcaggttctgaggatccagcttctacagtgtgttcagaaaatggcagatgggttagaggaacaacagcaagccttgtcaattttgcttgtcaagttcttcattattctttgcagaaatctatcaaatgtggaagaaattgggacttgctcgtacattaattatgtcatcaccatgacaacactctatattcagcaattaaaaagcaaaaaaaaagagaaggaaatggcagatcagacatgtattgaagaatttgtgatccacgcattggcattttgtgaaagcttatatgatccatatcggaattggagacatagaatttcaggacgaatccttagtactgtggaaaagagcagacagaaatataaaccagcttctctcacagtggaattcgtccctttcttttatcaatgttttcaggaaagtgaacatctcaaggaaagtcttaaatgttgcttattgcatctctttggagccattgtagccggtgggcagaggaatgctttgcaagcaatttctccagccactatggaagttcttatgcgagtattggcagattgtgattcctgggaggatggagatcctgaagaagtgggtaggaaggcagaactaactctgaagtgccttacagaagtggtacatatccttctcagtagcaactctgatcagcgtcaagtggaaaccagtactattctggagaactattttaaattgctaaattcagatcattcagctttacctaatcaaaggaggtccagacagtgggaaaaccgatttattgctctacagatcaaaatgctgaataccatcacagccatgttagattgtacagatagacctgttcttcaggccatttttcttaacagcaattgctttgaacatctcatacgactgctacagaactgcaaggtgtttcagggacaattggattgtttggccatatcaaccattcaggctttgaccgcagtaatgaacaaatctccagctgctaaggaagtatttaaagaaagaattggttatacacatatgcttgaagtattaaaatccctgggtcagccaccactggaattacttaaagaacttatgaatatggctgtagagggtgaccacacttcagttgggattttgggcattagtaatgtccaacctctcttgcttcttatccagtggcttccagaactacaatcccatgacctgcaaatcttcatctctgattggctgaaaagaatttgttgtattaatagacagagtcgaactacttgtgtcaatgcaaacatggggattagaatcattgaaacccttgacttgcattcttccctccatcaaacttgtgctgagaacttgattgcaatccatggttccttggggagtcagtcagtgagctcagaagaaatccgtcgactactgagattgctgagagtggatgaatctgagtctgttcacccttatgtcactcccgtgactcgagcaatcctgacaatggcccgaaaactaagtctagagagtgccctccagtatttcaatttgtcacatagtatggcaggaatttctgtgcctcccatacagaaatggccagggtctgccttttctttcagtgcttggttttgcttagaccaggatcagttgactcttggcattgctaacaaaggagggaaaaggaaacaattgtacagtttttttacaggaagtggcatgggttttgaagcctttattacccattcaggtatgttggtcgtggcagtgtgcacaaaaagagaatatgcaacggttatgcttcctgaccacagtttctgtgattccctctggcacaacataactgttgtccacatgcctggaaaaaggccttttggtcagagcttcgtctatatctatgacaatggacaacagaaggtttctgcccctctcagatttcctgccatgaatgaaccctttacttcctgttgcattggttcagctgggcaaagaaccaccactcctccaccatcccaaatcccagatccacctttctcttctcccattacccctcatcggacatcatttggtggaattctgtcatcagcctcctggggaggaacaattgaaaaatcaaaattgattaccaaattgatatcagctggaacccaagacagtgaatgggggtgtcccacatctctggagggtcagctaggatctgttatcatcttttatgaaccactacaacctcctcaggtgaaggcattatatttagcaggtccaaattgtttaagcccttggaagtgtcaagagtctgacatggccgacctgcctggtaacatccttctttactacacagcaaaggcctgcaaaaattcaatctgtcttgatttatctactaattgtttgcatggaagattaacaggaaacaaagtagtgaactgggacattaaggatatcataaactgcataggtgggttaaatgtactctttcctttattggaacaaatcagccactttagtgaaggacagattcctgaagaaaagaatgaaagcacagttcctgaatcagtaacacctgttgaaggagattggctcgtatggacttccacaaaggcctcagagtcaagactagagagaaacctagttgcaacatttatcttaattgtgaaacattttattcagagacatcctatcaaccagggcaatcttattcactcccatggagttgcaactcttggtgctttacttcagaaggtgccaagcaccttgatggatgttaatgtgttgatggcagttcagttactaattgaacaagtatcattagagaaaaatatgcagctcctgcaacaaatgtatcaatatttactctttgactttcgtatttggaaccgtggagattttccctttcgaatcggtcacatacagtatctttcaaccatcattaaagacagcaggagagttttccgaaagaagtatggtgtgcagtttctcctagatacacttaggatttattatgggaatggttgtaaatataatgaactatctctagatgatattcgaacaataaggacttctttgtatggactaattaaatattttctgtgcaaaggtggatctcatgaagagatacaaagtattatggggtacatagctgctactaatgaagaagaacagctctttggaattttggacgtgctcttcagtctcctacgtaccagcccaaccagaggtcagcttttcttactgctttttgaaccaggaaatgctgacatactgtacgcattgctcttaaatcagaagtactctgacagactaagagaaatcatttttaagattatggaacaaatgttgaaatgcacgaacgtttatgagcgtagtaaacaacatattcgactcagagaagttggctactcgggactgggactccttcttaatgaagcacttgttaatacttctcttattaaaaacctcacccatcaaatcataaatacagatcctgttattaatttcaaagatctactatctgtggtatatatatctcacagagcacatataaatgttagagtggccatctgcagaaaggttttgcaaattttgcagttccagccagatgcagcacatcaaatatcacagcaagtgggttggcaagacaccttagttaggctttttttaaaagcaaaatttgaaaacggaaatactcttcataagcacagtagagctgttttaatgaaagacaatgataaaaatatgtcaactgaagataccaagaagaactctgatgaaaaaacagatgaggaaaaaatcacctcttttgcctcagctaatgtgtcttcggatcagtggagtttggaggatagacactctttagactcaaacacaccattatttccagaagatagctctgtgggagaattgtctttcaaatcagagaatcaagaggaattctggcatagtaacccttcacatttgagtttagacctcagtggaattgactcatgtgaaatgagtgatagtggaagtcaagtgccagacagtctgcctagcacaccatccccagtagagtctactaaatcgttttctgtgcactctgacagagaaagcagcatcacaaatgatatgggctttagtgatgacttctctttacttgaaagccaagagagatgtgaggaggagcttcttcaattactgacacatattttgaattatgtaatgtgtaagggactagaaaagtctgatgatgatacttggattgaacgaggacaagtgttttcagcactaagtaaaccaggaatatccagtgaactacttcgaccatcagatgaaataaaactaactttgctacaaaagatgttagaatgggcaatctcagaaaacagagaagcaaaaactaatccagtaactgctgaaaacgccttccgactagtgctgatcatacaggactttcttcagtcagagggactagttaattcaaacatgtggaccgagaagcttttagaggatatgatgctgctctttgactgtctgtcagtctgctattctgaaagtccagtatgggtaaaactctctcaaattcagatccagttgcttctaggattcattggaaggggtaatttgcaggtttgtgcaatggcatcagctaagctaaatacccttcttcagaccaaagtgattgaaaatcaggatgaagcatgttacattttagggaagctggaacatgttctaagtcaatcaatcaaggaacagactgaaatctactcatttctgattccccttgttcgtaccctggtttccaaaatttatgagcttctcttcatgaacttgcacctaccttctttaccttttaccaatggtagctcctcattttttgaagattttcaagaatattgtaattcaaatgaatggcaagtttacattgaaaaatatattgtaccttatatgaagcagtatgaagctcatacattttacgatggtcatgagaacatggcactttattggaaggattgttatgaagctttaatggtaaatatgcataaacgagaccgggaaggaggggaaagcaagctcaaatttcaggagctgtttgtggagccatttaatcgaaaagcacgccaagagaacctgaggtataataatatgcttaaacaacttagcagtcaacagttagccactcttagacgctggaaagcaatacagctctatcttacatgtgaaaggggaccttgggctaaaaggaaacagaatccaattcactggaagctagctaatgtagagaattattcccgcatgagacttaagctggtaccgaattataatttcaaaacccatgaggaagctagtgccttgagagataatctgggtatccaacactcacagccttccagtgatacattgcttttggaagtagtgaaacaagtaaaagttagtgatatggtggaggataaattagaccttcctgaagaggatataacagctagagtaaatgttgatgagaaagaagaacaggatcaaaaagaaaaattggtattgatggaagactgtgaactcattacaataattgatgtaattcctggcagattagaaatcactactcaacacatttacttctatgatggcagcattgaaaaagaagatggagtaggctttgatttcaagtggcctcattctcaaattcgagagattcatctccggcgttacaatttaagaagatcagcccttgagatttttcatgttgaccaatccaactactttctcaatttcaaaaaagaggttagaaacaaaatatatagccgactgttgtcacttcattccccaaatagttattatggaagcagatcaccacaggagttattcaaagcatcaggattgacacagaaatgggtaaacagagagatatcaaattttgactacctcattcaaataaatacaatggcaggacgaacctataatgaccttgcacagtatcctgtgtttccctggattttacaagattatacttcggaagagttggaccttaataaccctgctgtatttcgagatctttccaaaccaattggggtagttaatgaaaaaaacgccaaagctatgagagaaaaatatgaaaattttgaggatcctatgggaactattgataagtttcactatggtactcactattcaaattctgcgggggtcatgcactatctcattcgtgtagaaccgttcaccaccctccacatccaacttcagagtggaaggtttgactgtgcagatcgacagttccattctattcctgctacctggcaagctcttatggataatccatatgatgttaaagaacttattcctgaattcttctatttcccagagtttttggaaaatcaaaatcaatttaacttgggtcgtctacagatttccaaagaattagtaaatgatgtcattctcccgaaatgggctaaatcagctgaagatttcatctataaacataggaaagctttggagtctgaatatgtttcagctcatcttcatgaatggatagatctgatctttggctataaacagaggggaccagctgcagtagaggcactcaacgttttctattattgtagttatgaaggagctgtggatctggatgccttaacagatgagaaagaaagaaaagccttagaagggatgattaataattttgggcaaacaccctgtcaattattaaagataacaataagcatgaattatgttattggaacccatggatggttgccttatgacagaaacatttctaattactttacattcatcaaggatcaaactgtgacaaatccaaaaactcagcgcagtataaatggttcttttgctcccgggctagagatcacttctaagctatttgtagtatcacatgatgcaaagttgctcttcagtgctggatactgggataatagcattcaagtgatgtcacttacaaaaggcaaaattatctcacacatcatccggcatatggatattgtgacttgcttagctacagattactgtggaatacatttgatttctggttccagagatactacatgtatgatatggcaaataacacaacagggaggtgttcctgtgggcttagcatctaaaccttttcagattctttatggacacaccaacgaggtactgagtgtcggcatcagcactgagctagacatggcagtgtcaggatcaagggatggaacggtgattatacataccattcctaatttggctatatcttgggaaggacatattgttgtctactccagcactgaagaaaagaccaccctcaaggataagaatgcattacatctgttttctataaatggcaagtatctagggtctcaaatcctgaaggaacaagtatcagatatatgtataatcggagaacacattgtcacaggcagcatacaaggattcctgtctataagagatctccacagcttgaatctcagcatcaacccattagccatgcgactgcctatccattgtgtttgtgtcaccaaagaatacagccatattcttgtaggtttagaagatggcaaattgattgtagtgggtgttggcaagcctgctgagatgcgttcaggtcagctttctcgaaaattttggggatcgagcaagcggctcagccagatttcagctggagaaactgaatataatactcaagattccaagtgattgttatttccattttctgttatgattactgaaacctgatttattgctttgtcactttaaccacatctctcaactctctgcaatgttgcaaggcttttatccctgaaaatcatttacagataaccacaatttgctgtggtatataaactaattcttggtctatactaagatgtatttgagaaaatacatttgatttgattttgtggcccattcctaaaggtcattgtatccatttttaaaacaaactaaaatgagaacattaggttcaattttcttattattccaaatgataaaatttaagatttttctaataaaagagtacagataatgggacagttgagagagatggctttaaatacattcttaagtaatcattttcctatttactgaccactgtaatgaaaatatatcaatttatttatggaactcctgattggggataatattttaaaggtatctgttgcacacttggattttcaaaactcggtgaaagttacaagtttgcatggtaagaataaaataagaatattgaaactggtacattagctaattctattactacttagcgtgtttctaatgagaagttactgaaatctattactgtccttaataaaaattgagtagaaaaaagtggaactag

SEQ ID NO: 19880 - DNA, 10938 bp, Homo sapiens
  source 1..10938: mol_type = unassigned DNA
gctcgtctgcctggctgcggggtgacacggggcttcgccttgggaaggggtcgagggaagcagttagacggctgccgggcggcggctgccgcgcggcacacaatatttatttaattgcccaactaccactgatgaagatatattggagtgactgctgaaattgcctttttgtttttaaccagaggacagtccatttgtttcacttctttttgctttctttactgctatgagctttactgaacggctgaaaaacttggaaaataaaatggacatgctgtagtcttgaacataatttttttaaggaaaacttaaagtgccagagtgaaagccagaatggcatccagagagaggctctttgaactttggatgctttattgtacaaagaaagatccagattacctgaagctgtggttggacacttttgtttctagctatgaacaatttttagacgttgactttgaaaagctgcctaccagggtagatgatatgcctccaggaatatctctgcttcctgataatattctgcaggttctgaggatccagcttctacagtgtgttcagaaaatggcagatgggttagaggaacaacagcaagccttgtcaattttgcttgtcaagttcttcattattctttgcagaaatctatcaaatgtggaagaaattgggacttgctcgtacattaattatgtcatcaccatgacaacactctatattcagcaattaaaaagcaaaaaaaaagagaaggaaatggcagatcagacatgtattgaagaatttgtgatccacgcattggcattttgtgaaagcttatatgatccatatcggaattggagacatagaatttcaggacgaatccttagtactgtggaaaagagcagacagaaatataaaccagcttctctcacagtggaattcgtccctttcttttatcaatgttttcaggaaagtgaacatctcaaggaaagtcttaaatgttgcttattgcatctctttggagccattgtagccggtgggcagaggaatgctttgcaagcaatttctccagccactatggaagttcttatgcgagtattggcagattgtgattcctgggaggatggagatcctgaagaagtgggtaggaaggcagaactaactctgaagtgccttacagaagtggtacatatccttctcagtagcaactctgatcagcgtcaagtggaaaccagtactattctggagaactattttaaattgctaaattcagatcattcagctttacctaatcaaaggaggtccagacagtgggaaaaccgatttattgctctacagatcaaaatgctgaataccatcacagccatgttagattgtacagatagacctgttcttcaggccatttttcttaacagcaattgctttgaacatctcatacgactgctacagaactgcaaggtgtttcagggacaattggattgtttggccatatcaaccattcaggctttgaccgcagtaatgaacaaatctccagctgctaaggaagtatttaaagaaagaattggttatacacatatgcttgaagtattaaaatccctgggtcagccaccactggaattacttaaagaacttatgaatatggctgtagagggtgaccacacttcagttgggattttgggcattagtaatgtccaacctctcttgcttcttatccagtggcttccagaactacaatcccatgacctgcaaatcttcatctctgattggctgaaaagaatttgttgtattaatagacagagtcgaactacttgtgtcaatgcaaacatggggattagaatcattgaaacccttgacttgcattcttccctccatcaaacttgtgctgagaacttgattgcaatccatggttccttggggagtcagtcagtgagctcagaagaaatccgtcgactactgagattgctgagagtggatgaatctgagtctgttcacccttatgtcactcccgtgactcgagcaatcctgacaatggcccgaaaactaagtctagagagtgccctccagtatttcaatttgtcacatagtatggcaggaatttctgtgcctcccatacagaaatggccagggtctgccttttctttcagtgcttggttttgcttagaccaggatcagttgactcttggcattgctaacaaaggagggaaaaggaaacaattgtacagtttttttacaggaagtggcatgggttttgaagcctttattacccattcaggtatgttggtcgtggcagtgtgcacaaaaagagaatatgcaacggttatgcttcctgaccacagtttctgtgattccctctggcacaacataactgttgtccacatgcctggaaaaaggccttttggtcagagcttcgtctatatctatgacaatggacaacagaaggtttctgcccctctcagatttcctgccatgaatgaaccctttacttcctgttgcattggttcagctgggcaaagaaccaccactcctccaccatcccaaatcccagatccacctttctcttctcccattacccctcatcggacatcatttggtggaattctgtcatcagcctcctggggaggaacaattgaaaaatcaaaattgattaccaaattgatatcagctggaacccaagacagtgaatgggggtgtcccacatctctggagggtcagctaggatctgttatcatcttttatgaaccactacaacctcctcaggtgaaggcattatatttagcaggtccaaattgtttaagcccttggaagtgtcaagagtctgacatggccgacctgcctggtaacatccttctttactacacagcaaaggcctgcaaaaattcaatctgtcttgatttatctactaattgtttgcatggaagattaacaggaaacaaagtagtgaactgggacattaaggatatcataaactgcataggtgggttaaatgtactctttcctttattggaacaaatcagccactttagtgaaggacagattcctgaagaaaagaatgaaagcacagttcctgaatcagtaacacctgttgaaggagattggctcgtatggacttccacaaaggcctcagagtcaagactagagagaaacctagttgcaacatttatcttaattgtgaaacattttattcagagacatcctatcaaccagggcaatcttattcactcccatggagttgcaactcttggtgctttacttcagaaggtgccaagcaccttgatggatgttaatgtgttgatggcagttcagttactaattgaacaagtatcattagagaaaaatatgcagctcctgcaacaaatgtatcaatatttactctttgactttcgtatttggaaccgtggagattttccctttcgaatcggtcacatacagtatctttcaaccatcattaaagacagcaggagagttttccgaaagaagtatggtgtgcagtttctcctagatacacttaggatttattatgggaatggttgtaaatataatgaactatctctagatgatattcgaacaataaggacttctttgtatggactaattaaatattttctgtgcaaaggtggatctcatgaagagatacaaagtattatggggtacatagctgctactaatgaagaagaacagctctttggaattttggacgtgctcttcagtctcctacgtaccagcccaaccagaggtcagcttttcttactgctttttgaaccaggaaatgctgacatactgtacgcattgctcttaaatcagaagtactctgacagactaagagaaatcatttttaagattatggaacaaatgttgaaatgcacgaacgtttatgagcgtagtaaacaacatattcgactcagagaagttggctactcgggactgggactccttcttaatgaagcacttgttaatacttctcttattaaaaacctcacccatcaaatcataaatacagatcctgttattaatttcaaagatctactatctgtggtatatatatctcacagagcacatataaatgttagagtggccatctgcagaaaggttttgcaaattttgcagttccagccagatgcagcacatcaaatatcacagcaagtgggttggcaagacaccttagttaggctttttttaaaagcaaaatttgaaaacggaaatactcttcataagcacagtagagctgttttaatgaaagacaatgataaaaatatgtcaactgaagataccaagaagaactctgatgaaaaaacagatgaggaaaaaatcacctcttttgcctcagctaatgtgtcttcggatcagtggagtttggaggatagacactctttagactcaaacacaccattatttccagaagatagctctgtgggagaattgtctttcaaatcagagaatcaagaggaattctggcatagtaacccttcacatttgagtttagacctcagtggaattgactcatgtgaaatgagtgatagtggaagtcaagtgccagacagtctgcctagcacaccatccccagtagagtctactaaatcgttttctgtgcactctgacagagaaagcagcatcacaaatgatatgggctttagtgatgacttctctttacttgaaagccaagagagatgtgaggaggagcttcttcaattactgacacatattttgaattatgtaatgtgtaagggactagaaaagtctgatgatgatacttggattgaacgaggacaagtgttttcagcactaagtaaaccaggaatatccagtgaactacttcgaccatcagatgaaataaaactaactttgctacaaaagatgttagaatgggcaatctcagaaaacagagaagcaaaaactaatccagtaactgctgaaaacgccttccgactagtgctgatcatacaggactttcttcagtcagagggactagttaattcaaacatgtggaccgagaagcttttagaggatatgatgctgctctttgactgtctgtcagtctgctattctgaaagtccagtatgggtaaaactctctcaaattcagatccagttgcttctaggattcattggaaggggtaatttgcaggtttgtgcaatggcatcagctaagctaaatacccttcttcagaccaaagtgattgaaaatcaggatgaagcatgttacattttagggaagctggaacatgttctaagtcaatcaatcaaggaacagactgaaatctactcatttctgattccccttgttcgtaccctggtttccaaaatttatgagcttctcttcatgaacttgcacctaccttctttaccttttaccaatggtagctcctcattttttgaagattttcaagaatattgtaattcaaatgaatggcaagtttacattgaaaaatatattgtaccttatatgaagcagtatgaagctcatacattttacgatggtcatgagaacatggcactttattggaaggattgttatgaagctttaatggtaaatatgcataaacgagaccgggaaggaggggaaagcaagctcaaatttcaggagctgtttgtggagccatttaatcgaaaagcacgccaagagaacctgaggtataataatatgcttaaacaacttagcagtcaacagttagccactcttagacgctggaaagcaatacagctctatcttacatgtgaaaggggaccttgggctaaaaggaaacagaatccaattcactggaagctagctaatgtagagaattattcccgcatgagacttaagctggtaccgaattataatttcaaaacccatgaggaagctagtgccttgagagataatctgggtatccaacactcacagccttccagtgatacattgcttttggaagtagtgaaacaagtaaaagttagtgatatggtggaggataaattagaccttcctgaagaggatataacagctagagtaaatgttgatgagaaagaagaacaggatcaaaaagaaaaattggtattgatggaagactgtgaactcattacaataattgatgtaattcctggcagattagaaatcactactcaacacatttacttctatgatggcagcattgaaaaagaagatggagtaggctttgatttcaagtggcctcattctcaaattcgagagattcatctccggcgttacaatttaagaagatcagcccttgagatttttcatgttgaccaatccaactactttctcaatttcaaaaaagaggttagaaacaaaatatatagccgactgttgtcacttcattccccaaatagttattatggaagcagatcaccacaggagttattcaaagcatcaggattgacacagaaatgggtaaacagagagatatcaaattttgactacctcattcaaataaatacaatggcaggacgaacctataatgaccttgcacagtatcctgtgtttccctggattttacaagattatacttcggaagagttggaccttaataaccctgctgtatttcgagatctttccaaaccaattggggtagttaatgaaaaaaacgccaaagctatgagagaaaaatatgaaaattttgaggatcctatgggaactattgataagtttcactatggtactcactattcaaattctgcgggggtcatgcactatctcattcgtgtagaaccgttcaccaccctccacatccaacttcagagtggaaggtttgactgtgcagatcgacagttccattctattcctgctacctggcaagctcttatggataatccatatgatgttaaagaacttattcctgaattcttctatttcccagagtttttggaaaatcaaaatcaatttaacttgggtcgtctacagatttccaaagaattagtaaatgatgtcattctcccgaaatgggctaaatcagctgaagatttcatctataaacataggaaagctttggagtctgaatatgtttcagctcatcttcatgaatggatagatctgatctttggctataaacagaggggaccagctgcagtagaggcactcaacgttttctattattgtagttatgaaggagctgtggatctggatgccttaacagatgagaaagaaagaaaagccttagaagggatgattaataattttgggcaaacaccctgtcaattattaaaggaaccacaccctccaagattatcagcagaagaagcagtgcagaagccaaccaaaatagacacttcaaccctaaacctgtttcaacaccttcctgaactcaagtcattttttatagaggggattagtgatggtattccactattaaaggccaccatccccaaaaatcagtatcgttcttttatgtctcaaggcagccctgagttactgataacaataagcatgaattatgttattggaacccatggatggttgccttatgacagaaacatttctaattactttacattcatcaaggatcaaactgtgacaaatccaaaaactcagcgcagtataaatggttcttttgctcccgggctagagatcacttctaagctatttgtagtatcacatgatgcaaagttgctcttcagtgctggatactgggataatagcattcaagtgatgtcacttacaaaaggcaaaattatctcacacatcatccggcatatggatattgtgacttgcttagctacagattactgtggaatacatttgatttctggttccagagatactacatgtatgatatggcaaataacacaacagggaggtgttcctgtgggcttagcatctaaaccttttcagattctttatggacacaccaacgaggtactgagtgtcggcatcagcactgagctagacatggcagtgtcaggatcaagggatggaacggtgattatacataccattcagaaaggtcagtacatgaggactttacgaccaccttgtgagagttctctgttcctgaccattcctaatttggctatatcttgggaaggacatattgttgtctactccagcactgaagaaaagaccaccctcaaggataagaatgcattacatctgttttctataaatggcaagtatctagggtctcaaatcctgaaggaacaagtatcagatatatgtataatcggagaacacattgtcacaggcagcatacaaggattcctgtctataagagatctccacagcttgaatctcagcatcaacccattagccatgcgactgcctatccattgtgtttgtgtcaccaaagaatacagccatattcttgtaggtttagaagatggcaaattgattgtagtgggtgttggcaagcctgctgagatgcgttcaggtcagctttctcgaaaattttggggatcgagcaagcggctcagccagatttcagctggagaaactgaatataatactcaagattccaagtgattgttatttccattttctgttatgattactgaaacctgatttattgctttgtcactttaaccacatctctcaactctctgcaatgttgcaaggcttttatccctgaaaatcatttacagataaccacaatttgctgtggtatataaactaattcttggtctatactaagatgtatttgagaaaatacatttgatttgattttgtggcccattcctaaaggtcattgtatccatttttaaaacaaactaaaatgagaacattaggttcaattttcttattattccaaatgataaaatttaagatttttctaataaaagagtacagataatgggacagttgagagagatggctttaaatacattcttaagtaatcattttcctatttactgaccactgtaatgaaaatatatcaatttatttatggaactcctgattggggataatattttaaaggtatctgttgcacacttggattttcaaaactcggtgaaagttacaagtttgcatggtaagaataaaataagaatattgaaactggtacattagctaattctattactacttagcgtgtttctaatgagaagttactgaaatctattactgtccttaataaaaattgagtagaaaaaagtggaactagagatacattttacagatgtatttccttaataatataattaagcaaaagtgctaattgtgattttgacagttgggccttttaagtagcatttgcagcacaatttgcatttgcaaagttccgaatttcttgactctttcttcactaagcaaatactgttttactctaataattaagagttagtagtacccaaatatgttgaatttttacttaggatatctgtgtgattgatgaatgaattgaaaagatatgtataacttaaaataatcatttatatatagtaatttaaaaatttctatttcatgttttaggattatagctaattttattatatagtgttaaatgttgtggttgattattaagatcttaaagtaaaagtctgatttatttaatttggaattcaaagacattgttaaacttagatttttttgtaagattatcttttgagttaggtcagagagcttttacaactaccagtgttattaatctgagatttcatgtgtttgggagaacttgtgaatccctctgaaattgtgcagagactttgtatgttaaatgcattttcaggaaggaatggttacatggctttctttaaagggatctgtttccagtaatagtattcttttttgttccacaaatcatagatgtccttaaatccaattgtcttctcagttgaatcttagagaaatttttcttttgcaatttcgctttcctgttgaccacagtatccagtgcccttttctttataatcttttgagtgagtaaaaaaattttaagaaataaaggattctgtttagggaaacttttgaatagatttgatttgatgtgagtcagggctaataaaaagctatagaagaattttctttccaataagtaaaaatcctctgttttattaaggaaaaaatagctatgttttaggtaaataactctgaaataaactggtacaacaattgtaaaatagaacatatttaaatgtcaaggtgtcttttcttaagacttcaggaatttgtattgaacaaagtctcaagttaagtagcaataattatgatgcataaatgagactggcatctattcatttattttattcttttttggggtgatgggaggtttcaatccagtgcttcacccgtggtgccaccgtggctatctttttttttatcttacagttttttaggagatttcaagtcggcagaactaacatgattgatttttagtttttaaaatactgatttttttagaaactttttctaaatcaaaacctactaagttttattttgttatttatccagagattttgatgtaaaaatgccttcatttttaagattacttaatactggatttgaaaattattttggatgcttataagttttctaaaacttagataattagaaaaaatgcctaagtttatgatgttttactatgctgctttttagatggaagaaataagcagtttttactttatagtacaaataagttttgttcacaataaaatagatatcctacctggactaatactagatgtacaaggtagtggaattatttcttatattgctttttccaaaaagtaaaaaccaaaaatgtgggccgggtgtggtggctcatgcctgtaatcccagcactttgggaggctgaggcaggcgaatcacaaggtcaggagttcaagaccagcctggccaacacagtgaaaccctttctctactaaaaatacaaaaattagccgggcatggtggcacatgcctatagtcccagctacttgagaggctgagcagcgcaggagaatcacttaaacccgggaggtggaggttgcagtgacctgagatcacgctactgcactccagcttgggcaacagagtgagactttgtctcaaagaaaagaaaaaaaa

SEQ ID NO: 19881 - DNA, 8275 bp, Homo sapiens
  source 1..8275: mol_type = unassigned DNA
agcagacttgggtggctctgcgccgcggaggccacagccgcagacttccccagtagtaccgcgccgctccgccccggagtgacgccctccgcccatgggcctggccgagggcaaccggcgggcggcgcggaggaggcggcgacaggtggcgcgcagcagggccggagccgggccgggccatggccgcctcggagcggctgtacgagttgtggctgctctactacgcgcagaaggacctgggttacctgcagcagtggctgaaggcctttgtaggtgccttcaagaagagcatctcactgtcctctctggagccacgaaggccagaggaggcaggtgcagaggtcccgctgctaccactggatgagctgcatgtgctggccgaacagctgcaccaggctgacctggagcaagccctcctgctgctcaagctcttcatcattctctgcaggaacctggagaacatagaggcaggccggggccaagtgctagtgccccgagtgctggcactgttgaccaagttggtggcggagctgaaaggatgcccaccaccccagggccgaggcacgcagttggagaatgtggccctacatgctctgcttctctgcgagggcctctttgacccttaccaaacctggcggcgccagcgcagtggggaagtcatcagctccaaggagaagagcaaatacaagttccctcctgctgctttgccccaggaattcagcgccttcttccaagagagcctacagaatgcagaccacttgcctcccatactgctgttacgtctcatccacctcttctgcgccgtcctcgctggaggaaaggagaacgggcagatggctgtaagtgatggctctgtgaagggcctgctgagtgtggtgcggggctggagccgtgggccagccccggacccgtgcctagtgccactggctctagaggcactggtaggtgcagtccatgtcttgcatgccagccgcgcacctcctcgtggcccagagcttcgtgccctgcttgagagctacttccatgtccttaatgctgactggccagctggtctgagctcaggccccgaagaggcccttgtcaccctccgggtcagcatgctcgacgccatccccatgatgctggcatgtgaagaccggccagtgctgcaagccaccttcctcagcaacaattgctttgaacacctcactcggctcattcagaacagcaagctgtacctgcagtcccgggcgccccccgagggggacagtgacctggctacccggttactgactgagcccgatgtccaaaaggtcctggaccaagacacagacgccattgcagtccatgtagtcagagtgctgacctgcatcatgagtgactccccctcggccaaggaggtgtttaaggagcgcatcggctaccctcacctgcaggaggttctgcagagccatggtccccccacccatcggctgttgcaagagctgctcaacatggctgtggagggtgaccacagcatgtgcccacctccaccaatccgcaacgagcagccggtactggtgctggcgcagtggctgccgtcattgcccaccgctgagctgcggctcttcctagcgcaacgcctcaggtggctctgtgacagctgccctgccagccgtgccacctgtgtgcaggcaggcctggtgggctgcctgttggagacactcagcacagggctagccctggaggcccgctgccaagagcagctgctggcactgctacaagcactgggccgtgtatcaataaggcccatggagctgcgtcacctgctgcgcccccggccaggattggactcggaaccaggcggagctgaggctggaaaggcccgacacgcaggtgctgtcatccgcacattatcaggcatggccaggcaccagggtcctgcacgtgctctgcgctactttgacctcacgcccagcatggcgggcatcatggtaccccctgtacagcgatggccagggcctggcttcacctttcatgcctggctctgtctgcaccctatggatacagcacctacccctgcccccacccgaccactccagcgaaagcagctgtacagcttctttaccagcagcggctcagggtttgaggccttcttcacggcggccgggaccctggtggtggctgtgtgcacacggaaggagtatttgaccatgagtttgcccgaagtgtcctttgccgactctgcctggcactgcgtggctatcgtccatgtgcctgggcgccggcccttcagccagaacctggtccatgtctacaaagacggccatctggtcaagacagcaccccttcgctgcccctccctcagtgagcctttctcctcctgctgtatcggctccgctggataccgcacaacgaccaccaccacagggctgcccacaccaccagtccccgccaccctggcctacactcaccccgccctcacccgctcccagtcagtcccagcctccacagggcttggctgggggtccgggctggtggcccccctgcaggagggcagcatcgactctaccctcgcaggcacccaggacactcggtggggcagccccacatccctggagggtgagctgggggctgtggccatctttcacgaagccctgcaggcgacggctctgaggaccctgtgcaccctggggcccaatgagacggcacccttcaagcctgagggggagctgcatgagctcagcaccaggctgctcctccattactcacctcaggcttgtaagaacaacatctgcctggacctgtcccccagtcatgggcttgatgggcgcctgacgggccacagagtggagacctgggatgtgaaggatgtggtgaactgcgttgggggtatgggtgccctgctgcccctgctggagcgagtagctgcacagcccaaagaggctgaagcaggtccagctgaaacgcatgacctcgtgggtcctgaactgacctctggtcacaacacccagggcctggttctcccattgggtaaatcttcagaggaacggatggagaggaacgcagtggctgcttttctgctgatgctgcggaacttccttcagggtcacatggtgaaccaagagagcctggtgcagtgccaggggcctgccatcatcggggccctcctgcgaaaggtcccaagctgggccatggacatgaacgtgctcatgtccgcccagctgctgatggagcaggtggcagctgagggcagcgggcccctcctgtacctactctaccagcatttgctcttcaactttcacctctggaccctcagtgacttcgccgtgcgcctcggtcacatccagtacatgtccagcatagttcgggagcacagacagaagctgcggaagaagtacggcgtccagtttatcttggatgctctgcgcacccactacagcccgcagcgggagcgccccctggctgctgacgacctacgcaccgtgcagacctccctcctgggcctggcgagggagttcctggtgcggagtctctcagcagatgacgtgcaggtcacgcagaccatgctgagctttttggcggccacaggcgatgacggtcagatcctgcgcagactgcagcagaatgagcggctacctgagcggagccgccagcgcctccggctgcgggagtgtggtctccagggtctggttgcctgcttgcctgaggggactgtttccccccagctctgccagggcctctacaagctgttcctgggggcaggatcaggcaacactgctggtggtggcggcagcagtgggactcttactccagccagccagcccggcactccttcgccactggatgggccgcggccctttcctgctgctcctggccgccacagctccagtctctccaatgtgctggaggacggcagcctcccggagcccaccattagcggggatgatacctcgaacaccagcaacccacagcaaacctctgaggaagagttgtgcaatctgctcaccaacgtgctgttctcggtgacgtggcgtggcgtggaaggcagcgatgaggctgcctggcgggagcgtggccaggttttctcagtgctcacccagctgggggcctcagccacacttgtgcgcccaccagactgcatcaagcgcagcctcctggagatgatgctggagtcagccctgaccgacatcaaagaggcccccgtgggggtcctggccagcctcacccagcaagcgctttggctgctgcgtctgctgcaggacttcctgtgtgctgaaggccatggtaaccaggaactgtggagtgagaagctctttgaaggtgtatgcagcctacttgatcgcctgggagcctggccccacctggccaacggcacagctgatctccgtgagatggcgcagattggcctacggcttgtacttggctacatcctgctggaagacccacagctgcatgcccaggcctacgtgagattgcacatgctgctacagactgcagtgccagcccgccgcgaggaggcctgctatgtgctctccaagctggaggctgcactggggcgggtgctgaacacctcttccttggagtcagccactgatgaggcagggtccccacttgcagctgcagcagctgcagcagctgcagagcgctgctcctggctggtgccactggtgcgcacgctgctagaccgtgcctatgagccgctggggctgcagtggggactgccctccctgccacccaccaatggcagccccaccttctttgaagacttccaggctttttgtgccacacccgaatggcgccacttcatcgacaaacaggtacagccaaccatgtcccagttcgaaatggacacgtatgctaagagccacgaccttatgtcaggtttctggaatgcctgctatgacatgcttatgagcagtgggcagcggcgccagtgggagcgcgcccagagtcgtcgggccttccaggagctggtgctggaacctgcgcagaggcgggcgcgcctggaggggctacgctacacggcagtgctgaagcagcaggcaacgcagcactccatggccctgctgcactggggggcgctgtggcgccagctcgccagcccatgtggggcctgggcgctgagggacactcccatcccccgctggaaactgtccagcgccgagacatattcacgcatgcgtctgaagctggtgcccaaccatcacttcgaccctcacctggaagccagcgctctccgagacaatctgggtgaggttcccctgacacccaccgaggaggcctcactgcctctggcagtgaccaaagaggccaaagtgagcaccccacccgagttgctgcaggaggaccagctcggcgaggacgagctggctgagctggagaccccgatggaggcagcagaactggatgagcagcgtgagaagctggtgctgtcggccgagtgccagctggtgacggtagtggccgtggtcccagggctgctggaggtcaccacacagaatgtatacttctacgatggcagcactgagcgcgtggaaaccgaggagggcatcggctatgatttccggcgcccactggcccagctgcgtgaggtccacctgcggcgtttcaacctgcgccgttcagcacttgagctcttctttatcgatcaggccaactacttcctcaacttcccatgcaaggtgggcacgaccccagtctcatctcctagccagactcccagaccccagcctggccccatcccaccccatacccaggtacggaaccaggtgtactcgtggctcctgcgcctacggcccccctctcaaggctacctaagcagccgctccccccaggagatgctgcgtgcctcaggccttacccagaaatgggtacagcgtgagatatccaacttcgagtacttgatgcaactcaacaccattgcggggcggacctacaatgacctgtctcagtaccctgtgttcccctgggtcctgcaggactacgtgtccccaaccctggacctcagcaacccagccgtcttccgggacctgtctaagcccatcggtgtggtgaaccccaagcatgcccagctcgtgagggagaagtatgaaagctttgaggacccagcagggaccattgacaagttccactatggcacccactactccaatgcagcaggcgtgatgcactacctcatccgcgtggagcccttcacctccctgcacgtccagctgcaaagtggccgctttgactgctccgaccggcagttccactcggtggcggcagcctggcaggcacgcctggagagccctgccgatgtgaaggagctcatcccggaattcttctactttcctgacttcctggagaaccagaacggttttgacctgggctgtctccagctgaccaacgagaaggtaggcgatgtggtgctacccccgtgggccagctctcctgaggacttcatccagcagcaccgccaggctctggagtcggagtatgtgtctgcacacctacacgagtggatcgacctcatctttggctacaagcagcgggggccagccgccgaggaggccctcaatgtcttctattactgcacctatgagggggctgtagacctggaccatgtgacagatgagcgggaacggaaggctctggagggcattatcagcaactttgggcagactccctgtcagctgctgaaggagccacatccaactcggctctcagctgaggaagcagcccatcgccttgcacgcctggacactaactcacctagcatcttccagcacctggacgaactcaaggcattcttcgcagaggttgtcagtgatggtgtacccctggtgctagccctggtcccccaccggcagccccactccttcatcacccagggttccccagacctgttggtgactgtgagtgccagtgggctgctgggcacccacagctggttgccctatgaccgcaacataagcaactacttcagcttcagcaaagaccccaccatgggcagccacaagacgcagcgactgctgagtggcccgtgggtgccaggcagtggtgtgagtggacaagcactggcagtggccccggatggaaagctgctattcagcggtggccactgggatggcagcctgcgggtgactgcactaccccgtggcaagctgttgagccagctcagctgccaccttgatgtagtaacctgccttgcactggacacctgtggcatctacctcatctcaggctcccgggacaccacgtgcatggtgtggcggctcctgcatcagggtggtctgtcagtaggcctggcaccaaagcctgtgcaggtcctgtatgggcatggggctgcagtgagctgtgtggccatcagcactgaacttgacatggctgtgtctggatctgaggatggaactgtgatcatacacactgtacgccgcggacagtttgtagcggcactacggcctctgggtgccacattccctggacctattttccacctggcattggggtccgaaggccagattgtggtacagagctcagcgtgggaacgtcctggggcccaggtcacctactccttgcacctgtattcagtcaatgggaagttgcgggcttcactgcccctggcagagcagcctacagccctgacggtgacagaggactttgtgttgctgggcaccgcccagtgcgccctgcacatcctccaactaaacacactgctcccggccgcgcctcccttgcccatgaaggtggccatccgcagcgtggccgtgaccaaggagcgcagccacgtgctggtgggcctggaggatggcaagctcatcgtggtggtcgcggggcagccctctgaggtgcgcagcagccagttcgcgcggaagctgtggcggtcctcgcggcgcatctcccaggtgtcctcgggagagacggaatacaaccctactgaggcgcgctgaacctggccagtccggctgctcgggccccgcccccggcaggcctggcccgggaggccccgcccagaagtcggcgggaacaccccggggtgggcagcccaggggggtgagcggggcccaccctgcccagctcagggattggcgggcgatgttaccccctcagggattggcgggcggaagtcccgcccctcgccggctgaggggccgccctgagggccagcactggcgtctgcggccgcagcagcactttttgcacagtctggggcggggttccccggcttccaagtcgctgtttcgtcaaagcacgagggccgcctgtggccttaattcctaacggcggccccggttctcccttctcggcaataaaccaggcctagttttgtagc

SEQ ID NO: 19882 - DNA, 1901 bp, Homo sapiens
  source 1..1901: mol_type = unassigned DNA
aaagttttcctggcagcgcctagacctgggcttagccactgcccctcttgcccatggaaccagctctggggcctggggtccagaaggacctgggttacctgcagcagtggctgaaggcctttgtaggtgccttcaagaagagcatctcactgtcctctctggagccacgaaggccagaggaggcaggtgcagaggtcccgctgctaccactggatgagctgcatgtgctggccgaacagctgcaccaggctgacctggagcaagccctcctgctgctcaagctcttcatcattctctgcaggaacctggagaacatagaggcaggccggggccaagtgctagtgccccgagtgctggcactgttgaccaagttggtggcggagctgaaaggatgcccaccaccccagggccgaggcacgcagttggagaatgtggccctacatgctctgcttctctgcgagggcctctttgacccttaccaaacctggcggcgccagcgcagtggggaagtcatcagctccaaggagaagagcaaatacaagttccctcctgctgctttgccccaggaattcagcgccttcttccaagagagcctacagaatgcagaccacttgcctcccatactgctgttacgtctcatccacctcttctgcgccgtcctcgctggaggaaaggagaacgggcagatggctgtaagtgatggctctgtgaagggcctgctgagtgtggtgcggggctggagccgtgggccagccccggacccgtgcctagtgccactggctctagaggcactggtaggtgcagtccatgtcttgcatgccagccgcgcacctcctcgtggcccagagcttcgtgccctgcttgagagctacttccatgtccttaatgctgactggccagctggtctgagctcaggccccgaagaggcccttgtcaccctccgggtcagcatgctcgacgccatccccatgatgctggcatgtgaagaccggccagtgctgcaagccaccttcctcagcaacaattgctttgaacacctcactcggctcattcagaacagcaaggtcctggaccaagacacagacgccattgcagtccatgtagtcagagtgctgacctgcatcatgagtgactccccctcggccaaggaggtgtttaaggagcgcatcggctaccctcacctgcaggaggttctgcagagccatggtccccccacccatcggctgttgcaagagctgctcaacatggctgtggagggtgaccacagcatgtgcccacctccaccaatccgcaacgagcagccggtactggtgctggcgcagtggctgccgtcattgcccaccgctgagctgcggctcttcctagcgcaacgcctcaggtggctctgtgacagctgccctgccagccgtgccacctgtgtgcaggcaggcctggtgggctgcctgttggagacactcagcacagggctagccctggaggcccgctgccaagagcagctgctggcactgctacaagcactgggccgtgtatcaataaggcccatggagctgcgtcacctgctgcgcccccggccaggattggactcggaaccaggcggagctgaggctggaaaggcccgacacgcaggtgctgtcatccgcacattatcaggcatggccaggcaccagggtcctgcacgtgctctgcgctactttgacctcacgcccagcatggcgggcatcatggtaccccctgtacagcgatggccagggcctggcttcacctttcatgcctggctctgtctgcaccctatggatacagcacctacccctgccccccccaccctgcccagctcagggattggcgggcgatgttaccccctcagggattggcgggcggaagtcccgcccctcgccggctga

SEQ ID NO: 19883 - DNA, 8737 bp, Homo sapiens
  source 1..8737: mol_type = unassigned DNA
agcagacttgggtggctctgcgccgcggaggccacagccgcagacttccccagtagtaccgcgccgctccgccccggagtgacgccctccgcccatgggcctggccgagggcaaccggcgggcggcgcggaggaggcggcgacaggtggcgcgcagcagggccggagccgggccgggccatggccgcctcggagcggctgtacgagttgtggctgctctactacgcgcagaaggacctgggttacctgcagcagtggctgaaggcctttgtaggtgccttcaagaagagcatctcactgtcctctctggagccacgaaggccagaggaggcaggtgcagaggtcccgctgctaccactggatgagctgcatgtgctggccgaacagctgcaccaggctgacctggagcaagccctcctgctgctcaagctcttcatcattctctgcaggaacctggagaacatagaggcaggccggggccaagtgctagtgccccgagtgctggcactgttgaccaagttggtggcggagctgaaaggatgcccaccaccccagggccgaggcacgcagttggagaatgtggccctacatgctctgcttctctgcgagggcctctttgacccttaccaaacctggcggcgccagcgcagtggggaagtcatcagctccaaggagaagagcaaatacaagttccctcctgctgctttgccccaggaattcagcgccttcttccaagagagcctacagaatgcagaccacttgcctcccatactgctgttacgtctcatccacctcttctgcgccgtcctcgctggaggaaaggagaacgggcagatggctgtaagtgatggctctgtgaagggcctgctgagtgtggtgcggggctggagccgtgggccagccccggacccgtgcctagtgccactggctctagaggcactggtaggtgcagtccatgtcttgcatgccagccgcgcacctcctcgtggcccagagcttcgtgccctgcttgagagctacttccatgtccttaatgctgactggccagctggtctgagctcaggccccgaagaggcccttgtcaccctccgggtcagcatgctcgacgccatccccatgatgctggcatgtgaagaccggccagtgctgcaagccaccttcctcagcaacaattgctttgaacacctcactcggctcattcagaacagcaagctgtacctgcagtcccgggcgccccccgagggggacagtgacctggctacccggttactgactgagcccgatgtccaaaaggtcctggaccaagacacagacgccattgcagtccatgtagtcagagtgctgacctgcatcatgagtgactccccctcggccaaggaggtgtttaaggagcgcatcggctaccctcacctgcaggaggttctgcagagccatggtccccccacccatcggctgttgcaagagctgctcaacatggctgtggagggtgaccacagcatgtgcccacctccaccaatccgcaacgagcagccggtactggtgctggcgcagtggctgccgtcattgcccaccgctgagctgcggctcttcctagcgcaacgcctcaggtggctctgtgacagctgccctgccagccgtgccacctgtgtgcaggcaggcctggtgggctgcctgttggagacactcagcacagggctagccctggaggcccgctgccaagagcagctgctggcactgctacaagcactgggccgtgtatcaataaggcccatggagctgcgtcacctgctgcgcccccggccaggattggactcggaaccaggcggagctgaggctggaaaggcccgacacgcaggtgctgtcatccgcacattatcaggcatggccaggcaccagggtcctgcacgtgctctgcgctactttgacctcacgcccagcatggcgggcatcatggtaccccctgtacagcgatggccagggcctggcttcacctttcatgcctggctctgtctgcaccctatggatacagcacctacccctgcccccacccgaccactccagcgaaagcagctgtacagcttctttaccagcagcggctcagggtttgaggccttcttcacggcggccgggaccctggtggtggctgtgtgcacacggaaggagtatttgaccatgagtttgcccgaagtgtcctttgccgactctgcctggcactgcgtggctatcgtccatgtgcctgggcgccggcccttcagccagaacctggtccatgtctacaaagacggccatctggtcaagacagcaccccttcgctgcccctccctcagtgagcctttctcctcctgctgtatcggctccgctggataccgcacaacgaccaccaccacagggctgcccacaccaccagtccccgccaccctggcctacactcaccccgccctcacccgctcccagtcagtcccagcctccacagggcttggctgggggtccgggctggtggcccccctgcaggagggcagcatcgactctaccctcgcaggcacccaggacactcggtggggcagccccacatccctggagggtgagctgggggctgtggccatctttcacgaagccctgcaggcgacggctctgaggaccctgtgcaccctggggcccaatgagacggcacccttcaagcctgagggggagctgcatgagctcagcaccaggctgctcctccattactcacctcaggcttgtaagaacaacatctgcctggacctgtcccccagtcatgggcttgatgggcgcctgacgggccacagagtggagacctgggatgtgaaggatgtggtgaactgcgttgggggtatgggtgccctgctgcccctgctggagcgagtagctgcacagcccaaagaggctgaagcaggtccagctgaaacgcatgacctcgtgggtcctgaactgacctctggtcacaacacccagggcctggttctcccattgggtaaatcttcagaggaacggatggagaggaacgcagtggctgcttttctgctgatgctgcggaacttccttcagggtcacatggtgaaccaagagagcctggtgcagtgccaggggcctgccatcatcggggccctcctgcgaaaggtcccaagctgggccatggacatgaacgtgctcatgtccgcccagctgctgatggagcaggtggcagctgagggcagcgggcccctcctgtacctactctaccagcatttgctcttcaactttcacctctggaccctcagtgacttcgccgtgcgcctcggtcacatccagtacatgtccagcatagttcgggagcacagacagaagctgcggaagaagtacggcgtccagtttatcttggatgctctgcgcacccactacagcccgcagcgggagcgccccctggctgctgacgacctacgcaccgtgcagacctccctcctgggcctggcgagggagttcctggtgcggagtctctcagcagatgacgtgcaggtcacgcagaccatgctgagctttttggcggccacaggcgatgacggtcaggcggtgggtgcgctggacctgctgctggccctgctgcacggttccctggtgcaggagtccttggctgtctttctgttggagccagggaacctcgaagtgctactggccctgctagtgcggccagggtcactgcccctgctgcccgatcgagtctgcaagatcctgcgcagactgcagcagaatgagcggctacctgagcggagccgccagcgcctccggctgcgggagtgtggtctccagggtctggttgcctgcttgcctgaggggactgtttccccccagctctgccagggcctctacaagctgttcctgggggcagattgcctgaacctctcagatctgctggctgtggtacagctgtccctccaggctgacctcagcgttcgcctagacatctgtcgccagcttttccacctcatctacggacagccagatgtagtgcggcttctggcccgacaggctggctggcaagatgtgctgacccggctatatgtcctggaggctgccacagccggcagcccccctccgtcttccccagagtcacctacctcccccaagccagccccacccaagccacccactgagtcacctgctgagccttcagatgtcttcctgccctcagaggccccctgccctgaccctgatggcttttaccatgctctctccccattctgcacgccctttgacctgggcctggaacggtctagtgtaggatcaggcaacactgctggtggtggcggcagcagtgggactcttactccagccagccagcccggcactccttcgccactggatgggccgcggccctttcctgctgctcctggccgccacagctccagtctctccaatgtgctggaggacggcagcctcccggagcccaccattagcggggatgatacctcgaacaccagcaacccacagcaaacctctgaggaagagttgtgcaatctgctcaccaacgtgctgttctcggtgacgtggcgtggcgtggaaggcagcgatgaggctgcctggcgggagcgtggccaggttttctcagtgctcacccagctgggggcctcagccacacttgtgcgcccaccagactgcatcaagcgcagcctcctggagatgatgctggagtcagccctgaccgacatcaaagaggcccccgtgggggtcctggccagcctcacccagcaagcgctttggctgctgcgtctgctgcaggacttcctgtgtgctgaaggccatggtaaccaggaactgtggagtgagaagctctttgaaggtgtatgcagcctacttgatcgcctgggagcctggccccacctggccaacggcacagctgatctccgtgagatggcgcagattggcctacggcttgtacttggctacatcctgctggaagacccacagctgcatgcccaggcctacgtgagattgcacatgctgctacagactgcagtgccagcccgccgcgaggaggcctgctatgtgctctccaagctggaggctgcactggggcgggtgctgaacacctcttccttggagtcagccactgatgaggcagggtccccacttgcagctgcagcagctgcagcagctgcagagcgctgctcctggctggtgccactggtgcgcacgctgctagaccgtgcctatgagccgctggggctgcagtggggactgccctccctgccacccaccaatggcagccccaccttctttgaagacttccaggctttttgtgccacacccgaatggcgccacttcatcgacaaacaggtacagccaaccatgtcccagttcgaaatggacacgtatgctaagagccacgaccttatgtcaggtttctggaatgcctgctatgacatgcttatgagcagtgggcagcggcgccagtgggagcgcgcccagagtcgtcgggccttccaggagctggtgctggaacctgcgcagaggcgggcgcgcctggaggggctacgctacacggcagtgctgaagcagcaggcaacgcagcactccatggccctgctgcactggggggcgctgtggcgccagctcgccagcccatgtggggcctgggcgctgagggacactcccatcccccgctggaaactgtccagcgccgagacatattcacgcatgcgtctgaagctggtgcccaaccatcacttcgaccctcacctggaagccagcgctctccgagacaatctgggtgaggttcccctgacacccaccgaggaggcctcactgcctctggcagtgaccaaagaggccaaagtgagcaccccacccgagttgctgcaggaggaccagctcggcgaggacgagctggctgagctggagaccccgatggaggcagcagaactggatgagcagcgtgagaagctggtgctgtcggccgagtgccagctggtgacggtagtggccgtggtcccagggctgctggaggtcaccacacagaatgtatacttctacgatggcagcactgagcgcgtggaaaccgaggagggcatcggctatgatttccggcgcccactggcccagctgcgtgaggtccacctgcggcgtttcaacctgcgccgttcagcacttgagctcttctttatcgatcaggccaactacttcctcaacttcccatgcaaggtgggcacgaccccagtctcatctcctagccagactcccagaccccagcctggccccatcccaccccatacccaggtacggaaccaggtgtactcgtggctcctgcgcctacggcccccctctcaaggctacctaagcagccgctccccccaggagatgctgcgtgcctcaggccttacccagaaatgggtacagcgtgagatatccaacttcgagtacttgatgcaactcaacaccattgcggggcggacctacaatgacctgtctcagtaccctgtgttcccctgggtcctgcaggactacgtgtccccaaccctggacctcagcaacccagccgtcttccgggacctgtctaagcccatcggtgtggtgaaccccaagcatgcccagctcgtgagggagaagtatgaaagctttgaggacccagcagggaccattgacaagttccactatggcacccactactccaatgcagcaggcgtgatgcactacctcatccgcgtggagcccttcacctccctgcacgtccagctgcaaagtggccgctttgactgctccgaccggcagttccactcggtggcggcagcctggcaggcacgcctggagagccctgccgatgtgaaggagctcatcccggaattcttctactttcctgacttcctggagaaccagaacggttttgacctgggctgtctccagctgaccaacgagaaggtaggcgatgtggtgctacccccgtgggccagctctcctgaggacttcatccagcagcaccgccaggctctggagtcggagtatgtgtctgcacacctacacgagtggatcgacctcatctttggctacaagcagcgggggccagccgccgaggaggccctcaatgtcttctattactgcacctatgagggggctgtagacctggaccatgtgacagatgagcgggaacggaaggctctggagggcattatcagcaactttgggcagactccctgtcagctgctgaaggagccacatccaactcggctctcagctgaggaagcagcccatcgccttgcacgcctggacactaactcacctagcatcttccagcacctggacgaactcaaggcattcttcgcagaggtgactgtgagtgccagtgggctgctgggcacccacagctggttgccctatgaccgcaacataagcaactacttcagcttcagcaaagaccccaccatgggcagccacaagacgcagcgactgctgagtggcccgtgggtgccaggcagtggtgtgagtggacaagcactggcagtggccccggatggaaagctgctattcagcggtggccactgggatggcagcctgcgggtgactgcactaccccgtggcaagctgttgagccagctcagctgccaccttgatgtagtaacctgccttgcactggacacctgtggcatctacctcatctcaggctcccgggacaccacgtgcatggtgtggcggctcctgcatcagggtggtctgtcagtaggcctggcaccaaagcctgtgcaggtcctgtatgggcatggggctgcagtgagctgtgtggccatcagcactgaacttgacatggctgtgtctggatctgaggatggaactgtgatcatacacactgtacgccgcggacagtttgtagcggcactacggcctctgggtgccacattccctggacctattttccacctggcattggggtccgaaggccagattgtggtacagagctcagcgtgggaacgtcctggggcccaggtcacctactccttgcacctgtattcagtcaatgggaagttgcgggcttcactgcccctggcagagcagcctacagccctgacggtgacagaggactttgtgttgctgggcaccgcccagtgcgccctgcacatcctccaactaaacacactgctcccggccgcgcctcccttgcccatgaaggtggccatccgcagcgtggccgtgaccaaggagcgcagccacgtgctggtgggcctggaggatggcaagctcatcgtggtggtcgcggggcagccctctgaggtgcgcagcagccagttcgcgcggaagctgtggcggtcctcgcggcgcatctcccaggtgtcctcgggagagacggaatacaaccctactgaggcgcgctgaacctggccagtccggctgctcgggccccgcccccggcaggcctggcccgggaggccccgcccagaagtcggcgggaacaccccggggtgggcagcccaggggggtgagcggggcccaccctgcccagctcagggattggcgggcgatgttaccccctcagggattggcgggcggaagtcccgcccctcgccggctgaggggccgccctgagggccagcactggcgtctgcggccgcagcagcactttttgcacagtctggggcggggttccccggcttccaagtcgctgtttcgtcaaagcacgagggccgcctgtggccttaattcctaacggcggccccggttctcccttctcggcaataaaccaggcctagttttgtagc

SEQ ID NO: 19884 - DNA, 2781 bp, Homo sapiens
  source 1..2781: mol_type = unassigned DNA
tggtgctgtcggccgagtgccagctggtgacggtagtggccgtggtcccagggctgctggaggtcaccacacagaatgtatacttctacgatggcagcactgagcgcgtggaaaccgaggagggcatcggctatgatttccggcgcccactggcccagctgcgtgaggtccacctgcggcgtttcaacctgcgccgttcagcacttgagctcttctttatcgatcaggccaactacttcctcaacttcccatgcaaggtgggcacgaccccagtctcatctcctagccagactcccagaccccagcctggccccatcccaccccatacccaggtacggaaccaggtgtactcgtggctcctgcgcctacggcccccctctcaaggctacctaagcagccgctccccccaggagatgctgcgtgcctcaggccttacccagaaatgggtacagcgtgagatatccaacttcgagtacttgatgcaactcaacaccattgcggggcggacctacaatgacctgtctcagtaccctgtgttcccctgggtcctgcaggactacgtgtccccaaccctggacctcagcaacccagccgtcttccgggacctgtctaagcccatcggtgtggtgaaccccaagcatgcccagctcgtgagggagaagtatgaaagctttgaggacccagcagggaccattgacaagttccactatggcacccactactccaatgcagcaggcgtgatgcactacctcatccgcgtggagcccttcacctccctgcacgtccagctgcaaagtggccgctttgactgctccgaccggcagttccactcggtggcggcagcctggcaggcacgcctggagagccctgccgatgtgaaggagctcatcccggaattcttctactttcctgacttcctggagaaccagaacggttttgacctgggctgtctccagctgaccaacgagaaggtaggcgatgtggtgctacccccgtgggccagctctcctgaggacttcatccagcagcaccgccaggctctggagtcggagtatgtgtctgcacacctacacgagtggatcgacctcatctttggctacaagcagcgggggccagccgccgaggaggccctcaatgtcttctattactgcacctatgagggggctgtagacctggaccatgtgacagatgagcgggaacggaaggctctggagggcattatcagcaactttgggcagactccctgtcagctgctgaaggagccacatccaactcggctctcagctgaggaagcagcccatcgccttgcacgcctggacactaactcacctagcatcttccagcacctggacgaactcaaggcattcttcgcagaggttgtcagtgatggtgtacccctggtgctagccctggtcccccaccggcagccccactccttcatcacccagggttccccagacctgttggtgactgtgagtgccagtgggctgctgggcacccacagctggttgccctatgaccgcaacataagcaactacttcagcttcagcaaagaccccaccatgggcagccacaagacgcagcgactgctgagtggcccgtgggtgccaggcagtggtgtgagtggacaagcactggcagtggccccggatggaaagctgctattcagcggtggccactgggatggcagcctgcgggtgactgcactaccccgtggcaagctgttgagccagctcagctgccaccttgatgtagtaacctgccttgcactggacacctgtggcatctacctcatctcaggctcccgggacaccacgtgcatggtgtggcggctcctgcatcagggtggtctgtcagtaggcctggcaccaaagcctgtgcaggtcctgtatgggcatggggctgcagtgagctgtgtggccatcagcactgaacttgacatggctgtgtctggatctgaggatggaactgtgatcatacacactgtacgccgcggacagtttgtagcggcactacggcctctgggtgccacattccctggacctattttccacctggcattggggtccgaaggccagattgtggtacagagctcagcgtgggaacgtcctggggcccaggtcacctactccttgcacctgtattcagtcaatgggaagttgcgggcttcactgcccctggcagagcagcctacagccctgacggtgacagaggactttgtgttgctgggcaccgcccagtgcgccctgcacatcctccaactaaacacactgctcccggccgcgcctcccttgcccatgaaggtggccatccgcagcgtggccgtgaccaaggagcgcagccacgtgctggtgggcctggaggatggcaagctcatcgtggtggtcgcggggcagccctctgaggtgcgcagcagccagttcgcgcggaagctgtggcggtcctcgcggcgcatctcccaggtgtcctcgggagagacggaatacaaccctactgaggcgcgctgaacctgggcccaccctgcccagctcagggattggcgggcgatgttaccccctcagggattggcgggcggaagtcccgcccctcgccggctgaggggccgccctgagggccagcactggcgtctgcggccgcagcagcactttttgcacagtctggggcggggttccccggcttccaagtcgctgtttcgtcaaagcacgagggccgcctgtggccttaattcctaacggcggccccggttctcccttctcggcaataaaccaggcctagttttgt

SEQ ID NO: 19885 - DNA, 8667 bp, Homo sapiens
  source 1..8667: mol_type = unassigned DNA
gccggagccgggccgggccatggccgcctcggagcggctgtacgagttgtggctgctctactacgcgcagaaggacctgggttacctgcagcagtggctgaaggcctttgtaggtgccttcaagaagagcatctcactgtcctctctggagccacgaaggccagaggaggcaggtgcagaggtcccgctgctaccactggatgagctgcatgtgctggccgaacagctgcaccaggctgacctggagcaagccctcctgctgctcaagctcttcatcattctctgcaggaacctggagaacatagaggcaggccggggccaagtgctagtgccccgagtgctggcactgttgaccaagttggtggcggagctgaaaggatgcccaccaccccagggccgaggcacgcagttggagaatgtggccctacatgctctgcttctctgcgagggcctctttgacccttaccaaacctggcggcgccagcgcagtggggaagtcatcagctccaaggagaagagcaaatacaagttccctcctgctgctttgccccaggaattcagcgccttcttccaagagagcctacagaatgcagaccacttgcctcccatactgctgttacgtctcatccacctcttctgcgccgtcctcgctggaggaaaggagaacgggcagatggctgtaagtgatggctctgtgaagggcctgctgagtgtggtgcggggctggagccgtgggccagccccggacccgtgcctagtgccactggctctagaggcactggtaggtgcagtccatgtcttgcatgccagccgcgcacctcctcgtggcccagagcttcgtgccctgcttgagagctacttccatgtccttaatgctgactggccagctggtctgagctcaggccccgaagaggcccttgtcaccctccgggtcagcatgctcgacgccatccccatgatgctggcatgtgaagaccggccagtgctgcaagccaccttcctcagcaacaattgctttgaacacctcactcggctcattcagaacagcaagctgtacctgcagtcccgggcgccccccgagggggacagtgacctggctacccggttactgactgagcccgatgtccaaaaggtcctggaccaagacacagacgccattgcagtccatgtagtcagagtgctgacctgcatcatgagtgactccccctcggccaaggaggtgtttaaggagcgcatcggctaccctcacctgcaggaggttctgcagagccatggtccccccacccatcggctgttgcaagagctgctcaacatggctgtggagggtgaccacagcatgtgcccacctccaccaatccgcaacgagcagccggtactggtgctggcgcagtggctgccgtcattgcccaccgctgagctgcggctcttcctagcgcaacgcctcaggtggctctgtgacagctgccctgccagccgtgccacctgtgtgcaggcaggcctggtgggctgcctgttggagacactcagcacagggctagccctggaggcccgctgccaagagcagctgctggcactgctacaagcactgggccgtgtatcaataaggcccatggagctgcgtcacctgctgcgcccccggccaggattggactcggaaccaggcggagctgaggctggaaaggcccgacacgcaggtgctgtcatccgcacattatcaggcatggccaggcaccagggtcctgcacgtgctctgcgctactttgacctcacgcccagcatggcgggcatcatggtaccccctgtacagcgatggccagggcctggcttcacctttcatgcctggctctgtctgcaccctatggatacagcacctacccctgcccccacccgaccactccagcgaaagcagctgtacagcttctttaccagcagcggctcagggtttgaggccttcttcacggcggccgggaccctggtggtggctgtgtgcacacggaaggagtatttgaccatgagtttgcccgaagtgtcctttgccgactctgcctggcactgcgtggctatcgtccatgtgcctgggcgccggcccttcagccagaacctggtccatgtctacaaagacggccatctggtcaagacagcaccccttcgctgcccctccctcagtgagcctttctcctcctgctgtatcggctccgctggataccgcacaacgaccaccaccacagggctgcccacaccaccagtccccgccaccctggcctacactcaccccgccctcacccgctcccagtcagtcccagcctccacagggcttggctgggggtccgggctggtggcccccctgcaggagggcagcatcgactctaccctcgcaggcacccaggacactcggtggggcagccccacatccctggagggtgagctgggggctgtggccatctttcacgaagccctgcaggcgacggctctgaggaccctgtgcaccctggggcccaatgagacggcacccttcaagcctgagggggagctgcatgagctcagcaccaggctgctcctccattactcacctcaggcttgtaagaacaacatctgcctggacctgtcccccagtcatgggcttgatgggcgcctgacgggccacagagtggagacctgggatgtgaaggatgtggtgaactgcgttgggggtatgggtgccctgctgcccctgctggagcgagtagctgcacagcccaaagaggctgaagcaggtccagctgaaacgcatgacctcgtgggtcctgaactgacctctggtcacaacacccagggcctggttctcccattgggtaaatcttcagaggaacggatggagaggaacgcagtggctgcttttctgctgatgctgcggaacttccttcagggtcacatggtgaaccaagagagcctggtgcagtgccaggggcctgccatcatcggggccctcctgcgaaaggtcccaagctgggccatggacatgaacgtgctcatgtccgcccagctgctgatggagcaggtggcagctgagggcagcgggcccctcctgtacctactctaccagcatttgctcttcaactttcacctctggaccctcagtgacttcgccgtgcgcctcggtcacatccagtacatgtccagcatagttcgggagcacagacagaagctgcggaagaagtacggcgtccagtttatcttggatgctctgcgcacccactacagcccgcagcgggagcgccccctggctgctgacgacctacgcaccgtgcagacctccctcctgggcctggcgagggagttcctggtgcggagtctctcagcagatgacgtgcaggtcacgcagaccatgctgagctttttggcggccacaggcgatgacggtcaggcggtgggtgcgctggacctgctgctggccctgctgcacggttccctggtgcaggagtccttggctgtctttctgttggagccagggaacctcgaagtgctactggccctgctagtgcggccagggtcactgcccctgctgcccgatcgagtctgcaagatcctgcgcagactgcagcagaatgagcggctacctgagcggagccgccagcgcctccggctgcgggagtgtggtctccagggtctggttgcctgcttgcctgaggggactgtttccccccagctctgccagggcctctacaagctgttcctgggggcagattgcctgaacctctcagatctgctggctgtggtacagctgtccctccaggctgacctcagcgttcgcctagacatctgtcgccagcttttccacctcatctacggacagccagatgtagtgcggcttctggcccgacaggctggctggcaagatgtgctgacccggctatatgtcctggaggctgccacagccggcagcccccctccgtcttccccagagtcacctacctcccccaagccagccccacccaagccacccactgagtcacctgctgagccttcagatgtcttcctgccctcagaggccccctgccctgaccctgatggcttttaccatgctctctccccattctgcacgccctttgacctgggcctggaacggtctagtgtaggatcaggcaacactgctggtggtggcggcagcagtgggactcttactccagccagccagcccggcactccttcgccactggatgggccgcggccctttcctgctgctcctggccgccacagctccagtctctccaatgtgctggaggacggcagcctcccggagcccaccattagcggggatgatacctcgaacaccagcaacccacagcaaacctctgaggaagagttgtgcaatctgctcaccaacgtgctgttctcggtgacgtggcgtggcgtggaaggcagcgatgaggctgcctggcgggagcgtggccaggttttctcagtgctcacccagctgggggcctcagccacacttgtgcgcccaccagactgcatcaagcgcagcctcctggagatgatgctggagtcagccctgaccgacatcaaagaggcccccgtgggggtcctggccagcctcacccagcaagcgctttggctgctgcgtctgctgcaggacttcctgtgtgctgaaggccatggtaaccaggaactgtggagtgagaagctctttgaaggtgtatgcagcctacttgatcgcctgggagcctggccccacctggccaacggcacagctgatctccgtgagatggcgcagattggcctacggcttgtacttggctacatcctgctggaagacccacagctgcatgcccaggcctacgtgagattgcacatgctgctacagactgcagtgccagcccgccgcgaggaggcctgctatgtgctctccaagctggaggctgcactggggcgggtgctgaacacctcttccttggagtcagccactgatgaggcagggtccccacttgcagctgcagcagctgcagcagctgcagagcgctgctcctggctggtgccactggtgcgcacgctgctagaccgtgcctatgagccgctggggctgcagtggggactgccctccctgccacccaccaatggcagccccaccttctttgaagacttccaggctttttgtgccacacccgaatggcgccacttcatcgacaaacaggtacagccaaccatgtcccagttcgaaatggacacgtatgctaagagccacgaccttatgtcaggtttctggaatgcctgctatgacatgcttatgagcagtgggcagcggcgccagtgggagcgcgcccagagtcgtcgggccttccaggagctggtgctggaacctgcgcagaggcgggcgcgcctggaggggctacgctacacggcagtgctgaagcagcaggcaacgcagcactccatggccctgctgcactggggggcgctgtggcgccagctcgccagcccatgtggggcctgggcgctgagggacactcccatcccccgctggaaactgtccagcgccgagacatattcacgcatgcgtctgaagctggtgcccaaccatcacttcgaccctcacctggaagccagcgctctccgagacaatctgggtgaggttcccctgacacccaccgaggaggcctcactgcctctggcagtgaccaaagaggccaaagtgagcaccccacccgagttgctgcaggaggaccagctcggcgaggacgagctggctgagctggagaccccgatggaggcagcagaactggatgagcagcgtgagaagctggtgctgtcggccgagtgccagctggtgacggtagtggccgtggtcccagggctgctggaggtcaccacacagaatgtatacttctacgatggcagcactgagcgcgtggaaaccgaggagggcatcggctatgatttccggcgcccactggcccagctgcgtgaggtccacctgcggcgtttcaacctgcgccgttcagcacttgagctcttctttatcgatcaggccaactacttcctcaacttcccatgcaaggtgggcacgaccccagtctcatctcctagccagactcccagaccccagcctggccccatcccaccccatacccaggtacggaaccaggtgtactcgtggctcctgcgcctacggcccccctctcaaggctacctaagcagccgctccccccaggagatgctgcgtgcctcaggccttacccagaaatgggtacagcgtgagatatccaacttcgagtacttgatgcaactcaacaccattgcggggcggacctacaatgacctgtctcagtaccctgtgttcccctgggtcctgcaggactacgtgtccccaaccctggacctcagcaacccagccgtcttccgggacctgtctaagcccatcggtgtggtgaaccccaagcatgcccagctcgtgagggagaagtatgaaagctttgaggacccagcagggaccattgacaagttccactatggcacccactactccaatgcagcaggcgtgatgcactacctcatccgcgtggagcccttcacctccctgcacgtccagctgcaaagtggccgctttgactgctccgaccggcagttccactcggtggcggcagcctggcaggcacgcctggagagccctgccgatgtgaaggagctcatcccggaattcttctactttcctgacttcctggagaaccagaacggttttgacctgggctgtctccagctgaccaacgagaaggtaggcgatgtggtgctacccccgtgggccagctctcctgaggacttcatccagcagcaccgccaggctctggagtcggagtatgtgtctgcacacctacacgagtggatcgacctcatctttggctacaagcagcgggggccagccgccgaggaggccctcaatgtcttctattactgcacctatgagggggctgtagacctggaccatgtgacagatgagcgggaacggaaggctctggagggcattatcagcaactttgggcagactccctgtcagctgctgaaggagccacatccaactcggctctcagctgaggaagcagcccatcgccttgcacgcctggacactaactcacctagcatcttccagcacctggacgaactcaaggcattcttcgcagaggttgtcagtgatggtgtacccctggtgctagccctggtcccccaccggcagccccactccttcatcacccagggttccccagacctgttggtgactgtgagtgccagtgggctgctgggcacccacagctggttgccctatgaccgcaacataagcaactacttcagcttcagcaaagaccccaccatgggcagccacaagacgcagcgactgctgagtggcccgtgggtgccaggcagtggtgtgagtggacaagcactggcagtggccccggatggaaagctgctattcagcggtggccactgggatggcagcctgcgggtgactgcactaccccgtggcaagctgttgagccagctcagctgccaccttgatgtagtaacctgccttgcactggacacctgtggcatctacctcatctcaggctcccgggacaccacgtgcatggtgtggcggctcctgcatcagggtggtctgtcagtaggcctggcaccaaagcctgtgcaggtcctgtatgggcatggggctgcagtgagctgtgtggccatcagcactgaacttgacatggctgtgtctggatctgaggatggaactgtgatcatacacactgtacgccgcggacagtttgtagcggcactacggcctctgggtgccacattccctggacctattttccacctggcattggggtccgaaggccagattgtggtacagagctcagcgtgggaacgtcctggggcccaggtcacctactccttgcacctgtattcagtcaatgggaagttgcgggcttcactgcccctggcagagcagcctacagccctgacggtgacagaggactttgtgttgctgggcaccgcccagtgcgccctgcacatcctccaactaaacacactgctcccggccgcgcctcccttgcccatgaaggtggccatccgcagcgtggccgtgaccaaggagcgcagccacgtgctggtgggcctggaggatggcaagctcatcgtggtggtcgcggggcagccctctgaggtgcgcagcagccagttcgcgcggaagctgtggcggtcctcgcggcgcatctcccaggtgtcctcgggagagacggaatacaaccctactgaggcgcgctgaacctggccagtccggctgctcgggccccgcccccggcaggcctggcccgggaggccccgcccagaagtcggcgggaacaccccggggtgggcagcccaggggggtgagcggggcccaccctgcccagctcagggattggcgggcgatgttaccccctcagggattggcgggcggaagtcccgcccctcgccggctgaggggccgccctgagggccagcactggcgtctgcggccgcagcagcactttttgcacagtctggggcggggttccccggcttccaagtcgctgtttcgtcaaagcacgagggccgcctgtggccttaattcctaacggcggccccggttctcccttctcggcaataaaccaggcctagttttgtagc

SEQ ID NO: 19886 - DNA, 7281 bp, Homo sapiens
  source 1..7281: mol_type = unassigned DNA
ctccgctgcctgagtcctcggcgaacatggcggcccccgagtcagggccggctttgagtccaggcactgcagagggtgaggaggagacgattctctatgacttgttggtcaacaccgagtggccaccggagactgaagtacagcctagaggcaaccaaaaacatggtgcatcctttatcatcacgaaagcaattcgagatcgtttattatttttacgccaatacatctggtacagcccggcaccttttttgctccctgatggactggttcgcttggttaataaacagataaactggcatttggtacttgcaagcaatggaaagcttttggctgctgttcaagatcagtgtgtggaaatcaggtctgcaaaagatgattttacatccattattgggaaatgtcaagttccgaaagacccgaaaccccagtggagacgggtagcatggagttacgattgtaccctactggcctatgccgaaagcacaggaactgtgagggtgtttgatctcatgggaagtgaactctttgtcatttccccggcatctagttttataggtgacttaagctatgccattgctgggttgatatttttagaatataaagcaagtgcacagtggtctgcagaactcctggtcatcaattaccgaggagaacttagaagttaccttgtaagtgttggaacaaatcagagctaccaagaaagtcactgtttcagcttcagtagtcattatcctcatggaatcaacacagctatttaccaccctggtcacagacttttacttgttggtggatgtgaaactgctgaagtaggcatgtcaaaagcttctagctgtggcctttctgcctggagagttctttcaggatcaccgtattataagcaggttactaatggtggagacggggttactgcagtaccgaagacactgggattattaaggatgttaagtgtcaagttttacagtcgccagggacaagaacaggatggaatttttaagatgagcctttctccagatgggatgctcctggcagccattcacttctcagggaaactgagcatctgggcgattccatctctgaagcaacaaggggaatggggtcaaaatgagcagccaggctatgatgaccttaatcctgattggaggctctctactgagaagagaaaaaaaatcaaagataaagagtccttttacccactgatagatgtcaattggtgggcagacagtgcagtgactttagctcgatgctctggtgctttaactgtttcatctgtgaaaactttgaagaatttactgggaaaatcctgtgaatggtttgaaccatcacctcaagtcactgctacccatgatgggggatttttaagtttggagtgtgagattaaacttgcccccaaacgatctcgtttggagactagagctggagaagaagatgaaggagaagaggattctgattctgattatgaaatatctgccaaggctcgctactttggttatataaaacagggcctttacttggtgactgaaatggagcgatttgcaccaccacggaaacgcccacgaaccattactaaaaactaccgccttgtgagtttgcgctccacgacaccagaggaactttatcagaggaagattgaaagtgaagagtatgaggaagccttgtccttggctcatacctacggcctggatactgaccttgtatatcagaggcagtggaggaagtcagcggtcaacgttgcttcaattcagaattatttgagtaaaataaagaagcgatcctgggttctccatgagtgtttggaaagagttcctgaaaatgtggatgctgcaaaagaactgcttcagtatggattaaaaggcacagacctggaggctcttttagcaatagggaaaggagcagatgatggcagatttacattacctggtgaaatagacattgacagtatctcctatgaagagctttcaccacctgatgaagagcctgccaagaataaaaaggaaaaggagctcaagaagagacaagaactactgaaattagtgaacttttccaagttgacactggaacaaaaggaactttgccgttgtagacggaagttattaacctacttagatcgacttgcaacatatgaggaaatcctaggagtgcctcatgcatctgaacagagatatgatgctgaattctttaagaaattcagaaatcagaatattgttctctcagcaagaacttatgctcaggaaagtaatgtacaagccctggaaattctgtttacttaccatggttccgacctgcttcctcatcgccttgcaattctgtccaactttccagagaccacttctccacatgaatattctgttttgctgcccgaagcttgttttaacggtgactccctgatgatcattccttggcatgaacataaacaccgagctaaagattggtgcgaggagttggcttgcagaatggttgttgagccgaatctccaagatgaaagtgaattcttgtatgctgcacagcctgagttactaaggttcaggatgacccagcttacggtggagaaggttatggactggtatcagaccagagcagaggaaatagagcattatgctcggcaggtggactgtgcattgtcacttattcgacttgggatggagcggaatattcctggtttgctggttctctgtgacaatttggttactctggaaacattggtttatgaagccaggtgtgatgtaactctaaccctgaaagaactccagcagatgaaagacattgaaaaactaagattactgatgaatagttgttctgaggataaatatgtgacaagtgcctaccagtggatggttccctttcttcatcgttgtgagaaacagtcgcctggtgtggctaatgagctattaaaagaatatttagtaactttagctaaaggggacttaaaatttcccctgaagatatttcagcattccaaaccagatctgcagcaaaaaattattcctgatcaggaccaactgatggcaatagcactagagtgcatctatacctgtgaacgaaatgatcaactctgtctttgctatgacctactagaatgtctgccagaaagaggatatggtgataagacagaggcaaccacaaagcttcatgacatggtagaccaactggaacaaattctcagtgtgtcagagcttttggaaaaacatggactcgagaaaccaatttcatttgttaaaaacactcaatctagctcagaagaggcacgcaagctgatggttagattgacgaggcacactggccggaagcagcctcctgtcagtgagtctcattggagaacgttgctgcaagacatgttaactatgcagcagaatgtatacacatgtctagattctgatgcctgctatgagatatttacagaaagccttctgtgctctagtcgccttgaaaacatccacctggctggacagatgatgcactgcagtgcttgttcagaaaatcctccagctggtatagcccataaagggaaaccccactacagggtcagctacgaaaagagtattgacttggttttggctgccagcagagagtacttcaattcttctaccaacctcactgatagctgcatggatctagccaggtgctgcttacaactgataacagacagaccccctgccattcaagaggagctagatcttatccaagccgttggatgtcttgaagaatttggggtaaagatcctgcctttgcaagtgcgattgtgccctgatcggatcagtctcatcaaggagtgtatttcccagtcccccacatgctataaacaatccaccaagcttctgggccttgctgagctgctgagggttgcaggtgagaacccagaagaaaggcggggacaggttctaatccttttagtggagcaggcacttcgcttccatgactacaaagcagccagtatgcattgtcaggagctgatggccacaggttatcctaaaagttgggatgtttgtagccagttaggacaatcagaaggttaccaggacttggccactcgtcaagagctcatggcttttgctttgacacattgccctcctagcagcattgaacttcttttggcagctagcagctctctgcagacagaaattctttatcaaagagtgaatttccagatccatcatgaaggaggggaaaatatcagtgcttcaccattaactagtaaagcagtacaagaggatgaagtaggtgttccaggtagcaattcagctgacctattgcgctggaccactgctaccaccatgaaagtcctttccaacaccacaaccaccaccaaagcggtgctgcaggccgtcagtgatgggcagtggtggaagaagtctttaacttaccttcgaccccttcaggggcaaaaatgtggtggtgcatatcaaatcggaactacagccaatgaagatctagagaaacaagggtgtcatcctttttatgaatctgtcatctcaaatccttttgtcgctgagtctgaagggacctatgacacctatcagcatgttccagtggaaagctttgcagaagtattgctgagaactggaaaattggcagaggctaaaaataaaggagaagtatttccaacaactgaagttctcttgcaactagcaagtgaagccttgccaaatgacatgaccttggctcttgcttaccttcttgccttaccacaagtgttagatgctaaccggtgctttgaaaagcagtccccctctgcattatctctccagctggcagcgtattactatagcctccagatctatgcccgattggccccatgtttcagggacaagtgccatcctctttacagggctgatcccaaagaactaatcaagatggtcaccaggcatgtgactcgacatgagcacgaagcctggcctgaagaccttatttcactgaccaagcagttacactgctacaatgaacgtctcctggatttcactcaggcgcagatccttcagggccttcggaagggtgtggacgtgcagcggtttactgcagatgaccagtataaaagggaaactatccttggtctggcagaaactctagaggaaagcgtctacagcattgctatttctctggcacaacgttacagtgtctcccgctgggaagtttttatgacccatttggagttcctcttcacggacagtggtttgtccacactagaaattgaaaatagagcccaagaccttcatctctttgagactttgaagactgatccagaagcctttcaccagcacatggtcaagtatatttaccctactattggtggctttgatcacgaaaggctgcagtattatttcactcttctggaaaactgtggctgtgcagatttggggaactgtgccattaaaccagaaacccacattcgactgctgaagaagtttaaggttgttgcatcaggtcttaattacaaaaagctgacagatgaaaacatgagtcctcttgaagcattggagccagttctttcaagtcaaaatatcttgtctatttccaaacttgttcccaaaatccctgaaaaggatggacagatgctttccccaagctctctgtacaccatctggttacagaagttgttctggactggagaccctcatctcattaaacaagtcccaggctcttcaccggagtggcttcatgcctatgatgtctgcatgaagtactttgatcgtctccacccaggtgacctcatcactgtggtagatgcagttacattttctccaaaagctgtgaccaagctgtctgtggaagcccgtaaagagatgactagaaaggctattaagacagtcaaacattttattgagaagccaaggaaaagaaactcagaagacgaagctcaagaagctaaggattctaaagttacctatgcagatactttgaatcatctggagaaatcacttgcccacctggaaaccctgagccacagcttcatcctttctctgaagaatagtgagcaggaaacactgcaaaaatacagtcacctctatgatctgtcccgatcagaaaaagagaaacttcatgatgaagctgtggctatttgtttagatggtcagcctctagcaatgattcagcagctgctagaggtggcagttggccctcttgacatctcacccaaggatatagtgcagagtgcaatcatgaaaataatttctgcattgagtggtggcagtgctgaccttggtgggccaagggacccactgaaggtcctggaaggtgttgttgcagcagtccacgccagtgtggacaagggtgaggagctggtttcacctgaggacctgctggagtggctgcggcctttctgtgctgatgacgcctggccggtgcggccccgcattcacgtgctgcagattttggggcaatcatttcacctgactgaggaggacagcaagctcctcgtgttctttagaactgaagccattctcaaagcctcctggccccagagacaggtagacatagctgacattgagaatgaagagaaccgctactgtctattcatggaactcctggaatctagtcaccacgaggctgaatttcagcacttggttttacttttgcaagcttggccacctatgaaaagtgaatatgtcataaccaataatccatgggtgagactagctacagtgatgctaaccagatgtacgatggagaacaaggaaggattggggaatgaagttttgaaaatgtgtcgctctttgtataacaccaagcagatgctgcctgcagagggtgtgaaggagctgtgtctgctgctgcttaaccagtccctcctgcttccatctctgaaacttctcctcgagagccgagatgagcatctgcacgagatggcactggagcaaatcacggcagtcactacggtgaatgattccaattgtgaccaagaacttctttccctgctcctggatgccaagctgctggtgaagtgtgtctccactcccttctatccacgtattgttgaccacctcttggctagcctccagcaagggcgctgggatgcagaggagctgggcagacacctgcgggaggccggccatgaagccgaagccgggtctctccttctggccgtgagggggactcaccaggccttcagaaccttcagtacagccctccgcgcagcacagcactgggtgtgagggccacctgtggccctgctccttagcagaaaaagcatctggagttgaatgctgttcccagaagcaacatgtgtatctgccgattgttctccatggttccaacaaattgcaaataaaactgtatggaaacgatgagcaa

SEQ ID NO: 19887 - DNA, 6922 bp, Homo sapiens
  source 1..6922: mol_type = unassigned DNA
ctccgctgcctgagtcctcggcgaacatggcggcccccgagtcagggccggctttgagtccaggcactgcagagggtgaggaggagacgattctctatgacttgttggtcaacaccgagtggccaccggagactgaagtacagcctagaggcaaccaaaaacatggtgcatcctttatcatcacgaaagcaattcgagatcgtttattatttttacgccaatacatctggtacagcccggcaccttttttgctccctgatggactggttcgcttggttaataaacagataaactggcatttggtacttgcaagcaatggaaagcttttggctgctgttcaagatcagtgtgtggaaatcaggtctgcaaaagatgattttacatccattattgggaaatgtcaagttccgaaagacccgaaaccccagtggagacgggtagcatggagttacgattgtaccctactggcctatgccgaaagcacaggaactgtgagggtgtttgatctcatgggaagtgaactctttgtcatttccccggcatctagttttataggtgacttaagctatgccattgctgggttgatatttttagaatataaagcaagtgcacagtggtctgcagaactcctggtcatcaattaccgaggagaacttagaagttaccttgtaagtgttggaacaaatcagagctaccaagaaagtcactgtttcagcttcagtagtcattatcctcatggaatcaacacagctatttaccaccctggtcacagacttttacttgttggtggatgtgaaactgctgaagtaggcatgtcaaaagcttctagctgtggcctttctgcctggagagttctttcaggatcaccgtattataagcaggttactaatggtggagacggggttactgcagtaccgaagacactgggattattaaggatgttaagtgtcaagttttacagtcgccagggacaagaacaggatggaatttttaagatgagcctttctccagatgggatgctcctggcagccattcacttctcagggaaactgagcatctgggcgattccatctctgaagcaacaaggggaatggggtcaaaatgagcagccaggctatgatgaccttaatcctgattggaggctctctactgagaagagaaaaaaaatcaaagataaagagtccttttacccactgatagatgtcaattggtgggcagacagtgcagtgactttagctcgatgctctggtgctttaactgtttcatctgtgaaaactttgaagaatttactgggaaaatcctgtgaatggtttgaaccatcacctcaagtcactgctacccatgatgggggatttttaagtttggagtgtgagattaaacttgcccccaaacgatctcgtttggagactagagctggagaagaagatgaaggagaagaggattctgattctgattatgaaatatctgccaaggctcgctactttggttatataaaacagggcctttacttggtgactgaaatggagcgatttgcaccaccacggaaacgcccacgaaccattactaaaaactaccgccttgtgagtttgcgctccacgacaccagaggaactttatcagaggaagattgaaagtgaagagtatgaggaagccttgtccttggctcatacctacggcctggatactgaccttgtatatcagaggcagtggaggaagtcagcggtcaacgttgcttcaattcagaattatttgagtaaaataaagaagcgatcctgggttctccatgagtgtttggaaagagttcctgaaaatgtggatgctgcaaaagaactgcttcagtatggattaaaaggcacagacctggaggctcttttagcaatagggaaaggagcagatgatggcagatttacattacctggtgaaatagacattgacagtatctcctatgaagagctttcaccacctgatgaagagcctgccaagaataaaaaggaaaaggagctcaagaagagacaagaactactgaaattagtgaacttttccaagttgacactggaacaaaaggaactttgccgttgtagacggaagttattaacctacttagatcgacttgcaacatatgaggaaatcctaggagtgcctcatgcatctgaacagagatatgatgctgaattctttaagaaattcagaaatcagaatattgttctctcagcaagaacttatgctcaggaaagtaatgtacaagccctggaaattctgtttacttaccatggttccgacctgcttcctcatcgccttgcaattctgtccaactttccagagaccacttctccacatgaatattctgttttgctgcccgaagcttgttttaacggtgactccctgatgatcattccttggcatgaacataaacaccgagctaaagattggtgcgaggagttggcttgcagaatggttgttgagccgaatctccaagatgaaagtgaattcttgtatgctgcacagcctgagttactaaggttcaggatgacccagcttacggtggagaaggttatggactggtatcagaccagagcagaggaaatagagcattatgctcggcagctgcagcaaaaaattattcctgatcaggaccaactgatggcaatagcactagagtgcatctatacctgtgaacgaaatgatcaactctgtctttgctatgacctactagaatgtctgccagaaagaggatatggtgataagacagaggcaaccacaaagcttcatgacatggtagaccaactggaacaaattctcagtgtgtcagagcttttggaaaaacatggactcgagaaaccaatttcatttgttaaaaacactcaatctagctcagaagaggcacgcaagctgatggttagattgacgaggcacactggccggaagcagcctcctgtcagtgagtctcattggagaacgttgctgcaagacatgttaactatgcagcagaatgtatacacatgtctagattctgatgcctgctatgagatatttacagaaagccttctgtgctctagtcgccttgaaaacatccacctggctggacagatgatgcactgcagtgcttgttcagaaaatcctccagctggtatagcccataaagggaaaccccactacagggtcagctacgaaaagagtattgacttggttttggctgccagcagagagtacttcaattcttctaccaacctcactgatagctgcatggatctagccaggtgctgcttacaactgataacagacagaccccctgccattcaagaggagctagatcttatccaagccgttggatgtcttgaagaatttggggtaaagatcctgcctttgcaagtgcgattgtgccctgatcggatcagtctcatcaaggagtgtatttcccagtcccccacatgctataaacaatccaccaagcttctgggccttgctgagctgctgagggttgcaggtgagaacccagaagaaaggcggggacaggttctaatccttttagtggagcaggcacttcgcttccatgactacaaagcagccagtatgcattgtcaggagctgatggccacaggttatcctaaaagttgggatgtttgtagccagttaggacaatcagaaggttaccaggacttggccactcgtcaagagctcatggcttttgctttgacacattgccctcctagcagcattgaacttcttttggcagctagcagctctctgcagacagaaattctttatcaaagagtgaatttccagatccatcatgaaggaggggaaaatatcagtgcttcaccattaactagtaaagcagtacaagaggatgaagtaggtgttccaggtagcaattcagctgacctattgcgctggaccactgctaccaccatgaaagtcctttccaacaccacaaccaccaccaaagcggtgctgcaggccgtcagtgatgggcagtggtggaagaagtctttaacttaccttcgaccccttcaggggcaaaaatgtggtggtgcatatcaaatcggaactacagccaatgaagatctagagaaacaagggtgtcatcctttttatgaatctgtcatctcaaatccttttgtcgctgagtctgaagggacctatgacacctatcagcatgttccagtggaaagctttgcagaagtattgctgagaactggaaaattggcagaggctaaaaataaaggagaagtatttccaacaactgaagttctcttgcaactagcaagtgaagccttgccaaatgacatgaccttggctcttgcttaccttcttgccttaccacaagtgttagatgctaaccggtgctttgaaaagcagtccccctctgcattatctctccagctggcagcgtattactatagcctccagatctatgcccgattggccccatgtttcagggacaagtgccatcctctttacagggctgatcccaaagaactaatcaagatggtcaccaggcatgtgactcgacatgagcacgaagcctggcctgaagaccttatttcactgaccaagcagttacactgctacaatgaacgtctcctggatttcactcaggcgcagatccttcagggccttcggaagggtgtggacgtgcagcggtttactgcagatgaccagtataaaagggaaactatccttggtctggcagaaactctagaggaaagcgtctacagcattgctatttctctggcacaacgttacagtgtctcccgctgggaagtttttatgacccatttggagttcctcttcacggacagtggtttgtccacactagaaattgaaaatagagcccaagaccttcatctctttgagactttgaagactgatccagaagcctttcaccagcacatggtcaagtatatttaccctactattggtggctttgatcacgaaaggctgcagtattatttcactcttctggaaaactgtggctgtgcagatttggggaactgtgccattaaaccagaaacccacattcgactgctgaagaagtttaaggttgttgcatcaggtcttaattacaaaaagctgacagatgaaaacatgagtcctcttgaagcattggagccagttctttcaagtcaaaatatcttgtctatttccaaacttgttcccaaaatccctgaaaaggatggacagatgctttccccaagctctctgtacaccatctggttacagaagttgttctggactggagaccctcatctcattaaacaagtcccaggctcttcaccggagtggcttcatgcctatgatgtctgcatgaagtactttgatcgtctccacccaggtgacctcatcactgtggtagatgcagttacattttctccaaaagctgtgaccaagctgtctgtggaagcccgtaaagagatgactagaaaggctattaagacagtcaaacattttattgagaagccaaggaaaagaaactcagaagacgaagctcaagaagctaaggattctaaagttacctatgcagatactttgaatcatctggagaaatcacttgcccacctggaaaccctgagccacagcttcatcctttctctgaagaatagtgagcaggaaacactgcaaaaatacagtcacctctatgatctgtcccgatcagaaaaagagaaacttcatgatgaagctgtggctatttgtttagatggtcagcctctagcaatgattcagcagctgctagaggtggcagttggccctcttgacatctcacccaaggatatagtgcagagtgcaatcatgaaaataatttctgcattgagtggtggcagtgctgaccttggtgggccaagggacccactgaaggtcctggaaggtgttgttgcagcagtccacgccagtgtggacaagggtgaggagctggtttcacctgaggacctgctggagtggctgcggcctttctgtgctgatgacgcctggccggtgcggccccgcattcacgtgctgcagattttggggcaatcatttcacctgactgaggaggacagcaagctcctcgtgttctttagaactgaagccattctcaaagcctcctggccccagagacaggtagacatagctgacattgagaatgaagagaaccgctactgtctattcatggaactcctggaatctagtcaccacgaggctgaatttcagcacttggttttacttttgcaagcttggccacctatgaaaagtgaatatgtcataaccaataatccatgggtgagactagctacagtgatgctaaccagatgtacgatggagaacaaggaaggattggggaatgaagttttgaaaatgtgtcgctctttgtataacaccaagcagatgctgcctgcagagggtgtgaaggagctgtgtctgctgctgcttaaccagtccctcctgcttccatctctgaaacttctcctcgagagccgagatgagcatctgcacgagatggcactggagcaaatcacggcagtcactacggtgaatgattccaattgtgaccaagaacttctttccctgctcctggatgccaagctgctggtgaagtgtgtctccactcccttctatccacgtattgttgaccacctcttggctagcctccagcaagggcgctgggatgcagaggagctgggcagacacctgcgggaggccggccatgaagccgaagccgggtctctccttctggccgtgagggggactcaccaggccttcagaaccttcagtacagccctccgcgcagcacagcactgggtgtgagggccacctgtggccctgctccttagcagaaaaagcatctggagttgaatgctgttcccagaagcaacatgtgtatctgccgattgttctccatggttccaacaaattgcaaataaaactgtatggaaacgatgagcaag

SEQ ID NO: 19888 - DNA, 10697 bp, Homo sapiens
  source 1..10697: mol_type = unassigned DNA
tccctgactccacctcttctgccacaaacgtcagcatggtggtatcagccggcccttggtccagtgagaaggcagagatgaacattctagaaatcaacgagacattgcgcccccagctggcagagaagaaacagcagttcagaaacctcaaagagaaatgttttctaactcaactggccggcttcctggccaaccgacagaagaaatacaagtatgaagagtgtaaagacctcataaaatttatgctgaggaatgagcgacagttcaaggaggagaagcttgcagagcagctgaagcaagctgaggagctcaggcaatataaagtcctagttcactctcaggaacgagagctgacccagctaagggagaagttacgggaagggagagatgcctcccgctcattgtatgagcatctccaggccctcctcactccggatgagccggacaagtcccaggggcaggacctccaagaacagctggctgaggggtgtagactggcacagcaccttgtccaaaagctcagcccagaaaatgacgaagatgaggatgaagatgttcaagttgaggaggctgagaaagtactggaatcatctgcccccagggaggtgcagaaggctgaagagagcaaagtccctgaggactcactggaggaatgtgccatcacttgttcaaatagccacggcccttgtgactccaaccagcctcacaagaacatcaaaatcacatttgaggaagacgaagtcaactcaactctggttgtagacagagaatcctctcatgatgaatgtcaggatgctctaaacattctcccagtccctggccccacctcttctgccacaaacgtcagcatggtggtatcagccggccctttgtccagcgagaaggcagagatgaacattctagaaatcaatgagaaattgcgcccccagctggcagagaagaaacagcagttcagaaacctcaaagagaaatgttttctaactcaactgtccggcttcctggccaaccaacagaagaaatacaaatatgaagagtgcaaagacctcataaaatttatgctgaggaatgagcgacagttcaaggaggagaagcttgcagagcagctcaagcaagctgaggagctcaggcaatataaagtcctggttcacgctcaggaacgagagctgacccagttaaaggagaagttacgggaagggagagatgcctcccgctcattgaatgagcatctccaggccctcctcactccgtatgagccggacaagtcccaggggcaggacctccaagaacagctggctgaggggtgtagactggcacagcaccttgtccaaaagctcagcccagaaaatgacaacgatgacgatgaagatgttcaagttgaggtggctgagaaagtgcagaaatcatctgcccccagggagatgcagaaggctgaagaaaaggaagtccctgaggactcactggaggaatgtgccatcacttattcaaatagccatggctcttatgactccaaccagccacataggaaaaccaaaatcacatttgaggaagacaaagtcgactcaactctcattggctcatcctctcatgttgaatgggaggatgctgtacacattattccagaaaatgaaagtgatgatgaggaagaggaagaaaaagggccagtgtctcccaggaatctgcaggagtctgaagaggaggaagtcccccaggagtcctgggatgaaggttattcgactctctcaattcctcctgaaatgttggcctcgtaccagtcttacagcagcacatttcactcattagaggaacagcaagtctgcatggctgttgacataggcagacatcggtgggatcaagtgaaaaaggaggaccaagaggcaacaggtcccaggctcagcagggagctgctggatgagaaagagcctgaagtcttgcaggactcactggatagatgttattcgactccttcaggttatcttgaactgcctgacttaggccagccctacagcagtgctgtttactcattggaggaacagtaccttggcttggctcttgacgtggacagaattaaaaaggaccaagaagaggaagaagaccaaggcccaccatgccccaggctcagcagggagctgctggaggtagtagagcctgaagtcttgcaggactcactggatagatgttattcaactccttccagttgtcttgaacagcctgactcctgccagccctatggaagttccttttatgcattggaggaaaaacatgttggcttttctcttgacgtgggagaaattgaaaagaaggggaaggggaagaaaagaaggggaagaagatcaaagaaggaaagaagaaggggaagaaaagaaggggaagaagatcaaaacccaccatgccccaggctcagcagggagctgctggatgagaaagggcctgaagtcttgcaggactcactggatagatgttattcaactccttcaggttgtcttgaactgactgactcatgccagccctacagaagtgccttttatgtattggagcaacagcgtgttggcttcgctgttgacatggatgaaattgaaaagtaccaagaagtggaagaagaccaagacccatcatgccccaggctcagcagggagctgctggatgagaaagagcctgaagtcttgcaggactcactggatagatgttattcgactccttcaggttatcttgaactgcctgacttaggccagccctacagcagtgctgtttactcattggaggaacagtaccttggcttggctcttgacgtggacagaattaaaaaggaccaagaagaggaagaagaccaaggcccaccatgccccaggctcagcagggagctgctggaggtagtagagcctgaagtcttgcaggactcactggatagatgttattcaactccttccagttgtcttgaacagcctgactcctgccagccctatggaagttccttttatgcattggaggaaaaacatgttggcttttctcttgacgtgggagaaattgaaaagaaggggaaggggaagaaaagaaggggaagaagatcaaagaaggaaagaagaaggggaagaaaagaaggggaagaagatcaaaacccaccatgccccaggctcagcagggagctgctggatgagaaagggcctgaagtcttgcaggactcactggatagatgttattcaactccttcaggttgtcttgaactgactgactcatgccagccctacagaagtgccttttatgtattggagcaacagcgtgttggcttcgctgttgacatggatgaaattgaaaagtaccaagaagtggaagaagaccaagacccatcatgccccaggctcagcagggagctgctggatgagaaagagcctgaagtcttgcaggactcactggatagatgttattcgactccttcaggttatcttgaactgcctgacttaggccagccctacagcagtgctgtttactcattggaggaacagtaccttggcttggctcttgacgtggacagaattaaaaaggacgaagaagaggaagaagaccaagacccaccatgccccaggctcagcagggagctgctggaggtagtagcgcctgaagtcttgcaggactcactggatagatgttattcaactccttccagttgtcttgaacagcctgactcctgccagccctatggaagttccttttatgcattggaggaaaaacatgttggcttttctcttgacgtgggagaaattgaaaagaaggggaaggggaagaaaagaaggggaagaagatcaaagaaggaaagaagaaggggaagaaaagaaggggaagaagatcaaaacccaccatgccccaggctcagcagggagctgctggatgagaaagggcctgaagtcttgcaagactcactggatagatgttattcaactccttcaggttgtcttgaactgactgactcatgccagccctacagaagtgccttttatgtattggagcaacagcgtgttggcatggctgttgacatggatgaaattgaaaagtaccaagaagtggaagaagaccaagacccatcatgccccaggctcagcagggagctgctggatgagaaagagcctgaagtcttgcaggactcactgaatagatgttattcgactccttcaggttatcttgaactgcctgacttaggccagccctacagcagtgctgtttactcattggaggaacagtaccttggcttggctcttgacgtggacagaattaaaaaggaccaagaagaggaagaagacgaagaccaagacccaccatgccccaggctcagcagggagctgctggaggtagtagagcctgaagtcttgcaggactcactggatagatgttattcaactccttccagttgtcttgaacagcctgactcctgccagccctatggaagttccttttatgcattggaggaaaaccatgttggcttttctcttgacgtgggagaaattgaaaagaaggggaaggggaagaaaagaaggggaagaagatcaaagaaggaaagaagaaggggaagaaaagaaggggaagaagatcaaaacccaccatgccccaggctcagcagggagctgctggatgagaaagggcctgaagtcttgcaggactcactggatagatgttattcaactccttcaggttgtcttgaactgactgactcatgccagccctacagaagtgccttttatgtattggagcaacagcatgttggcttggctgttgacatggatgaaattgaaaagtaccaagaagtggaagaagaccaagacccatcatgccccaggctcagcagggagctgctggatgagaaagagcctgaagtcttgcaggactcactggatagatgttattcgactccttcaggttatcttgaactgcctgacttaggccagccctacagcagtgctgtttactcattggaggaacagtaccttggcttggctcttgacgtggacagaattaaaaaggaccaagaagaggaagaagaccaaggcccaccatgccccaggctcagcagggagctgctggaggtagtagagcctgaagtcttgcaggactcactggatagatgttattcaactccttccagttgtcttgaacagcctgactcctgccagccctatggaagttccttttatgcattggaggaaaaccatgttggcttttctcttgacgtgggagaaattgaaaagaaggggaaggggaagaaaagaaggggaagaagatcaaagaaggaaagaagaaggggaagaaaagaaggggaagaagatcaaaacccaccatgccccaggctcagcagggagctgctggatgagaaagggcctgaagtcttgcaggactcactggatagatgttattcaactccttcaggttgtcttgaactgactgactcatgccagccctacagaagtgccttttatgtattggagcaacagcatgttggcttggctgttgacatggatgaaattgaaaagtaccaagaagtggaagaagaccaagacccatcatgccccaggctcagcagggagctgctggatgagaaagagcctgaagtcttgcaggactcactggatagatgttattcgactccttcaggttatcttgaactgcctgacttaggccagccctacagcagtgctgtttactcattggaggaacagtaccttggcttggctcttgacgtggacagaattaaaaaggaccaagaagaggaagaagaccaaggcccaccatgccccaggctcagcagggagctgctggaggtagtagagcctgaagtcttgcaggactcactggatagatgttattcaactccttccagttgtcttgaacagcctgactcctgccagccctatggaagttccttttatgcattggaggaaaaccatgttggcttttctcttgacgtgggagaaattgaaaagaaggggaaggggaagaaaagaaggggaagaagatcaaagaaggaaagaagaaggggaagaaaagaaggggaagaagatcaaaacccaccatgccccaggctcagcagggagctgctggatgagaaagggcctgaagtcttgcaggactcactggatagatgttattcaactccttcaggttgtcttgaactgactgactcatgccagccctacagaagtgccttttatgtattggagcaacagcatgttggcttggctgttgacatggatgaaattgaaaagtaccaagaagtggaagaagaccaagacccatcatgccccaggctcagcagggagctgctggatgagaaagagcctgaagtcttgcaggactcactggatagatgttattcgactccttcaggttatcttgaactgcctgacttaggccagccctacagcagtgctgtttactcattggaggaacagtaccttggcttggctcttgacgtggacagaattaaaaaggaccaagaagaggaagaagaccaaggcccaccatgccccaggctcagcagggagctgctggaggtagtagagcctgaagtcttgcaggactcactggatagatgttattcaactccttccagttgtcttgaacagcctgactcctgccagccctatggaagttccttttatgcattggaggaaaaccatgttggcttttctcttgacgtgggagaaattgaaaagaaggggaaggggaagaaaagaaggggaagaagatcaaagaaggaaagaagaaggggaagaaaagaaggggaagaagatcaaaacccaccatgccccaggctcagcagggagctgctggatgagaaagggcctgaagtcttgcaggactcactggatagatgttattcaactccttcaggttgtcttgaactgactgactcatgccagccctacagaagtgccttttatgtattggagcaacagcatgttggcttggctgttgacatggatgaaattgaaaagtaccaagaagtggaagaagaccaagacccatcatgccccaggctcagcagggagctgctggatgagaaagagcctgaagtcttgcaggactcactggatagatgttattcgactccttcaggttatcttgaactgcctgacttaggccagccctacagcagtgctgtttactcattggaggaacagtaccttggcttggctcttgacgtggacagaattaaaaaggaccaagaagaggaagaagaccaaggcccaccatgccccaggctcagcagggagctgctggaggtagtagagcctgaagtcttgcaggactcactggatagatgttattcaactccttccagttgtcttgaacagcctgactcctgccagccctatggaagttccttttatgcattggaggaaaaccatgttggcttttctcttgacgtgggagaaattgaaaagaaggggaaggggaagaaaagaaggggaagaagatcaaagaaggaaagaagaaggggaagaaaagaaggggaagaagatcaaaacccaccatgccccaggctcagcagggagctgctggatgagaaagggcctgaagtcttgcaggactcactggatagatgttattcaactccttcaggttgtcttgaactgactgactcatgccagccctacagaagtgccttttatgtattggagcaacagcatgttggcttggctgttgacatggatgaaattgaaaagtaccaagaagtggaagaagaccaagacccatcatgccccaggctcagcagggagctgctggatgagaaagagcctgaagtcttgcaggactcactggatagatgttattcgactccttcaggttatcttgaactgcctgacttaggccagccctacagcagtgctgtttactcattggaggaacagtaccttggcttggctcttgacgtggacagaattaaaaaggaccaagaagaggaagaagaccaaggcccaccatgccccaggctcagcagggagctgctggaggtagtagagcctgaagtcttgcaggactcactggatagatgttattcaactccttccagttgtcttgaacagcctgactcctgccagccctatggaagttccttttatgcattggaggaaaaacatgttggcttttctcttgacgtgggagaaattgaaaagaaggggaaggggaagaaaagaaggggaagaagatcaaagaaggaaagaagaaggggaagaaaagaaggggaagaagatcaaaacccaccatgccccaggctcagcagggagctgctggatgagaaagggcctgaagtcttgcaggactcactggatagatgttattcaactccttcaggttgtcttgaactgactgactcatgccagccctacagaagtgccttttatgtattggagcaacagcatgttggcttggctgttgacatggatgaaattgaaaagtaccaagaagtggaagaagaccaagacccatcatgccccaggctcagcagggagctgctggatgagaaagagcctgaagtcttgcaggactcactggatagatgttattcgactccttcaggttatcttgaactgcctgacttaggccagccctacagcagtgctgtttactcattggaggaacagtaccttggcttggctcttgacgtggacagaattaaaaaggaccaagaagaggaagaagaccaaggcccaccatgccccaggctcagcagggagctgctggaggtagtagagcctgaagtcttgcaggactcactggatagatgttattcaactccttccagttgtcttgaacagcctgactcctgccagccctatggaagttccttttatgcattggaggaaaaacatgttggcttttctcttgacgtgggagaaattgaaaagaaggggaaggggaagaaaagaaggggaagaagatcaaagaaggaaagaagaaggggaagaaaagaaggggaagaagatcaaaacccaccatgccccaggctcagcagggagctgctggatgagaaagggcctaaagtcttgcaggactcactggatagatgttattcaactccttcaggttgtcttgaactgtgtgactcatgccagccctacagaagtgccttttatgtattggagcaacagcgtgttggcttggctgttgacatggatgaaattgaaaagtaccaagaagtggaagaagaccaagacccatcatgccccaggctcagcagggagctgctggatgagaaagggcctgaagtcttgcaggactcactggatagatgttattcgactccttcaggttgtcttgaactgtgtgactcatgccagccctacagaagtgccttttacatattggagcaacagcgtgttggcttggctgttgacatggatgaaattgaaaagtaccaagaagtggaagaagaccaagacccatcatgccccaggcttagcagggagctgctggatgagaaagagcctgaagtcttgcaggactcactggatagatgttattcgactccttcaggttatcttgaactgcctgacttaggccagccctacagcagtgctgtttactcattggaggaacagtaccttggcttggctcttgacgtggacagaattaaaaaggaccaagaagaggaagaagaccaaggcccaccatgccccaggctcagcagggagctgctggaggtagtagagcctgaagtcttgcaggactcactggatagatgttattcaactccttccagttgtcttgaacagcctgactcctgccagccctatggaagttccttttatgcattggaggaaaaacatgttggcttttctcttgacgtgggagaaattgaaaagaaggggaaggggaagaaaagaaggggaagaagatcaaagaaggaaagaagaaggggaagaaaagaaggggaagaagatcaaaacccaccatgccccaggctcagcagggagctgctggatgagaaagggcctgaagtcttgcaggactcactggatagatgttattcaactccttcaggttgtcttgaactgtgtgactcatgccagccctacagaagtgccttttatgtattggagcaacagcatgttggcttggctgttgacatggatgaaattgaaaagtaccaagaagtggaagaagaccaagacccatcatgccccaggctcagcagggagctgctggatgagaaagagcctgaagtcttgcaggactcactggatagatgttattcgactccttcaggttatcttgaactgcctgacttaggccagccctacagcagtgctgtttactcattggaggaacagtaccttggcttggctcttgacgtggacaaaattgaaaagaaggggaaggggaaaaaaagaaggggaagaagatcaaagaaggaaagaagaaggggaagaaaagaaggggaagaagatcaaaacccaccatgccccaggctcaacggcgtgctgatggaagtggaagagcgtgaagtcttacaggactcactggatagatgttattcgactccgtcaatgtactttgaactacctgactcattccagcactacagaagtgtgttttactcatttgaggaacagcacatcagcttcgccctttacgtggacaataggttttttactttgacggtgacaagtctccacctggtgttccagatgggagtcatattcccacaataa

SEQ ID NO: 19889 - DNA, 1789 bp, Homo sapiens
  source 1..1789: mol_type = unassigned DNA
aaagtgctgtggggagtgatcacatttttcacaacagtaagtccctgactccacctcttctgccacaaacgtcagcatggtggtatcagccggcccttggtccagtgagaaggcagagatgaacattctagaaatcaacgagacattgcgcccccagctggcagagaagaaacagcagttcagaaacctcaaagagaaatgttttctaactcaactggccggcttcctggccaaccgacagaagaaatacaagtatgaagagtgtaaagacctcataaaatttatgctgaggaatgagcgacagttcaaggaggagaagcttgcagagcagctgaagcaagctgaggagctcaggcaatataaagtcctagttcactctcaggaacgagagctgacccagctaagggagaagttacgggaagggagagatgcctcccgctcattgtatgagcatctccaggccctcctcactccggatgagccggacaagtcccaggggcaggacctccaagaacagctggctgaggggtgtagactggcacagcaccttgtccaaaagctcagcccagaaaatgacgaagatgaggatgaagatgttcaagttgaggaggctgagaaagtactggaatcatctgcccccagggaggtgcagaaggctgaagagagcaaagtccctgaggactcactggaggaatgtgccatcacttgttcaaatagccacggcccttgtgactccaaccagcctcacaagaacatcaaaatcacatttgaggaagacgaagtcaactcaactctggttgtagacagagaatcctctcatgatgaatgtcaggatgctctaaacattctcccagtccctggccccacctcttctgccacaaacgtcagcatggtggtatcagccggccctttgtccagcgagaaggcagagatgaacattctagaaatcaatgagaaattgcgcccccagctggcagagaagaaacagcagttcagaaacctcaaagagaaatgttttctaactcaactgtccggcttcctggccaaccaacagaagaaatacaaatatgaagagtgcaaagacctcataaaatttatgctgaggaatgagcgacagttcaaggaggagaagcttgcagagcagctcaagcaagctgaggagctcaggcaatataaagtcctggttcacgctcaggaacgagagctgacccagttaaaggagaagttacgggaagggagagatgcctcccgctcattgaatgagcatctccaggccctcctcactccgtatgagccggacaagtcccaggggcaggacctccaagaacagctggctgaggggtgtagactggcacagcaccttgtccaaaagctcagcccagaaaatgacaacgatgacgatgaagatgttcaagttgaggtggctgagaaagtgcagaaatcatctgcccccagggagatgcagaaggctgaagaaaaggaagtccctgaggactcactggaggaatgtgccatcacttattcaaatagccatggctcttatgactccaaccagccacataggaaaaccaaaatcacatttgaggaagacaaagtcgactcaactctcattggctcatcctctcatgttgaatgggaggatgctgtacacattattccagaaaatgaaagtgatgatgaggaagaggaagaaaaagggccagtgtctcccaggacatcggtgggatcaagtgaaaaaggaggaccaagaggcaacaggtcccaggctcagcagggagctgctggatga

SEQ ID NO: 19890 - DNA, 3715 bp, Homo sapiens
  source 1..3715: mol_type = unassigned DNA
acggttacctggcacgctggccacattctgcctcactcttatcagagtctgagctactggcagtgctttcagctctgagttgaggcacctcgaaccttgtttttgtggtgaaggatcctaaagtgctgtggggagtgatcacatttttcacaacatccctggccccacctcttctgccacaaacgtcagcatggtggtatcagccggccctttgtccagcgagaaggcagagatgaacattctagaaatcaatgagaaattgcgcccccagctggcagagaagaaacagcagttcagaaacctcaaagagaaatgttttctaactcaactgtccggcttcctggccaaccaacagaagaaatacaaatatgaagagtgcaaagacctcataaaatttatgctgaggaatgagcgacagttcaaggaggagaagcttgcagagcagctcaagcaagctgaggagctcaggcaatataaagtcctggttcacgctcaggaacgagagctgacccagttaaaggagaagttacgggaagggagagatgcctcccgctcattgaatgagcatctccaggccctcctcactccgtatgagccggacaagtcccaggggcaggacctccaagaacagctggctgaggggtgtagactggcacagcaccttgtccaaaagctcagcccagaaaatgacaacgatgacgatgaagatgttcaagttgaggtggctgagaaagtgcagaaatcatctgcccccagggagatgcagaaggctgaagaaaaggaagtccctgaggactcactggaggaatgtgccatcacttattcaaatagccatggctcttatgactccaaccagccacataggaaaaccaaaatcacatttgaggaagacaaagtcgactcaactctcattggctcatcctctcatgttgaatgggaggatgctgtacacattattccagaaaatgaaagtgatgatgaggaagaggaagaaaaagggccagtgtctcccaggaatctgcaggagtctgaagaggaggaagtcccccaggagtcctgggatgaaggttattcgactctctcaattcctcctgaaatgttggcctcgtaccagtcttacagcagcacatttcactcattagaggaacagcaagtctgcatggctgttgacataggcagacatcggtgggatcaagtgaaaaaggaggaccaagaggcaacaggtcccagcagggagctgctggatgagaaagggcctgaagtcttccaggactcacaggatagatgttattcaactccttcaggttgtcttgaactgactgactcatgccagccctacagaagtgccttttacatattggagcaacagcgtgttggcttggctattgacatggatgaaattgaaaagtaccaagaagtggaagaagaccaagacccatcatgccccaggctcagcagggagctgctggatgagaaagagcctgaagtcttgcaggactcactggatagatgttattcgactccttcaggttatcttgaactgcctgacttaggccagccctacagcagtgctgtttactcattggaggaacagtaccttggcttggctcttgacgtggacagaattaaaaaggaccaagaagaggaagaagaccaaggcccaccatgccccaggctcagcagggagctgctggatgagaaagggcctgaagtcttgcaggactcactggatagatgttattcaactccttcaggttgtcttgaactgactgactcatgccagccctacagaagtgccttttatgtattggagcaacagcatgttggcttggctgttgacatggatgaaattgaaaagaaggggaaggggaagaaaagaaggggaagaagatcaaagaaggaaagaagaaggggaagaaaagaaggggaagaagatcaaaacccaccatgccccaggctcaacggcgtgctgatggaagtggaagagcgtgaagtcttacaggactcactggatagatgttattcgactccgtcaatgtactttgaactacctgactcattccagcactacagaagtgtgttttactcatttgaggaacagcacatcagcttcgccctttacgtggacaataggttttttactttgacggtgacaagtctccacctggtgttccagatgggagtcatattcccacaataagcagcccttagtaatccgagagatgtcattcctgcaggcaggacctataggcaagtgaagatttgaatgaaagtacagttccatttggaagcccagacataggatgggtcagtgggcatggctctattcctattctcaaaccatgccagtggcaacctgtgcgcagtctgaagacaatggacccacattaggtgtgacacgttcacataactgtgcagcacatgccgggagtgatcagtcagacattttaatttgaaccacgtatctctgggtagctacaaaattcctcagggatttcattttgcaggcatgtctctgagcttctatacctgctcaaggtcattgtcatctttgtgtttagctcatccaaaggtgttaccctggtttcaatgaacctaacctcattctttgtgtcttcagtgttggcttgttttagctgatccatctgtaacacaggagggatccttggctgaggattgtatttcagaaccaccaactgctcttgacaattgttaacccgctagactcctttggttagagaagccacagtccttcagcctccaattggtgtcagtacttaggaagaccacagctagatggacaaacagcattgggaggccttagccctgctcctctcaattccatcctgtagagaacaggagtcaggagccgctggcaggagacagcatgtcacccaggactctgccggtgcagaatatgaacaatgccatgttcttgcagaaaacgcttagcctgagtttcataggaggtaatcaccagacaactgcagaatgtagaacactgagcaggacaactgacctgtctccttcacatagtccatatcaccacaaatcacacaacaaaaaggagaagagatattttgggttcaaaaaaagtaaaaagataatgtagctgcatttctttagttattttgaaccccaaatatttcctcatctttttgttgttgtcatggatggtggtgacatggacttgtttatagaagacaggtcagctgtctggctcaatgatctacattctgaagttgtctgaaaatgtcttcatgattaaattcagcctaaacgttttgccaggaacactgcagagacaatgctgtgagtttccaacctcagcccatctgcgggcagagaaggtctagtttgtccatcaccattatgatatcaggactggttacttggttaaggaggggtctaggagatctgtcccttttagagacaccttacttacaatgaagtacttgggaaagtggttttcaagagtataaatatcctgtattctaatgatcatcctctaaacattttatcatttattaatcctccctgcctgtgtctattattatattcatatctctacactgcaaatttggggtctcaatttttactgtgcctttgtttttactagtgtctgctgttgcaaaaagaagacattctctgcctgagttttaatttttgtccaaagttaattttaatctatacaattaaaaccttttgcctatca

SEQ ID NO: 19891 - DNA, 3894 bp, Homo sapiens
  source 1..3894: mol_type = unassigned DNA
aaatgaggtataggggagagaaacacgtactttgaaagaattgacccagctgaattggaaaatgtgggaaggggatggggaagaggctgctccacctgagatctggctccaggacttacagcaaggggaacttggcaacatggccaatctttcctaagctgctcagcttacaagaaaaggaatcatactgctaagaattcaaacttcagcagtcatagtccctgactccacctcttctgccacaaacgtcagcatggtggtatcagccggcccttggtccagtgagaaggcagagatgaacattctagaaatcaacgagacattgcgcccccagctggcagagaagaaacagcagttcagaaacctcaaagagaaatgttttctaactcaactggccggcttcctggccaaccgacagaagaaatacaagtatgaagagtgtaaagacctcataaaatttatgctgaggaatgagcgacagttcaaggaggagaagcttgcagagcagctgaagcaagctgaggagctcaggcaatataaagtcctagttcactctcaggaacgagagctgacccagctaagggagaagttacgggaagggagagatgcctcccgctcattgtatgagcatctccaggccctcctcactccggatgagccggacaagtcccaggggcaggacctccaagaacagctggctgaggggtgtagactggcacagcaccttgtccaaaagctcagcccagaaaatgacgaagatgaggatgaagatgttcaagttgaggaggctgagaaagtactggaatcatctgcccccagggaggtgcagaaggctgaagagagcaaagtccctgaggactcactggaggaatgtgccatcacttgttcaaatagccacggcccttgtgactccaaccagcctcacaagaacatcaaaatcacatttgaggaagacgaagtcaactcaactctggttgtagacagagaatcctctcatgatgaatgtcaggatgctctaaacattctcccagaaaatgaaagtgatgatgaggaagaggaagaaaaagggccagtgtctcccaggaatctgcaggagtctgaagaggaggaagtcccccaggagtcctgggatgaaggttattcgactctctcaattcctcctgaaatgttggcctcgtaccagtcttacagcagcacatttcactcattagaggaacagcaagtctgcatggctgttgacataggcagacatcggtgggatcaagtgaaaaaggaggaccaagaggcaacaggtcccaggctcagcagggagctgctggatgagaaagggcctgaagtcttgcaggactcactggatagatgttattcaactccttcaggttgtcttgaactgactgactcatgccagccctacagaagtgccttttatgtattggagcaacagcgtgttggcttcgctgttgacatggatgaaattgaaaagtaccaagaagtggaagaagaccaagacccatcatgccccaggctcagcagggagctgctggatgagaaagagcctgaagtcttgcaggactcactggatagatgttattcgactccttcaggttatcttgaactgcctgacttaggccagccctacagcagtgctgtttactcattggaggaacagtaccttggcttggctcttgacgtggacagaattaaaaaggaccaagaagaggaagaagaccaaggcccaccatgccccaggctcagcagggagctgctggaggtagtagagcctgaagtcttgcaggactcactggatagatgttattcaactccttccagttgtcttgaacagcctgactcctgccagccctatggaagttccttttatgcattggaggaaaaacatgttggcttttctcttgacgtgggagaaattgaaaagaaggggaaggggaaaaaaagaaggggaagaagatcaaagaaggaaagaagaaggggaagaaaagaaggggaagaagatcaaaacccaccatgccccaggctcaacggcgtgctgatggaagtggaagagcgtgaagtcttacaggactcactggatagatgttattcgactccgtcaatgtactttgaactacctgactcattccagcactacagaagtgtgttttactcatttgaggaacagcacatcagcttcgccctttacgtggacaataggttttttactttgacggtgacaagtctccacctggtgttccagatgggagtcatattcccacaataagcagcccttagtaatccgagagatgtcattcctgcaggcaggacctataggcaagtgaagatttgaatgaaagtacagttccatttggaagcccagacataggatgggtcagtgggcatggctctattcctattctcaaaccatgccagtggcaacctgtgcgcagtctgaagacaatggacccacattaggtgtgacacgttcacataactgtgcagcacatgccgggagtgatcagtcagacattttaatttgaaccacgtatctctgggtagctacaaaattcctcagggatttcattttgcaggcatgtctctgagcttctatacctgctcaaggtcattgtcatctttgtgtttagctcatccaaaggtgttaccctggtttcaatgaacctaacctcattctttgtgtcttcagtgttggcttgttttagctgatccatctgtaacacaggagggatccttggctgaggattgtatttcagaaccaccaactgctcttgacaattgttaacccgctagactcctttggttagagaagccacagtccttcagcctccaattggtgtcagtacttaggaagaccacagctagatggacaaacagcattgggaggccttagccctgctcctctcaattccatcctgtagagaacaggagtcaggagccgctggcaggagacagcatgtcacccaggactctgccggtgcagaatatgaacaatgccatgttcttgcagaaaacgcttagcctgagtttcataggaggtaatcaccagacaactgcagaatgtagaacactgagcaggacaactgacctgtctccttcacatagtccatatcaccacaaatcacacaacaaaaaggagaagagatattttgggttcaaaaaaagtaaaaagataatgtagctgcatttctttagttattttgaaccccaaatatttcctcatctttttgttgttgtcatggatggtggtgacatggacttgtttatagaagacaggtcagctgtctggctcaatgatctacattctgaagttgtctgaaaatgtcttcatgattaaattcagcctaaacgttttgccaggaacactgcagagacaatgctgtgagtttccaacctcagcccatctgcgggcagagaaggtctagtttgtccatcaccattatgatatcaggactggttacttggttaaggaggggtctaggagatctgtcccttttagagacaccttacttacaatgaagtacttgggaaagtggttttcaagagtataaatatcctgtattctaatgatcatcctctaaacattttatcatttattaatcctccctgcctgtgtctattattatattcatatctctacactgcaaatttggggtctcaatttttactgtgcctttgtttttactagtgtctgctgttgcaaaaagaagacattctctgcctgagttttaatttttgtccaaagttaattttaatctatacaattaaaaccttttgcctatcactctggacttttggattgttttttacattcagtgttataatatttgattatggtgattggttttggtgggtactgatgcgaattaataaaaacatttcatttcc

SEQ ID NO: 19892 - DNA, 2380 bp, Homo sapiens
  source 1..2380: mol_type = unassigned DNA
cctaaagtgctgtggggagtgatcacatttttcacaacagtaagtccctgactccacctcttctgccacaaacgtcagcatggtggtatcagccggcccttggtccagtgagaaggcagagatgaacattctagaaatcaacgagacattgcgcccccagctggcagagaagaaacagcagttcagaaacctcaaagagaaatgttttctaactcaactggccggcttcctggccaaccgacagaagaaatacaagtatgaagagtgtaaagacctcataaaatttatgctgaggaatgagcgacagttcaaggaggagaagcttgcagagcagctgaagcaagctgaggagctcaggcaatataaagtcctagttcactctcaggaacgagagctgacccagctaagggagaagttacgggaagggagagatgcctcccgctcattgtatgagcatctccaggccctcctcactccggatgagccggacaagtcccaggggcaggacctccaagaacagctggctgaggggtgtagactggcacagcaccttgtccaaaagctcagcccagaaaatgacgaagatgaggatgaagatgttcaagttgaggaggctgagaaagtactggaatcatctgcccccagggaggtgcagaaggctgaagagagcaaagtccctgaggactcactggaggaatgtgccatcacttgttcaaatagccacggcccttgtgactccaaccagcctcacaagaacatcaaaatcacatttgaggaagacgaagtcaactcaactctggttgtagacagagaatcctctcatgatgaatgtcaggatgctctaaacattctcccagtccctggccccacctcttctgccacaaacgtcagcatggtggtatcagccggccctttgtccagcgagaaggcagagatgaacattctagaaatcaatgagaaattgcgcccccagctggcagagaagaaacagcagttcagaaacctcaaagagaaatgttttctaactcaactgtccggcttcctggccaaccaacagaagaaatacaaatatgaagagtgcaaagacctcataaaatttatgctgaggaatgagcgacagttcaaggaggagaagcttgcagagcagctcaagcaagctgaggagctcaggcaatataaagtcctggttcacgctcaggaacgagagctgacccagttaaaggagaagttacgggaagggagagatgcctcccgctcattgaatgagcatctccaggccctcctcactccgtatgagccggacaagtcccaggggcaggacctccaagaacagctggctgaggggtgtagactggcacagcaccttgtccaaaagctcagcccagaaaatgacaacgatgacgatgaagatgttcaagttgaggtggctgagaaagtgcagaaatcatctgcccccagggagatgcagaaggctgaagaaaaggaagtccctgaggactcactggaggaatgtgccatcacttattcaaatagccatggctcttatgactccaaccagccacataggaaaaccaaaatcacatttgaggaagacaaagtcgactcaactctcattggctcatcctctcatgttgaatgggaggatgctgtacacattattccagaaaatgaaagtgatgatgaggaagaggaagaaaaagggccagtgtctcccaggaatctgcaggagtctgaagaggaggaagtcccccaggagtcctgggatgaaggttattcgactctctcaattcctcctgaaatgttggcctcgtaccagtcttacagcagcacatttcactcattagaggaacagcaagtctgcatggctgttgacataggcagacatcggtgggatcaagtgaaaaaggaggaccaagaggcaacaggtcccagcagggagctgctggatgagaaagggcctgaagtcttccaggactcacaggatagatgttattcaactccttcaggttgtcttgaactgactgactcatgccagccctacagaagtgccttttacatattggagcaacagcgtgttggcttggctattgacatggatgaaattgaaaagtaccaagaagtggaagaagaccaagacccatcatgccccaggctcagcagggagctgctggatgagaaagagcctgaagtcttgcaggactcactggatagatgttattcgactccttcaggttatcttgaactgcctgacttaggccagccctacagcagtgctgtttactcattggaggaacagtaccttggcttggctcttgacgtggacagaattaaaaaggaccaagaagaggaagaagaccaaggcccaccatgccccaggtaa

SEQ ID NO: 19893 - DNA, 2916 bp, Homo sapiens
  source 1..2916: mol_type = unassigned DNA
tgacttcatgactaccattaagaaaatataacctgttgggaaactgtttctgccttgatgatgttgtacagacaagagataaacagtgaggaatatgcttagatgtattgggaaagacacgggtctgtggcattgtcacaagggtacacgaatactgagagtgaatgctgaaggaatgatccccattggtggtgaccctcaggtgagagtagggtgcctgtgtttcagcaaagcctgggcaattggaatgcagagctcctaagattccatgacacccccaccttctaattctgttattgcaactgcagacggttacctggcacgctggccacattctgcctcactcttatcagagtctgagctactggcagtgctttcagctctgagttgaggcacctcgaaccttgtttttgtggtgaaggatcctaaagtgctgtggggagtgatcacatttttcacaacagtaatccctgactccacctcttctgccacaaacgtcagcatggtggtatcagccggcccttggtccagtgagaaggcagagatgaacattctagaaatcaacgagacattgcgcccccagctggcagagaagaaacagcagttcagaaacctcaaagagaaatgttttctaactcaactggccggcttcctggccaaccgacagaagaaatacagcaatataaagtcctagttcactctcaggaacgagagctgacccagctaagggagaagttacgggaagggagagatgcctcccgctcattgtatgagcatctccaggccctcctcactccggatgagccggacaagtcccaggggcaggacctccaagaacagctggctgaggggtgtagactggcacagcaccttgtccaaaagctcagcccagaaaatgacgaagatgaggatgaagatgttcaagttgaggaggctgagaaagtactggaatcatctgcccccagggaggtgcagaaggctgaagagagcaaagtccctgaggactcactggaggaatgtgccatcacttgttcaaatagccacggcccttgtgactccaaccagcctcacaagaacatcaaaatcacatttgaggaagacgaagtcaactcaactctggttgtagacagagaatcctctcatgatgaatgtcaggatgctctaaacattctcccagtccctggccccacctcttctgccacaaacgtcagcatggtggtatcagccggccctttgtccagcgagaaggcagagatgaacattctagaaatcaatgagaaattgcgcccccagctggcagagaagaaacagcagttcagaaacctcaaagagaaatgttttctaactcaactgtccggcttcctggccaaccaacagaagaaatacaaatatgaagagtgcaaagacctcataaaatttatgctgaggaatgagcgacagttcaaggaggagaagcttgcagagcagctcaagcaagctgaggagctcaggcaatataaagtcctggttcacgctcaggaacgagagctgacccagttaaaggagaagttacgggaagggagagatgcctcccgctcattgaatgagcatctccaggccctcctcactccgtatgagccggacaagtcccaggggcaggacctccaagaacagctggctgaggggtgtagactggcacagcaccttgtccaaaagctcagcccagaaaatgacaacgatgacgatgaagatgttcaagttgaggtggctgagaaagtgcagaaatcatctgcccccagggagatgcagaaggctgaagaaaaggaagtccctgaggactcactggaggaatgtgccatcacttattcaaatagccatggctcttatgactccaaccagccacataggaaaaccaaaatcacatttgaggaagacaaagtcgactcaactctcattggctcatcctctcatgttgaatgggaggatgctgtacacattattccagaaaatgaaagtgatgatgaggaagaggaagaaaaagggccagtgtctcccaggaatctgcaggagtctgaagaggaggaagtcccccaggagtcctgggatgaaggttattcgactctctcaattcctcctgaaatgttggcctcgtaccagtcttacagcagcacatttcactcattagaggaacagcaagtctgcatggctgttgacataggcagacatcggtgggatcaagtgaaaaaggaggaccaagaggcaacaggtcccaggctcagcagggagctgctggatgagaaagggcctgaagtcttgcaggactcactggatagatgttattcaactccttcaggttgtcttgaactgactgactcatgccagccctacagaagtgccttttatgtattggagcaacagcatgttggcttggctgttgacatggatgaaattgaaaagtaccaagaagtggaagaagaccaagacccatcatgccccaggcttagcagggagctgctggatgagaaagagcctgaagtcttgcaggactcactggatagatgttattcgactccttcaggttatcttgaactgcctgacttaggccagccctacagcagtgctgtttactcattggaggaacagtaccttggcttggctcttgacgtggacagaattaaaaaggaccaagaagaggaagaagaccaaggcccaccatgccccaggctcagcagggagctgctggaggtagtagagcctgaagtcttgcaggactcactggatagatgttattcaactccttccagttgtcttgaacagcctgactcctgccagccctatggaagttccttttatgcattggaggaaaaacatgttggcttttctcttgacgtgggagaaattgaaaagaaggggaaggggaaaaaaagaaggggaaga

SEQ ID NO: 19894 - DNA, 531 bp, Homo sapiens
  source 1..531: mol_type = unassigned DNA
aaagtcgactcaactctcattggctcatcctctcatgttgaatgggaggatgctgtacacattattccagaaaatgaaagtgatgatgaggaagaggaagaaaaagggccagtgtctcccaggaatctgcaggagtctgaagaggaggaagtcccccaggagtcctgggatgaaggttattcgactctctcaattcctcctgaaatgttggcctcgtaccagtcttacagcagcacatttcactcattagaggaacagcaagtctgcatggctgttgacataggcagacatcggtgggatcaagtgaaaaaggaggaccaagaggcaacaggtcccaggctcagcagggagctgctggatgagaaagggcctgaagtcttgcaggactcactggatagatgttattcaactccttcaggttgtcttgaactgactgactcatgccagccctacagaagtgccttttatgtattggagcaacagcatgttggcttggctgttgacatggatgaaattgaaaagtaccaagaa

SEQ ID NO: 19895 - DNA, 5560 bp, Homo sapiens
  source 1..5560: mol_type = unassigned DNA
ccggaagtcagactatggggcggtgcggcagcgcgaagcctgcagtcctaaacgctgggtagctccgggcttccgagggggtgtgtctcccgcctctttaacctggcaggggcggttcaagtggccggggaaatcagcgaattgcagggtcaagggctggtgctttgaaagagaggcggaggggagagagggattttcccgtccccgctgcgctctgtcctccattactccttttctcggcccgcggcccgaacccgctgtgcggtagaggcagccgggtccctttaaggcccagctgcgcctgtgccttgggctctcctgacacggcccatccggaccctgaggagccagcgggccgcaagcaagttgctgggcggcggtggagatagcggcggtgctgggaggggtaggtgagggtcgcgaggctgcctgagcttctgagtgagcctggtgattttgggaacgcgggacgggcgacctgcggcgccaggagcggggccgaggtacggcggcacggctgcagcctggatgggaagttcaagtttactgcgaagtccacccagcgttccggaggtgagggcgccgcgccaggccgggcgggaggcattctgaaggcaaatcctgtttagacccaggcaaaggttcctggtgacccaggctctcatgagcagattgtcccttatcattctcctgaggatgtctggagcttcagtgctgtgtgctcttggcctccacactgggggtgccaccaactcccactgtccagggcttctggtggactctccgaggcaccgatgtagaaacttacccattcagtgcaccaagagcagcttcacatggtgtgggccgacatgaagagctgccagatccaacagaaatgtgattgataacagtaaagccacactcctcaagtgcctgaaatacccctcattgtcttcttcaggtggcaagggctctggaacagccacataaagcccttgaagataaggatggtcaaacaaaataatatcatacctggagaaactcagatcttgctaagatttactggttgggaatccaaagttaatgccaagaagcagctgccagttgggatcaaatgtgagcctatggatcaagacggttacctggcacgctggccacaatctacctcactcttatcagagtctgagcagtgctttcagctctgagttgaggcacctcgaaccttgtttttgtggtgaaggatcctaaagtgctgtggggagtgatcacatttttcacaacatccctgactccacctcttctgccacaaacgtcagcatggtggtatcagccggcccttggtccagcgagaaggcagagatgaacattctagaaatcaacgagaaattgcgcccccagttggcagagaacaaacagcagttcagaaacctcaaagagagatgttttctaactcaactggccggcttcctggccaaccgacagaagaaatacaagtatgaagagtgtaaagacctcataaaatttatgctgaggaatgagcgacagttcaaggaggagaagcttgcagagcagctgaagcaagctgaggagctcaggcaatataaagtcctggttcactctcaggaacgagagctgacccagttaagggagaagttacgggaagggagagatgcctcccgctcattgaatgagcatctccaggccctcctcactccggatgagccggacaagtcccaggggcaggacctccaagaacagctggctgaggggtgtagactggcacagcaccttgtccaaaagctcagcccagaaaatgacgaagatgaggatgaagatgttcaagttgaggaggatgagaaagtactggaatcatctgcccccagggaggtgcagaaggctgaagagagcaaagtccctgaggactcactggaggaatgtgccatcacttgttcaaatagccacggcccttgtgactccatccagcctcacaagaacatcaaaatcacatttgaggaagacaaagtcaactcatctctggttgtagacagagaatcctctcatgatggatgtcaggatgctctaaacattctcccagtccctggccccacctcttctgccacaaacgtcagcatggtggtatcagccggccctttgtccagcgagaaggcagagatgaacattctagaaatcaatgagaaattgtgcccccagctggcagagaagaaacagcagttcagaagcctcaaagagaaatgttttgtaactcaagtggcctgcttcctggccaagcagcagaacaaatacaaatatgaagagtgcaaagacctcataaaatctatgctgaggaatgagcgacagttcaaggaggagaagcttgcagagcagctgaagcaagctgaggagctcaggcaatataaagtcctggttcactctcaggaacgagagctgacccagttaagggagaagttacgggaagggagagatgcctcccgctcattgaatgagcatctccaggccctcctcactccggatgagccggacaagtcccaggggcaggacctccaagaacagctggctgaggggtgtagactggcacagcaccttgtccaaaagctcagcccagaaaatgataacgatgacgatgaagatgttcaagttgaggtggctgagaaagtgcagaaatcgtcttcccccagggagatgcagaaggctgaagaaaaggaagtccctgaggactcactggaggagtgtgccatcacttgttcaaatagccatggcccttatgactccaaccagccacatagaaaaccaaaatcacatttgaggaagacaaagtcgactcaactctcattggctcatcctctcatgttgaatgggaggatgctgtacacattatcccagaaaatgaaagtgatgatgaggaagaggaagaaaaagggccagtgtctcccaggaatctgcaggagtctgaagaggaggaagtcccccaggagtcctgggatgaaggttattcgactctctcaattcctcctgaaaggacatcggtgggatcaagtgaaaaaggaggaccaagaggcaacaggtcccaggctcagcagggagctgctggatgagaaagagcctgaagtcttgcaggactcactggatagatgttattcaactccttcagtttatcttggactgactgactcatgccagccctacagaagtgccttttacgtattggagcaacagcgtattggcttggctgttgacatggatgaaattgaaaagtaccaagaagtggaagaagaccaagacccatcatgccccaggctcagcagggagctgctggctgagaaagagcctgaagtcttgcaggactcactggatagatgttattcgactccttcaggttatcttgaactgcctgacttaggccagccctacagaagtgctgtttactcattggaggaacagtaccttggcttggctcttgacgtggacagaattaaaaaggaccaagaagaggaagaagaccaaggcccaccgtgccccaggctcagcagggagctgctggaggtagtagagcctgaagtcttgcaggactcactggatgttattcaactccttccagttgtcttgaacagcctgactcctgccagccctacggaagttccttttatgcattggaggaaaaacatgttggcttttctcttgacgtgggagaaattgaaaagaaggggaaggggaagaaaagaaggggaagaagatcaaagaagaaaagaagaaggggaagaaaagaaggggaagaagatcaaaacccaccatgccccaggctcagcagcgtgctgatggaagtggaagtgcctgaagtcttacaggactcactggatagatattattcgactccatcaatgtactttgaactacctgactcattccagcactacagaagtgtgttttactcatttgaggaacagcacatcagctttgcccttgacatggacaataggttttttactttgacggtgagaagtctccacctggtcttccagatgggagtcatattcccacaataagcagcccttactaagccgagaggtgtcattcctgcaggcaggacctataggcacctgaagatttgaatgaaactatagttccatttggaagcccagacataggatgggtcagtgggcatggctctattcctattctcagagcatgccagtggcaacctgtgctcagtctgaagacaatggacccacgttaggtgtgacacgttcacataactgtgcagcacatgccgggagtgatcagtcggacattttaatttgaaccacgtatctctgggtagctacaaaattcctcagggatttcattttgcaggcatgtctctgagcttctatacctgctcaaggtcagtgtcatctttgtgtttagctcatccaaaggtgttaccctggtttcaatgaacctaacctcattctttgtgtcttcagtgttggcttgttttagctgatccatctgtaacacaggagggatccttggctgaggattgtatttcagaaccaccaactgctcttgacaattgttaacccgctaggctcctttggttagagaagccacagtccttcagcctccaattggtgtcagtacttaggaagaccacagctagatggacaaacagcattgggaggccttagccctgctcctctcaattccatcctgtagagaacaggagtcaggagccgctggcaggagacagcatgtcacccaggactctgccggtgcagaatatgagcaatgccatgttcttgcagaaaacgcttagcctgagtttcataggaggtaatcaccagacaactgcagaatgtagaacactgagcaggacaactgacctgtctccttcacatagtccatatcaccacaaatcacacaacaaaaaggagaagagatattttgggttgaaaaaaagtaaaaagataatgtagctgcatttctttagttattttgaaccccaaatatttcctcatctttttgttgttgtcatggatggtggtgacatggacttgtttatagaggacaggtcagctgtctggctcaatgatctacattctgaagttgtctgaaaatgtcttcatgattaaattcagcctaaactttttgacgggaacactgcagagacaatgctgtgagtttccaacctcagcccatctgcgggcagagaaggtctagtttgtccaacaccattatgatatcaggactggttacttggttaaggaggggtctaggagatctgtcccttttagagacaccttacttataatgaagtacttgggaaagtggttttcaagagtataaatatcctgtattctaatgatcatcctctaaacattttatcatttattaatcctccctgcctgtgtctattattatattcatatctctacgctgcaaattttgggtctcaatttttactgtgcctttgtttttactagtgtctgctgttgcaaaaagaagaaaacattctttgcctgagttttaatttttgtccaaagttaattttaatctatacaattaaaaccttttgcctatc

SEQ ID NO: 19896 - DNA, 3409 bp, Homo sapiens
  source 1..3409: mol_type = unassigned DNA
attgataacagtaaagccacactcctcaagtgcctgaaatacccctcattgtcttcttcaggtggcaagggctctggaacagccacataaagcccttgaagataaggatggtcaaacaaaataatatcatacctggagaaactcagatcttgctaagatttactggttgggaatccaaagttaatgccaagaagcagctgccagttgggatcaaatgtgagcctatggatcaaggaatgtctggacacagtagacaaaggtttttcaacaggatgccttaggatacatgcttccaaaaacaaagtagccaaaaagaaaccagagtcacagaatatcagagccagaggaacatttggagacggttacctggcacgctggccacaatctacctcactcttatcagagtctgagcagtgctttcagctctgagttgaggcacctcgaaccttgtttttgtggtgaaggatcctaaagtgctgtggggagtgatcacatttttcacaacatccctgactccacctcttctgccacaaacgtcagcatggtggtatcagccggcccttggtccagcgagaaggcagagatgaacattctagaaatcaacgagaaattgcgcccccagttggcagagaacaaacagcagttcagaaacctcaaagagagatgttttctaactcaactggccggcttcctggccaaccgacagaagaaatacagcaatataaagtcctggttcactctcaggaacgagagctgacccagttaagggagaagttacgggaagggagagatgcctcccgctcattgaatgagcatctccaggccctcctcactccggatgagccggacaagtcccaggggcaggacctccaagaacagctggctgaggggtgtagactggcacagcaccttgtccaaaagctcagcccagaaaatgacgaagatgaggatgaagatgttcaagttgaggaggatgagaaagtactggaatcatctgcccccagggaggtgcagaaggctgaagagagcaaagtccctgaggactcactggaggaatgtgccatcacttgttcaaatagccacggcccttgtgactccatccagcctcacaagaacatcaaaatcacatttgaggaagacaaagtcaactcatctctggttgtagacagagaatcctctcatgatggatgtcaggatgctctaaacattctcccagtccctggccccacctcttctgccacaaacgtcagcatggtggtatcagccggccctttgtccagcgagaaggcagagatgaacattctagaaatcaatgagaaattgtgcccccagctggcagagaagaaacagcagttcagaagcctcaaagagaaatgttttgtaactcaagtggcctgcttcctggccaagcagcagaacaaatacaaatatgaagagtgcaaagacctcataaaatctatgctgaggaatgagcgacagttcaaggaggagaagcttgcagagcagctgaagcaagctgaggagctcaggcaatataaagtcctggttcactctcaggaacgagagctgacccagttaagggagaagttacgggaagggagagatgcctcccgctcattgaatgagcatctccaggccctcctcactccggatgagccggacaagtcccaggggcaggacctccaagaacagctggctgaggggtgtagactggcacagcaccttgtccaaaagctcagcccagaaaatgataacgatgacgatgaagatgttcaagttgaggtggctgagaaagtgcagaaatcgtcttcccccagggagatgcagaaggctgaagaaaaggaagtccctgaggactcactggaggagtgtgccatcacttgttcaaatagccatggcccttatgactccaaccagccacatagaaaaaccaaaatcacatttgaggaagacaaagtcgactcaactctcattggctcatcctctcatgttgaatgggaggatgctgtacacattatcccagaaaatgaaagtgatgatgaggaagaggaagaaaaagggccagtgtctcccaggaatctgcaggagtctgaagaggaggaagtcccccaggagtcctgggatgaaggttattcgactctctcaattcctcctgaaaggttggcctcgtaccagtcttacagcagcacatttcactcattagaggaacagcaagtctgcatggctgttgacataggcagacatcggtgggatcaagtgaaaaaggaggaccaagaggcaacaggtcccaggctcagcagggagctgctggatgagaaagagcctgaagtcttgcaggactcactggatagatgttattcaactccttcagtttatcttggactgactgactcatgccagccctacagaagtgccttttacgtattggagcaacagcgtattggcttggctgttgacatggatgaaattgaaaagtaccaagaagtggaagaagaccaagacccatcatgccccaggctcagcagggagctgctggctgagaaagagcctgaagtcttgcaggactcactggatagatgttattcgactccttcaggttatcttgaactgcctgacttaggccagccctacagaagtgctgtttactcattggaggaacagtaccttggcttggctcttgacgtggacagaattaaaaaggaccaagaagaggaagaagaccaaggcccaccgtgccccaggctcagcagggagctgctggaggtagtagagcctgaagtcttgcaggactcactggatgttattcaactccttccagttgtcttgaacagcctgactcctgccagccctacggaagttccttttatgcattggaggaaaaacatgttggcttttctcttgacgtgggagaaattgaaaagaaggggaaggggaagaaaagaaggggaagaagatcaaagaagaaaagaagaaggggaagaaaagaaggggaagaagatcaaaacccaccatgccccaggctcagcagcgtgctgatggaagtggaagtgcctgaagtcttacaggactcactggatagatattattcgactccatcaatgtactttgaactacctgactcattccagcactacagaagtgtgttttactcatttgaggaacagcacatcagctttgcccttgacatggacaataggttttttactttgacggtgagaagtctccacctggtcttccagatgggagtcatattcccacaataagcagcccttactaagccgagaggtgtcattcctgcaggcaggacctataggcacctgaagatttgaatgaaactatagttccatttggaagcccagacataggatgggtcagtgggcatggctctattcctattctcagagcatgc

SEQ ID NO: 19897 - DNA, 578 bp, Homo sapiens
  source 1..578: mol_type = unassigned DNA
cactctcaggaacgagagctgacccagttaagggagaagttacgggaagggagagatgcctcccgctcattgaatgagcatctccaggccctcctcactccggatgagccggacaagtcccaggggcaggacctccaagaacagctggctgaggggtgtagactggcacagcaccttgtccaaaagctcagcccagaaaatgataacgatgacgatgaagatgttcaagttgaggtggctgagaaagtgcagaaatcgtcttcccccagggagatgcagaaggctgaagaaaaggaagtccctgaggactcactggaggagtgtgccatcacttgttcaaatagccatggcccttatgactccaaccagccacatagaaaaaccaaaatcacatttgaggaagacaaagtcgactcaactctcattggctcatcctctcatgttgaatgggaggatgctgtacacattatcccagaaaatgaaagtgatgatgaggaagaggaagaaaaagggccagtgtctcccaggaatctgcaggagtctgaagaggaggaagtcccccaggagtcctgggatga

SEQ ID NO: 19898 - DNA, 2618 bp, Homo sapiens
  source 1..2618: mol_type = unassigned DNA
ttggcctcgtaccagtcttacagcagcacatttcactcattagaggaacagcaagtctgcatggctgttgacataggcagacatcggtgggatcaagtgaaaaaggaggaccaagaggcaacaggtcccaggctcagcagggagctgctggatgagaaagagcctgaagtcttgcaggactcactggatagatgttattcaactccttcagtttatcttggactgactgactcatgccagccctacagaagtgccttttacgtattggagcaacagcgtattggcttggctgttgacatggatgaaattgaaaagtaccaagaagtggaagaagaccaagacccatcatgccccaggctcagcagggagctgctggctgagaaagagcctgaagtcttgcaggactcactggatagatgttattcgactccttcaggttatcttgaactgcctgacttaggccagccctacagaagtgctgtttactcattggaggaacagtaccttggcttggctcttgacgtggacagaattaaaaaggaccaagaagaggaagaagaccaaggcccaccgtgccccaggctcagcagggagctgctggaggtagtagagcctgaagtcttgcaggactcactgtgttattcaactccttccagttgtcttgaacagcctgactcctgccagccctacggaagttccttttatgcattggaggaaaaacatgttggcttttctcttgacgtgggagaaattgaaaagaaggggaaggggaagaaaagaaggggaagaagatcaaagaagaaaagaagaaggggaagaaaagaaggggaagaagatcaaaacccaccatgccccaggctcagcagcgtgctgatggaagtggaagtgcctgaagtcttacaggactcactggatagatattattcgactccatcaatgtactttgaactacctgactcattccagcactacagaagtgtgttttactcatttgaggaacagcacatcagctttgcccttgacatggacaataggttttttactttgacggtgagaagtctccacctggtcttccagatgggagtcatattcccacaataagcagcccttactaagccgagaggtgtcattcctgcaggcaggacctataggcacctgaagatttgaatgaaactatagttccatttggaagcccagacataggatgggtcagtgggcatggctctattcctattctcagagcatgccagtggcaacctgtgctcagtctgaagacaatggacccacgttaggtgtgacacgttcacataactgtgcagcacatgccgggagtgatcagtcggacattttaatttgaaccacgtatctctgggtagctacaaaattcctcagggatttcattttgcaggcatgtctctgagcttctatacctgctcaaggtcagtgtcatctttgtgtttagctcatccaaaggtgttaccctggtttcaatgaacctaacctcattctttgtgtcttcagtgttggcttgttttagctgatccatctgtaacacaggagggatccttggctgaggattgtatttcagaaccaccaactgctcttgacaattgttaacccgctaggctcctttggttagagaagccacagtccttcagcctccaattggtgtcagtacttaggaagaccacagctagatggacaaacagcattgggaggccttagccctgctcctctcaattccatcctgtagagaacaggagtcaggagccgctggcaggagacagcatgtcacccaggactctgccggtgcagaatatgagcaatgccatgttcttgcagaaaacgcttagcctgagtttcataggaggtaatcaccagacaactgcagaatgtagaacactgagcaggacaactgacctgtctccttcacatagtccatatcaccacaaatcacacaacaaaaaggagaagagatattttgggttgaaaaaaagtaaaaagataatgtagctgcatttctttagttattttgaaccccaaatatttcctcatctttttgttgttgtcatggatggtggtgacatggacttgtttatagaggacaggtcagctgtctggctcaatgatctacattctgaagttgtctgaaaatgtcttcatgattaaattcagcctaaactttttgacgggaacactgcagagacaatgctgtgagtttccaacctcagcccatctgcgggcagagaaggtctagtttgtccaacaccattatgatatcaggactggttacttggttaaggaggggtctaggagatctgtcccttttagagacaccttacttataatgaagtacttgggaaagtggttttcaagagtataaatatcctgtattctaatgatcatcctctaaacattttatcatttattaatcctccctgcctgtgtctattattatattcatatctctacgctgcaaattttgggtctcaatttttactgtgcctttgtttttactagtgtctgctgttgcaaaaagaagaaaacattctttgcctgagttttaatttttgtccaaagttaattttaatctatacaattaaaaccttttgcctatc

SEQ ID NO: 19899 - DNA, 2598 bp, Homo sapiens
  source 1..2598: mol_type = unassigned DNA
atggtggtatcagccggcccttggtccagcgagaaggcagagatgaacattctagaaatcaacgagaaattgcgcccccagttggcagagaacaaacagcagttcagaaacctcaaagagagatgttttctaactcaactggccggcttcctggccaaccgacagaagaaatacaagtatgaagagtgtaaagacctcataaaatttatgctgaggaatgagcgacagttcaaggaggagaagcttgcagagcagctgaagcaagctgaggagctcaggcaatataaagtcctggttcactctcaggaacgagagctgacccagttaagggagaagttacgggaagggagagatgcctcccgctcattgaatgagcatctccaggccctcctcactccggatgagccggacaagtcccaggggcaggacctccaagaacagctggctgaggggtgtagactggcacagcaccttgtccaaaagctcagcccagaaaatgacgaagatgaggatgaagatgttcaagttgaggaggatgagaaagtactggaatcatctgcccccagggaggtgcagaaggctgaagagagcaaagtccctgaggactcactggaggaatgtgccatcacttgttcaaatagccacggcccttgtgactccatccagcctcacaagaacatcaaaatcacatttgaggaagacaaagtcaactcatctctggttgtagacagagaatcctctcatgatggatgtcaggatgctctaaacattctcccagtccctggccccacctcttctgccacaaacgtcagcatggtggtatcagccggccctttgtccagcgagaaggcagagatgaacattctagaaatcaatgagaaattgtgcccccagctggcagagaagaaacagcagttcagaagcctcaaagagaaatgttttgtaactcaagtggcctgcttcctggccaagcagcagaacaaatacaaatatgaagagtgcaaagacctcataaaatctatgctgaggaatgagcgacagttcaaggaggagaagcttgcagagcagctgaagcaagctgaggagctcaggcaatataaagtcctggttcactctcaggaacgagagctgacccagttaagggagaagttacgggaagggagagatgcctcccgctcattgaatgagcatctccaggccctcctcactccggatgagccggacaagtcccaggggcaggacctccaagaacagctggctgaggggtgtagactggcacagcaccttgtccaaaagctcagcccagaaaatgataacgatgacgatgaagatgttcaagttgaggtggctgagaaagtgcagaaatcgtcttcccccagggagatgcagaaggctgaagaaaaggaagtccctgaggactcactggaggagtgtgccatcacttgttcaaatagccatggcccttatgactccaaccagccacatagaaaaaccaaaatcacatttgaggaagacaaagtcgactcaactctcattggctcatcctctcatgttgaatgggaggatgctgtacacattatcccagaaaatgaaagtgatgatgaggaagaggaagaaaaagggccagtgtctcccaggaatctgcaggagtctgaagaggaggaagtcccccaggagtcctgggatgaaggttattcgactctctcaattcctcctgaaaggttggcctcgtaccagtcttacagcagcacatttcactcattagaggaacagcaagtctgcatggctgttgacataggcagacatcggtgggatcaagtgaaaaaggaggaccaagaggcaacaggtcccaggctcagcagggagctgctggatgagaaagagcctgaagtcttgcaggactcactggatagatgttattcaactccttcagtttatcttggactgactgactcatgccagccctacagaagtgccttttacgtattggagcaacagcgtattggcttggctgttgacatggatgaaattgaaaagtaccaagaagtggaagaagaccaagacccatcatgccccaggctcagcagggagctgctggctgagaaagagcctgaagtcttgcaggactcactggatagatgttattcgactccttcaggttatcttgaactgcctgacttaggccagccctacagaagtgctgtttactcattggaggaacagtaccttggcttggctcttgacgtggacagaattaaaaaggaccaagaagaggaagaagaccaaggcccaccgtgccccaggctcagcagggagctgctggaggtagtagagcctgaagtcttgcaggactcactggatgttattcaactccttccagttgtcttgaacagcctgactcctgccagccctacggaagttccttttatgcattggaggaaaaacatgttggcttttctcttgacgtgggagaaattgaaaagaaggggaaggggaagaaaagaaggggaagaagatcaaagaagaaaagaagaaggggaagaaaagaaggggaagaagatcaaaacccaccatgccccaggctcagcagcgtgctga

SEQ ID NO: 19900 - DNA, 3409 bp, Homo sapiens
  source 1..3409: mol_type = unassigned DNA
attgataacagtaaagccacactcctcaagtgcctgaaatacccctcattgtcttcttcaggtggcaagggctctggaacagccacataaagcccttgaagataaggatggtcaaacaaaataatatcatacctggagaaactcagatcttgctaagatttactggttgggaatccaaagttaatgccaagaagcagctgccagttgggatcaaatgtgagcctatggatcaaggaatgtctggacacagtagacaaaggtttttcaactggatgccttaggatacatgcttccaaaaacaaagtagccaaaaagaaaccagagtcacagaatatcagagccagaggaacatttggagacggttacctggcacgctggccacaatctacctcactcttatcagagtctgagcagtgctttcagctctgagttgaggcacctcgaaccttgtttttgtggtgaaggatcctaaagtgctgtggggagtgatcacatttttcacaacatccctgactccacctcttctgccacaaacgtcagcatggtggtatcagccggcccttggtccagcgagaaggcagagatgaacattctagaaatcaacgagaaattgcgcccccagttggcagagaacaaacagcagttcagaaacctcaaagagagatgttttctaactcaactggccggcttcctggccaaccgacagaagaaatacagcaatataaagtcctggttcactctcaggaacgagagctgacccagttaagggagaagttacgggaagggagagatgcctcccgctcattgaatgagcatctccaggccctcctcactccggatgagccggacaagtcccaggggcaggacctccaagaacagctggctgaggggtgtagactggcacagcaacttgtccaaaagctcagcccagaaaatgatgaagatgaggatgaagatgttcaagttgaggaggatgagaaagtactggaatcatctgcccccagggaggtgcagaaggctgaagagagcaaagtccctgaggactcactggaggaatgtgccatcacttgttcaaatagccacggcccttgtgactccaaccagcctcacaagaacatcaaaatcacatttgaggaagacaaagtcaactcatctctggttgtagacagagaatactctcatgatgaatgtcaggatgctctaaacattctcccagtccctggccccacctcttctgccacaaacgtcagcatggtggtatcagccggccctttgtccagcgagaaggcagagatgaacattctagaaatcaatgagaagttgcgcccccagctggcagagaagaaacagcagttcagaagcctcaaagagaaatgttttgtaactcaagtggcctgcttcctggccaagcagcagaacaaatacaaatatgaagagtgcaaagacctcataaaatctatgctgaggaatgagctacagttcaaggaggagaagcttgcagagcagctgaagcaagctgaggagctcaggcaatataaagtcctggttcactctcaggaacgagagctgacccagttaagggagaagttacgggaagggagagatgcctcccgctcattgaatgagcatctccaggccctcctcactccggatgagccggacaagtcccaggggcaggacctccaagaacagctggctgaggggtgtagactggcacaacaccttgtccaaaagctcagcccagaaaatgataacgatgacgatgaagatgttcaagttgaggtggctgagaaagtgcagaaatcgtcttcccccagggagatgcagaaggctgaagaaaaggaagtccctgaggactcactggaggagtgtgccatcacttgttcaaatagccatggcccttatgactccaaccagccacataggaaaaccaaaatcacatttgaggaagacaaagtcgactcaactctcattggctcatcctctcatgttgaatgggaggatgctgtacacattatcccagaaaatgaaagtgatgatgaggaagaggaagaaaaagggccagtgtctcccaggaatctgcaggagtctgaagaggaggaagtcccccaggagtcctgggatgaaggttattcgactctctcaattcctcctgaaaggttggcctcataccagtcttacagcagcacatttcactcattagaggaacagcaagtctgcatggctgttgacataggcagacatcggtgggatcaagtgaaaaaggaggaccaagaggcaacaggtcccaggctcagcagggagctgctggctgagaaagagcctgaagtcttgcaggactcactggatagatgttattcaactccttcagtttatcttggactgactgactcatgccagccctacagaagtgccttttacgtattggagcaacagcgtgttggcttggctgttgacatggatgaaattgaaaagtaccaagaagtggaagaagaccaagacccatcatgccccaggctcagcagggagctgctggctgagaaagagcctgaagtcttgcaggactcactggatagatgttattcgactccttcaggttatcttgaactgcctgacttaggccagccctacagaagtgctgtttactcattggaggaacagtaccttggcttggctcttgacgtggacagaattaaaaaggaccaagaagaggaagaagaccaaggcccaccatgccccaggctcagcagggagctgctggaggtagtagagcctgaagtcttgcaggactcactggatgttattcaactccttccagttgtcttgaacagcctgactcctgccagccctacagaagttccttttatgcattggaggaaaaacatgttggcttttctcttgacgtgggagaaattgaaaagaaggggaaggggaagaaaagaaggggaagaagatcaaagaagaaaagaagaaggggaagaaaagaaggggaagaagatcaaaacccaccatgccccaggctcaacagcgtgctgatggaagtggaagagcctgaagtcttgcaggactcactggatagatgttattcgactccatcaatgtactttgaactacctgactcattccagcactacagaagtgtgttttactcatttgaggaacagcacatcacctttgcccttgacatggacaatagcttttttactttgacggtgacaagtctccacctggtcttccagatgggagtcatattcccacaataagcagcccttactaagccgagaggtgtcattcctgcaggcaggacctataggcacctgaagatttgaatgaaactatagttccatttggaagcccagacataggatgggtcagtgggcatggctctattcctattctcagagcatgc

SEQ ID NO: 19901 - DNA, 440 bp, Homo sapiens
  source 1..440: mol_type = unassigned DNA
agcaacagcgtgttggcttggctgttgacatggatgaaattgaaaagtaccaagaagtggaagaagaccaagacccatcatgccccaggctcagcagggagctgctggctgagaaagagcctgaagtcttgcaggactcactggatagatgttattcgactccttcaggttatcttgaactgcctgacttaggccagccctacagaagtgctgtttactcattggaggaacagtaccttggcttggctcttgacgtggacagaattaaaaaggaccaagaagaggaagaagaccaaggcccaccatgccccaggctcagcagggagctgctggaggtagtagagcctgaagtcttgcaggactcactggatagatgttattcaactccttccagttgtcttgaacagcctgactcctgccagccctacagaagttccttt

SEQ ID NO: 19902 - DNA, 271 bp, Homo sapiens
  source 1..271: mol_type = unassigned DNA
ttacgtattggagcaacagcgtgttggcttggctgttgacatggatgaaattgaaaagtaccaagaagtggaagaagaccaagacccatcatgccccaggctcagcagggagctgctggctgagaaagagcctgaagtcttgcaggactcactggatagatggtattcgactccttcaggttatcttgaactgcctgacttaggccagccctacagaagtgctgtttactcattggaggaacagtaccttggcttggctcttgacgtggac

SEQ ID NO: 19903 - DNA, 589 bp, Homo sapiens
  source 1..589: mol_type = unassigned DNA
aagagcctgaagtcttgcaggactcactggatagatggtattcgactccttcagtttatcttggactgactgacccatgccagccctacagaagtgccttttacgtattggagcaacagcgtgttggcttggctgttgacatggatgaaattgaaaagtaccaagaagtggaagaagaccaagacccatcatgccccaggctcagcagggagctgctggctgagaaagagcctgaagtcttgcaggactcactggatagatgttattcgactccttcaggttatcttgaactgcctgacttaggccagccctacagaagtgctgtttactcattggaggaacagtaccttggcttggctcttgacgtggacagaattaaaaaggaccaagaagaggaagaagaccaaggcccaccatgccccaggctcagcagggagctgctggaggtagtagagcctgaagtcttgcaggactcactggatagatgttattcaactccttccagttgtcttgaacagcctgactcctgccagccctacagaagttccttttatgcattggaggaaaaacatgttggcttttctcttga

SEQ ID NO: 19904 - DNA, 592 bp, Homo sapiens
  source 1..592: mol_type = unassigned DNA
aaagtcctggttcactctcaggaacgagagctgacccagttaagggagaagttacgggaagggagagatgcctcccgctcattgaatgagcatctccaggccctcctcactccggatgagccggacaagtcccaggggcaggacctccaagaacagctggctgaggggtgtagactggcacagcaccttgtccaaaagctcagcccagaaaatgataacgatgacgatgaagatgttcaagttgaggtggctgagaaagtgcagaaatcgtcttcccccagggagatgcagaaggctgaagaaaaggaagtccctgaggactcactggaggagtgtgccatcacttgttcaaatagccatggcccttatgactccaaccagccacataggaaaaccaaaatcacatttgaggaagacaaagtcgactcaactctcattggctcatcctctcatgttgaatgggaggatgctgtacacattatcccagaaaatgaaagtgatgatgaggaagaggaagaaaaagggccagtgtctcccaggaatctgcaggagtctgaagaggaggaagtcccccaggagtcctgggatgaag

SEQ ID NO: 19905 - DNA, 12455 bp, Homo sapiens
  source 1..12455: mol_type = unassigned DNA
ggaccctgaggagccagcgggccgcaagcaagttgctgggcggcggttgagatagcggcggtgctgggaggggtaggtgagggtcgcgaggctgcctgagcttctgagtgagcctggtgattttgggaacgcgggacgggcgacctgcggcgccaggagcggggccgaggtacggcggcacggctgcagcctggatgggaagttcaagtttactgcgaagtccacccagcgttccggaggcattctgaaggcaaatcctgtttagacccaggcaaaggttcctggtgacccaggctctcatgagcagattgtcccttatcattctcctgaggatgtctggagcttcagtgctgtgtgctcttggcctccacactgggggtgccaccaactcccactgtccagggcttctggtggactctccgaggcaccgatgtagaaacttacccattcagtgcaccaagagcagcctcacatggtgtgggccgacatgaagagctgccagatccaacagcccttgaagataaggatggtcaaacaaaataatatcatacctggagaaactcagatcttgctaagatttactggttgggaatccaaagttaatgccaagaagcagctgccagttgggatcaaatgtgagcctatggatcaagacggttacctggcacgctggccacaatctacctcactcttatcagagtctgagcagtgctttcagctctgagttgaggcacctcgaaccttgtttttgtggtgaaggatcctaaagtgctgtggggagtgatcacatttttcacaacatccctgactccacctcttctgccacaaacgtcagcatggtggtatcagccggcccttggtccagcgagaaggcagagatgaacattctagaaatcaacgagaaattgcgcccccagttggcagagaacaaacagcagttcagaaacctcaaagagagatgttttctaactcaactggccggcttcctggccaaccgacagaagaaatacaagtatgaagagtgtaaagacctcataaaatttatgctgaggaatgagcgacagttcaaggaggagaagcttgcagagcagctgaaacaagctgaggagctcaggcaatataaagtcctggttcactctcaggaacgagagctgacccagttaagggagaagttacgggaagggagagatgcctcccgctcattgaatgagcatctccaggccctcctcactccggatgagccggacaagtcccaggggcaggacctccaagaacagctggctgaggggtgtagactggcacagcaacttgtccaaaagctcagcccagaaaatgatgaagatgaggatgaagatgttcaagttgaggaggatgagaaagtactggaatcatctgcccccagggaggtgcagaaggctgaagagagcaaagtccctgaggactcactggaggaatgtgccatcacttgttcaaatagccacggcccttgtgactccaaccagcctcacaagaacatcaaaatcacatttgaggaagacaaagtcaactcaactgtggttgtagacagaaaatcctctcatgatgaatgtcaggatgctctaaacattctcccagtccctggccccacctcttctgccacaaacgtcagcatggtggtatcagccggccctttgtccagcgagaaggcagagatgaacattctagaaatcaatgagaagttgcgcccccagctggcagagaagaaacagcagttcagaagcctcaaagagaaatgttttgtaactcaactggccggcttcctggccaagcagcagaacaaatacaaatatgaagagtgcaaagacctcataaaatctatgctgaggaatgagctacagttcaaggaggagaagcttgcagagcagctgaagcaagctgaggagctcaggcaatataaagtcctggttcactctcaggaacgagagctgacccagttaagggagaagttacgggaagggagagatgcctcccgctcattgaatgagcatctccaggccctcctcactccggatgagccggacaagtcccaggggcaggacctccaagaacagctggctgaggggtgtagactggcacagcaccttgtccaaaagctcagcccagaaaatgatgaagatgaggatgaagatgttcaagttgaggaggatgagaaagtgctggaatcatcttcccccagggagatgcagaaggctgaagaaagcaaagtccctgaggactcactggaggaatgtgccatcacttgttcaaatagccacggcccttgtgactccaaccagcctcacaagaacatcaaaatcacatttgaggaagacaaagtcaactcatctctggttgtagacagagaatactctcatgatgaatgtcaggatgctctaaacattctcccagtccctggccccacctcttctgccacaaacgtcagcatggtggtatcagccggccctttgtccagcgagaaggcagagatgaacattctagaaatcaatgagaagttgcgcccccagctggcagagaagaaacagcagttcagaagcctcaaagagaaatgttttgtaactcaagtggcctgcttcctggccaagcagcagaacaaatacaaatatgaagagtgcaaagacctcataaaatctatgctgaggaatgagctacagttcaaggaggagaagcttgcagagcagctgaagcaagctgaggagctcaggcaatataaagtcctggttcactctcaggaacgagagctgacccagttaagggagaagttacgggaagggagagatgcctcccgctcattgaatgagcatctccaggccctcctcactccggatgagccggacaagtcccaggggcaggacctccaagaacagctggctgaggggtgtagactggcacaacaccttgtccaaaagctcagcccagaaaatgataacgatgacgatgaagatgttcaagttgaggtggctgagaaagtgcagaaatcgtcttcccccagggagatgcagaaggctgaagaaaaggaagtccctgaggactcactggaggagtgtgccatcacttgttcaaatagccatggcccttatgactccaaccagccacataggaaaaccaaaatcacatttgaggaagacaaagtcgactcaactctcattggctcatcctctcatgttgaatgggaggatgctgtacacattatcccagaaaatgaaagtgatgatgaggaagaggaagaaaaagggccagtgtctcccaggaatctgcaggagtctgaagaggaggaagtcccccaggagtcctgggatgaaggttattcgactctctcaattcctcctgaaaggttggcctcataccagtcttacagcagcacatttcactcattagaggaacagcaagtctgcatggctgttgacataggcagtgagtactccattgtgaaggtgataaagctccagttcatggcccagtctcaggccatgcccgtgccaacctggactgactgtcacgacattgaactcaaggcaggacatcggtgggatcaagtgaaaaaggaggaccaagaggcaacaggtcccaggctcagcagggagctgctggctgagaaagagcctgaagtcttgcaggactcactggatagatgttattcaactccttcagtttatcttggactgactgactcatgccagccctacagaagtgccttttacgtattggagcaacagcgtgttggcttggctgttgacatggatgaaattgaaaagtaccaagaagtggaagaagaccaagacccatcatgccccaggctcagcagggagctgctggctgagaaagagcctgaagtcttgcaggactcactggatagatggtattcgactccttcaggttatcttgaactgcctgacttaggccagccctacagaagtgctgtttactcattggaggaacagtaccttggcttggctcttgacgtggacagaattaaaaaggaccaagaagaggaagaagaccaaggcccaccatgccccaggctcagcagggagctgctggaggtagtagagcctgaagtcttgcaggactcactggatagatgttattcaactccttccagttgtcttgaacagcctgactcctgccagccctacagaagttccttttatgcattggaggaaaaacatgttggcttttctcttgacgtgggagaaattgaaaagaaggggaaggggaagaaaagaaggggaagaagatcaaagaagaaaagaagaaggggaagaaaagaaggggaagaagatcaaaacccaccatgccccaggctcagcagggagctgctggctgagaaagagcctgaagtcttgcaggactcactggatagatggtattcgactccttcagtttatcttggactgactgacccatgccagccctacagaagtgccttttacgtattggagcaacagcgtgttggcttggctgttgacatggatgaaattgaaaagtaccaagaagtggaagaagaccaagacccatcatgccccaggctcagcagggagctgctggctgagaaagagcctgaagtcttgcaggactcactggatagatggtattcgactccttcaggttatcttgaactgcctgacttaggccagccctacagaagtgctgtttactcattggaggaacagtaccttggcttggctcttgacgtggacagaattaaaaaggaccaagaagaggaagaagaccaaggcccaccatgccccaggctcagcagggagctgctggaggtagtagagcctgaagtcttgcaggactcactggatagatgttattcaactccttccagttgtcttgaacagcctgactcctgccagccctacagaagttccttttatgcattggaggaaaaacatgttggcttttctcttgacgtgggagaaattgaaaagaaggggaaggggaagaaaagaaggggaagaagatcaaagaagaaaagaagaaggggaagaaaagaaggggaagaagatcaaaacccaccatgccccaggctcagcagggagctgctggctgagaaagagcctgaagtcttgcaggactcactggatagatggtattcgactccttcagtttatcttggactgactgacccatgccagccctacagaagtgccttttacgtattggagcaacagcgtgttggcttggctgttgacatggatgaaattgaaaagtaccaagaagtggaagaagaccaagacccatcatgccccaggctcagcagggagctgctggctgagaaagagcctgaagtcttgcaggactcactggatagatggtattcgactccttcaggttatcttgaactgcctgacttaggccagccctacagaagtgctgtttactcattggaggaacagtaccttggcttggctcttgacgtggacagaattaaaaaggaccaagaagaggaagaagaccaaggcccaccatgccccaggctcagcagggagctgctggaggtagtagagcctgaagtcttgcaggactcactggatagatgttattcaactccttccagttgtcttgaacagcctgactcctgccagccctacagaagttccttttatgcattggaggaaaaacatgttggcttttctcttgacgtgggagaaattgaaaagaaggggaaggggaagaaaagaaggggaagaagatcaaagaagaaaagaagaaggggaagaaaagaaggggaagaagatcaaaacccaccatgccccaggctcagcagggagctgctggctgagaaagagcctgaagtcttgcaggactcactggatagatggtattcgactccttcagtttatcttggactgactgacccatgccagccctacagaagtgccttttacgtattggagcaacagcgtgttggcttggctgttgacatggatgaaattgaaaagtaccaagaagtggaagaagaccaagacccatcatgccccaggctcagcagggagctgctggctgagaaagagcctgaagtcttgcaggactcactggatagatggtattcgactccttcaggttatcttgaactgcctgacttaggccagccctacagaagtgctgtttactcattggaggaacagtaccttggcttggctcttgacgtggacagaattaaaaaggaccaagaagaggaagaagaccaaggcccaccatgccccaggctcagcagggagctgctggaggtagtagagcctgaagtcttgcaggactcactggatagatgttattcaactccttccagttgtcttgaacagcctgactcctgccagccctacagaagttccttttatgcattggaggaaaaacatgttggcttttctcttgacgtgggagaaattgaaaagaaggggaaggggaagaaaagaaggggaagaagatcaaagaagaaaagaagaaggggaagaaaagaaggggaagaagatcaaaacccaccatgccccaggctcagcagggagctgctggctgagaaagagcctgaagtcttgcaggactcactggatagatggtattcgactccttcagtttatcttggactgactgacccatgccagccctacagaagtgccttttacgtattggagcaacagcgtgttggcttggctgttgacatggatgaaattgaaaagtaccaagaagtggaagaagaccaagacccatcatgccccaggctcagcagggagctgctggctgagaaagagcctgaagtcttgcaggactcactggatagatggtattcgactccttcaggttatcttgaactgcctgacttaggccagccctacagaagtgctgtttactcattggaggaacagtaccttggcttggctcttgacgtggacaaaattgaaaagtaccaagaagtggaagaagaccaagacccatcatgccccaggctcagcagggagctgctggctgagaaagagcctgaagtcttgcaggactcactggatagatggtattcgactccttcagtttatcttggactgactgacccatgccagccctacagaagtgccttttacgtattggagcaacagcgtgttggcttggctgttgacatggatgaaattgaaaagtaccaagaagtggaagaagaccaagacccatcatgccccaggctcagcagggagctgctggctgagaaagagcctgaagtcttgcaggactcactggatagatgttattcgactccttcaggttatcttgaactgcctgacttaggccagccctacagaagtgctgtttactcattggaggaacagtaccttggcttggctcttgacgtggacagaattaaaaaggaccaagaagaggaagaagaccaaggcccaccatgccccaggctcagcagggagctgctggaggtagtagagcctgaagtcttgcaggactcactggatagatgttattcaactccttccagttgtcttgaacagcctgactcctgccagccctacagaagttccttttatgcattggaggaaaaacatgttggcttttctcttgacgtgggagaaattgaaaagtaccaagaagtggaagaagaccaagacccatcatgccccaggctcagcagggagctgctggctgagaaagagcctgaagtcttgcaggactcactggatagatggtattcgactccttcagtttatcttggactgactgacccatgccagccctacagaagtgccttttacgtattggagcaacagcgtgttggcttggctgttgacatggatgaaattgaaaagtaccaagaagtggaagaagaccaagacccatcatgccccaggctcagcagggagctgctggctgagaaagagcctgaagtcttgcaggactcactggatagatgttattcgactccttcaggttatcttgaactgcctgacttaggccagccctacagaagtgctgtttactcattggaggaacagtaccttggcttggctcttgacgtggacagaattaaaaaggaccaagaagaggaagaagaccaaggcccaccatgccccaggctcagcagggagctgctggaggtagtagagcctgaagtcttgcaggactcactggatagatgttattcaactccttccagttgtcttgaacagcctgactcctgccagccctacagaagttccttttatgcattggaggaaaaacatgttggcttttctcttgacgtgggagaaattgaaaagaaggggaaggggaagaaaagaaggggaagaagatcaaagaagaaaagaagaaggggaagaaaagaaggggaagaagatcaaaacccaccatgccccaggctcagcagggagctgctggctgagaaagagcctgaagtcttgcaggactcactggatagatggtattcgactccttcagtttatcttggactgactgacccatgccagccctacagaagtgccttttacgtattggagcaacagcgtgttggcttggctgttgacatggatgaaattgaaaagtaccaagaagtggaagaagaccaagacccatcatgccccaggctcagcagggagctgctggctgagaaagagcctgaagtcttgcaggactcactggatagatggtattcgactccttcaggttatcttgaactgcctgacttaggccagccctacagaagtgctgtttactcattggaggaacagtaccttggcttggctcttgacgtggacagaattaaaaaggaccaagaagaggaagaagaccaaggcccaccatgccccaggctcagcagggagctgctggaggtagtagagcctgaagtcttgcaggactcactggatagatgttattcaactccttccagttgtcttgaacagcctgactcctgccagccctacagaagttccttttatgcattggaggaaaaacatgttggcttttctcttgacgtgggagaaattgaaaagaaggggaaggggaagaaaagaaggggaagaagatcaaagaagaaaagaagaaggggaagaaaagaaggggaagaagatcaaaacccaccatgccccaggctcagcagggagctgctggctgagaaagagcctgaagtcttgcaggactcactggatagatggtattcgactccttcagtttatcttggactgactgacccatgccagccctacagaagtgccttttacgtattggagcaacagcgtgttggcttggctgttgacatggatgaaattgaaaagtaccaagaagtggaagaagaccaagacccatcatgccccaggctcagcagggagctgctggctgagaaagagcctgaagtcttgcaggactcactggatagatgttattcgactccttcaggttatcttgaactgcctgacttaggccagccctacagaagtgctgtttactcattggaggaacagtaccttggcttggctcttgacgtggacagaattaaaaaggaccaagaagaggaagaagaccaaggcccaccatgccccaggctcagcagggagctgctggaggtagtagagcctgaagtcttgcaggactcactggatagatgttattcaactccttccagttgtcttgaacagcctgactcctgccagccctacagaagttccttttatgcattggaggaaaaacatgttggcttttctcttgacgtgggagaaattgaaaagaaggggaaggggaagaaaagaaggggaagaagatcaaagaagaaaagaagaaggggaagaaaagaaggggaagaagatcaaaacccaccatgccccaggctcagcagggagctgctggctgagaaagagcctgaagtcttgcaggactcactggatagatggtattcgactccttcagtttatcttggactgactgacccatgccagccctgcagaagtgccttttacgtattggagcaacagcgtgttggcttggctgttgacatggatgaaattgaaaagtaccaagaagtggaagaagaccaagacccatcatgccccaggctcagcagggagctgctggctgagaaagagcctgaagtcttgcaggactcactggatagatgttattcgactccttcaggttatcttgaactgcctgacttaggccagccctacagaagtgctgtttactcattggaggaacagtaccttggcttggctcttgacgtggacagaattaaaaaggaccaagaagaggaagaagaccaaggcccaccatgccccaggctcagcagggagctgctggaggtagtagagcctgaagtcttgcaggactcactggatagatgttattcaactccttccagttgtcttgaacagcctgactcctgccagccctacagaagttccttttatgcattggaggaaaaacatgttggcttttctcttgacgtgggagaaattgaaaagaaggggaaggggaagaaaagaaggggaagaagatcaaagaagaaaagaagaaggggaagaaaagaaggggaagaagatcaaaacccaccatgccccaggctcaacagcgtgctgatggaagtggaagagcctgaagtcttgcaggactcactggatagatgttattcgactccatcaatgtactttgaactacctgactcattccagcactacagaagtgtgttttactcatttgaggaacagcacatcacctttgcccttgacatggacaatagcttttttactttgacggtgacaagtctccacctggtcttccagatgggagtcatattcccacaataagcagcccttactaagccgagaggtgtcattcctgcaggcaggacctataggcacctgaagatttgaatgaaactatagttccatttggaagcccagacataggatgggtcagtgggcatggctctattcctattctcagagcatgccagtggcaacctgtgctcagtctgaagacaatggacccacgttaggtgtgacacattcacataactgtgcagcacatgccgggagtgatcagccggacattttaatttgaaccatgtatctctgggtagctacaaaattcctcagggatttcattttgcaggcatgtctctgagcttctatacctactcaaggtcagtgtcatctttgtgtttagttcatccaaaggtgttaccctggtttcaatgaacctaacctcattatttgtgtcttcagtgttggcttgttttagctgatccatctgtaacacaggagggatccttggctgaggattgtatttcagaaccaccaactgctcttgacaattgttaacccgctaggctcctttggttagagaagccacagtccttcagcctccaattggtgtcagtacttaggaagaccacagctagatggacaaacagcattgggaggccttagccctgctcctctcaattccatcctgtagagaacaggagtcaggagccgctggcaggagacagcatgtcacccaggactctgccggtgcagaatatgagcaatgccatgttcttgcagaaaacgcttagcctgagtttcataggaggtaatcaccagacaactgcagaatgtagaacactgagcaggacaactgacctgtctccttcacatagtccatatcaccacaaatcacacaacaaaaaggagaagagatattttgggttgaaaaaaagtaaaaagataatgtagctgcatttctttagttattttgaaccccaaatatttcctcatctttttgttgttgtcattgatggtggtgacatggacttgtttatagaggacaggtcagctctctggctcaatgatctacattctgaagttgtctgaaaatgtcttcatgattaaattcagcctaaactttttgctgggaacactgcagagacaatgctgtgagtttccaacctcagcccatctgcgggcagagaaggtctagtttgtccatcaccattatgatatcaggactggttacttggttaaggaggggtctaggagatctgtcccttttagagacaccttacttataatgaagtacttgggaaagcggttttcaagagtataaatatcctgtattctaatgatcatcctctaaacattttatcatttattaatcctccctgcctgtgtctattattatatacatatctctacgctgcaaattttgggtctcaatttttactgtgcctttgtttttactagtgtctgctgttgcaaaaagaagaaaacattctctgcctgagttttaatttttgtccaaagttaattttaatctatacaattaaaaccttttgcctatcactctggacttttggattgttttttacattcagtgttataatatttgattatgctgattggttttggtgggtactgatgtgaattaataaaaacatttcatttcca

SEQ ID NO: 19906 - DNA, 618 bp, Homo sapiens
  source 1..618: mol_type = unassigned DNA
gcagggagctgctggctgagaaagagcctgaagtcttgcaggactcactggatagatgttattcaactccttcagtttatcttggactgactgactcatgccagccctacagaagtgccttttacgtattggagcaacagcgtgttggcttggctgttgacatggatgaaattgaaaagtaccaagaagtggaagaagaccaagacccatcatgccccaggctcagcagggagctgctggctgagaaagagcctgaagtcttgcaggactcactggatagatgttattcgactccttcaggttatcttgaactgcctgacttaggccagccctacagaagtgctgtttactcattggaggaacagtaccttggcttggctcttgacgtggacagaattaaaaaggaccaagaagaggaagaagaccaaggcccaccatgccccaggctcagcagggagctgctggaggtagtagagcctgaagtcttgcaggactcactggatagatgttattcaactccttccagttgtcttgaacagcctgactcctgccagccctacagaagttccttttatgcattggaggaaaaacatgttggcttttctcttgacgtgggag

SEQ ID NO: 19907 - DNA, 5560 bp, Homo sapiens
  source 1..5560: mol_type = unassigned DNA
ccggaagtcagactatggggcggtgcggcagcgcgaagcctgcagtcctaaacgcggggtcgctccaggcttccgagggggtgtgtctcccgcctctttaacctggcaggggcggttcaagtggccggggaaatcggcgaattgcagggtcaagggctggtgctttgaaagagaggcggaggggagagagggattttcccgtccccgctgcgctccgtcctccattactccttttctccgcccgcggcccgaacccgttgtgcggtagaggcagccgggtccctttaaggcccagctgcgcctgtgccttgggctctcctgacacggcccatccggaccctgaggagccagcgggccgcaagcaagttgctgggcggcggttgagatagcggcggtgctgggaggggtaggtgagggtcgcgaggctgcctgagcttctgagtgagcctggtgattttgggaacgcgggacgggcgacctgcggcgccaggagcggggccgaggtacggcggcacggctgcagcctggatgggaagttcaagtttactgcgaagtccacccagcgttccggaggtgagggcgccgcgccaggccgggcggcaggcattctgaaggcaaatcctgtttagacccaggcaaaggttcctggtgacccaggctctcatgagcagattgtcccttatcattctcctgaggatgtctggagcttcagtgctgtgtgctcttggcctccacactgggggtgccaccaactcccactgtccagggcttctggtggactctccgaggcaccgatgtagaaacttacccattcagtgcaccaagagcagcctcacatggtgtgggccgacatgaagagctgccagatccaacagaaatgtgattgataacagtaaagccacactcctcaagtgcctgaaatacccctcattgtcttcttcaggtggcaagggctctggaacagccacataaagcccttgaagataaggatggtcaaacaaaataatatcatacctggagaaactcagatcttgctaagatttactggttgggaatccaaagttaatgccaagaagcagctgccagttgggatcaaatgtgagcctatggatcaagacggttacctggcacgctggccacaatctacctcactcttatcagagtctgagcagtgctttcagctctgagttgaggcacctcgaaccttgtttttgtggtgaaggatcctaaagtgctgtggggagtgatcacatttttcacaacatccctgactccacctcttctgccacaaacgtcagcatggtggtatcagccggcccttggtccagcgagaaggcagagatgaacattctagaaatcaacgagaaattgcgcccccagttggcagagaacaaacagcagttcagaaacctcaaagagagatgttttctaactcaactggccggcttcctggccaaccgacagaagaaatacaagtatgaagagtgtaaagacctcataaaatttatgctgaggaatgagcgacagttcaaggaggagaagcttgcagagcagctgaaacaagctgaggagctcaggcaatataaagtcctggttcactctcaggaacgagagctgacccagttaagggagaagttacgggaagggagagatgcctcccgctcattgaatgagcatctccaggccctcctcactccggatgagccggacaagtcccaggggcaggacctccaagaacagctggctgaggggtgtagactggcacagcaacttgtccaaaagctcagcccagaaaatgatgaagatgaggatgaagatgttcaagttgaggaggatgagaaagtactggaatcatctgcccccagggaggtgcagaaggctgaagagagcaaagtccctgaggactcactggaggaatgtgccatcacttgttcaaatagccacggcccttgtgactccaaccagcctcacaagaacatcaaaatcacatttgaggaagacaaagtcaactcatctctggttgtagacagagaatactctcatgatgaatgtcaggatgctctaaacattctcccagtccctggccccacctcttctgccacaaacgtcagcatggtggtatcagccggccctttgtccagcgagaaggcagagatgaacattctagaaatcaatgagaagttgcgcccccagctggcagagaagaaacagcagttcagaagcctcaaagagaaatgttttgtaactcaagtggcctgcttcctggccaagcagcagaacaaatacaaatatgaagagtgcaaagacctcataaaatctatgctgaggaatgagctacagttcaaggaggagaagcttgcagagcagctgaagcaagctgaggagctcaggcaatataaagtcctggttcactctcaggaacgagagctgacccagttaagggagaagttacgggaagggagagatgcctcccgctcattgaatgagcatctccaggccctcctcactccggatgagccggacaagtcccaggggcaggacctccaagaacagctggctgaggggtgtagactggcacaacaccttgtccaaaagctcagcccagaaaatgataacgatgacgatgaagatgttcaagttgaggtggctgagaaagtgcagaaatcgtcttcccccagggagatgcagaaggctgaagaaaaggaagtccctgaggactcactggaggagtgtgccatcacttgttcaaatagccatggcccttatgactccaaccagccacataggaaaccaaaatcacatttgaggaagacaaagtcgactcaactctcattggctcatcctctcatgttgaatgggaggatgctgtacacattatcccagaaaatgaaagtgatgatgaggaagaggaagaaaaagggccagtgtctcccaggaatctgcaggagtctgaagaggaggaagtcccccaggagtcctgggatgaaggttattcgactctctcaattcctcctgaaaggacatcggtgggatcaagtgaaaaaggaggaccaagaggcaacaggtcccaggctcagcagggagctgctggctgagaaagagcctgaagtcttgcaggactcactggatagatgttattcaactccttcagtttatcttggactgactgactcatgccagccctacagaagtgccttttacgtattggagcaacagcgtgttggcttggctgttgacatggatgaaattgaaaagtaccaagaagtggaagaagaccaagacccatcatgccccaggctcagcagggagctgctggctgagaaagagcctgaagtcttgcaggactcactggatagatgttattcgactccttcaggttatcttgaactgcctgacttaggccagccctacagaagtgctgtttactcattggaggaacagtaccttggcttggctcttgacgtggacagaattaaaaaggaccaagaagaggaagaagaccaaggcccaccatgccccaggctcagcagggagctgctggaggtagtagagcctgaagtcttgcaggactcactggatgttattcaactccttccagttgtcttgaacagcctgactcctgccagccctacagaagttccttttatgcattggaggaaaaacatgttggcttttctcttgacgtgggagaaattgaaaagaaggggaaggggaagaaaagaaggggaagaagatcaaagaagaaaagaagaaggggaagaaaagaaggggaagaagatcaaaacccaccatgccccaggctcaacagcgtgctgatggaagtggaagagcctgaagtcttgcaggactcactggatagatgttattcgactccatcaatgtactttgaactacctgactcattccagcactacagaagtgtgttttactcatttgaggaacagcacatcacctttgcccttgacatggacaatagcttttttactttgacggtgacaagtctccacctggtcttccagatgggagtcatattcccacaataagcagcccttactaagccgagaggtgtcattcctgcaggcaggacctataggcacctgaagatttgaatgaaactatagttccatttggaagcccagacataggatgggtcagtgggcatggctctattcctattctcagagcatgccagtggcaacctgtgctcagtctgaagacaatggacccacgttaggtgtgacacattcacataactgtgcagcacatgccgggagtgatcagccggacattttaatttgaaccatgtatctctgggtagctacaaaattcctcagggatttcattttgcaggcatgtctctgagcttctatacctactcaaggtcagtgtcatctttgtgtttagttcatccaaaggtgttaccctggtttcaatgaacctaacctcattatttgtgtcttcagtgttggcttgttttagctgatccatctgtaacacaggagggatccttggctgaggattgtatttcagaaccaccaactgctcttgacaattgttaacccgctaggctcctttggttagagaagccacagtccttcagcctccaattggtgtcagtacttaggaagaccacagctagatggacaaacagcattgggaggccttagccctgctcctctcaattccatcctgtagagaacaggagtcaggagccgctggcaggagacagcatgtcacccaggactctgccggtgcagaatatgagcaatgccatgttcttgcagaaaacgcttagcctgagtttcataggaggtaatcaccagacaactgcagaatgtagaacactgagcaggacaactgacctgtctccttcacatagtccatatcaccacaaatcacacaacaaaaaggagaagagatattttgggttgaaaaaaagtaaaaagataatgtagctgcatttctttagttattttgaaccccaaatatttcctcatctttttgttgttgtcattgatggtggtgacatggacttgtttatagaggacaggtcagctctctggctcaatgatctacattctgaagttgtctgaaaatgtcttcatgattaaattcagcctaaactttttgctgggaacactgcagagacaatgctgtgagtttccaacctcagcccatctgcgggcagagaaggtctagtttgtccatcaccattatgatatcaggactggttacttggttaaggaggggtctaggagatctgtcccttttagagacaccttacttataatgaagtacttgggaaagcggttttcaagagtataaatatcctgtattctaatgatcatcctctaaacattttatcatttattaatcctccctgcctgtgtctattattatatacatatctctacgctgcaaattttgggtctcaatttttactgtgcctttgtttttactagtgtctgctgttgcaaaaagaagaaaacattctctgcctgagttttaatttttgtccaaagttaattttaatctatacaattaaaaccttttgcctatc

SEQ ID NO: 19908 - DNA, 288 bp, Homo sapiens
  source 1..288: mol_type = unassigned DNA
attgcagaaattgaaaagtaccaagaagtggaagaagaccaagacccatcatgccccaggctcagcagggagctgctggctgagaaagagcctgaagtcttgcaggactcactggatagatggtattcgactccttcaggttatcttgaactgcctgacttaggccagccctacagaagtgctgtttactcattggaggaacagtaccttggcttggctcttgacgtggacaaaattgaaaagtaccaagaagtggaagaagaccaagacccatcatgccccaggtaa

SEQ ID NO: 19909 - DNA, 440 bp, Homo sapiens; identical to SEQ ID NO: 19901
  source 1..440: mol_type = unassigned DNA

SEQ ID NO: 19910 - DNA, 3689 bp, Homo sapiens
  source 1..3689: mol_type = unassigned DNA
aagatctcataaaatctatgctgaggaatgagcgacagttcaaggaggagaagcttgcagagcagctcaagcaagctgaggagctcaggcaatataaagtcctggttcacgctcaggaacgagagctgacccagttaagggagaagttgcgggaagggagagatgcctcccgctcattgaatgagcatctccaggccctcctcactccggatgagccggacaagtcccaggggcaggacctccaagaacagctggctgaggggtgtagactggcacagcaccttgtccaaaagctcagcccagaaaatgacaacgatgacgatgaagatgttcaagttgaggtggctgagaaagtgcagaaatcgtctgcccccagggagatgcagaaggctgaagaaaaggaagtccctgaggactcactggaggaatgtgccatcacttgttcaaatagccatggcccttatgactccaaccagccacataggaaaaccaaaatcacatttgaggaagacaaagtcgactcaactctcattggctcatcctctcatgttgaatgggaggatgctgtacacattattccagaaaatgaaagtgatgatgaggaagaggaagaaaaaggaccagtgtctcccaggaatctgcaggagtctgaagaggaggaagtcccccaggagtcctgggatgaaggttattcgactctctcaattcctcctgaaatgttggcctcgtacaagtcttacagcagcacatttcactcattagaggaacagcaagtctgcatggctgttgacataggcagacatcggtgggatcaagtgaaaaaggaggaccacgaggcaacaggtcccaggctcagcagagagctgctggatgagaaagggcctgaagtcttgcaggactcactggatagatgttattcaactccttcaggttgtcttgaactgactgactcatgccagccctacagaagtgccttttacgtattggagcaacagcgtgttggcttggctgttaacatggatgaaattgaaaagtaccaagaagtggaagaagaccaagacccatcatgccccaggctcagcagggagctgctggatgagaaagagcctgaagtcttgcaggactcactgggtagatgttattcgactccttcaggttatcttgaactgcctgacttaggccagccctacagcagtgctgtttactcattggaggaacagtaccttggcttggctcttgacgtggacagaattaaaaaggaccaagaagaggaagaagaccaaggcccaccatgccccaggctcagcagggagctgctggaggtagtagagcctgaagtcttgcaggactcactggatagatgttattcaactccttccagttgtcttgaacagcctgactcctgccagccctatggaagttccttttatgcattggaggaaaagcatgttggcttttctcttgacgtgggagaaattgaaaagaaggggaaggggaagaaaagaaggggaagaagatcaaagaaggaaagaagaaggggaagaaaagaaggggaagaagatcaaaacccaccatgccccaggctcagcagggagctgctggatgagaaagggcctgaagtcttgcaggactcactggatagatgttattcaactccttcaggttgtcttgaactgactgactcatgccagccctacagaagtgccttttacatattggagcaacagcgtgttggcttggctgttgacatggatgaaattgaaaagtaccaagaagtggaagaagaccaagacccatcatgccccaggctcagcggggagctgttggatgagaaagagcctgaagtcttgcaggagtcactggatagatgctattcaactccttcaggttgtcttgaactgactgactcatgccagccctacagaagtgccttttacatattggagcaacagcgtgttggcttggctgttgacatggatgaaattgaaaagtaccaagaagtggaagaagaccaagacccatcatgccccaggctcagcagggagctgctggatgagaaagagcctgaagtcttgcaggactcactgggtagatgttattcgactccttcaggttatcttgaactgcctgacttaggccagccctacagcagtgctgtttactcattggaggaacagtaccttggcttggctcttgacgtggacagaattaaaaaggaccaagaagaggaagaagaccaaggcccaccatgccccaggctcagcagggagctgctggaggtagtagagcctgaagtcttgcaggactcactggatagatgttattcaactccttccagttgtcttgaacagcctgactcctgccagccctatggaagttccttttatgcattggaggaaaaacatgttggcttttctcttgacgtgggagaaattgaaaagaaggggaaggggaagaaaagaaggggaagaagatcaaagaaggaaagaagaaggggaagaaaagaaggggaagaagatcaaaacccaccatgccccaggctcaacagcatgctgatggaagtggaagagcctgaagtcttgcaggactcactggatatatgttattcgactccgtcaatgtactttgaactacctgactcattccagcactacagaagtgtgttttactcatttgaggaagagcatatcagcttcgccctttacgtggacaataggttttttactttgacggtgacaagtctccacctggtgttccagatgggagtcatattcccacaataagcagcccttactaagccgagaggtgtcattcctgcaggcaggacctataggcacgtgaagatttgaatgaaagtacagttccatttggaagcccagacataggatgggtcagtgggcatggctctattcctattctcaaaccatgccagtggcaacctgtgctcagtctgaagacaatggacccacgttaggtgtgacacgttcacataactgtgcagcacatgccgggagtgatcagtcagacattttaatttgaaccacgtatctctgggtagctacaaaattcctcagggatgtcattttgcaggcatgtctctgagcttctatacctgctcaaggtcattgtcatctttgtgtttagctcatccaaaggtgttaccctggtttcaatgaacctaacctcattctttgtgtcttcagtgttggcttgttttagctgatccatctgtaacacaggagggatccttggctgaggattgtatttcagaaccaccaactgctcttgacaattgttaacccgctaggctcctttggttagagaagccacagtccttcagcctccaattggtgtcagtacttaggaagaccacagctagatggacaaacagcattgggaggccttagccctgctcctctcaattccatcctgtagagaacaggagtcaggagccgctggcaggagacagcatgtcacccaggactctgccggtgcagaatatgagcaatgccatgttcttgcagaaaacgcttaacctgagtttcataggaggtaatcaccagacaactgcagaatgtagaacactgagcaggacaactgacctgtctccttcacatagtccatatcaccacaaatcacacaacaaaaaggagaagagatattttcggttgaaaaaaagtaaaaagata

SEQ ID NO: 19911 - DNA, 3671 bp, Homo sapiens
  source 1..3671: mol_type = unassigned DNA
aagatctcataaaatctatgctgaggaatgagcgacagttcaaggaggagaagcttgcagagcagctcaagcaagctgaggagctcaggcaatataaagtcctggttcacgctcaggaacgagagctgacccagttaagggagaagttgcgggaagggagagatgcctcccgctcattgaatgagcatctccaggccctcctcactccggatgagccggacaagtcccaggggcaggacctccaagaacagctggctgaggggtgtagactggcacagcaccttgtccaaaagctcagcccagaaaatgacaacgatgacgatgaagatgttcaagttgaggtggctgagaaagtgcagaaatcgtctgcccccagggagatgcagaaggctgaagaaaaggaagtccctgaggactcactggaggaatgtgccatcacttgttcaaatagccatggcccttatgactccaaccagccacataggaaaaccaaaatcacatttgaggaagacaaagtcgactcaactctcattggctcatcctctcatgttgaatgggaggatgctgtacacattattccagaaaatgaaagtgatgatgaggaagaggaagaaaaaggaccagtgtctcccaggaatctgcaggagtctgaagaggaggaagtcccccaggagtcctgggatgaaggttattcgactctctcaattcctcctgaaatgttggcctcgtacaagtcttacagcagcacatttcactcattagaggaacagcaagtctgcatggctgttgacataggcagacatcggtgggatcaagtgaaaaaggaggaccacgaggcaacaggtcccaggctcagcagagagctgctggatgagaaagggcctgaagtcttgcaggactcactggatagatgttattcaactccttcaggttgtcttgaactgactgactcatgccagccctacagaagtgccttttacgtattggagcaacagcgtgttggcttggctgttaacatggatgaaattgaaaagtaccaagaagtggaagaagaccaagacccatcatgccccaggctcagcagggagctgctggatgagaaagagcctgaagtcttgcaggactcactgggtagatgttattcgactccttcaggttatcttgaactgcctgacttaggccagccctacagcagtgctgtttactcattggaggaacagtaccttggcttggctcttgacgtggacagaattaaaaaggaccaagaagaggaagaagaccaaggcccaccatgccccaggctcagcagggagctgctggaggtagtagagcctgaagtcttgcaggactcactggatagatgttattcaactccttccagttgtcttgaacagcctgactcctgccagccctatggaagttccttttatgcattggaggaaaagcatgttggcttttctcttgacgtgggagaaattgaaaagaaggggaaggggaagaaaagaaggggaagaagatcaaagaaggaaagaagaaggggaagaaaagaaggggaagaagatcaaaacccaccatgccccaggctcagcagggagctgctggatgagaaagggcctgaagtcttgcaggactcactggatagatgttattcaactccttcaggttgtcttgaactgactgactcatgccagccctacagaagtgccttttacatattggagcaacagcgtgttggcttggctgttgacatggatgaaattgaaaagtaccaagaagtggaagaagaccaagacccatcatgccccaggctcagcggggagctgttggatgagaaagagcctgaagtcttgcaggagtcactggatagatgctattcaactccttcaggttgtcttgaactgactgactcatgccagccctacagaagtgccttttacatattggagcaacagcgtgttggcttggctgttgacatggatgaaattgaaaagtaccaagaagtggaagaagaccaagacccatcatgccccaggctcagcagggagctgctggatgagaaagagcctgaagtcttgcaggactcactgggtagatgttattcgactccttcaggttatcttgaactgcctgacttaggccagccctacagcagtgctgtttactcattggaggaacagtaccttggcttggctcttgacgtggacagaattaaaaaggaccaagaagaggaagaagaccaaggcccaccatgccccaggctcagcagggagctgctggaggtagtagagcctgaagtcttgcaggactcactggatagatgttattcaactccttccagttgtcttgaacagcctgactcctgccagccctatggaagttccttttatgcattggaggaaaaacatgttggcttttctcttgacgtgggagaaattgaaaagaaggggaaggggaagaaaagaaggggaagaagatcaaagaaggaaagaagaaggggaagaaaagaaggggaagaagatcaaaacccaccatgccccaggctcaacagcatgctgatggaagtggaagagcctgaagtcttgcaggactcactggatatatgttattcgactccgtcaatgtactttgaactacctgactcattccagcactacagaagtgtgttttactcatttgaggaagagcatatcagcttcgccctttacgtggacaataggttttttactttgacggtgacaagtctccacctggtgttccagatgggagtcatattcccacaataagcagcccttactaagccgagaggtgtcattcctgcaggcaggacctataggcacgtgaagatttgaatgaaagtacagttccatttggaagcccagacataggatgggtcagtgggcatggctctattcctattctcaaaccatgccagtggcaacctgtgctcagtctgaagacaatggacccacgttaggtgtgacacgttcacataactgtgcagcacatgccgggagtgatcagtcagacattttaatttgaaccacgtatctctgggtagctacaaaattcctcagggatgtcattttgcaggcatgtctctgagcttctatacctgctcaaggtcattgtcatctttgtgtttagctcatccaaaggtgttaccctggtttcaatgaacctaacctcattctttgtgtcttcagtgttggcttgttttagctgatccatctgtaacacaggagggatccttggctgaggattgtatttcagaaccaccaactgctcttgacaattgttaacccgctaggctcctttggttagagaagccacagtccttcagcctccaattggtgtcagtacttaggaagaccacagctagatggacaaacagcattgggaggccttagccctgctcctctcaattccatcctgtagagaacaggagtcaggagccgctggcaggagacagcatgtcacccaggactctgccggtgcagaatatgagcaatgccatgttcttgcagaaaacgcttaacctgagtttcataggaggtaatcaccagacaactgcagaatgtagaacactgagcaggacaactgacctgtctccttcacatagtccatatcaccacaaatcacacaacaaaaaggagaagagatattttcggttg

SEQ ID NO: 19912 - DNA, 1447 bp, Homo sapiens
  source 1..1447: mol_type = unassigned DNA
atcaaaacccaccatgccccaggctcagcagggagctgctggatgagaaagggcctgaagtcttgcaggactcactggatagatgttattcaactccttcaggttgtcttgaactgactgactcatgccagccctacagaagtgccttttacatattggagcaacagcgtgttggcttggctgttgacatggatgaaattgaaaagtaccaagaagtggaagaagaccaagacccatcatgccccaggctcagcagggagctgctggatgagaaagagcctgaagtcttgcaggactcactgggtagatgttattcgactccttcaggttatcttgaactgcctgacttaggccagccctacagcagtgctgtttactcattggaggaacagtaccttggcttggctcttgacgtggacagaattaaaaaggaccaagaagaggaagaagaccaaggcccaccatgccccaggctcagcagggagctgctggaggtagtagagcctgaagtcttgcaggactcactggatagatgttattcaactccttccagttgtcttgaacagcctgactcctgccagccctatggaagttccttttatgcattggaggaaaaacatgttggcttttctcttgacgtgggagaaattgaaaagaaggggaaggggaagaaaagaaggggaagaagatcaaagaaggaaagaagaaggggaagaaaagaaggggaagaagatcaaaacccaccatgccccaggctcaacagcatgctgatggaagtggaagagcctgaagtcttgcaggactcactggatatatgttattcgactccgtcaatgtactttgaactacctgactcattccagcactacagaagtgtgttttactcatttgaggaagagcatatcagcttcgccctttacgtggacaataggttttttactttgacggtgacaagtctccacctggtgttccagatgggagtcatattcccacaataagcagcccttactaagccgagaggtgtcattcctgcaggcaggacctataggcacgtgaagatttgaatgaaagtacagttccatttggaagcccagacataggatgggtcagtgggcatggctctattcctattctcaaaccatgccagtggcaacctgtgctcagtctgaagacaatggacccacgttaggtgtgacacgttcacataactgtgcagcacatgccgggagtgatcagtcagacattttaatttgaaccacgtatctctgggtagctacaaaattcctcagggatgtcattttgcaggcatgtctctgagcttctatacctgctcaaggtcattgtcatctttgtgtttagctcatccaaaggtgttaccctggtttcaatgaacctaacctcattctttgtgtcttcagtgttggcttgttttagctgatccatctgt

SEQ ID NO: 19913 - DNA, 1534 bp, Homo sapiens
  source 1..1534: mol_type = unassigned DNA
aatatgaagagtgcaaagatctcataaaatctatgctgaggaatgagcgacagttcaaggaggagaagcttgcagagcagctcaagcaagctgaggagctcaggcaatataaagtcctggttcacgctcaggaacgagagctgacccagttaagggagaagttgcgggaagggagagatgcctcccgctcattgaatgagcatctccaggccctcctcactccggatgagccggacaagtcccaggggcaggacctccaagaacagctggctgaggggtgtagactggcacagcaccttgtccaaaagctcagcccagaaaatgacaacgatgacgatgaagatgttcaagttgaggtggctgagaaagtgcagaaatcgtctgcccccagggagatgcagaaggctgaagaaaaggaagtccctgaggactcactggaggaatgtgccatcacttgttcaaatagccatggcccttatgactccaaccagccacataggaaaaccaaaatcacatttgaggaagacaaagtcgactcaactctcattggctcatcctctcatgttgaatgggaggatgctgtacacattattccagaaaatgaaagtgatgatgaggaagaggaagaaaaaggaccagtgtctcccaggaatctgcaggagtctgaagaggaggaagtcccccaggagtcctgggatgaaggttattcgactctctcaattcctcctgaaatgttggcctcgtacaagtcttacagcagcacatttcactcattagaggaacagcaagtctgcatggctgttgacataggcagacatcggtgggatcaagtgaaaaaggaggaccacgaggcaacaggtcccaggctcagcagagagctgctggatgagaaagggcctgaagtcttgcaggactcactggatagatgttattcaactccttcaggttgtcttgaactgactgactcatgccagccctacagaagtgccttttacgtattggagcaacagcgtgttggcttggctgttaacatggatgaaattgaaaagtaccaagaagtggaagaagaccaagacccatcatgccccaggctcagcagggagctgctggatgagaaagagcctgaagtcttgcaggactcactgggtagatgttattcgactccttcaggttatcttgaactgcctgacttaggccagccctacagcagtgctgtttactcattggaggaacagtaccttggcttggctcttgacgtggacagaattaaaaaggaccaagaagaggaagaagaccaaggcccaccatgccccaggctcagcagggagctgctggaggtagtagagcctgaagtcttgcaggactcactggatagatgttattcaactccttccagttgtcttgaacagcctgactcctgccagccctatggaagttccttttatgcattggaggaaaagcatgttggcttttctcttgacgtgggagaaattgaaaagaaggggaaggggaagaaaagaaggggaagaagatc

SEQ ID NO: 19914 - DNA, 1603 bp, Homo sapiens
  source 1..1603: mol_type = unassigned DNA
atcaaagaaggaaagaagaaggggaagaaaagaaggggaagaagatcaaaacccaccatgccccaggctcagcagggagctgctggatgagaaagggcctgaagtcttgcaggactcactggatagatgttattcaactccttcaggttgtcttgaactgactgactcatgccagccctacagaagtgccttttacatattggagcaacagcgtgttggcttggctgttgacatggatgaaattgaaaagtaccaagaagtggaagaagaccaagacccatcatgccccaggctcagcagggagctgctggatgagaaagagcctgaagtcttgcaggactcactgggtagatgttattcgactccttcaggttatcttgaactgcctgacttaggccagccctacagcagtgctgtttactcattggaggaacagtaccttggcttggctcttgacgtggacagaattaaaaaggaccaagaagaggaagaagaccaaggcccaccatgccccaggctcagcagggagctgctggaggtagtagagcctgaagtcttgcaggactcactggatagatgttattcaactccttccagttgtcttgaacagcctgactcctgccagccctatggaagttccttttatgcattggaggaaaaacatgttggcttttctcttgacgtgggagaaattgaaaagaaggggaaggggaagaaaagaaggggaagaagatcaaagaaggaaagaagaaggggaagaaaagaaggggaagaagatcaaaacccaccatgccccaggctcaacagcatgctgatggaagtggaagagcctgaagtcttgcaggactcactggatatatgttattcgactccgtcaatgtactttgaactacctgactcattccagcactacagaagtgtgttttactcatttgaggaagagcatatcagcttcgccctttacgtggacaataggttttttactttgacggtgacaagtctccacctggtgttccagatgggagtcatattcccacaataagcagcccttactaagccgagaggtgtcattcctgcaggcaggacctataggcacgtgaagatttgaatgaaagtacagttccatttggaagcccagacataggatgggtcagtgggcatggctctattcctattctcaaaccatgccagtggcaacctgtgctcagtctgaagacaatggacccacgttaggtgtgacacgttcacataactgtgcagcacatgccgggagtgatcagtcagacattttaatttgaaccacgtatctctgggtagctacaaaattcctcagggatgtcattttgcaggcatgtctctgagcttctatacctgctcaaggtcattgtcatctttgtgtttagctcatccaaaggtgttaccctggtttcaatgaacctaacctcattctttgtgtcttcagtgttggcttgttttagctgatccatctgtaacacaggagggatccttggctgaggattgtatttcagaaccaccaactgctcttgacaattgttaacccgctaggctcctttggttagagaagccacagtccttcagcctc

SEQ ID NO: 19915 - DNA, 1534 bp, Homo sapiens; identical to SEQ ID NO: 19913
  source 1..1534: mol_type = unassigned DNA

SEQ ID NO: 19916 - DNA, 1534 bp, Homo sapiens
  source 1..1534: mol_type = unassigned DNA
aatatgaagagtgcaaagatctcataaaatctatgctgaggaatgagcgacagttcaaggaggagaagcttgcagagcagctcaagcaagctgaggagctcaggcaatataaagtcctggttcacgctcaggaacgagagctgacccagttaagggagaagttgcgggaagggagagatgcctcccgctcattgaatgagcatctccaggccctcctcactccggatgagccggacaagtcccaggggcaggacctccaagaacagctggctgaggggtgtagactggcacagcaccttgtccaaaagctcagcccagaaaatgacaacgatgacgatgaagatgttcaagttgaggtggctgagaaagtgcagaaatcgtctgcccccagggagatgcagaaggctgaagaaaaggaagtccctgaggactcactggaggaatgtgccatcacttgttcaaatagccatggcccttatgactccaaccagccacataggaaaaccaaaatcacatttgaggaagacaaagtcgactcaactctcattggctcatcctctcatgttgaatgggaggatgctgtacacattattccagaaaatgaaagtgatgatgaggaagaggaagaaaaaggaccagtgtctcccaggaatctgcaggagtctgaagaggaggaagtcccccaggagtcctgggatgaaggttattcgactctctcaattcctcctgaaatgttggcctcgtacaagtcttacagcagcacatttcactcattagaggaacagcaagtctgcatggctgttgacataggcagacatcggtgggatcaagtgaaaaaggaggaccacgaggcaacaggtcccaggctcagcagagagctgctggatgagaaagggcctgaagtcttgcaggactcactggatagatgttattcaactccttcaggttgtcttgaactgactgactcatgccagccctacagaagtgccttttacgtattggagcaacagcgtgttggcttggctgttaacatggatgaaattgaaaagtaccaagaagtggaagaagaccaagacccatcatgccccaggctcagcagggagctgctggatgagaaagagcctgaagtcttgcaggactcactgggtagatgttattcgactccttcaggttatcttgaactgcctgacttaggccagccctacagcagtgctgtttactcattggaggaacagtaccttggcttggctcttgacgtggacagaattaaaaaggaccaagaagaggaagaagaccaaggcccaccatgccccaggctcagcagggagctgctggaggtagtagagcctgaagtcttgcaggactcactggatagatgttattcaactccttccagttgtcttgaacagcctgactcctgccagccctatggaagttccttttatgcattggaggaaaaacatgttggcttttctcttgacgtgggagaaattgaaaagaaggggaaggggaagaaaagaaggggaagaagatc

SEQ ID NO: 19917 - DNA, 750 bp, Homo sapiens
  source 1..750: mol_type = unassigned DNA
gaaattgaaaagtaccaagaagtggaagaagaccaagacccatcatgccccaggctcagcagggagctgctggatgagaaagagcctgaagtcttgcaggactcactgggtagatgttattcgactccttcaggttatcttgaactgcctgacttaggccagccctacagcagtgctgtttactcattggaggaacagtaccttggcttggctcttgacgtggacagaattaaaaaggaccaagaagaggaagaagaccaaggcccaccatgccccaggctcagcagggagctgctggaggtagtagagcctgaagtcttgcaggactcactggatagatgttattcaactccttccagttgtcttgaacagcctgactcctgccagccctatggaagttccttttatgcattggaggaaaagcatgttggcttttctcttgacgtgggagaaattgaaaagaaggggaaggggaagaaaagaaggggaagaagatcaaagaaggaaagaagaaggggaagaaaagaaggggaagaagatcaaaacccaccatgccccaggctcagcggggagctgttggatgagaaagagcctgaagtcttgcaggagtcactggatagatgctattcaactccttcaggttgtcttgaactgactgactcatgccagccctacagaagtgccttttacatattggagcaacagcgtgttggcttggctgttgacatggatggtgagtacctttctatg

SEQ ID NO: 19918 - DNA, 1534 bp, Homo sapiens; identical to SEQ ID NO: 19916
  source 1..1534: mol_type = unassigned DNA

SEQ ID NO: 19919 - DNA, 1534 bp, Homo sapiens; identical to SEQ ID NO: 19916
  source 1..1534: mol_type = unassigned DNA

SEQ ID NO: 19920 - DNA, 1534 bp, Homo sapiens; identical to SEQ ID NO: 19916
  source 1..1534: mol_type = unassigned DNA

SEQ ID NO: 19921 - DNA, 1534 bp, Homo sapiens; identical to SEQ ID NO: 19916
  source 1..1534: mol_type = unassigned DNA

SEQ ID NO: 19922 - DNA, 4020 bp, Homo sapiens
  source 1..4020: mol_type = unassigned DNA
ccaactcccactgtccagggcttccagtggactctccgaggtactgatgtagaaacttccccattcggtgcaccaagagcaacctcacacggtgtgggctgaatgaagagctgccagatcccacaggtggcaagggctctggaacagccacataaagcccttgaagataaggatggtcaaacaaaataatatcatacctggagaaactcagatcttggtaagatttactggttgggaatccaaagttaatgccaagaagcagccgccagttgggatcaaatgtgagcctatggatcaagacggttacctggcacgctggccacaatctacctcactcttatcagagtctgcgctactgacagtgctttcagctctgagttgaggcacctcgaaccttgtttttgtggtgaaggatcctaaagtgctgtggggagtgatcacatttttgacaacatccctgactccacctcttctgccacaaacgtcagcatggtggtatcagccggccctttgtccagcgagaaggcagagatgaacattctagaaatcaatgagaaattgcgcccccagttggcagagaagaaacagcagttcagaaacctcaaagagaaatgttttctaactcaactggccggcttcctggccaaccgacagaagaaatacaaatatgaagagtgcaaagatctcataaaatttatgctgaggaatgagcgacagttcaaggaggagaagcttgcagagcagctcaagcaagctgaggagctcaggcaatataaagtcctggttcacgctcaggaacgagagctgacccagttaagggagaagttacgggaagggagagatgcctcccgctcattgaatgagcatctccaggccctcctcactccggatgagccggacaagtcccaggggcaggacctccaagaacagctggctgaggggtgtagactgacacagcaccttgtccaaaagctcagcccagaaaatgacaacgatgacgatgaagatgttcaagttgaggtggctgagaaagtgcagaaatcgtctgcccccagggagatgcagaaggctgaagaaaaggaagtccctgaggactcactggaggaatgtgccatcacttgttcaaatagccatggcccttatgactccaaccagccacataagaaaaccaaaatcacatttgaggaagacaaagtcgactcaactctcattggctcatcctctcatgttgaatgggaggatgctgtacacattattccagaaaatgaaagtgatgatgaggaagaggaagaaaaagggccagtgtctcccaggaatctgcaggagtctgaagaggaggaagtcccccaggagtcctgggatgaaggttattcgactctctcaattcctcctgaaatgttggcctcgtaccagtcttacagcagcacatttcactcattagaggaacagcaagtctgcatggctgttgacataggcagacatcggtgggatcaagtgaaaaaggaggaccaagaggcaacaggtcccaggctcagcagggagctgctggatgagaaagagcctgaagtcttgcaggactcactggatagatgttattcaactccttcaggttgtcttgaactgactgactcatgccagccctacagaagtgccttttacgtattggagcaacagcgtgttggcttggctattgacatggatgaaattgaaaagtaccaagaagtggaagaagaccaagacccatcatgccccaggctcagcagggagctgctggatgagaaagagcctgaagtcttgcaggactcactggatagatgttattcaactccttcagattatcttgaactgcctgacttaggccagccctacagcagtgctgtttactcattggaggaacagtaccttggcttggctcttgacgtggacagaattaaaaaggaccaagaagaggaagaagaccaaggcccaccatgccccaggctcagcagggagctgctggaggtagtagagcctgaagtcttgcaggactcactggatagatgttattcaactccttccagttgtcttgaacagcctgactcctgccagccctatggaagttccttttatgcattggaggaaaaacatgttggcttttctcttgacgtgggagaaattgaaaagaaggggaaggggaagaaaagaaggggaagaagatcaaagaagaaaagaagaaggggaagaaaagaaggggaagatgacaacccaccatgccccaggctctacggcgtgctgatggaagtggaagagcctgaagtcttacaggactcactggatagatgttattcgactccgtcaatgtactttgaacaacctgactcattccagcactacagaagtgtgttttactcatttgaggaagagcatatcagcttcgccctttacgtggacaataggttttttactttgacggtgacaagtctccacctggtgttccagatgggagtcatattcccacaataagcagctcttactaagccgagagatgtcattcctgcaggcaggacctataggcacgagaagatttgaatgaaagtacagttccatttggaagcccagacataggatgggtcagtgagcatggctctattcctattctcaaaccatgccattggcaacctgtgctcaatctgaagacaatggacccatgttaggtgtgacacgttcacataactgtgcagaacatgccgggagtgatcagtcagacattttaatttgaaccacgtatctctgggtagctacaaaattcctcagggatttcattttgcaggcatgtctctgagcttctatacctgctcaaggtcattgtcatctttgtgtttagctcatccaaaggtgttaccctggtttcaatgaacctaacctcattctttgtgtcttcagtgttggcttgttttagctgatccatctgtaacacaggagggatccttggctgaggattgtatttcagaaccaccaactgctcttgacaattgttaacccgctaggctcctttggttagagaagccacagtccttcagcctccaattggtgtcagtacttaggaagaccacagctagatggacaaacagcattgggaggccttagccctgctcctctcaattccatcctgtagagaacaggagtcaggagccgctggcaggagacagcatgtcacccaggactctgccggtgcagaatatgaacaatgccatgttcttgcagaaaacgcttagcctgagtttcataggaggtaatcaccagacaactgcagaatgtagaacactgagcaggacaactgacctgtctccttcacatagtccatatcaccacaaatcacacaacaaaaaggagaagagatattttgggttcaaaaaaagtaaaaagataatgtagctgcatttctttagttattttgaaccccaaatatttcctcatctttttgttgttgtcatggatggtggtgacatggacttgtttatagaggacaggtcagctgtctggctcaatgatctacattctgaagttgtctgaaaatgtcttcatgattaaattcagcctaaacattttgccgggaacactgcagagacaatgctgtgagtttccaacctcagcccatctgcgggcagagaaggtctagtttgtccatcaccattatgatatcaggactggttacttggttaaggaggggtctaggagatctgtcccttttagagacaccttacttataatgaagtacttgggaaagcggttttcaagagtataaatatcctgtattctaatgatcatcctctaaacattttatcatttattaatcctccctgcctgtgtctattattatattcatatctctacactgcaaattttgggtctcaatttttactgtgcctttgtttttactagtgtctgctgttgcaaaaagaagaaaacattctctgcctgagttttaatttttgtccaaagttaattttaatctatacaattaaaaccttttgcctatca

SEQ ID NO: 19923 - DNA, 4707 bp, Homo sapiens
  source 1..4707: mol_type = unassigned DNA
ataggcaatctgaaagcaaatcctgtttagatgcaggcgaaggttcctggtgacccaggctctcaccttaccgtcccttaccgtcctcctgagggtgtcctggagcttcagtgctgtgtgttcttggcctccacgctggggctgccaccaactcccactgtccagggcttccagtggactctccgaggtactgatgtagaaacttccccattcggtgcaccaagagcaacctcacacggtgtgggctgaatgaagagctgccagatcccacaggtggcaagggctctggaacagccacataaagcccttgaagataaggatggtcaaacaaaataatatcatacctggagaaactcagatcttggtaagatttactggttgggaatccaaagttaatgccaagaagcagccgccagttgggatcaaatgtgagcctatggatcaagcaggcctagcgtcttggcagtcatggtgacaatgacgttgaaggtggggactccaccgatgctcttcatatgaagatccacggtcaattccccatcctgcagcagtgagtccaggaccacagtatatttctggccccccagtgtcagtccattcatgacaaagtttgaccagtctttgccaaccaggacaccaacctcagctggcgtgatgttgaggaaggttttccctgggatggcggcccagatggaagaaaatataacctgttgggaaactgtttctgccttgatgatgttgtacagacaagagataaacagtgaggaatatgcttagatgtattgggaaagacacgggtctgtggcattgtcacaagggtacacgaatactgagagtgaatgctgaaggaatgatccccattggtggtgaccctcagacggttacctggcacgctggccacaatctacctcactcttatcagagtctgcgctactgacagtgctttcagctctgagttgaggcacctcgaaccttgtttttgtggtgaaggatcctaaagtgctgtggggagtgatcacatttttgacaacatccctgactccacctcttctgccacaaacgtcagcatggtggtatcagccggccctttgtccagcgagaaggcagagatgaacattctagaaatcaatgagaaattgcgcccccagttggcagagaagaaacagcagttcagaaacctcaaagagaaatgttttctaactcaactggccggcttcctggccaaccgacagaagaaatacaaatatgaagagtgcaaagatctcataaaatttatgctgaggaatgagcgacagttcaaggaggagaagcttgcagagcagctcaagcaagctgaggagctcaggcaatataaagtcctggttcacgctcaggaacgagagctgacccagttaagggagaagttacgggaagggagagatgcctcccgctcattgaatgagcatctccaggccctcctcactccggatgagccggacaagtcccaggggcaggacctccaagaacagctggctgaggggtgtagactgacacagcaccttgtccaaaagctcagcccagaaaatgacaacgatgacgatgaagatgttcaagttgaggtggctgagaaagtgcagaaatcgtctgcccccagggagatgcagaaggctgaagaaaaggaagtccctgaggactcactggaggaatgtgccatcacttgttcaaatagccatggcccttatgactccaaccagccacataagaaaaccaaaatcacatttgaggaagacaaagtcgactcaactctcattggctcatcctctcatgttgaatgggaggatgctgtacacattattccagaaaatgaaagtgatgatgaggaagaggaagaaaaagggccagtgtctcccaggaatctgcaggagtctgaagaggaggaagtcccccaggagtcctgggatgaaggttattcgactctctcaattcctcctgaaatgttggcctcgtaccagtcttacagcagcacatttcactcattagaggaacagcaagtctgcatggctgttgacataggcagacatcggtgggatcaagtgaaaaaggaggaccaagaggcaacaggtcccaggctcagcagggagctgctggatgagaaagagcctgaagtcttgcaggactcactggatagatgttattcaactccttcaggttgtcttgaactgactgactcatgccagccctacagaagtgccttttacgtattggagcaacagcgtgttggcttggctattgacatggatgaaattgaaaagtaccaagaagtggaagaagaccaagacccatcatgccccaggctcagcagggagctgctggatgagaaagagcctgaagtcttgcaggactcactggatagatgttattcaactccttcagattatcttgaactgcctgacttaggccagccctacagcagtgctgtttactcattggaggaacagtaccttggcttggctcttgacgtggacagaattaaaaaggaccaagaagaggaagaagaccaaggcccaccatgccccaggctcagcagggagctgctggaggtagtagagcctgaagtcttgcaggactcactggatagatgttattcaactccttccagttgtcttgaacagcctgactcctgccagccctatggaagttccttttatgcattggaggaaaaacatgttggcttttctcttgacgtgggagaaattgaaaagaaggggaaggggaagaaaagaaggggaagaagatcaaagaagaaaagaagaaggggaagaaaagaaggggaagatgacaacccaccatgccccaggctctacggcgtgctgatggaagtggaagagcctgaagtcttacaggactcactggatagatgttattcgactccgtcaatgtactttgaacaacctgactcattccagcactacagaagtgtgttttactcatttgaggaagagcatatcagcttcgccctttacgtggacaataggttttttactttgacggtgacaagtctccacctggtgttccagatgggagtcatattcccacaataagcagctcttactaagccgagagatgtcattcctgcaggcaggacctataggcacgagaagatttgaatgaaagtacagttccatttggaagcccagacataggatgggtcagtgagcatggctctattcctattctcaaaccatgccattggcaacctgtgctcaatctgaagacaatggacccatgttaggtgtgacacgttcacataactgtgcagaacatgccgggagtgatcagtcagacattttaatttgaaccacgtatctctgggtagctacaaaattcctcagggatttcattttgcaggcatgtctctgagcttctatacctgctcaaggtcattgtcatctttgtgtttagctcatccaaaggtgttaccctggtttcaatgaacctaacctcattctttgtgtcttcagtgttggcttgttttagctgatccatctgtaacacaggagggatccttggctgaggattgtatttcagaaccaccaactgctcttgacaattgttaacccgctaggctcctttggttagagaagccacagtccttcagcctccaattggtgtcagtacttaggaagaccacagctagatggacaaacagcattgggaggccttagccctgctcctctcaattccatcctgtagagaacaggagtcaggagccgctggcaggagacagcatgtcacccaggactctgccggtgcagaatatgaacaatgccatgttcttgcagaaaacgcttagcctgagtttcataggaggtaatcaccagacaactgcagaatgtagaacactgagcaggacaactgacctgtctccttcacatagtccatatcaccacaaatcacacaacaaaaaggagaagagatattttgggttcaaaaaaagtaaaaagataatgtagctgcatttctttagttattttgaaccccaaatatttcctcatctttttgttgttgtcatggatggtggtgacatggacttgtttatagaggacaggtcagctgtctggctcaatgatctacattctgaagttgtctgaaaatgtcttcatgattaaattcagcctaaacattttgccgggaacactgcagagacaatgctgtgagtttccaacctcagcccatctgcgggcagagaaggtctagtttgtccatcaccattatgatatcaggactggttacttggttaaggaggggtctaggagatctgtcccttttagagacaccttacttataatgaagtacttgggaaagcggttttcaagagtataaatatcctgtattctaatgatcatcctctaaacattttatcatttattaatcctccctgcctgtgtctattattatattcatatctctacactgcaaattttgggtctcaatttttactgtgcctttgtttttactagtgtctgctgttgcaaaaagaagaaaacattctctgcctgagttttaatttttgtccaaagttaattttaatctatacaattaaaaccttttgcctatcactctggacttctggattgttttttacattcagtgttataatatttgattatgctgattggttttggtgggtactgatgcgaattaataaaaacatttcatttccatgtt

SEQ ID NO: 19924 - DNA, 3640 bp, Homo sapiens
  source 1..3640: mol_type = unassigned DNA
atggtggtatcagccggccctttgtccagcgagaaggcagagatgaacattctagaaatcaatgagaaattgcgcccccagttggcagagaagaaacagcagttcagaaacctcaaagagaaatgttttctaactcaactggccggcttcctggccaaccgacagaagaaatacaaatatgaagagtgcaaagatctcataaaatttatgctgaggaatgagcgacagttcaaggaggagaagcttgcagagcagctcaagcaagctgaggagctcaggcaatataaagtcctggttcacgctcaggaacgagagctgacccagttaagggagaagttacgggaagggagagatgcctcccgctcattgaatgagcatctccaggccctcctcactccggatgagccggacaagtcccaggggcaggacctccaagaacagctggctgaggggtgtagactgacacagcaccttgtccaaaagctcagcccagaaaatgacaacgatgacgatgaagatgttcaagttgaggtggctgagaaagtgcagaaatcgtctgcccccagggagatgcagaaggctgaagaaaaggaagtccctgaggactcactggaggaatgtgccatcacttgttcaaatagccatggcccttatgactccaaccagccacataagaaaaccaaaatcacatttgaggaagacaaagtcgactcaactctcattggctcatcctctcatgttgaatgggaggatgctgtacacattattccagaaaatgaaagtgatgatgaggaagaggaagaaaaagggccagtgtctcccaggaatctgcaggagtctgaagaggaggaagtcccccaggagtcctgggatgaaggttattcgactctctcaattcctcctgaaatgttggcctcgtaccagtcttacagcagcacatttcactcattagaggaacagcaagtctgcatggctgttgacataggcagacatcggtgggatcaagtgaaaaaggaggaccaagaggcaacaggtcccaggctcagcagggagctgctggatgagaaagagcctgaagtcttgcaggactcactggatagatgttattcaactccttcaggttgtcttgaactgactgactcatgccagccctacagaagtgccttttacgtattggagcaacagcgtgttggcttggctattgacatggatgaaattgaaaagtaccaagaagtggaagaagaccaagacccatcatgccccaggctcagcagggagctgctggatgagaaagagcctgaagtcttgcaggactcactggatagatgttattcgactccttcagattatcttgaactgcctgacttaggccagccctacagcagtgctgtttactcattggaggaacagtaccttggcttggctcttgacgtggacagaattaaaaaggaccaagaagaggaagaagaccaaggcccaccatgccccaggctcagcagggagctgctggaggtagtagagcctgaagtcttgcaggactcactggatagatattattcaactccttccagttgtcttgaacagcctgactcctgccagccctatggaagttccttttatgcattggaggaaaaacatgttggcttttctcttgacgtgggagaaattgaaaagaaggggaaggggaagaaaagaaggggaagaagatcaaagaagaaaagaagaaggggaagaaaagaaggggaagatgacaacccaccatgccccaggctcaacggcgtgctgatggaagtggaagagcctgaagtcttacaggactcactggatagatgttattcgactcagtcaatgtactttgaactacctgactcattccagcactacagaagtgtgttttactcatttgaggaagagcatatcagcttcgccctttacgtggacaataggttttttactttgacggtgacaagtctccacctggtgttccagatgggagtcatattcccacaataagcagctcttactaagccgagagatgtcattcctgcaggcaggacctataggcacgagaagatttgaatgaaagtacagttccatttggaagcccagacataggatgggtcagtgagcatggctctattcctattctcaaaccatgccattggcaacctgtgctcaatctgaagacaatggacccatgttaggtgtgacacgttcacataactgtgcagcacatgccgggagtgatcagtcagacattttaatttgaaccacgtatctctgggtagctacaaaattcctcagggatttcattttgcaggcatgtctctgagcttctatacctgctcaaggtcattgtcatctttgtgtttagctcatccaaaggtgttaccctggtttcaatgaacctaacctcattctttgtgtcttcagtgttggcttgttttagctgatccatctgtaacacaggagggatccttggctgaggattgtatttcagaaccaccaactgctcttgacaattgttaacccgctaggctcctttggttagagaagccacagtccttcagcctccaattggtgtcagtacttaggaagaccacagctagatggacaaacagcattgggaggccttagccctgctcctctcaattccatcctgtagagaacaggagtcaggagccgctggcaggagacagcatgtcacccaggactctgccggtgcagaatatgaacaatgccatgttcttgcagaaaacgcttagcctgagtttcataggaggtaatcaccagacaactgcagaatgtagaacactgagcaggacaactgacctgtctccttcacatagtccatatcaccacaaatcacacaacaaaaaggagaagagatattttgggttcaaaaaaagtaaaaagataatgtagctgcatttctttagttattttgaaccccaaatatttcctcatctttttgttgttgtcatggatggtggtgacatggacttgtttatagaggacaggtcagctgtctggctcaatgatctacattctgaagttgtctgaaaatgtcttcatgattaaattcagcctaaacgttttgccgggaacactgcagagacaatgctgtgagtttccaacctcagcccatctgcgggcagagaaggtctagtttgtccatcaccattatgatatcagcactggttacttggttaaggaggggtctaggagatctgtcccttttagagacaccttacttataatgaagtacttgggaaagcggttttcaagagtataaatatcctgtattctaatgatcatcctctaaacattttatcatttattaatcctccctgcctgtgtctattattatattcatatctctacactgcaaattttgggtctcaatttttactgtgcctttgtttttactagtgtctgctgttgcaaaaagaagaaaacattctctgcctgagttttaatttttgtccaaagttaattttaatctatacaattaaaaccttttgcctatcactctggacttctggattgttttttacattcagtgttataatatttgattatgctgattggttttggtgggtactgatgcgaattaataaaaacatttcatttccatgtt

SEQ ID NO: 19925 - DNA, 3830 bp, Homo sapiens
  source 1..3830: mol_type = unassigned DNA
acggttacctggcacgctggccacaatctacctcactcttatcagagtctgcgctactgacagtgctttcagctctgagttgaggcacctcgaaccttgtttttgtggtgaaggatcctaaagtgctgtggggagtgatcacatttttgacaacatccctgactccacctcttctgccacaaacgtcagcatggtggtatcagccggccctttgtccagcgagaaggcagagatgaacattctagaaatcaatgagaaattgcgcccccagttggcagagaagaaacagcagttcagaaacctcaaagagaaatgttttctaactcaactggccggcttcctggccaaccgacagaagaaatacaaatatgaagagtgcaaagatctcataaaatttatgctgaggaatgagcgacagttcaaggaggagaagcttgcagagcagctcaagcaagctgaggagctcaggcaatataaagtcctggttcacgctcaggaacgagagctgacccagttaagggagaagttacgggaagggagagatgcctcccgctcattgaatgagcatctccaggccctcctcactccggatgagccggacaagtcccaggggcaggacctccaagaacagctggctgaggggtgtagactgacacagcaccttgtccaaaagctcagcccagaaaatgacaacgatgacgatgaagatgttcaagttgaggtggctgagaaagtgcagaaatcgtctgcccccagggagatgcagaaggctgaagaaaaggaagtccctgaggactcactggaggaatgtgccatcacttgttcaaatagccatggcccttatgactccaaccagccacataagaaaaccaaaatcacatttgaggaagacaaagtcgactcaactctcattggctcatcctctcatgttgaatgggaggatgctgtacacattattccagaaaatgaaagtgatgatgaggaagaggaagaaaaagggccagtgtctcccaggaatctgcaggagtctgaagaggaggaagtcccccaggagtcctgggatgaaggttattcgactctctcaattcctcctgaaatgttggcctcgtaccagtcttacagcagcacatttcactcattagaggaacagcaagtctgcatggctgttgacataggcagacatcggtgggatcaagtgaaaaaggaggaccaagaggcaacaggtcccaggctcagcagggagctgctggatgagaaagagcctgaagtcttgcaggactcactggatagatgttattcaactccttcaggttgtcttgaactgactgactcatgccagccctacagaagtgccttttacgtattggagcaacagcgtgttggcttggctattgacatggatgaaattgaaaagtaccaagaagtggaagaagaccaagacccatcatgccccaggctcagcagggagctgctggatgagaaagagcctgaagtcttgcaggactcactggatagatgttattcgactccttcagattatcttgaactgcctgacttaggccagccctacagcagtgctgtttactcattggaggaacagtaccttggcttggctcttgacgtggacagaattaaaaaggaccaagaagaggaagaagaccaaggcccaccatgccccaggctcagcagggagctgctggaggtagtagagcctgaagtcttgcaggactcactggatagatattattcaactccttccagttgtcttgaacagcctgactcctgccagccctatggaagttccttttatgcattggaggaaaaacatgttggcttttctcttgacgtgggagaaattgaaaagaaggggaaggggaagaaaagaaggggaagaagatcaaagaagaaaagaagaaggggaagaaaagaaggggaagatgacaacccaccatgccccaggctcaacggcgtgctgatggaagtggaagagcctgaagtcttacaggactcactggatagatgttattcgactcagtcaatgtactttgaactacctgactcattccagcactacagaagtgtgttttactcatttgaggaagagcatatcagcttcgccctttacgtggacaataggttttttactttgacggtgacaagtctccacctggtgttccagatgggagtcatattcccacaataagcagctcttactaagccgagagatgtcattcctgcaggcaggacctataggcacgagaagatttgaatgaaagtacagttccatttggaagcccagacataggatgggtcagtgagcatggctctattcctattctcaaaccatgccattggcaacctgtgctcaatctgaagacaatggacccatgttaggtgtgacacgttcacataactgtgcagcacatgccgggagtgatcagtcagacattttaatttgaaccacgtatctctgggtagctacaaaattcctcagggatttcattttgcaggcatgtctctgagcttctatacctgctcaaggtcattgtcatctttgtgtttagctcatccaaaggtgttaccctggtttcaatgaacctaacctcattctttgtgtcttcagtgttggcttgttttagctgatccatctgtaacacaggagggatccttggctgaggattgtatttcagaaccaccaactgctcttgacaattgttaacccgctaggctcctttggttagagaagccacagtccttcagcctccaattggtgtcagtacttaggaagaccacagctagatggacaaacagcattgggaggccttagccctgctcctctcaattccatcctgtagagaacaggagtcaggagccgctggcaggagacagcatgtcacccaggactctgccggtgcagaatatgaacaatgccatgttcttgcagaaaacgcttagcctgagtttcataggaggtaatcaccagacaactgcagaatgtagaacactgagcaggacaactgacctgtctccttcacatagtccatatcaccacaaatcacacaacaaaaaggagaagagatattttgggttcaaaaaaagtaaaaagataatgtagctgcatttctttagttattttgaaccccaaatatttcctcatctttttgttgttgtcatggatggtggtgacatggacttgtttatagaggacaggtcagctgtctggctcaatgatctacattctgaagttgtctgaaaatgtcttcatgattaaattcagcctaaacgttttgccgggaacactgcagagacaatgctgtgagtttccaacctcagcccatctgcgggcagagaaggtctagtttgtccatcaccattatgatatcagcactggttacttggttaaggaggggtctaggagatctgtcccttttagagacaccttacttataatgaagtacttgggaaagcggttttcaagagtataaatatcctgtattctaatgatcatcctctaaacattttatcatttattaatcctccctgcctgtgtctattattatattcatatctctacactgcaaattttgggtctcaatttttactgtgcctttgtttttactagtgtctgctgttgcaaaaagaagaaaacattctctgcctgagttttaatttttgtccaaagttaattttaatctatacaattaaaaccttttgcctatcactctggacttctggattgttttttacattcagtgttataatatttgattatgctgattggttttggtgggtactgatgcgaattaataaaaacatttcatttccatgtt

SEQ ID NO: 19926 - DNA, 2604 bp, Homo sapiens
  source 1..2604: mol_type = unassigned DNA
cctaaagtgctgtggggagtgatcacatttttcacaacagtaagtccctgactccacctcttctgccacaaacgtcagcatggtggtatcagccggcccttggtccagcgagaaggcagagatgaacattctagaaatcaacgagaaattgcgcccccagttggcagagaacaaacagcagttcggaaacctcaaagagagatgttttgtaactcaactggccggcttcctggccaaccagcagaagaaatacaactatgaagagtgtaaagacctcataaaatttatgctgaggaatgagcgacagttcaaggaggagaagcttgcagagcagctcaagcaagctgaggagctcaggcaatataaagtcctggttcactctcaggaacgagagctgacccagttaagggagaagttacgggaagggagagatgcctcccgctcattgaatgagcatctccaggccctcctcactctggatgagccggacaagtcccaggggcaggacctccaagaacagctggctgaggggtgtagactggcacagcaccttgtccaaaagctcagcccagaaaatgacgaagatgaggatgaagatgttcaagttgaggaggctgagaaagtgcagaaatcatctgcccccagggaggtgcagaagactgaagagagcaaagtccctgaggactcactggaggaatgtgccatcacttgttcaaatagccacggcccttgtgactccaaccagcctcacaagaacatcaaaatcacatttgaggaagacgaagtcaactcaactctggttgtagacagagaatcctctcatgatgaatgtcaggatgctctaaacattctcccagtccctggccccacctcttctgccacaaacgtcagcatggtggtatcagccggccctttgtccagcgagaaggcagagatgaacattctagaaatcaatgagaaattgcacccccagctggcagagaagaaacagcagttcagaaacctcaaagagagatgttttgtaactcaactggccggcttcctggccaaccagcagaagaaatacaaatatgaagagtgcaaagacctcataaaatctatgctgaggaatgagcgacagttcaaggaggagaagcttgcagagcagctcaagcaagctgaggagctcaggcaatataaagtcctggttcacgctcaggaacgagagctgacccagttaagggagaagttgcgggaagggagagatgcctcccgctcattgaatgagcatctccaggccctccttactccggatgagccggacaagtcccaggggcaggacctccaagaacagctggctgaggggtgtagactggcacagcaccttgtccaaaagctcagcccagaaaatgacaacgatgacgatgaagatgttcaagttgagttggctgagaaagtgcagaaatcgtctgcccccagggagatgcagaaggctgaagaaaaggaagtccctgaggactcacaggaggaatgtgccatcacttattcaaatagccatggcccttatgactccaaccagccacataggaaaaccaaaatcacatttgaggaagacaaagtcgactcaactctgattggctcatcctctcatgttgaatgggaggatgctgtacacattattccagaaaatgaaagtgatgatgaggaagaggaagaaaaagggccagtgtctcccaggaatctgcaggagtctgaagaggaggaagtcccccaggagtcctgggatgaaggttattcgactctctcaattcctcctgaaatgttggcctcgtaccagtcttacagcagcacatttcactcattagaggaacagcaagtctgcatggctgttgacataggcagacatcggtgggatcaagtgaaaaaggaggaccaagaggcaacaggtcccaggctcagcagggagctgctggatgagaaagggcctgaagtcttgcaggactcactggatagatgttattcaactccttcaggttgtcttgaactgactgactcatgccagccctacagaagtgccttttacgtattggagcaacagcgtgttggcttggctgttgacatggatgaaattgaaaagtaccaagaagtggaagaagaccaagacccatcatgccccaggctcagcagggagctgctggatgagaaagagcctgaagtcttgcaggactcactggatagatgttattcgactccttcaggttatcttgaactgcctgacttaggccagccctacagcagtgctgtttactcattggaggaacagtaccttggcttggctcttgacgtggacagaactaaaaaggaccaagaagaggaagaagaccaaggcccaccatgccccaggctcagcagggagctgctggaggtagtagagcctgaagtcttgcaggactcactggatagatgttattcaactccttccagttgtcttgaacagcctgactcctgccagccctatggaagttccttttatgcattggaggaaaaacatgttggcttttctctcgacgtgggagaaattgaaaagaaggggaaggggaagaaaagaaggggaagaagatcaaa

SEQ ID NO: 19927 - DNA, 15690 bp, Homo sapiens
  source 1..15690: mol_type = unassigned DNA
cagacggttacctggcacgctggccacaatctacctcactcttatcagagtctgagctactggcagtgctttcagctctgagttgaggcaccttgaaccttgtttttgtggtgaaggatcctaaagtgctgtggggagtgatcacatttttcacaacagtaagtccctgactccacctcttctgccacaaacgtcagcatggtggtatcagccggcccttggtccagcgagaaggcagagatgaacattctagaaatcaacgagaaattgcgcccccagttggcagagaacaaacagcagttcggaaacctcaaagagagatgttttgtaactcaactggccggcttcctggccaaccagcagaagaaatacaactatgaagagtgtaaagacctcataaaatttatgctgaggaatgagcgacagttcaaggaggagaagcttgcagagcagctcaagcaagctgaggagctcaggcaatataaagtcctggttcactctcaggaacgagagctgacccagttaagggagaagttacgggaagggagagatgcctcccgctcattgaatgagcatctccaggccctcctcactctggatgagccggacaagtcccaggggcaggacctccaagaacagctggctgaggggtgtagactggcacagcaccttgtccaaaagctcagcccagaaaatgacgaagatgaggatgaagatgttcaagttgaggaggctgagaaagtgcagaaatcatctgcccccagggaggtgcagaagactgaagagagcaaagtccctgaggactcactggaggaatgtgccatcacttgttcaaatagccacggcccttgtgactccaaccagcctcacaagaacatcaaaatcacatttgaggaagacgaagtcaactcaactctggttgtagacagagaatcctctcatgatgaatgtcaggatgctctaaacattctcccagtccctggccccacctcttctgccacaaacgtcagcatggtggtatcagccggccctttgtccagcgagaaggcagagatgaacattctagaaatcaatgagaaattgcacccccagctggcagagaagaaacagcagttcagaaacctcaaagagagatgttttgtaactcaactggccggcttcctggccaaccagcagaagaaatacaaatatgaagagtgcaaagacctcataaaatctatgctgaggaatgagcgacagttcaaggaggagaagcttgcagagcagctcaagcaagctgaggagctcaggcaatataaagtcctggttcacgctcaggaacgagagctgacccagttaagggagaagttgcgggaagggagagatgcctcccgctcattgaatgagcatctccaggccctccttactccggatgagccggacaagtcccaggggcaggacctccaagaacagctggctgaggggtgtagactggcacagcaccttgtccaaaagctcagcccagaaaatgacaacgatgacgatgaagatgttcaagttgagttggctgagaaagtgcagaaatcgtctgcccccagggagatgcagaaggctgaagaaaaggaagtccctgaggactcacaggaggaatgtgccatcacttattcaaatagccatggcccttatgactccaaccagccacataggaaaaccaaaatcacatttgaggaagacaaagtcgactcaactctgattggctcatcctctcatgttgaatgggaggatgctgtacacattattccagaaaatgaaagtgatgatgaggaagaggaagaaaaagggccagtgtctcccaggaatctgcaggagtctgaagaggaggaagtcccccaggagtcctgggatgaaggttattcgactctctcaattcctcctgaaatgttggcctcgtaccagtcttacagcagcacatttcactcattagaggaacagcaagtctgcatggctgttgacataggcagacatcggtgggatcaagtgaaaaaggaggaccaagaggcaacaggtcccaggctcagcagggagctgctggatgagaaagggcctgaagtcttgcaggactcactggatagatgttattcaactccttcaggttgtcttgaactgactgactcatgccagccctacagaagtgccttttacgtattggagcaacagcgtattggcttggctgttgacatggatgaaattgaaaagtaccaagaagtggaagaagaccaagacccatcatgccccaggctcagcagggagctgctggatgagaaagagcctgaagtcttgcaggactcactggatagatgttattcgactccttcaggttatcttgaactgcctgacttaggccagccctacagcagtgctgtttactcattggaggaacagtaccttggcttggctcttgacgtggacagaactaaaaaggaccaagaagaggaagaagaccaaggcccaccatgccccaggctcagcagggagctgctggaggtagtagagcctgaagtcttgcaggactcactggatagatgttattcaactccttccagttgtcttgaacagcctgactcctgccagccctatggaagttccttttatgcattggaggaaaaacatgttggcttttctcttgacgtgggagaaattgaaaagaaggggaaggggaagaaaagaaggggaagaagatcaaagaaggaaagaagaaggggaagaaaagaaggggaagaagatcaaaacccaccatgccccaggctcagcagggagctgctggatgagaaagggcctgaagtcttgcaggactcactggatagaagttattcaactccttcaggttgtcttgaactgactgactcatgccagccctacagaagtgccttttacgtattggagcaacagcgtgttggcttggctgttgacatggatgaaattgaaaagtaccaagaagtggaagaagaccaagacccatcatgccccaggctcagcagggagctgctggatgagaaagagcctgaagtcttgcaggactcactggatagatgttattcgactccttcaggttatcttgaactgcctgacttaggccagccctacagcagtgctgtttactcattggaggaacagtaccttggcttggctcttgacgtggacagaactaaaaaggaccaagaagaggaagaagaccaaggcccaccatgccccaggctcagcagggagctgctggaggtagtagagcctgaagtcttgcaggactcactggatagatgttattcaactccttccagttgtcttgaacagcctgactcctgccagccctatggaagttccttttatgcattggaggaaaaacatgttggcttttctctcgacgtgggagaaattgaaaagaaggggaaggggaagaaaagaaggggaagaagatcaaagaaggaaagaagaaggggaagaaaagaaggggaagaagatcaaaacccaccatgccccaggctcagcagggagctgctggatgagaaagggcctgaagtcttgcaggactcactggatagatgttattcaactccttcaggttgtcttgaactgactgactcatgccagccctacagaagtgccttttacgtattggagcaacagcgtgttggcttggctgttgacatggatgaaattgaaaagtaccaagaagtggaagaagaccaagacccatcatgccccaggctcagcagggagctgctggatgagaaagagcctgaagtcttgcaggactcactggatagatgttattcgactccttcaggttatcttgaactgcctgacttaggccagccctacagcagtgctgtttactcattggaggaacagtaccttggcttggctcttgacgtggacagaactaaaaaggaccaagaagaggaagaagaccaaggcccaccatgccccaggctcagcagggagctgctggaggtagtagagcctgaagtcttgcaggactcactggatagatgttattcaactccttccagttgtcttgaacagcctgactcctgccagccctatggaagttccttttatgcattggaggaaaaacatgttggcttttctcttgacgtgggagaaattgaaaagaaggggaaggggaagaaaagaaggggaagaagatcaaagaaggaaagaagaaggggaagaaaagaaggggaagaagatcaaaacccaccatgccccaggctcagcagggagctgctggatgagaaagggcctgaagtcttgcaggactcactggatagaagttattcaactccttcaggttgtcttgaactgactgactcatgccagccctacagaagtgccttttacgtattggagcaacagcgtgttggcttggctgttgacatggatgaaattgaaaagtaccaagaagtggaagaagaccaagacccatcatgccccaggctcagcagggagctgctggatgagaaagagcctgaagtcttgcaggactcactggatagatgttattcgactccttcaggttatcttgaactgcctgacttaggccagccctacagcagtgctgtttactcattggaggaacagtaccttggcttggctcttgacgtggacagaactaaaaaggaccaagaagaggaagaagaccaaggcccaccatgccccaggctcagcagggagctgctggaggtagtagagcctgaagtcttgcaggactcactggatagatgttattcaactccttccagttgtcttgaacagcctgactcctgccagccctatggaagttccttttatgcattggaggaaaaacatgttggcttttctctcgacgtgggagaaattgaaaagaaggggaaggggaagaaaagaaggggaagaagatcaaagaaggaaagaagaaggggaagaaaagaaggggaagaagatcaaaacccaccatgccccaggctcagcagggagctgctggatgagaaagggcctgaagtcttgcaggactcactggatagatgttattcaactccttcaggttgtcttgaactgactgactcatgccagccctacagaagtgccttttacgtattggagcaacagcgtgttggcttggctgttgacatggatgaaattgaaaagtaccaagaagtggaagaagaccaagacccatcatgccccaggctcagcagggagctgctggatgagaaagagcctgaagtcttgcaggactcactggatagatgttattcgactccttcaggttatcttgaactgcctgacttaggccagccctacagcagtgctgtttactcattggaggaacagtaccttggcttggctcttgacgtggacagaactaaaaaggaccaagaagaggaagaagaccaaggcccaccatgccccaggctcagcagggagctgctggaggtagtagagcctgaagtcttgcaggactcactggatagatgttattcaactccttccagttgtcttgaacagcctgactcctgccagccctatggaagttccttttatgcattggaggaaaaacatgttggcttttctctcgacgtgggagaaattgaaaagaaggggaaggggaagaaaagaaggggaagaagatcaaagaaggaaagaagaaggggaagaaaagaaggggaagaagatcaaaacccaccatgccccaggctcagcagggagctgctggatgagaaagggcctgaagtcttgcaggactcactggatagaagttattcaactccttcaggttgtcttgaactgactgactcatgccagccctacagaagtgccttttacgtattggagcaacagcgtgttggcttggctgttgacatggatgaaattgaaaagtaccaagaagtggaagaagaccaagacccatcatgccccaggctcagcagggagctgctggatgagaaagagcctgaagtcttgcaggactcactggatagatgttattcgactccttcaggttatcttgaactgcctgacttaggccagccctacagcagtgctgtttactcattggaggaacagtaccttggcttggctcttgacgtggacagaactaaaaaggaccaagaagaggaagaagaccaaggcccaccatgccccaggctcagcagggagctgctggaggtagtagagcctgaagtcttgcaggactcactggatagatgttattcaactccttccagttgtcttgaacagcctgactcctgccagccctatggaagttccttttatgcattggaggaaaaacatgttggcttttctctcgacgtgggagaaattgaaaagaaggggaaggggaagaaaagaaggggaagaagatcaaagaaggaaagaagaaggggaagaaaagaaggggaagaagatcaaaacccaccatgccccaggctcagcagggagctgctggatgagaaagggcctgaagtcttgcaggactcactggatagaagttattcaactccttcaggttgtcttgaactgactgactcatgccagccctacagaagtgccttttacgtattggagcaacagcgtgttggcttggctgttgacatggatgaaattgaaaagtaccaagaagtggaagaagaccaagacccatcatgccccaggctcagcagggagctgctggatgagaaagagcctgaagtcttgcaggactcactggatagatgttattcgactccttcaggttatcttgaactgcctgacttaggccagccctacagcagtgctgtttactcattggaggaacagtaccttggcttggctcttgacgtggacagaactaaaaaggaccaagaagaggaagaagaccaaggcccaccatgccccaggctcagcagggagctgctggaggtagtagagcctgaagtcttgcaggactcactggatagatgttattcaactccttccagttgtcttgaacagcctgactcctgccagccctatggaagttccttttatgcattggaggaaaaacatgttggcttttctctcgacgtgggagaaattgaaaagaaggggaaggggaagaaaagaaggggaagaagatcaaagaaggaaagaagaaggggaagaaaagaaggggaagaagatcaaaacccaccatgccccaggctcagcagggagctgctggatgagaaagggcctgaagtcttgcaggactcactggatagaagttattcaactccttcaggttgtcttgaactgactgactcatgccagccctacagaagtgccttttacgtattggagcaacagcgtgttggcttggctgttgacatggatgaaattgaaaagtaccaagaagtggaagaagaccaagacccatcatgccccaggctcagcagggagctgctggatgagaaagagcctgaagtcttgcaggactcactggatagatgttattcgactccttcaggttatcttgaactgcctgacttaggccagccctacagcagtgctgtttactcattggaggaacagtaccttggcttggctcttgacgtggacagaactaaaaaggaccaagaagaggaagaagaccaaggcccaccatgccccaggctcagcagggagctgctggaggtagtagagcctgaagtcttgcaggactcactggatagatgttattcaactccttccagttgtcttgaacagcctgactcctgccagccctatggaagttccttttatgcattggaggaaaaacatgttggcttttctctcgacgtgggagaaattgaaaagaaggggaaggggaagaaaagaaggggaagaagatcaaagaaggaaagaagaaggggaagaaaagaaggggaagaagatcaaaacccaccatgccccaggctcagcagggagctgctggatgagaaagggcctgaagtcttgcaggactcactggatagaagttattcaactccttcaggttgtcttgaactgactgactcatgccagccctacagaagtgccttttacgtattggagcaacagcgtgttggcttggctgttgacatggatgaaattgaaaagtaccaagaagtggaagaagaccaagacccatcatgccccaggctcagcagggagctgctggatgagaaagagcctgaagtcttgcaggactcactggatagatgttattcgactccttcaggttatcttgaactgcctgacttaggccagccctacagcagtgctgtttactcattggaggaacagtaccttggcttggctcttgacgtggacagaactaaaaaggaccaagaagaggaagaagaccaaggcccaccatgccccaggctcagcagggagctgctggaggtagtagagcctgaagtcttgcaggactcactggatagatgttattcaactccttccagttgtcttgaacagcctgactcctgccagccctatggaagttccttttatgcattggaggaaaaacatgttggcttttctctcgacgtgggagaaattgaaaagaaggggaaggggaagaaaagaaggggaagaagatcaaagaaggaaagaagaaggggaagaaaagaaggggaagaagatcaaaacccaccatgccccaggctcagcagggagctgctggatgagaaagagcctgaagtcttgcaggactcactggatagatgttattcgactccttcaggttatcttgaactgcctgacttaggccagccctacagcagtgctgtttactcattggaggaacagtaccttggcttggctcttgacgtggacagaactaaaaaggaccaagaagaggaagaagaccaaggcccaccatgccccaggctcagcagggagctgctggaggtagtagagcctgaagtcttgcaggactcactggatagatgttattcaactccttccagttgtcttgaacagcctgactcctgccagccctatggaagttccttttatgcattggaggaaaaacatgttggcttttctcttgacgtgggagaaattgaaaagaaggggaaggggaagaaaagaaggggaagaagatcaaagaaggaaagaagaaggggaagaaaagaaggggaagaagatcaaaacccaccatgccccaggctcagcagggagctgctggatgagaaagagcctgaagtcttgcaggactcactggatagatgttattcgactccttcaggttatcttgaactgcctgacttaggccagccctacagcagtgctgtttactcattggaggaacagtaccttggcttggctcttgacgtggacagaactaaaaaggaccaagaagaggaagaagaccaaggcccaccatgccccaggctcagcagggagctgctggaggtagtagagcctgaagtcttgcaggactcactggatagatgttattcaactccttccagttgtcttgaacagcctgactcctgccagccctatggaagttccttttatgcattggaggaaaaacatgttggcttttctcttgacgtgggagaaattgaaaagaaggggaaggggaagaaaagaaggggaagaagatcaaagaaggaaagaagaaggggaagaaaagaaggggaagaagatcaaaacccaccatgccccaggctcagcagggagctgctggatgagaaagagcctgaagtcttgcaggactcactggatagatgttattcgactccttcaggttatcttgaactgcctgacttaggccagccctacagcagtgctgtttactcattggaggaacagtaccttggcttggctcttgacgtggacagaactaaaaaggaccaagaagaggaagaagaccaaggcccaccatgccccaggctcagcagggagctgctggaggtagtagagcctgaagtcttgcaggactcactggatagatgttattcaactccttccagttgtcttgaacagcctgactcctgccagccctatggaagttccttttatgcattggaggaaaaacatgttggcttttctcttgacgtgggagaaattgaaaagaaggggaaggggaagaaaagaaggggaagaagatcaaagaaggaaagaagaaggggaagaaaagaaggggaagaagatcaaaacccaccatgccccaggctcagcagggagctgctggatgagaaagggcctgaagtcttgcaggactcactggatagatgttattcaactccttcaggttgtcttgaactgactgactcatgccagccctacagaagtgccttttacgtattggagcaacagcgtgttggcttggctgttgacatggatgaaattgaaaagtaccaagaagtggaagaagaccaagacccatcatgccccaggctcagcagggagctgctggatgagaaagagcctgaagtcttgcaggactcactggatagatgttattcgactccttcaggttatcttgaactgcctgacttaggccagccctacagcagtgctgtttactcattggaggaacagtaccttggcttggctcttgacgtggacagaactaaaaaggaccaagaagaggaagaagaccaaggcccaccatgccccaggctcagcagggagctgctggaggtagtagagcctgaagtcttgcaggactcactggatagatgttattcaactccttccagttgtcttgaacagcctgactcctgccagccctatggaagttccttttatgcattggaggaaaaacatgttggcttttctcttgacgtgggagaaattgaaaagaaggggaaggggaagaaaagaaggggaagaagatcaaagaaggaaagaagaaggggaagaaaagaaggggaagaagatcaaaacccaccatgccccaggctcagcagggagctgctggatgagaaagggcctgaagtcttgcaggactcactggatagatgttattcaactccttcaggttgtcttgaactgactgactcatgccagccctacagaagtgccttttacgtattggagcaacagcgtgttggcttggctgttgacatggatgaaattgaaaagtaccaagaagtggaagaagaccaagacccatcatgccccaggctcagcagggagctgctggatgagaaagagcctgaagtcttgcaggactcactggatagatgttattcgactccttcaggttatcttgaactgcctgacttaggccagccctacagcagtgctgtttactcattggaggaacagtaccttggcttggctcttgacgtggacagaactaaaaaggaccaagaagaggaagaagaccaaggcccaccatgccccaggctcagcagggagctgctggaggtagtagagcctgaagtcttgcaggactcactggatagatgttattcaactccttccagttgtcttgaacagcctgactcctgccagccctatggaagttccttttatgcattggaggaaaaacatgttggcttttctcttgacgtgggagaaattgaaaagaaggggaaggggaagaaaagaaggggaagaagatcaaagaaggaaagaagaaggggaagaaaagaaggggaagaagatcaaaacccaccatgccccaggctcagcagggagctgctggatgagaaagggcctgaagtcttgcaggactcactggatagatgttattcaactccttcaggttgtcttgaactgactgactcatgccagccctacagaagtgccttttacgtattggagcaacagcgtgttggcttggctgttgacatggatgaaattgaaaagtaccaagaagtggaagaagaccaagacccatcatgccccaggctcagcagggagctgctggatgagaaagagcctgaagtcttgcaggactcactggatagatgttattcgactccttcaggttatcttgaactgcctgacttaggccagccctacagcagtgctgtttactcattggaggaacagtaccttggcttggctcttgacgtggacagaactaaaaaggaccaagaagaggaagaagaccaaggcccaccatgccccaggctcagcagggagctgctggaggtagtagagcctgaagtcttgcaggactcactggatagatgttattcaactccttccagttgtcttgaacagcctgactcctgccagccctatggaagttccttttatgcattggaggaaaaacatgttggcttttctctcgacgtgggagaaattgaaaagaaggggaaggggaagaaaagaaggggaagaagatcaaagaaggaaagaagaaggggaagaaaagaaggggaagaagatcaaaccccaccatgccccaggctcagcagggagctgctggatgagaaagggcctgaagtcttgcaggactcactggatagatgttattcaactccttcaggttgtcttgaactgactgactcatgccagccctacagaagtgccttttacgtattggagcaacagcgtgttggcttggctgttgacatggatgaaattgaaaagtaccaagaagtggaagaagaccaagacccatcatgccccaggctcagcagggagctgctggatgagaaagagcctgaagtcttgcaggactcactggatagatgttattcgactccttcaggttatcttgaactgcctgacttaggccagccctacagcagtgctgtttactcattggaggaacagtaccttggcttggctcttgacgtggacagaactaaaaaggaccaagaagaggaagaagaccaaggcccaccatgccccaggctcagcagggagctgctggaggtagtagagcctgaagtcttgcaggactcactggatagatgttattcaactccttccagttgtcttgaacagcctgactcctgccagccctatggaagttccttttatgcattggaggaaaaacatgttggcttttctcttgacgtgggagaaattgaaaagaaggggaaggggaagaaaagaaggggaagaagatcaaagaaggaaagaagaaggggaagaaaagaaggggaagaagatcaaaacccaccatgccccaggctcagcagggagctgctggatgagaaagggcctgaagtcttgcaggactcactggatagatgttattcaactccttcaggttgtcttgaactgactgactcatgccagccctacagaagtgccttttacgtattggagcaacagcgtgttggcttggctgttgacatggatgaaattgaaaagtaccaagaagtggaagaagaccaagacccatcatgccccaggctcagcagggagctgctggatgagaaagagcctgaagtcttgcaggactcactggatagatgttattcgactccttcaggttatcttgaactgcctgacttaggccagccctacagcagtgctgtttactcattggaggaacagtaccttggcttggctcttgacgtggacagaactaaaaaggaccaagaagaggaagaagaccaaggcccaccatgccccaggctcagcagggagctgctggaggtagtagagcctgaagtcttgcaggactcactggatagatgttattcaactccttccagttgtcttgaacagcctgactcctgccagccctatggaagttccttttatgcattggaggaaaaacatgttggcttttctcttgacgtgggagaaattgaaaagaaggggaaggggaagaaaagaaggggaagaagatcaaagaagaaaagaagaaggggaagaaaagaaggggaagaagatcaaaacccaccatgccccaggctcaacggcgtgctgatggaagtggaagagcctgaagtcttacaggactcactggatggatgttattctactccgtcaatgtactttgaactacctgactcattccagcactacagaagtgtgttttactcatttgaggaacagcacatcagcttcgccctttacgtggacaataggttttttactttgacggtgacaagtctccacctggtgttccagatgggagtcatattcccacaataaacagcccttactaagccgagagatgtcattcctgcaggcaggacctataggcacgtgaagatttgaatgaaagtacagttccatttggaagcccagacataggatgggtcagtgggcatggctgtattcctattctcaaaccatgccagtggcaacctgtgctcagtctgaagacaatggacccacgttaggtgtgacacgttcacataactgtgcagcacatgccgggagtgatcagtcagacattttaatttgaaccacgtatctctgggtagctacaaaattcctcagggatttcattttgcaggcatgtctctgagcttctatacctgctcaaggtcattgtcatctttgtgtttagctcatccaaaggtgttaccctggtttcaatgaacctaacctcattctttgtgtcttcagtgttggcttgttttagctgatccatctgtaacacaggagggatccttggttgaggattgtatttcagaaccaccaactgctcttgacaattgttaacccgctaggctcctttggttagagaagccacagtccttcagcctccaattggtgtcagtacttaggaagaccacagctagatggacaaacagcattgggaggccttagccctgctcttctcaattccatcctgtagagaacaggagtcaggagccgctggcaggagacagcatgtcacccaggactctgccggtgcagaatatgaacaatgccatgttcttgcagaaaacgcttagcctgagtttcataggaggtaatcaccagacaactgcagaatgtagaacactgagcaggacaactgacctgtctccttcacatagtccatatcaccacaaatcacacaacaaaaaggagaagagatattttgggttcaaaaaacgtaaaaagataatgtagctgcatttctttagttattttgaaccccaaatatttcctcatctttttgttgttgtcatggatggtggtgacatggacttgtttatagaggacaggtcagctgtctggctcaatgatctacattctgaagttgtctgaaaatgtcttcatgattaaattcagcctaaacgttttgccgggaacactgcagagacaatgctgtgagtttccaacctcagcccatctgcgggcagagaaggtctagtttgtccatcaccattatgatatcaggactggttacttggttaaggaggggtctaggagatctgtcccttttagagacaccttacttataatgaagaagtacttgggaaagcggttttcaagagtataaatatcctgtattctaatgatcatcctctaaacattttatcatttattaatcctccctgcctgtgtctattattatattcatatctctacactgcaaattttgggtctcaatttttactgtgcctttgtttttactagtgtctgctgttgcaaaaagaagaagacattctctgcctgagttttaatttttgtccaaagttaattttaatctatacaattaaaaccttttgcctatcactctggacttctggattgttttttacattcagtgttataatatttgattatgctgattggttttggtgggtactgatgcgaattaataaaaacatttcatttcca

SEQ ID NO: 19928 - DNA, 950 bp, Homo sapiens
  source 1..950: mol_type = unassigned DNA
aaagtgctgtggggagtgatcacatttttcacaacagtaaggtaagaatttcagttactgacatccctcagtcctgattaaacctatttgatttcaccagtttttaacccatcatatgtttgggtttcttctccccagtccctgactccacctcttctgccacaaacgtcagcatggtggtatcagccggcccttggtccagcgagaaggcagagatgaacattctagaaatcaacgagaaattgcgcccccagttggcagagaacaaacagcagttcggaaacctcaaagagagatgttttgtaactcaactggccggcttcctggccaaccagcagaagaaatacaactatgaagagtgtaaagacctcataaaatttatgctgaggaatgagcgacagttcaaggaggagaagcttgcagagcagctcaagcaagctgaggagctcaggcaatataaagtcctggttcactctcaggaacgagagctgacccagttaagggagaagttacgggaagggagagatgcctcccgctcattgaatgagcatctccaggccctcctcactctggatgagccggacaagtcccaggggcaggacctccaagaacagctggctgaggggtgtagactggcacagcaccttgtccaaaagctcagcccagaaaatgacgaagatgaggatgaagatgttcaagttgaggaggctgagaaagtgcagaaatcatctgcccccagggaggtgcagaagactgaagagagcaaagtccctgaggactcactggaggaatgtgccatcacttgttcaaatagccacggcccttgtgactccaaccagcctcacaagaacatcaaaatcacatttgaggaagacgaagtcaactcaactctggttgtagacagagaatcctctcatgatgaatgtcaggatgctctaaacattctccca

SEQ ID NO: 19929 - DNA, 680 bp, Homo sapiens
  source 1..680: mol_type = unassigned DNA
ctcagcagggagctgctggaggtagtagagcctgaagtcttgcaggactcactggatagatgttattcaactccttccagttgtcttgaacagcctgactcctgccagccctatggaagttccttttatgcattggaggaaaaacatgttggcttttctctcgacgtgggagaaattgaaaagaaggggaaggggaagaaaagaaggggaagaagatcaaagaaggaaagaagaaggggaagaaaagaaggggaagaagatcaaaccccaccatgccccaggctcagcagggagctgctggatgagaaagggcctgaagtcttgcaggactcactggatagatgttattcaactccttcaggttgtcttgaactgactgactcatgccagccctacagaagtgccttttacgtattggagcaacagcgtgttggcttggctgttgacatggatgaaattgaaaagtaccaagaagtggaagaagaccaagacccatcatgccccaggctcagcagggagctgctggatgagaaagagcctgaagtcttgcaggactcactggatagatgttattcgactccttcaggttatcttgaactgcctgacttaggccagccctacagcagtgctgtttactcattggaggaacagtaccttggcttggctcttgacgtggacag

SEQ ID NO: 19930 - DNA, 904 bp, Homo sapiens
  source 1..904: mol_type = unassigned DNA
ctcagcagggagctgctggaggtagtagagcctgaagtcttgcaggactcactggatagatgttattcaactccttccagttgtcttgaacagcctgactcctgccagccctatggaagttccttttatgcattggaggaaaaacatgttggcttttctctcgacgtgggagaaattgaaaagaaggggaaggggaagaaaagaaggggaagaagatcaaagaaggaaagaagaaggggaagaaaagaaggggaagaagatcaaaacccaccatgccccaggctcagcagggagctgctggatgagaaagggcctgaagtcttgcaggactcactggatagatgttattcaactccttcaggttgtcttgaactgactgactcatgccagccctacagaagtgccttttacgtattggagcaacagcgtgttggcttggctgttgacatggatgaaattgaaaagtaccaagaagtggaagaagaccaagacccatcatgccccaggctcagcagggagctgctggatgagaaagagcctgaagtcttgcaggactcactggatagatgttattcgactccttcaggttatcttgaactgcctgacttaggccagccctacagcagtgctgtttactcattggaggaacagtaccttggcttggctcttgacgtggacagaactaaaaaggaccaagaagaggaagaagaccaaggcccaccatgccccaggctcagcagggagctgctggaggtagtagagcctgaagtcttgcaggactcactggatagatgttattcaactccttccagttgtcttgaacagcctgactcctgccagccctatggaagttccttttatgcattggaggaaaaacatgttggcttttctctcgacgtgggag

SEQ ID NO: 19931 - DNA, 617 bp, Homo sapiens
  source 1..617: mol_type = unassigned DNA
gttattcgactccttcaggttatcttgaactgcctgacttaggccagccctacagcagtgctgtttactcattggaggaacagtaccttggcttggctcttgacgtggacagaactaaaaaggaccaagaagaggaagaagaccaaggcccaccatgccccaggctcagcagggagctgctggaggtagtagagcctgaagtcttgcaggactcactggatagatgttattcaactccttccagttgtcttgaacagcctgactcctgccagccctatggaagttccttttatgcattggaggaaaaacatgttggcttttctcttgacgtgggagaaattgaaaagaaggggaaggggaagaaaagaaggggaagaagatcaaagaaggaaagaagaaggggaagaaaagaaggggaagaagatcaaaacccaccatgccccaggctcagcagggagctgctggatgagaaagggcctgaagtcttgcaggactcactggatagaagttattcaactccttcaggttgtcttgaactgactgactcatgccagccctacagaagtgccttttacgtattggagcaacagcgtgttggcttggctgttgacatggat

SEQ ID NO: 19932 - DNA, 617 bp, Homo sapiens
  source 1..617: mol_type = unassigned DNA
gttattcgactccttcaggttatcttgaactgcctgacttaggccagccctacagcagtgctgtttactcattggaggaacagtaccttggcttggctcttgacgtggacagaactaaaaaggaccaagaagaggaagaagaccaaggcccaccatgccccaggctcagcagggagctgctggaggtagtagagcctgaagtcttgcaggactcactggatagatgttattcaactccttccagttgtcttgaacagcctgactcctgccagccctatggaagttccttttatgcattggaggaaaaacatgttggcttttctctcgacgtgggagaaattgaaaagaaggggaaggggaagaaaagaaggggaagaagatcaaagaaggaaagaagaaggggaagaaaagaaggggaagaagatcaaaacccaccatgccccaggctcagcagggagctgctggatgagaaagggcctgaagtcttgcaggactcactggatagatgttattcaactccttcaggttgtcttgaactgactgactcatgccagccctacagaagtgccttttacgtattggagcaacagcgtgttggcttggctgttgacatggat

SEQ ID NO: 19933 - DNA, 3837 bp, Homo sapiens
  source 1..3837: mol_type = unassigned DNA
gacggttacctggcacgctggccacaatctacctcactcttatcagagtctgagctactggcagtgctttcagctctgagttgaggcaccttgaaccttgtttttgtggtgaaggatcctaaagtgctgtggggagtgatcacatttttcacaacatccctggccccacctcttctgccacaaacgtcagcatggtggtatcagccggccctttgtccagcgagaaggcagagatgaacattctagaaatcaatgagaaattgcacccccagctggcagagaagaaacagcagttcagaaacctcaaagagagatgttttgtaactcaactggccggcttcctggccaaccagcagaagaaatacaaatatgaagagtgcaaagacctcataaaatctatgctgaggaatgagcgacagttcaaggaggagaagcttgcagagcagctcaagcaagctgaggagctcaggcaatataaagtcctggttcacgctcaggaacgagagctgacccagttaagggagaagttgcgggaagggagagatgcctcccgctcattgaatgagcatctccaggccctccttactccggatgagccggacaagtcccaggggcaggacctccaagaacagctggctgaggggtgtagactggcacagcaccttgtccaaaagctcagcccagaaaatgacaacgatgacgatgaagatgttcaagttgagttggctgagaaagtgcagaaatcgtctgcccccagggagatgcagaaggctgaagaaaaggaagtccctgaggactcacaggaggaatgtgccatcacttattcaaatagccatggcccttatgactccaaccagccacataggaaaaccaaaatcacatttgaggaagacaaagtcgactcaactctgattggctcatcctctcatgttgaatgggaggatgctgtacacattattccagaaaatgaaagtgatgatgaggaagaggaagaaaaagggccagtgtctcccaggaatctgcaggagtctgaagaggaggaagtcccccaggagtcctgggatgaaggttattcgactctctcaattcctcctgaaatgttggcctcgtaccagtcttacagcagcacatttcactcattagaggaacagcaagtctgcatggctgttgacataggcagacatcggtgggatcaagtgaaaaaggaggaccaagaggcaacaggtcccaggctcagcagggagctgctggatgagaaagggcctgaagtcttgcaggactcactggatagatgttattcaactccttcaggttgtcttgaactgactgactcatgccagccctacagaagtgccttttacgtattggagcaacagcgtgttggcttggctgttgacatggatgaaattgaaaagtaccaagaagtggaagaagaccaagacccatcatgccccaggctcagcagggagctgctggatgagaaagagcctgaagtcttgcaggactcactggatagatgttattcgactccttcaggttatcttgaactgcctgacttaggccagccctacagcagtgctgtttactcattggaggaacagtaccttggcttggctcttgacgtggacagaactaaaaaggaccaagaagaggaagaagaccaaggcccaccatgccccaggctcagcagggagctgctggaggtagtagagcctgaagtcttgcaggactcactggatagatgttattcaactccttccagttgtcttgaacagcctgactcctgccagccctatggaagttccttttatgcattggaggaaaaacatgttggcttttctcttgacgtgggagaaattgaaaagaaggggaaggggaagaaaagaaggggaagaagatcaaagaagaaaagaagaaggggaagaaaagaaggggaagaagatcaaaacccaccatgccccaggctcaacggcgtgctgatggaagtggaagagcctgaagtcttacaggactcactggatggatgttattctactccgtcaatgtactttgaactacctgactcattccagcactacagaagtgtgttttactcatttgaggaacagcacatcagcttcgccctttacgtggacaataggttttttactttgacggtgacaagtctccacctggtgttccagatgggagtcatattcccacaataaacagcccttactaagccgagagatgtcattcctgcaggcaggacctataggcacgtgaagatttgaatgaaagtacagttccatttggaagcccagacataggatgggtcagtgggcatggctgtattcctattctcaaaccatgccagtggcaacctgtgctcagtctgaagacaatggacccacgttaggtgtgacacgttcacataactgtgcagcacatgccgggagtgatcagtcagacattttaatttgaaccacgtatctctgggtagctacaaaattcctcagggatttcattttgcaggcatgtctctgagcttctatacctgctcaaggtcattgtcatctttgtgtttagctcatccaaaggtgttaccctggtttcaatgaacctaacctcattctttgtgtcttcagtgttggcttgttttagctgatccatctgtaacacaggagggatccttggttgaggattgtatttcagaaccaccaactgctcttgacaattgttaacccgctaggctcctttggttagagaagccacagtccttcagcctccaattggtgtcagtacttaggaagaccacagctagatggacaaacagcattgggaggccttagccctgctcttctcaattccatcctgtagagaacaggagtcaggagccgctggcaggagacagcatgtcacccaggactctgccggtgcagaatatgaacaatgccatgttcttgcagaaaacgcttagcctgagtttcataggaggtaatcaccagacaactgcagaatgtagaacactgagcaggacaactgacctgtctccttcacatagtccatatcaccacaaatcacacaacaaaaaggagaagagatattttgggttcaaaaaacgtaaaaagataatgtagctgcatttctttagttattttgaaccccaaatatttcctcatctttttgttgttgtcatggatggtggtgacatggacttgtttatagaggacaggtcagctgtctggctcaatgatctacattctgaagttgtctgaaaatgtcttcatgattaaattcagcctaaacgttttgccgggaacactgcagagacaatgctgtgagtttccaacctcagcccatctgcgggcagagaaggtctagtttgtccatcaccattatgatatcaggactggttacttggttaaggaggggtctaggagatctgtcccttttagagacaccttacttataatgaagaagtacttgggaaagcggttttcaagagtataaatatcctgtattctaatgatcatcctctaaacattttatcatttattaatcctccctgcctgtgtctattattatattcatatctctacactgcaaattttgggtctcaatttttactgtgcctttgtttttactagtgtctgctgttgcaaaaagaagaagacattctctgcctgagttttaatttttgtccaaagttaattttaatctatacaattaaaaccttttgcctatcactctggacttctggattgttttttacattcagtgttataatatttgattatgctgattggttttggtgggtactgatgcgaattaataaaaacatttcatttccatgtt

SEQ ID NO: 19934 - DNA, 471 bp, Homo sapiens
  source 1..471: mol_type = unassigned DNA
ctcagcagggagctgctggaggtagtagagcctgaagtcttgcaggactcactggatagatgttattcaactccttccagttgtcttgaacagcctgactcctgccagccctatggaagttccttttatgcattggaggaaaaacatgttggcttttctcttgacgtgggagaaattgaaaagaaggggaaggggaagaaaagaaggggaagaagatcaaagaaggaaagaagaaggggaagaaaagaaggggaagaagatcaaaacccaccatgccccaggctcagcagggagctgctggatgagaaagggcctgaagtcttgcaggactcactggatagatgttattcaactccttcaggttgtcttgaactgactgactcatgccagccctacagaagtgccttttacgtattggagcaacagcgtgttggcttggctgttgacatggatggtgagtacctttctatg

SEQ ID NO: 19935 - DNA, 1485 bp, Homo sapiens
  source 1..1485: mol_type = unassigned DNA
ctctcacattgtcctgttctcatgctgaggagcctgagatccctgtgtggggattagacagtggactgttatgggtgtaggtgaattggcttattttgtctgtccctgtctgaatgtattgcaggaactaaaaaggaccaagaagaggaagaagaccaaggcccaccatgccccaggtaactgagcaattgtgaacagctacttctgtgttgacatctggagactcctggttcagggaaaacagagcgggctgacattatcgattacatcttttccagcaagcctgaattattcctactaacattgctgttggttttcattgcagtagatatttaggtttccatttcttcctccccttatcatttactaacctactgtaggtggaccagacttcaaaaactgtattctcatggcgactgcatggaaacttgagcacattttatggaaaattattgagcacagtcttttcatgatccctgtatgctgtgtgtcctgagggcactaactcagagtgtcctgttactccctcatcagtgtgtcacctggacaattcactgagctcgttctctctctctgtgtgtgtgtgtgtgtgtgtgtgtgtgtgtgtgtctatctgtctttctctttcattcttttccatttggccctgttctgtcccaacatgaaggcaataatttgttacctcattaatggatctatccttttagttttttaaccacttccctatgctacccatgaaacctagttggggctctgttgtgtctgatttcccctggcttattctttactttttcctccttttccaggctcagcagggagctgctggaggtagtagagcctgaagtcttgcaggactcactggatagatgttattcaactccttccagttgtcttgaacagcctgactcctgccagccctatggaagttccttttatgcattggaggaaaaacatgttggcttttctcttgacgtgggagaaattgaaaagaaggggaaggggaagaaaagaaggggaagaagatcaaagaaggaaagaagaaggggaagaaaagaaggggaagaagatcaaaacccaccatgccccaggctcagcagggagctgctggatgagaaagggcctgaagtcttgcaggactcactggatagatgttattcaactccttcaggttgtcttgaactgactgactcatgccagccctacagaagtgccttttacgtattggagcaacagcgtgttggcttggctgttgacatggatgaaattgaaaagtaccaagaagtggaagaagaccaagacccatcatgccccaggctcagcagggagctgctggatgagaaagagcctgaagtcttgcaggactcactggatagatgttattcgactccttcaggttatcttgaactgcctgacttaggccagccctacagcagtgctgtttactcattggaggaacagtaccttggcttggctcttgacgtggac

SEQ ID NO: 19936 - DNA, 1447 bp, Homo sapiens
  source 1..1447: mol_type = unassigned DNA
atcaaaacccaccatgccccaggctcagcagggagctgctggatgagaaagggcctgaagtcttgcaggactcactggatagatgttattcaactccttcaggttgtcttgaactgactgactcatgccagccctacagaagtgccttttacgtattggagcaacagcgtgttggcttggctgttgacatggatgaaattgaaaagtaccaagaagtggaagaagaccaagacccatcatgccccaggctcagcagggagctgctggatgagaaagagcctgaagtcttgcaggactcactggatagatgttattcgactccttcaggttatcttgaactgcctgacttaggccagccctacagcagtgctgtttactcattggaggaacagtaccttggcttggctcttgacgtggacagaactaaaaaggaccaagaagaggaagaagaccaaggcccaccatgccccaggctcagcagggagctgctggaggtagtagagcctgaagtcttgcaggactcactggatagatgttattcaactccttccagttgtcttgaacagcctgactcctgccagccctatggaagttccttttatgcattggaggaaaaacatgttggcttttctcttgacgtgggagaaattgaaaagaaggggaaggggaagaaaagaaggggaagaagatcaaagaagaaaagaagaaggggaagaaaagaaggggaagaagatcaaaacccaccatgccccaggctcaacggcgtgctgatggaagtggaagagcctgaagtcttacaggactcactggatggatgttattctactccgtcaatgtactttgaactacctgactcattccagcactacagaagtgtgttttactcatttgaggaacagcacatcagcttcgccctttacgtggacaataggttttttactttgacggtgacaagtctccacctggtgttccagatgggagtcatattcccacaataaacagcccttactaagccgagagatgtcattcctgcaggcaggacctataggcacgtgaagatttgaatgaaagtacagttccatttggaagcccagacataggatgggtcagtgggcatggctgtattcctattctcaaaccatgccagtggcaacctgtgctcagtctgaagacaatggacccacgttaggtgtgacacgttcacataactgtgcagcacatgccgggagtgatcagtcagacattttaatttgaaccacgtatctctgggtagctacaaaattcctcagggatttcattttgcaggcatgtctctgagcttctatacctgctcaaggtcattgtcatctttgtgtttagctcatccaaaggtgttaccctggtttcaatgaacctaacctcattctttgtgtcttcagtgttggcttgttttagctgatccatctgt

SEQ ID NO: 19937 - DNA, 2606 bp, Homo sapiens
  source 1..2606: mol_type = unassigned DNA
ctctcacattgtcctgttctcatgctgaggagcctgagatccctgtgtggggattagacagtggactgttatgggtgtaggtgaattggcttattttgtctgtccctgtctgaatgtattgcaggaactaaaaaggaccaagaagaggaagaagaccaaggcccaccatgccccaggtaactgagcaattgtgaacagctacttctgtgttgacatctggagactcctggttcagggaaaacagagcgggctgacattatcgattacatcttttccagcaagcctgaattattcctactaacattgctgttggttttcattgcagtagatatttaggtttccatttcttcctccccttatcatttactaacctactgtaggtggaccagacttcaaaaactgtattctcatggcgactgcatggaaacttgagcacattttatggaaaattattgagcacagtcttttcatgatccctgtatgctgtgtgtcctgagggcactaactcagagtgtcctgttactccctcatcagtgtgtcacctggacaattcactgagctcgttctctctctgtgtgtgtgtgtgtgtgtgtgtgtgtgtgtgtgtgtctatctgtctttctctttcattcttttccatttggccctgttctgtcccaacatgaaggcaataatttgttacctcattaatggatctatccttttagttttttaaccacttccctatgctacccatgaaacctagttggggctctgttgtgtctgatttcccctggcttattctttactttttcctccttttccaggctcagcagggagctgctggaggtagtagagcctgaagtcttgcaggactcactggatagatgttattcaactccttccagttgtcttgaacagcctgactcctgccagccctatggaagttccttttatgcattggaggaaaaacatgttggcttttctctcgacgtgggagaaattgaaaagaaggggaaggggaagaaaagaaggggaagaagatcaaagaaggaaagaagaaggggaagaaaagaaggggaagaagatcaaaacccaccatgccccaggctcagcagggagctgctggatgagaaagggcctgaagtcttgcaggactcactggatagaagttattcaactccttcaggttgtcttgaactgactgactcatgccagccctacagaagtgccttttacgtattggagcaacagcgtgttggcttggctgttgacatggatgaaattgaaaagtaccaagaagtggaagaagaccaagacccatcatgccccaggtaactttgagcaattatggatgcttaattctgtgttgacacctggagatgccaggtccagggaaaacaagagtgtgttcaatttcatgttttcaacgaaggttgaattactcctcctgatattgctgttggttttcattgcagtagatgtttaggtttccatttcttcctccccttatcatttactaacttactataggttgaccatacctcaaaggctgtatggcaactgcatggaatcttgagcaagtttatggaaaattattgagcccactcttttcatgatcactgttcgctgtgtgtcccgagggcactaactcagagtgtcctttgaccccttcatcagtgtgtcacccggccaactcgctgaacttactttctcctctctctctctctccctctccctgtctttctctttcattcttttctacctggccctggtctatcccaacataaaggcaataattcattacctcattaatggatctgtcctttttctttttaaacagttccttatgttagccatgaaatctagctggggctgtgtggtttctgattccccctggcttattctttactttttcctacttttccaggctcagcagggagctgctggatgagaaagagcctgaagtcttgcaggactcactggatagatgttattcgactccttcaggttatcttgaactgcctgacttaggccagccctacagcagtgctgtttactcattggaggaacagtaccttggcttggctcttgacgtggacagaactaaaaaggaccaagaagaggaagaagaccaaggcccaccatgccccaggctcagcagggagctgctggaggtagtagagcctgaagtcttgcaggactcactggatagatgttattcaactccttccagttgtcttgaacagcctgactcctgccagccctatggaagttccttttatgcattggaggaaaaacatgttggcttttctcttgacgtgggagaaattgaaaagaaggggaaggggaagaaaagaaggggaagaagatcaaagaaggaaagaagaaggggaagaaaagaaggggaagaagatcaaaacccaccatgccccaggctcagcagggagctgctggatgagaaagggcctgaagtcttgcaggactcactggatagatgttattcaactccttcaggttgtcttgaactgactgactcatgccagccctacagaagtgccttttacgtattggagcaacagcgtgttggcttggctgttgacatggatggtgagtacctttctatg

SEQ ID NO: 19938 - DNA, 2045 bp, Homo sapiens
  source 1..2045: mol_type = unassigned DNA
ctcagcagggagctgctggaggtagtagagcctgaagtcttgcaggactcactggatagatgttattcaactccttccagttgtcttgaacagcctgactcctgccagccctatggaagttccttttatgcattggaggaaaaacatgttggcttttctcttgacgtgggagaaattgaaaagaaggggaaggggaagaaaagaaggggaagaagatcaaagaagaaaagaagaaggggaagaaaagaaggggaagaagatcaaaacccaccatgccccaggctcaacggcgtgctgatggaagtggaagagcctgaagtcttacaggactcactggatggatgttattctactccgtcaatgtactttgaactacctgactcattccagcactacagaagtgtgttttactcatttgaggaacagcacatcagcttcgccctttacgtggacaataggttttttactttgacggtgacaagtctccacctggtgttccagatgggagtcatattcccacaataaacagcccttactaagccgagagatgtcattcctgcaggcaggacctataggcacgtgaagatttgaatgaaagtacagttccatttggaagcccagacataggatgggtcagtgggcatggctgtattcctattctcaaaccatgccagtggcaacctgtgctcagtctgaagacaatggacccacgttaggtgtgacacgttcacataactgtgcagcacatgccgggagtgatcagtcagacattttaatttgaaccacgtatctctgggtagctacaaaattcctcagggatttcattttgcaggcatgtctctgagcttctatacctgctcaaggtcattgtcatctttgtgtttagctcatccaaaggtgttaccctggtttcaatgaacctaacctcattctttgtgtcttcagtgttggcttgttttagctgatccatctgtaacacaggagggatccttggttgaggattgtatttcagaaccaccaactgctcttgacaattgttaacccgctaggctcctttggttagagaagccacagtccttcagcctccaattggtgtcagtacttaggaagaccacagctagatggacaaacagcattgggaggccttagccctgctcttctcaattccatcctgtagagaacaggagtcaggagccgctggcaggagacagcatgtcacccaggactctgccggtgcagaatatgaacaatgccatgttcttgcagaaaacgcttagcctgagtttcataggaggtaatcaccagacaactgcagaatgtagaacactgagcaggacaactgacctgtctccttcacatagtccatatcaccacaaatcacacaacaaaaaggagaagagatattttgggttcaaaaaacgtaaaaagataatgtagctgcatttctttagttattttgaaccccaaatatttcctcatctttttgttgttgtcatggatggtggtgacatggacttgtttatagaggacaggtcagctgtctggctcaatgatctacattctgaagttgtctgaaaatgtcttcatgattaaattcagcctaaacgttttgccgggaacactgcagagacaatgctgtgagtttccaacctcagcccatctgcgggcagagaaggtctagtttgtccatcaccattatgatatcaggactggttacttggttaaggaggggtctaggagatctgtcccttttagagacaccttacttataatgaagaagtacttgggaaagcggttttcaagagtataaatatcctgtattctaatgatcatcctctaaacattttatcatttattaatcctccctgcctgtgtctattattatattcatatctctacactgcaaattttgggtctcaatttttactgtgcctttgtttttactagtgtctgctgttgcaaaaagaagaagacattctctgcctgagttttaatttttgtccaaagttaattttaatctatacaattaaaaccttttgcctatc

SEQ ID NO: 19939 - DNA, 617 bp, Homo sapiens; identical to SEQ ID NO: 19931
  source 1..617: mol_type = unassigned DNA

SEQ ID NO: 19940 - DNA, 1539 bp, Homo sapiens
  source 1..1539: mol_type = unassigned DNA
attttctgtgtcttctaagttcgcttgttttagctcatctgtccatcatgttcctggtatgttttctagataaatggctgacttttcacccacaaaagccataatagctgatgcttctgtgtagaaccaagtttcattttgactcaagagctggtacattgcaccccttcatcaaatctctgtgtccacaatctcataaactatcaaattctgggtatttgatgagagaaagcttaatattgaagtgtctctcctatgaggtgttagaactatttgcctacaatttattggggaaaaaatttctcatttgtgtacagaagcctaggacagagcacatagggaagataacattccaacacaggggaattttgcccaaggctcatgaaagaacccaagccagttttctcaagacttgacctcaggcctactggaatatttctctcaaagtctcctgttctcacactgacaagactgatgtccctgtgttaggattggacagaggaatgtttctgtgtgcaaggaagaactgcttaatgtaagagggcccatctgaatttatttgcaggacatcggtgggatcaagtgaaaaaggaggaccaagaggcaacaggtcccaggctcagcagggagctgctggatgagaaagggcctgaagtcttgcaggactcactggatagatgttattcaactccttcaggttgtcttgaactgactgactcatgccagccctacagaagtgccttttacgtattggagcaacagcgtattggcttggctgttgacatggatgaaattgaaaagtaccaagaagtggaagaagaccaagacccatcatgccccaggctcagcagggagctgctggatgagaaagagcctgaagtcttgcaggactcactggatagatgttattcgactccttcaggttatcttgaactgcctgacttaggccagccctacagcagtgctgtttactcattggaggaacagtaccttggcttggctcttgacgtggacagaactaaaaaggaccaagaagaggaagaagaccaaggcccaccatgccccaggctcagcagggagctgctggaggtagtagagcctgaagtcttgcaggactcactggatagatgttattcaactccttccagttgtcttgaacagcctgactcctgccagccctatggaagttccttttatgcattggaggaaaaacatgttggcttttctcttgacgtgggagaaattgaaaagaaggggaaggggaagaaaagaaggggaagaagatcaaagaaggaaagaagaaggggaagaaaagaaggggaagaagatcaaaacccaccatgccccaggctcagcagggagctgctggatgagaaagggcctgaagtcttgcaggactcactggatagatgttattcaactccttcaggttgtcttgaactgactgactcatgccagccctacagaagtgccttttacgtattggagcaacagcgtgttggcttggctgttgacatggatggtgagtacctttctatg

SEQ ID NO: 19941 - DNA, 4401 bp, Homo sapiens
  source 1..4401: mol_type = unassigned DNA
acaggcgaggggttgggtggcggttgagacagcggcggtactgggatgggtaggtgaggatcccgagactgagtgagcttctgcgcgcggtgcttttgggaacgcgggactggcaacctgcggcgccaggagctgggccgaggcgcggcggcgcggctgcgggccgccgtctggatgggaagttacggcgaagtccacccagcgtttctcaggcaatctgaaggcaaatcctgtttagacccaggcgaaggttcctggtgacccaggctctcaccagccaattgtcccttgccgtcctcctgagggtatctggagcttcagtgctgtgtgctcttggcctccacactggggatgccactgactcccactgtccagggcttccagtggactctccgaggccctgatgtagaaacttccccattcggtgcaccaagagcagcctcacatggtgtgggccgacatcaagagctgcgagatccaacagggagccttgggaggagcccgaatcactgatggaatcggacagtgcatggagatggttcagcaggacgaggtgctgaaaactcacccctgtgtgacctcaagtaagccacgtaactctgtgaacctgcagttttatcatttttaaaataaagaaacatgacagattttcattatgacacagaatgtcaggtctcccagatgccagaaaatacatttacttaaagccgttgatacgtcttaaagcggtttccttacagtgtcattggaggacagcgtggagtgcagagagacatgctttgaaatgggattgatccagtcctccttccttcactaccacatgaatgctgggcagcccaggatcacactcactgcaccctcaactcagaccgttacctggcacactggcctcactcttgtcggagactgagctattggcagtgccttcagctctgagctcaggcacctcgaacattgtttttgtcgttaaggatcctaaagtgctgcggggactgatcacatttttctcaacatccctggccccacctcttctgccacaaacgtcagcatggtggtatctgccggcccttggtccggtgagaaggcagagatgaacattctagaaatcaacaagaaatcgcgcccccagctggcagagaacaaacagcagttcagaaacctcaaacagaaatgtcttgtaactcaagtggcctacttcctggccaaccggcaaaataattacgactatgaagactgcaaagacctcataaaatctatgctgagggatgagcggctgctcacagaagagaagcttgcagaggagctcgggcaagctgaggagctcaggcaatataaagtcctggttcactctcaggaacgagagctgacccagttaagggagaagttacaggaagggagagatgcctcccgctcattgaatcagcatctccaggccctcctcactccggatgagccggacaactcccagggacgggacctccgagaacagctggctgagggatgtaggctggcacagcacctcgtccaaaagctcagcccagaaaatgatgacgatgaggatgaagatgttaaagttgaggaggctgagaaagtacaggaattatatgcccccagggaggtgcagaaggctgaagaaaaggaagtccctgaggactcactggaggagtgtgccatcacttgttcaaatagccaccacccttgtgagtccaaccagccttacgggaacaccagaatcacatttgaggaagaccaagtcgactcaactctcattgactcatcctctcatgatgaatggttggatgctgtatgcattatcccagaaaatgaaagtgatcatgagcaagaggaagaaaaagggccagtgtctcccaggaatctgcaggagtctgaagaggaggaagccccccaggagtcctgggatgaaggtgattggactctctcaattcctcctgacatgtctgcctcataccagtctgacaggagcacctttcactcagtagaggaacagcaagtcggcttggctcttgacataggcagacattggtgtgatcaagtgaaaaaggaggaccaagaggccacaagtcccaggctcagcagggagctgctggatgagaaagagcctgaagtcttgcaggactcactggatagattttattcaactccttttgagtacctggaactgcctgacttatgccagccctacagaagtgacttttactcattgcaggaacaacaccttggcttggctcttgacttggacagaatgaaaaaggaccaagaagaggaagaagaccaaggcccaccatgccccaggctcagcagagagctgccggaggtagtagagcctgaggacttgcaggactcactggatagatggtattcgactcctttcagttatccagaactgcctgattcatgccagccctacggaagttgcttttactcattggaggaagaacacgttggcttttctcttgacgtggatgaaattgaaaagtaccaagaaggggaagaagatcaaaagccaccatgccccaggctcaacgaggtgctgatggaagcagaagagcctgaagtcttgcaggactcactggatagatgttattcgactacttcaacttactttcaactacatgcctcattccagcagtatagaagtgccttttactcatttgaggaacaggacgtcagcttggcccttgacgtggacaataggttttttactttgacagtgataaggcaccacctggccttccagatgggagtcatattcccacactaagcagcccttactaagctgagagatgtcattgctgcaggcaggacgtataggcacatgtaggtttgaatgaaactgtagttccctttggaagcccagtcataggatgggaaagtgggcatggctctattcctattctcagaccatgccagtggccacctgtgctcagtctgaagacgttggacccaagttaggtgtgacacgttcacacgactatgtagcacatgccgggagtgatctgccagacattctaatttgaaccagatatctctgggtagctacaaagttcctcaggggtttcattttgcaggcatgtctctgagcttctatacctgctcaaggtcagtgtcatctttgtgtttagctcatccaaaggtgttaccctggtttcattgaacctaaccccattctttgtatcttcagtgttggtttgttttagctgatccatctgtaacacaggagggatccttggctgaggattgtatttcagaaccactgactgctcttgacagttgttaacccactaggctcctttgagtagagaagccatagtccttcagcctccaattgatatcaatacttaggaagaccacagctagacggacaaacagcattgggaggccttagtcctgctcctttcaattccatcctgtaaagaacaggagtcaggagccgctggcaagagacagcatgtcacctgggactctgccagtgcagaatatgaacaatgccatgttcttgcagaaaatgcttagcctgagtttcataggaggtaatcaccagacaactgcagaatgtagaacactgagcaggacaactgacctgtctccttcacacagtccacgtcaccacgaatcacacaacaaaaaggaggagagatattttgggttcagaagaagtaaatgataatgtagctacatttctttagttattttgaaccccaaatatttcctcatctttttgttgttgtcattgattttggtgacatggacttgtttgtagaggacaggtcagctgtctggctcaatggtctacattctgaagttgtctgaaaatgtcttcatgattaaattcagcctaaacgtttcatcaagaacactacagagtcgatactgtgagtttccaacctcagcccatctgtgggcagagaaggtctagtttgtccatcagcattatcatgatatcaggactggttacttggttaaggaggggtctaggagatctgtcccttttagagacaccttacttatgatgaagtatttgggagagtggtttttcaaagtagaaatgtcctgtattccagtgatcatcctctaaacgttttatcatttattaatcatccctgcctgtgtctattattatattcatatctctacgctggaaatttgctgcctcaatgtttactgtgcctttgtttttgctagtgtgtgttgttgaaaaaaaaacattctctgcctgagttttaatttttgtccaaagttattttaatctatacaattaaaaacttttgcctatcactctggactgttggattgttttttacattcagcgttataatcttttgttatgctgattggttttggtgggtactgatgcgaattaataaaaacattttcatttcc

SEQ ID NO: 19942 - DNA, 3765 bp, Homo sapiens
  source 1..3765: mol_type = unassigned DNA
caggcgaggggttgggtggcggttgagacagcggcggtactgggatgggtaggtgaggatcccgagactgagtgagcttctgcgcgcggtgcttttgggaacgcgggactggcaacctgcggcgccaggagctgggccgaggcgcggcggcgcggctgcgggccgccgtctggatgggaagttacggcgaagtccacccagcgtttctcaggcaatctgaaggcaaatcctgtttagacccaggcgaaggttcctggtgacccaggctctcaccagccaattgtcccttgccgtcctcctgagggtatctggagcttcagtgctgtgtgctcttggcctccacactggggatgccactgactcccactgtccagggcttccagtggactctccgaggccctgatgtagaaacttccccattcggtgcaccaagagcagcctcacatggtgtgggccgacatcaagagctgcgagatccaacagtccctggccccacctcttctgccacaaacgtcagcatggtggtatctgccggcccttggtccggtgagaaggcagagatgaacattctagaaatcaacaagaaatcgcgcccccagctggcagagaacaaacagcagttcagaaacctcaaacagaaatgtcttgtaactcaagtggcctacttcctggccaaccggcaaaataattacgactatgaagactgcaaagacctcataaaatctatgctgagggatgagcggctgctcacagaagagaagcttgcagaggagctcgggcaagctgaggagctcaggcaatataaagtcctggttcactctcaggaacgagagctgacccagttaagggagaagttacaggaagggagagatgcctcccgctcattgaatcagcatctccaggccctcctcactccggatgagccggacaactcccagggacgggacctccgagaacagctggctgagggatgtaggctggcacagcacctcgtccaaaagctcagcccagaaaatgatgacgatgaggatgaagatgttaaagttgaggaggctgagaaagtacaggaattatatgcccccagggaggtgcagaaggctgaagaaaaggaagtccctgaggactcactggaggagtgtgccatcacttgttcaaatagccaccacccttgtgagtccaaccagccttacgggaacaccagaatcacatttgaggaagaccaagtcgactcaactctcattgactcatcctctcatgatgaatggttggatgctgtatgcattatcccagaaaatgaaagtgatcatgagcaagaggaagaaaaagggccagtgtctcccaggaatctgcaggagtctgaagaggaggaagccccccaggagtcctgggatgaaggtgattggactctctcaattcctcctgacatgtctgcctcataccagtctgacaggagcacctttcactcagtagaggaacagcaagtcggcttggctcttgacataggcagacattggtgtgatcaagtgaaaaaggaggaccaagaggccacaagtcccaggctcagcagggagctgctggatgagaaagagcctgaagtcttgcaggactcactggatagattttattcaactccttttgagtacctggaactgcctgacttatgccagccctacagaagtgacttttactcattgcaggaacaacaccttggcttggctcttgacttggacagaatgaaaaaggaccaagaagaggaagaagaccaaggcccaccatgccccaggctcagcagagagctgccggaggtagtagagcctgaggacttgcaggactcactggatagatggtattcgactcctttcagttatccagaactgcctgattcatgccagccctacggaagttgcttttactcattggaggaagaacacgttggcttttctcttgacgtggatgaaattgaaaagtaccaagaaggggaagaagatcaaaagccaccatgccccaggctcaacgaggtgctgatggaagcagaagagcctgaagtcttgcaggactcactggatagatgttattcgactacttcaacttactttcaactacatgcctcattccagcagtatagaagtgccttttactcatttgaggaacaggacgtcagcttggcccttgacgtggacaataggttttttactttgacagtgataaggcaccacctggccttccagatgggagtcatattcccacactaagcagcccttactaagctgagagatgtcattgctgcaggcaggacgtataggcacatgtaggtttgaatgaaactgtagttccctttggaagcccagtcataggatgggaaagtgggcatggctctattcctattctcagaccatgccagtggccacctgtgctcagtctgaagacgttggacccaagttaggtgtgacacgttcacacgactatgtagcacatgccgggagtgatctgccagacattctaatttgaaccagatatctctgggtagctacaaagttcctcaggggtttcattttgcaggcatgtctctgagcttctatacctgctcaaggtcagtgtcatctttgtgtttagctcatccaaaggtgttaccctggtttcattgaacctaaccccattctttgtatcttcagtgttggtttgttttagctgatccatctgtaacacaggagggatccttggctgaggattgtatttcagaaccactgactgctcttgacagttgttaacccactaggctcctttgagtagagaagccatagtccttcagcctccaattgatatcaatacttaggaagaccacagctagacggacaaacagcattgggaggccttagtcctgctcctttcaattccatcctgtaaagaacaggagtcaggagccgctggcaagagacagcatgtcacctgggactctgccagtgcagaatatgaacaatgccatgttcttgcagaaaatgcttagcctgagtttcataggaggtaatcaccagacaactgcagaatgtagaacactgagcaggacaactgacctgtctccttcacacagtccacgtcaccacgaatcacacaacaaaaaggaggagagatattttgggttcagaagaagtaaatgataatgtagctacatttctttagttattttgaaccccaaatatttcctcatctttttgttgttgtcattgattttggtgacatggacttgtttgtagaggacaggtcagctgtctggctcaatggtctacattctgaagttgtctgaaaatgtcttcatgattaaattcagcctaaacgtttcatcaagaacactacagagtcgatactgtgagtttccaacctcagcccatctgtgggcagagaaggtctagtttgtccatcagcattatcatgatatcaggactggttacttggttaaggaggggtctaggagatctgtcccttttagagacaccttacttatgatgaagtatttgggagagtggtttttcaaagtagaaatgtcctgtattccagtgatcatcctctaaacgttttatcatttattaatcatccctgcctgtgtctattattatattcatatctctacgctggaaatttgctgcctcaatgtttactgtgcctttgtttttgctagtgtgtgttgttgaaaaaaaaacattctctgcctgagttttaatttttgtccaaagttattttaatctatacaattaaaaacttttgcctatc

SEQ ID NO: 19943 - DNA, 3704 bp, Homo sapiens
  source 1..3704: mol_type = unassigned DNA
gacagcggcggtactgggatgggtaggtgaggatcccgagactgagtgagcttctgcgcgcggtgcttttgggaacgcgggactggcaacctgcggcgccaggagctgggccgaggcgcggcggcgcggctgcgggccgccgtctggatgggaagttacggcgaagtccacccagcgtttctcaggcaatctgaaggcaaatcctgtttagacccaggcgaaggttcctggtgacccaggctctcaccagccaattgtcccttgccgtcctcctgagggtatctggagcttcagtgctgtgtgctcttggcctccacactggggatgccactgactcccactgtccagggcttccagtggactctccgaggccctgatgtagaaacttccccattcggtgcaccaagagcagcctcacatggtgtgggccgacatcaagagctgcgagatccaacagtccctggccccacctcttctgccacaaacgtcagcatggtggtatctgccggcccttggtccggtgagaaggcagagatgaacattctagaaatcaacaagaaatcgcgcccccagctggcagagaacaaacagcagttcagaaacctcaaacagaaatgtcttgtaactcaagtggcctacttcctggccaaccggcaaaataattacgactatgaagactgcaaagacctcataaaatctatgctgagggatgagcggctgctcacagaagagaagcttgcagaggagctcgggcaagctgaggagctcaggcaatataaagtcctggttcactctcaggaacgagagctgacccagttaagggagaagttacaggaagggagagatgcctcccgctcattgaatcagcatctccaggccctcctcactccggatgagccggacaactcccagggacgggacctccgagaacagctggctgagggatgtaggctggcacagcacctcgtccaaaagctcagcccagaaaatgatgacgatgaggatgaagatgttaaagttgaggaggctgagaaagtacaggaattatatgcccccagggaggtgcagaaggctgaagaaaaggaagtccctgaggactcactggaggagtgtgccatcacttgttcaaatagccaccacccttgtgagtccaaccagccttacgggaacaccagaatcacatttgaggaagaccaagtcgactcaactctcattgactcatcctctcatgatgaatggttggatgctgtatgcattatcccagaaaatgaaagtgatcatgagcaagaggaagaaaaagggccagtgtctcccagatcatctggaaggttttgttgtctaatctctgttggttatatcttctgtcatccctgtcctgcctggctcatcaggaatctgcaggagtctgaagaggaggaagccccccaggagtcctgggatgaaggacattggtgtgatcaagtgaaaaaggaggaccaagaggccacaagtcccaggctcagcagggagctgctggatgagaaagagcctgaagtcttgcaggactcactggatagattttattcaactccttttgagtacctggaactgcctgacttatgccagccctacagaagtgacttttactcattgcaggaacaacaccttggcttggctcttgacttggacagaatgaaaaaggaccaagaagaggaagaagaccaaggcccaccatgccccaggctcagcagagagctgccggaggtagtagagcctgaggacttgcaggactcactggatagatggtattcgactcctttcagttatccagaactgcctgattcatgccagccctacggaagttgcttttactcattggaggaagaacacgttggcttttctcttgacgtggatgaaattgaaaagtaccaagaaggggaagaagatcaaaagccaccatgccccaggctcaacgaggtgctgatggaagcagaagagcctgaagtcttgcaggactcactggatagatgttattcgactacttcaacttactttcaactacatgcctcattccagcagtatagaagtgccttttactcatttgaggaacaggacgtcagcttggcccttgacgtggacaataggttttttactttgacagtgataaggcaccacctggccttccagatgggagtcatattcccacactaagcagcccttactaagctgagagatgtcattgctgcaggcaggacgtataggcacatgtaggtttgaatgaaactgtagttccctttggaagcccagtcataggatgggaaagtgggcatggctctattcctattctcagaccatgccagtggccacctgtgctcagtctgaagacgttggacccaagttaggtgtgacacgttcacacgactatgtagcacatgccgggagtgatctgccagacattctaatttgaaccagatatctctgggtagctacaaagttcctcaggggtttcattttgcaggcatgtctctgagcttctatacctgctcaaggtcagtgtcatctttgtgtttagctcatccaaaggtgttaccctggtttcattgaacctaaccccattctttgtatcttcagtgttggtttgttttagctgatccatctgtaacacaggagggatccttggctgaggattgtatttcagaaccactgactgctcttgacagttgttaacccactaggctcctttgagtagagaagccatagtccttcagcctccaattgatatcaatacttaggaagaccacagctagacggacaaacagcattgggaggccttagtcctgctcctttcaattccatcctgtaaagaacaggagtcaggagccgctggcaagagacagcatgtcacctgggactctgccagtgcagaatatgaacaatgccatgttcttgcagaaaatgcttagcctgagtttcataggaggtaatcaccagacaactgcagaatgtagaacactgagcaggacaactgacctgtctccttcacacagtccacgtcaccacgaatcacacaacaaaaaggaggagagatattttgggttcagaagaagtaaatgataatgtagctacatttctttagttattttgaaccccaaatatttcctcatctttttgttgttgtcattgattttggtgacatggacttgtttgtagaggacaggtcagctgtctggctcaatggtctacattctgaagttgtctgaaaatgtcttcatgattaaattcagcctaaacgtttcatcaagaacactacagagtcgatactgtgagtttccaacctcagcccatctgtgggcagagaaggtctagtttgtccatcagcattatcatgatatcaggactggttacttggttaaggaggggtctaggagatctgtcccttttagagacaccttacttatgatgaagtatttgggagagtggtttttcaaagtagaaatgtcctgtattccagtgatcatcctctaaacgttttatcatttattaatcatccctgcctgtgtctattattatattcatatctctacgctggaaatttgctgcctcaatgtttactgtgcctttgtttttgctagtgtgtgttgttgaaaaaaaaacattctctgcctgagttttaatttttgtccaaagttattttaatctatacaattaaaaacttttgcctatca

SEQ ID NO: 19944 - DNA, 3763 bp, Homo sapiens
  source 1..3763: mol_type = unassigned DNA
caggcgaggggttgggtggcggttgagacagcggcggtactgggatgggtaggtgaggatcccgagactgagtgagcttctgcgcgcggtgcttttgggaacgcgggactggcaacctgcggcgccaggagctgggccgaggcgcggcggcgcggctgcgggccgccgtctggatgggaagttacggcgaagtccacccagcgtttctcaggcaatctgaaggcaaatcctgtttagacccaggcgaaggttcctggtgacccaggctctcaccagccaattgtcccttgccgtcctcctgagggtatctggagcttcagtgctgtgtgctcttggcctccacactggggatgccactgactcccactgtccagggcttccagtggactctccgaggccctgatgtagaaacttccccattcggtgcaccaagagcagcctcacatggtgtgggccgacatcaagagctgcgagatccaacagtccctggccccacctcttctgccacaaacgtcagcatggtggtatctgccggcccttggtccggtgagaaggcagagatgaacattctagaaatcaacaagaaatcgcgcccccagctggcagagaacaaacagcagttcagaaacctcaaacagaaatgtcttgtaactcaagtggcctacttcctggccaaccggcaaaataattacgactatgaagactgcaaagacctcataaaatctatgctgagggatgagcggctgctcacagaagagaagcttgcagaggagctcgggcaagctgaggagctcaggcaatataaagtcctggttcactctcaggaacgagagctgacccagttaagggagaagttacaggaagggagagatgcctcccgctcattgaatcagcatctccaggccctcctcactccggatgagccggacaactcccagggacgggacctccgagaacagctggctgagggatgtaggctggcacagcacctcgtccaaaagctcagcccagaaaatgatgacgatgaggatgaagatgttaaagttgaggaggctgagaaagtacaggaattatatgcccccagggaggtgcagaaggctgaagaaaaggaagtccctgaggactcactggaggagtgtgccatcacttgttcaaatagccaccacccttgtgagtccaaccagccttacgggaacaccagaatcacatttgaggaagaccaagtcgactcaactctcattgactcatcctctcatgatgaatggttggatgctgtatgcattatcccagaaaatgaaagtgatcatgagcaagaggaagaaaaagggccagtgtctcccaggaatctgcaggagtctgaagaggaggaagccccccaggagtcctgggatgaaggtgattggactctctcaattcctcctgacatgtctgcctcataccagtctgacaggagcacctttcactcagtagaggaacagcaagtcggcttggctcttgacataggcagacattggtgtgatcaagaaaaaggaggaccaagaggccacaagtcccaggctcagcagggagctgctggatgagaaagagcctgaagtcttgcaggactcactggatagattttattcaactccttttgagtacctggaactgcctgacttatgccagccctacagaagtgacttttactcattgcaggaacaacaccttggcttggctcttgacttggacagaatgaaaaaggaccaagaagaggaagaagaccaaggcccaccatgccccaggctcagcagagagctgccggaggtagtagagcctgaggacttgcaggactcactggatagatggtattcgactcctttcagttatccagaactgcctgattcatgccagccctacggaagttgcttttactcattggaggaagaacacgttggcttttctcttgacgtggatgaaattgaaaagtaccaagaaggggaagaagatcaaaagccaccatgccccaggctcaacgaggtgctgatggaagcagaagagcctgaagtcttgcaggactcactggatagatgttattcgactacttcaacttactttcaactacatgcctcattccagcagtatagaagtgccttttactcatttgaggaacaggacgtcagcttggcccttgacgtggacaataggttttttactttgacagtgataaggcaccacctggccttccagatgggagtcatattcccacactaagcagcccttactaagctgagagatgtcattgctgcaggcaggacgtataggcacatgtaggtttgaatgaaactgtagttccctttggaagcccagtcataggatgggaaagtgggcatggctctattcctattctcagaccatgccagtggccacctgtgctcagtctgaagacgttggacccaagttaggtgtgacacgttcacacgactatgtagcacatgccgggagtgatctgccagacattctaatttgaaccagatatctctgggtagctacaaagttcctcaggggtttcattttgcaggcatgtctctgagcttctatacctgctcaaggtcagtgtcatctttgtgtttagctcatccaaaggtgttaccctggtttcattgaacctaaccccattctttgtatcttcagtgttggtttgttttagctgatccatctgtaacacaggagggatccttggctgaggattgtatttcagaaccactgactgctcttgacagttgttaacccactaggctcctttgagtagagaagccatagtccttcagcctccaattgatatcaatacttaggaagaccacagctagacggacaaacagcattgggaggccttagtcctgctcctttcaattccatcctgtaaagaacaggagtcaggagccgctggcaagagacagcatgtcacctgggactctgccagtgcagaatatgaacaatgccatgttcttgcagaaaatgcttagcctgagtttcataggaggtaatcaccagacaactgcagaatgtagaacactgagcaggacaactgacctgtctccttcacacagtccacgtcaccacgaatcacacaacaaaaaggaggagagatattttgggttcagaagaagtaaatgataatgtagctacatttctttagttattttgaaccccaaatatttcctcatctttttgttgttgtcattgattttggtgacatggacttgtttgtagaggacaggtcagctgtctggctcaatggtctacattctgaagttgtctgaaaatgtcttcatgattaaattcagcctaaacgtttcatcaagaacactacagagtcgatactgtgagtttccaacctcagcccatctgtgggcagagaaggtctagtttgtccatcagcattatcatgatatcaggactggttacttggttaaggaggggtctaggagatctgtcccttttagagacaccttacttatgatgaagtatttgggagagtggtttttcaaagtagaaatgtcctgtattccagtgatcatcctctaaacgttttatcatttattaatcatccctgcctgtgtctattattatattcatatctctacgctggaaatttgctgcctcaatgtttactgtgcctttgtttttgctagtgtgtgttgttgaaaaaaaaacattctctgcctgagttttaatttttgtccaaagttattttaatctatacaattaaaaacttttgcctatc

SEQ ID NO: 19945 - DNA, 2726 bp, Homo sapiens
  source 1..2726: mol_type = unassigned DNA
acaggcaatctgaaggcaaatcctgtttagacccaggcgaaggttcctggtgacccaggctctcaccagccaattgtcccttgccgtcctcctgagggtatctggagcttcagtgctgtgtgctcttggcctccacactggggatgccactgactcccactgtccagggcttccagtggactctccgaggccctgatgtagaaacttccccattcggtgcaccaagagcagcctcacatggtgtgggccgacatcaagagctgcgagatccaacaggtggcaagggctctgaaacagccacataaacccttgtagataaggatggtcaaataaaataatattatatctgtaaaaactcagatcttggtaagatttactagttgggaatccagtgttaatgccatgaagcagccgccagttgggatcaaatgtgagcctatggatcaagcaggcccagtgtcttggcaatcatggtgacagtgacattgaaggtgggggctccaccgatgctcttcgtttgaagatgcacggtcagttccccatcctgcagcagtgagtccaggaccacagtacatttctggccccgcagtgtcagcctattcacgaaaaagcttgaccagtctttgccaaccaggacaccaaccttagctggcgtgatgttcacgaaggtttttccctgggacggcggcccagatggaggaaaatataacctgttgggaaactggttctgcctggatggtgttgtacaaacaagcgataaacaatgaggaatgtgcttagatgtattgggaaagagatgggtctgtggcattgtcacaagggtacacgaacactgagagtgaattttagaggaatgatccccattggtggtgaccctcagaccgttacctggcacactggcctcactcttgtcggagactgagctattggcagtgccttcagctctgagctcaggcacctcgaacattgtttttgtcgttaaggatcctaaagtgctgcggggactgatcacatttttctcaacatccctggccccacctcttctgccacaaacgtcagcatggtggtatctgccggcccttggtccggtgagaaggcagagatgaacattctagaaatcaacaagaaatcgcgcccccagctggcagagaacaaacagcagttcagaaacctcaaacagaaatgtcttgtaactcaagtggcctacttcctggccaaccggcaaaataattacgactatgaagactgcaaagacctcataaaatctatgctgagggatgagcggctgctcacagaagagaagcttgcagaggagctcgggcaagctgaggagctcaggcaatataaagtcctggttcactctcaggaacgagagctgacccagttaagggagaagttacaggaagggagagatgcctcccgctcattgaatcagcatctccaggccctcctcactccggatgagccggacaactcccagggacgggacctccgagaacagctggctgagggatgtaggctggcacagcacctcgtccaaaagctcagcccagaaaatgatgacgatgaggatgaagatgttaaagttgaggaggctgagaaagtacaggaattatatgcccccagggaggtgcagaaggctgaagaaaaggaagtccctgaggactcactggaggagtgtgccatcacttgttcaaatagccaccacccttgtgagtccaaccagccttacgggaacaccagaatcacatttgaggaagaccaagtcgactcaactctcattgactcatcctctcatgatgaatggttggatgctgtatgcattatcccagaaaatgaaagtgatcatgagcaagaggaagaaaaagggccagtgtctcccaggaatctgcaggagtctgaagaggaggaagccccccaggagtcctgggatgaaggtgattggactctctcaattcctcctgacatgtctgcctcataccagtctgacaggagcacctttcactcagtagaggaacagcaagtcggcttggctcttgacataggcagacattggtgtgatcaagtgaaaaaggaggaccaagaggccacaagtcccaggctcagcagggagctgctggatgagaaagagcctgaagtcttgcaggactcactggatagattttattcaactccttttgagtacctggaactgcctgacttatgccagccctacagaagtgacttttactcattgcaggaacaacaccttggcttggctcttgacttggacagaatgaaaaaggaccaagaagaggaagaagaccaaggcccaccatgccccaggctcagcagagagctgccggaggtagtagagcctgaggacttgcaggactcactggatagatggtattcgactcctttcagttatccagaactgcctgattcatgccagccctacggaagttgcttttactcattggaggaagaacacgttggcttttctcttgacgtggatgaaattgaaaagtaccaagaaggggaagaagatcaaaagccaccatgccccaggctcaacgaggtgctgatggaagcagaagagcctgaagtcttgcaggactcactggatagatgttattcgactacttcaacttactttcaactacatgcctcattccagcagtatagaagtgccttttactcatttgaggaacaggacgtcagcttggcccttgacgtggacaata

SEQ ID NO: 19946 - DNA, 2133 bp, Homo sapiens
  source 1..2133: mol_type = unassigned DNA
ggcgcaggcacaggcgaggggttgggtggcggttgagacagcggcggtactgggatgggtaggtgaggatcccgagactgagtgagcttctgcgcgcggtgcttttgggaacgcgggactggcaacctgcggcgccaggagctgggccgaggcgcggcggcgcggctgcgggccgccgtctggatgggaagttacggcgaagtccacccagcgtttctcaggcaatctgaaggcaaatcctgtttagacccaggcgaaggttcctggtgacccaggctctcaccagccaattgtcccttgccgtcctcctgagggtatctggagcttcagtgctgtgtgctcttggcctccacactggggatgccactgactcccactgtccagggcttccagtggactctccgaggccctgatgtagaaacttccccattcggtgcaccaagagcagcctcacatggtgtgggccgacatcaagagctgcgagatccaacagactatgaagactgcaaagacctcataaaatctatgctgagggatgagcggctgctcacagaagagaagcttgcagaggagctcgggcaagctgaggagctcaggcaatataaagtcctggttcactctcaggaacgagagctgacccagttaagggagaagttacaggaagggagagatgcctcccgctcattgaatcagcatctccaggccctcctcactccggatgagccggacaactcccagggacgggacctccgagaacagctggctgagggatgtaggctggcacagcacctcgtccaaaagctcagcccagaaaatgatgacgatgaggatgaagatgttaaagttgaggaggctgagaaagtacaggaattatatgcccccagggaggtgcagaaggctgaagaaaaggaagtccctgaggactcactggaggagtgtgccatcacttgttcaaatagccaccacccttgtgagtccaaccagccttacgggaacaccagaatcacatttgaggaagaccaagtcgactcaactctcattgactcatcctctcatgatgaatggttggatgctgtatgcattatcccagaaaatgaaagtgatcatgagcaagaggaagaaaaagggccagtgtctcccaggaatctgcaggagtctgaagaggaggaagccccccaggagtcctgggatgaaggtgattggactctctcaattcctcctgacatgtctgcctcataccagtctgacaggagcacctttcactcagtagaggaacagcaagtcggcttggctcttgacataggcagacattggtgtgatcaagtgaaaaaggaggaccaagaggccacaagtcccaggctcagcagggagctgctggatgagaaagagcctgaagtcttgcaggactcactggatagattttattcaactccttttgagtacctggaactgcctgacttatgccagccctacagaagtgacttttactcattgcaggaacaacaccttggcttggctcttgacttggacagaatgaaaaaggaccaagaagaggaagaagaccaaggcccaccatgccccaggctcagcagagagctgccggaggtagtagagcctgaggacttgcaggactcactggatagatggtattcgactcctttcagttatccagaactgcctgattcatgccagccctacggaagttgcttttactcattggaggaagaacacgttggcttttctcttgacgtggatgaaattgaaaagtaccaagaaggggaagaagatcaaaagccaccatgccccaggctcaacgaggtgctgatggaagcagaagagcctgaagtcttgcaggactcactggatagatgttattcgactacttcaacttactttcaactacatgcctcattccagcagtatagaagtgccttttactcatttgaggaacaggacgtcagcttggcccttgacgtggacaataggttttttactttgacagtgataaggcaccacctggccttccagatgggagtcatattcccacactaagcagcccttactaagctgagagatgtcattgctgcaggcaggacgtataggcacatgtaggtttgaatgaaactgtagttc

SEQ ID NO: 19947 - DNA, 1917 bp, Homo sapiens
  source 1..1917: mol_type = unassigned DNA
atggtggtatctgccgaccctttgtccagcgagagggcagagatgaacatcctagaaatcaaccaggaattgcgctcgcagctggcagagagcaatcagcagttccgagacctcaaagagaaattccttataactcaagctactgcctactccctggccaaccagctgaagaaatacaagtgtgaagagtacaaagacatcatagactctgtgctgagggatgaactgcagtccatggagaagctggcagagaagctcaggcaagctgaggagctcaggcagtataaagccctggttcactctcaggcaaaagagctgacccagttacgggagaagttacgggaagggagagatgcctcccgctggctgaacaagcatctgaaaaccctcctcactcctgatgaccctgacaagtcccagggtcaggacctccgagagcagctggctgaggggcacaggctggcagagcaccttgttcacaagctgagcccagaaaatgatgaagatgaagatgaggatgaagacgacaaagacgaggaggttgagaaagtacaggaatcacctgcccccagagaggtgcagaagactgaagaaaaggaagtccctcaggactcactggaggaatgtgctgtcacttgttcaaatagtcacaacccttctaactccaaccagcctcacaggagcaccaaaatcacatttaaggaacacgaagtcgactctgctctggttgtagagagtgaacaccctcatgatgaagaggaggaagctctaaacattcccccagaaaatcaaaatgaccatgaggaggaggaggggaaagcgccagtgccccccagacaccatgacaagtccaactcttaccggcatcgtgaagtctctttcttggcattggatgaacagaaagtttgctccgctcaggatgttgccagggattactccaatcccaaatgggatgaaacctcacttggcttcctcgaaaagcaaagtgatcttgaagaggtgaaaggacaagaaacagttgctcccaggctcagcaggggaccgctgagagtggacaagcatgaaatcccccaggagtcactggatggatgttgcttgactccttccatccttcctgacctgactccctcctaccacccttattggagcactttgtactcttttgaagacaagcaagtcagcttggctcttgtagacaaaattaaaaaggatcaagaggagatagaagaccaaagcccaccatgccccaggctcagccaggagctgccagaggtgaaggagcaggaagtcccagaggactctgtgaatgaagtttacttgactccctcagttcaccatgacgtgtctgactgccaccagccttatagcagcaccttgtcctcattggaggatcagcttgcctgctctgctctggatgtagcctcccccaccgaggcggcctgtccccaagggacttggagtggagacttgagccaccaccagtcagaggtgcaagtttcacaggcacagctggaaccaagcaccctggtgcccagttgtctgcgactacagctggatcaagggttccactgtgggaacggcttggcccagcggggcctttcctccaccacctgcagcttctcagccaatgctgattctgggaaccaatggcccttccaagagctggttttagagccctctctggggatgaagaaccctccccagctggaagatgatgcacttgaaggctcagcaagcaacacacaagggcgtcaagtcactggccggattcgtgcctcccttgtcctgatactgaagaccatcagaagaagactcccgttcagcaagtggagactggcattcagattcgctggcccgcatgctgagagcgcagagataccaaatactgctggaaggacgcaaaggatggcaggatga

SEQ ID NO: 19948 - DNA, 2499 bp, Homo sapiens
  source 1..2499: mol_type = unassigned DNA
cttctaattctgttattgcaactgcagaccgttacctggtacgctggctgctacctccctcactcttgtcagagtcggagctacaggcagtgccttcagctctgagctcaggcatcccggtccctgtttttgcggttaaggactctaaagtgttgtgtcgtgttcatcaactttttctcaacttccctggctctacctcttctgccacaaacgtcagcatggtggtatctgccgaccctttgtccagcgagagggcagagatgaacatcctagaaatcaaccaggaattgcgctcgcagctggcagagagcaatcagcagttccgagacctcaaagagaaattccttataactcaagctactgcctactccctggccaaccagctgaagaaatacaagtgtgaagagtacaaagacatcatagactctgtgctgagggatgaactgcagtccatggagaagctggcagagaagctcaggcaagctgaggagctcaggcagtataaagccctggttcactctcaggcaaaagagctgacccagttacgggagaagttacgggaagggagagatgcctcccgctggctgaacaagcatctgaaaaccctcctcactcctgatgaccctgacaagtcccagggtcaggacctccgagagcagctggctgaggggcacaggctggcagagcaccttgttcacaagctgagcccagaaaatgatgaagatgaagatgaggatgaagacgacaaagacgaggaggttgagaaagtacaggaatcacctgcccccagagaggtgcagaagactgaagaaaaggaagtccctcaggactcactggaggaatgtgctgtcacttgttcaaatagtcacaacccttctaactccaaccagcctcacaggagcaccaaaatcacatttaaggaacacgaagtcgactctgctctggttgtagagagtgaacaccctcatgatgaagaggaggaagctctaaacattcccccagaaaatcaaaatgaccatgaggaggaggaggggaaagcgccagtgccccccagacaccatgacaagtccaactcttaccggcatcgtgaagtctctttcttggcattggatgaacagaaagtttgctccgctcaggatgttgccagggattactccaatcccaaatgggatgaaacctcacttggcttcctcgaaaagcaaagtgatcttgaagaggtgaaaggacaagaaacagttgctcccaggctcagcaggggaccgctgagagtggacaagcatgaaatcccccaggagtcactggatggatgttgcttgactccttccatccttcctgacctgactccctcctaccacccttattggagcactttgtactcttttgaagacaagcaagtcagcttggctcttgtagacaaaattaaaaaggatcaagaggagatagaagaccaaagcccaccatgccccaggctcagccaggagctgccagaggtgaaggagcaggaagtcccagaggactctgtgaatgaagtttacttgactccctcagttcaccatgacgtgtctgactgccaccagccttatagcagcaccttgtcctcattggaggatcagcttgcctgctctgctctggatgtagcctcccccaccgaggcggcctgtccccaagggacttggagtggagacttgagccaccaccagtcagaggtgcaagtttcacaggcacagctggaaccaagcaccctggtgcccagttgtctgcgactacagctggatcaagggttccactgtgggaacggcttggcccagcggggcctttcctccaccacctgcagcttctcagccaatgctgattctgggaaccaatggcccttccaagagctggttttagagccctctctggggatgaagaaccctccccagctggaagatgatgcacttgaaggctcagcaagcaacacacaagggcgtcaagtcactggccggattcgtgcctcccttgtcctgatactgaagaccatcagaagaagactcccgttcagcaagtggagactggcattcagattcgctggcccgcatgctgagagcgcagagataccaaatactgctggaaggacgcaaaggatggcaggatgaaagaatgtcacaaaaagcagcttttccacttgataaaaacaactaaaacagcaaagcaagtttaagtccaaacacaatactgcaggggtccttcactgaggattgaatttcagacacagaatactcttgatgacttcaagccactatgctcctttgatttgagaagccacattccatccccctccaattgtgatcaatacctagggagaccaatgcccagatggacaaatagcattgaccggcgttagccctgtttctcaattcccatcgtgtagagaacaggagtccgcagctgctggcaggagacagcatgtcagccgggactctgccagggcagagtatgagcaatgccatgttcttgctg

SEQ ID NO: 19949 - DNA, 2586 bp, Homo sapiens
  source 1..2586: mol_type = unassigned DNA
cttctaattctgttattgcaactgcagaccgttacctggtacgctggctgctacctccctcactcttgtcagagtcggagctacaggcagtgccttcagctctgagctcaggcatcccggtccctgtttttgcggttaaggactctaaagtgttgtgtcgtgttcatcaactttttctcaacttccctggctctacctcttctgccacaaacgtcagcatggtggtatctgccgaccctttgtccagcgagagggcagagatgaacatcctagaaatcaaccaggaattgcgctcgcagctggcagagagcaatcagcagttccgagacctcaaagagaaattccttataactcaagctactgcctactccctggccaaccagctgaagaaatacaagtgtgaagagtacaaagacatcatagactctgtgctgagggatgaactgcagtccatggagaagctggcagagaagctcaggcaagctgaggagctcaggcagtataaagccctggttcactctcaggcaaaagagctgacccagttacgggagaagttacgggaagggagagatgcctcccgctggctgaacaagcatctgaaaaccctcctcactcctgatgaccctgacaagtcccagggtcaggacctccgagagcagctggctgaggggcacaggctggcagagcaccttgttcacaagctgagcccagaaaatgatgaagatgaagatgaggatgaagacgacaaagacgaggaggttgagaaagtacaggaatcacctgcccccagagaggtgcagaagactgaagaaaaggaagtccctcaggactcactggaggaatgtgctgtcacttgttcaaatagtcacaacccttctaactccaaccagcctcacaggagcaccaaaatcacatttaaggaacacgaagtcgactctgctctggttgtagagagtgaacaccctcatgatgaagaggaggaagctctaaacattcccccagaaaatcaaaatgaccatgaggaggaggaggggaaagcgccagtgccccccaggaaccgacaatcacttgaaccaggtgaactgaccaacctcagggatttcctgatctcacctgtggtctcccatgtggctaatccaggacaccatgacaagtccaactcttaccggcatcgtgaagtctctttcttggcattggatgaacagaaagtttgctccgctcaggatgttgccagggattactccaatcccaaatgggatgaaacctcacttggcttcctcgaaaagcaaagtgatcttgaagaggtgaaaggacaagaaacagttgctcccaggctcagcaggggaccgctgagagtggacaagcatgaaatcccccaggagtcactggatggatgttgcttgactccttccatccttcctgacctgactccctcctaccacccttattggagcactttgtactcttttgaagacaagcaagtcagcttggctcttgtagacaaaattaaaaaggatcaagaggagatagaagaccaaagcccaccatgccccaggctcagccaggagctgccagaggtgaaggagcaggaagtcccagaggactctgtgaatgaagtttacttgactccctcagttcaccatgacgtgtctgactgccaccagccttatagcagcaccttgtcctcattggaggatcagcttgcctgctctgctctggatgtagcctcccccaccgaggcggcctgtccccaagggacttggagtggagacttgagccaccaccagtcagaggtgcaagtttcacaggcacagctggaaccaagcaccctggtgcccagttgtctgcgactacagctggatcaagggttccactgtgggaacggcttggcccagcggggcctttcctccaccacctgcagcttctcagccaatgctgattctgggaaccaatggcccttccaagagctggttttagagccctctctggggatgaagaaccctccccagctggaagatgatgcacttgaaggctcagcaagcaacacacaagggcgtcaagtcactggccggattcgtgcctcccttgtcctgatactgaagaccatcagaagaagactcccgttcagcaagtggagactggcattcagattcgctggcccgcatgctgagagcgcagagataccaaatactgctggaaggacgcaaaggatggcaggatgaaagaatgtcacaaaaagcagcttttccacttgataaaaacaactaaaacagcaaagcaagtttaagtccaaacacaatactgcaggggtccttcactgaggattgaatttcagacacagaatactcttgatgacttcaagccactatgctcctttgatttgagaagccacattccatccccctccaattgtgatcaatacctagggagaccaatgcccagatggacaaatagcattgaccggcgttagccctgtttctcaattcccatcgtgtagagaacaggagtccgcagctgctggcaggagacagcatgtcagccgggactctgccagggcagagtatgagcaatgccatgttcttgctg

SEQ ID NO: 19950 - DNA, 2138 bp, Homo sapiens
  source 1..2138: mol_type = unassigned DNA
cttctaattctgttattgcaactgcagaccgttacctggtacgctggctgctacctccctcactcttgtcagagtcggagctacaggcagtgccttcagctctgagctcaggcatcccggtccctgtttttgcggttaaggactctaaagtgttgtgtcgtgttcatcaactttttctcaacctccctggctctacctcttctgccacaaacgtcagcatggtggtatctgccgaccctttgtccagcgagagggcagagatgaacatcctagaaatcaaccaggaattgcgctcgcagctggcagagagcaatcagcagttccgagacctcaaagagaaattccttataactcaagctactgcctactccctggccaaccagctgaagaaatacagttgtttaaagtacaggaatcacctgcccccagagaggtgcagaagactgaagaaaaggaagtccctcaggactcactggaggaatgtgctgtcacttgttcaaatagtcacaacccttctaactccaaccagcctcacaggagcaccaaaatcacatttaaggaacacgaagtcgactctgctctggttgtagagagtgaacaccctcatgatgaagaggaggaagctctaaacattcccccagaaaatcaaaatgaccatgaggaggaggaggggaaagcgccagtgccccccagacaccatgacaagtccaactcttaccggcatcgtgaagtctctttcttggcattggatgaacagaaagtttgctccgctcaggatgttgccagggattactccaatcccaaatgggatgaaacctcacttggcttcctcgaaaagcaaagtgatcttgaagaggtgaaaggacaagaaacagttgctcccaggctcagcaggggaccgctgagagtggacaagcatgaaatcccccaggagtcactggatggatgttgcttgactccttccatccttcctgacctgactccctcctaccacccttattggagcactttgtactcttttgaagacaagcaagtcagcttggctcttgtagacaaaattaaaaaggatcaagaggagatagaagaccaaagcccaccatgccccaggctcagccaggagctgccagaggtgaaggagcaggaagtcccagaggactctgtgaatgaagtttacttgactccctcagttcaccatgacgtgtctgactgccaccagccttatagcagcaccttgtcctcattggaggatcagcttgcctgctctgctctggatgtagcctcccccaccgaggcggcctgtccccaagggacttggagtggagacttgagccaccaccggtcagaggttcaaatttcacaggcacagctggaaccaagcaccctggtgcccagttgtctgcgactacagctggatcaagggttccactgtgggaacggcttggcccagcggggcctttcctccaccacctgcagcttctcagccaatgctgattctgggaaccaatggcccttccaagagctggttttagagccctctctggggatgaagaaccctccccagctggaagatgatgcacttgaaggctcagcaagcaacacacaagggcgtcaagtcactggccggattcgtgcctcccttgtcctgatactgaagaccatcagaagaagactcccgttcagcaagtggagactggcattcagattcgctggcccgcatgctgagagtgcagagataccaaatactgctgaaaggatgcaaaggatgataggatgaaagaatgtcacaaaaagcagcttttccacttgataaaaacaactaaaacagcaaagcaagtttaagtccaaacacaatactgcaggggtccttcactgaggattgaatttcagacacagaatactcttgatgacttcaagccactatgctcctttgatttgagaagccacattccatccccctccaattgtgatcaacacctagggagaccaatgcccagatggacaaatagcattgactggcgttagccctgtttctcaattcccatcatgtagagaacaggagtccgcagctgctggcaggagacagcatgtcagccgggactctgccagggcagagtatgagcaatgccatgttcttgctg

SEQ ID NO: 19951 - DNA, 2222 bp, Homo sapiens
  source 1..2222: mol_type = unassigned DNA
cttctaattctgttattgcaactgcagaccgttacctggtacactggctgctacctccctcactcttgtcagagtcggagctacaggcagtgccttcagctctgagctcaggcatcccggtccctgtttttgcggttaaggactctaaagtgttgtgtcgtgttcatcaactttttctcaacctccctggctctacctcttctgccacaaacgtcagcatggtggtatctgccgaccctttgtccagcgagagggcagagatgaacatcctagaaatcaaccaggaattgcgctcgcagctggcagagagcaatcagcagttccgagacctcaaagagaaattccttataactcaagctactgcctactccctggccaaccagctgaagaaatacaagtgtgaagagtacaaagacatcatagactctgtgctgagggatgaactgcagtccatggagaagctggcagagaagctcaggcaagctgaggagctcaggcagtataaagccctggttcactctcaggcaaaagagctgacccagttacgggagaagttacgggaagggagagatgcctcccgctggctgaacaagcatctgaaaaccctcctcactcctgatgaccctgacaagtcccagggtcaggacctccgagagcagctggctgaggggcacaggctggcagagcaccttgttcacaagctgagcccagaaaatgatgaagatgaagatgaggatgaagacgacaaagacgaggaggttgagaaagtacaggaatcacctgcccccagagaggtgcagaagactgaagaaaaggaagtccctcaggactcactggaggaatgtgctgtcacttgttcaaatagtcacaacccttctaactccaaccagcctcacaggagcaccaaaatcacatttaaggaacacgaagtcgactctgctctggttgtagagagtgaacaccctcatgatgaagaggaggaagctctaaacattcccccagaaaatcaaaatgaccatgaggaggaggaggggaaagcgccagtgccccccaggaaccgacaatcacttgaaccaggtgaactgaccaacctcagggatttcctgatctcacctgtggtctcccatgtggctaatccaggacaccatgacaagtccaactcttaccggcatcgtgaagtctctttcttggcattggatgaacagaaagtttgctccgctcaggatgttgccagggattactccaatcccaaatgggatgaaacctcacttggcttcctcgaaaagcaaagtgatcttgaagaggtgaaaggacaagaaacagttgctcccaggctcagcaggggaccgctgagagtggacaagcatgaaatcccccaggagtcactggatggatgttgcttgactccttccatccttcctgacctgactccctcctaccacccttattggagcactttgtactcttttgaagacaagcaagtcagcttggctcttgtagacaaaattaaaaaggatcaagaggagatagaagaccaaagcccaccatgccccaggctcagccaggagctgccagaggtgaaggagcaggaagtcccagaggactctgtgaatgaagtttacttgactccctcagttcaccatgacgtgtctgactgccaccagccttatagcagcaccttgtcctcattggaggatcagcttgcctgctctgctctggatgtagcctcccccaccgaggcggcctgtccccaagggacttggagtggagacttgagccaccaccggtcagaggttcaaatttcacaggcacagctggaaccaagcaccctggtgcccagttgtctgcgactacagctggatcaagggttccactgtgggaacggcttggcccagcggggcctttcctccaccacctgcagcttctcagccaatgctgattctgggaaccaatggcccttccaagagctggttttagagccctctctggggatgaagaaccctccccagctggaagatgatgcacttgaaggctcagcaagcaacacacaagggcgtcaagtcactggccggattcgtgcctcccttgtcctgatactgaagaccatcagaagaagactcccgttcagcaagtggagactggcattcagattcgctggcccgcatgctgagagtgcagagataccaaatactgctgaaaggatgcaaaggatgataggatga

SEQ ID NO: 19952 - DNA, 2586 bp, Homo sapiens
  source 1..2586: mol_type = unassigned DNA
cttctaattctgttattgcaactgcagaccgttacctggtacgctggctgctacctccctcactcttgtcagagtcggagctacaggcagtgccttcagctctgagctcaggcatcccggtccctgtttttgcggttaaggactctaaagtgttgtgtcgtgttcatcaactttttctcaacctccctggctctacctcttctgccacaaacgtcagcatggtggtatctgccgaccctttgtccagcgagagggcagagatgaacatcctagaaatcaaccaggaattgcgctcgcagctggcagagagcaatcagcagttccgagacctcaaagagaaattccttataactcaagctactgcctactccctggccaaccagctgaagaaatacaagtgtgaagagtacaaagacatcatagactctgtgctgagggatgaactgcagtccatggagaagctggcagagaagctcaggcaagctgaggagctcaggcagtataaagccctggttcactctcaggcaaaagagctgacccagttacgggagaagttacgggaagggagagatgcctcccgctggctgaacaagcatctgaaaaccctcctcactcctgatgaccctgacaagtcccagggtcaggacctccgagagcagctggctgaggggcacaggctggcagagcaccttgttcacaagctgagcccagaaaatgatgaagatgaagatgaggatgaagacgacaaagacgaggaggttgagaaagtacaggaatcacctgcccccagagaggtgcagaagactgaagaaaaggaagtccctcaggactcactggaggaatgtgctgtcacttgttcaaatagtcacaacccttctaactccaaccagcctcacaggagcaccaaaatcacatttaaggaacacgaagtcgactctgctctggttgtagagagtgaacaccctcatgatgaagaggaggaagctctaaacattcccccagaaaatcaaaatgaccatgaggaggaggaggggaaagcgccagtgccccccaggaaccgacaatcacttgaaccaggtgaactgaccaacctcagggatttcctgatctcacctgtggtctcccatgtggctaatccaggacaccatgacaagtccaactcttaccggcatcgtgaagtctctttcttggcattggatgaacagaaagtttgctccgctcaggatgttgccagggattactccaatcccaaatgggatgaaacctcacttggcttcctcgaaaagcaaagtgatcttgaagaggtgaaaggacaagaaacagttgctcccaggctcagcaggggaccgctgagagtggacaagcatgaaatcccccaggagtcactggatggatgttgcttgactccttccatccttcctgacctgactccctcctaccacccttattggagcactttgtactcttttgaagacaagcaagtcagcttggctcttgtagacaaaattaaaaaggatcaagaggagatagaagaccaaagcccaccatgccccaggctcagccaggagctgccagaggtgaaggagcaggaagtcccagaggactctgtgaatgaagtttacttgactccctcagttcaccatgacgtgtctgactgccaccagccttatagcagcaccttgtcctcattggaggatcagcttgcctgctctgctctggatgtagcctcccccaccgaggcggcctgtccccaagggacttggagtggagacttgagccaccaccggtcagaggttcaaatttcacaggcacagctggaaccaagcaccctggtgcccagttgtctgcgactacagctggatcaagggttccactgtgggaacggcttggcccagcggggcctttcctccaccacctgcagcttctcagccaatgctgattctgggaaccaatggcccttccaagagctggttttagagccctctctggggatgaagaaccctccccagctggaagatgatgcacttgaaggctcagcaagcaacacacaagggcgtcaagtcactggccggattcgtgcctcccttgtcctgatactgaagaccatcagaagaagactcccgttcagcaagtggagactggcattcagattcgctggcccgcatgctgagagtgcagagataccaaatactgctgaaaggatgcaaaggatgataggatgaaagaatgtcacaaaaagcagcttttccacttgataaaaacaactaaaacagcaaagcaagtttaagtccaaacacaatactgcaggggtccttcactgaggattgaatttcagacacagaatactcttgatgacttcaagccactatgctcctttgatttgagaagccacattccatccccctccaattgtgatcaacacctagggagaccaatgcccagatggacaaatagcattgactggcgttagccctgtttctcaattcccatcatgtagagaacaggagtccgcagctgctggcaggagacagcatgtcagccgggactctgccagggcagagtatgagcaatgccatgttcttgctg

SEQ ID NO: 19953 - DNA, 2499 bp, Homo sapiens
  source 1..2499: mol_type = unassigned DNA
cttctaattctgttattgcaactgcagaccgttacctggtacgctggctgctacctccctcactcttgtcagagtcggagctacaggcagtgccttcagctctgagctcaggcatcccggtccctgtttttgcggttaaggactctaaagtgttgtgtcgtgttcatcaactttttctcaacctccctggctctacctcttctgccacaaacgtcagcatggtggtatctgccgaccctttgtccagcgagagggcagagatgaacatcctagaaatcaaccaggaattgcgctcgcagctggcagagagcaatcagcagttccgagacctcaaagagaaattccttataactcaagctactgcctactccctggccaaccagctgaagaaatacaagtgtgaagagtacaaagacatcatagactctgtgctgagggatgaactgcagtccatggagaagctggcagagaagctcaggcaagctgaggagctcaggcagtataaagccctggttcactctcaggcaaaagagctgacccagttacgggagaagttacgggaagggagagatgcctcccgctggctgaacaagcatctgaaaaccctcctcactcctgatgaccctgacaagtcccagggtcaggacctccgagagcagctggctgaggggcacaggctggcagagcaccttgttcacaagctgagcccagaaaatgatgaagatgaagatgaggatgaagacgacaaagacgaggaggttgagaaagtacaggaatcacctgcccccagagaggtgcagaagactgaagaaaaggaagtccctcaggactcactggaggaatgtgctgtcacttgttcaaatagtcacaacccttctaactccaaccagcctcacaggagcaccaaaatcacatttaaggaacacgaagtcgactctgctctggttgtagagagtgaacaccctcatgatgaagaggaggaagctctaaacattcccccagaaaatcaaaatgaccatgaggaggaggaggggaaagcgccagtgccccccagacaccatgacaagtccaactcttaccggcatcgtgaagtctctttcttggcattggatgaacagaaagtttgctccgctcaggatgttgccagggattactccaatcccaaatgggatgaaacctcacttggcttcctcgaaaagcaaagtgatcttgaagaggtgaaaggacaagaaacagttgctcccaggctcagcaggggaccgctgagagtggacaagcatgaaatcccccaggagtcactggatggatgttgcttgactccttccatccttcctgacctgactccctcctaccacccttattggagcactttgtactcttttgaagacaagcaagtcagcttggctcttgtagacaaaattaaaaaggatcaagaggagatagaagaccaaagcccaccatgccccaggctcagccaggagctgccagaggtgaaggagcaggaagtcccagaggactctgtgaatgaagtttacttgactccctcagttcaccatgacgtgtctgactgccaccagccttatagcagcaccttgtcctcattggaggatcagcttgcctgctctgctctggatgtagcctcccccaccgaggcggcctgtccccaagggacttggagtggagacttgagccaccaccggtcagaggttcaaatttcacaggcacagctggaaccaagcaccctggtgcccagttgtctgcgactacagctggatcaagggttccactgtgggaacggcttggcccagcggggcctttcctccaccacctgcagcttctcagccaatgctgattctgggaaccaatggcccttccaagagctggttttagagccctctctggggatgaagaaccctccccagctggaagatgatgcacttgaaggctcagcaagcaacacacaagggcgtcaagtcactggccggattcgtgcctcccttgtcctgatactgaagaccatcagaagaagactcccgttcagcaagtggagactggcattcagattcgctggcccgcatgctgagagtgcagagataccaaatactgctgaaaggatgcaaaggatgataggatgaaagaatgtcacaaaaagcagcttttccacttgataaaaacaactaaaacagcaaagcaagtttaagtccaaacacaatactgcaggggtccttcactgaggattgaatttcagacacagaatactcttgatgacttcaagccactatgctcctttgatttgagaagccacattccatccccctccaattgtgatcaacacctagggagaccaatgcccagatggacaaatagcattgactggcgttagccctgtttctcaattcccatcatgtagagaacaggagtccgcagctgctggcaggagacagcatgtcagccgggactctgccagggcagagtatgagcaatgccatgttcttgctg

SEQ ID NO: 19954 - DNA, 2494 bp, Homo sapiens
  source 1..2494: mol_type = unassigned DNA
aattctgttattgcaactgcagaccgttacctggtacactggctgctacctccctcactcttgtcagagtcggagctacaggcagtgccttcagctctgagctcaggcatcccggtccctgtttttgcggttaaggactctaaagtgttgtgtcgtgttcatcaactttttctcaacctccctggctctacctcttctgccacaaacgtcagcatggtggtatctgccgaccctttgtccagcgagagggcagagatgaacatcctagaaatcaaccaggaattgcgctcgcagctggcagagagcaatcagcagttccgagacctcaaagagaaattccttataactcaagctactgcctactccctggccaaccagctgaagaaatacaagtgtgaagagtacaaagacatcatagactctgtgctgagggatgaactgcagtccatggagaagctggcagagaagctcaggcaagctgaggagctcaggcagtataaagccctggttcactctcaggcaaaagagctgacccagttacgggagaagttacgggaagggagagatgcctcccgctggctgaacaagcatctgaaaaccctcctcactcctgatgaccctgacaagtcccagggtcaggacctccgagagcagctggctgaggggcacaggctggcagagcaccttgttcacaagctgagcccagaaaatgatgaagatgaagatgaggatgaagacgacaaagacgaggaggttgagaaagtacaggaatcacctgcccccagagaggtgcagaagactgaagaaaaggaagtccctcaggactcactggaggaatgtgctgtcacttgttcaaatagtcacaacccttctaactccaaccagcctcacaggagcaccaaaatcacatttaaggaacacgaagtcgactctgctctggttgtagagagtgaacaccctcatgatgaagaggaggaagctctaaacattcccccagaaaatcaaaatgaccatgaggaggaggaggggaaagcgccagtgccccccagacaccatgacaagtccaactcttaccggcatcgtgaagtctctttcttggcattggatgaacagaaagtttgctccgctcaggatgttgccagggattactccaatcccaaatgggatgaaacctcacttggcttcctcgaaaagcaaagtgatcttgaagaggtgaaaggacaagaaacagttgctcccaggctcagcaggggaccgctgagagtggacaagcatgaaatcccccaggagtcactggatggatgttgcttgactccttccatccttcctgacctgactccctcctaccacccttattggagcactttgtactcttttgaagacaagcaagtcagcttggctcttgtagacaaaattaaaaaggatcaagaggagatagaagaccaaagcccaccatgccccaggctcagccaggagctgccagaggtgaaggagcaggaagtcccagaggactctgtgaatgaagtttacttgactccctcagttcaccatgacgtgtctgactgccaccagccttatagcagcaccttgtcctcattggaggatcagcttgcctgctctgctctggatgtagcctcccccaccgaggcggcctgtccccaagggacttggagtggagacttgagccaccaccggtcagaggttcaaatttcacaggcacagctggaaccaagcaccctggtgcccagttgtctgcgactacagctggatcaagggttccactgtgggaacggcttggcccagcggggcctttcctccaccacctgcagcttctcagccaatgctgattctgggaaccaatggcccttccaagagctggttttagagccctctctggggatgaagaaccctccccagctggaagatgatgcacttgaaggctcagcaagcaacacacaagggcgtcaagtcactggccggattcgtgcctcccttgtcctgatactgaagaccatcagaagaagactcccgttcagcaagtggagactggcattcagattcgctggcccgcatgctgagagtgcagagataccaaatactgctgaaaggatgcaaaggatgataggatgaaagaatgtcacaaaaagcagcttttccacttgataaaaacaactaaaacagcaaagcaagtttaagtccaaacacaatactgcaggggtccttcactgaggattgaatttcagacacagaatactcttgatgacttcaagccactatgctcctttgatttgagaagccacattccatccccctccaattgtgatcaacacctagggagaccaatgcccagatggacaaatagcattgactggcgttagccctgtttctcaattcccatcatgtagagaacaggagtccgcagctgctggcaggagacagcatgtcagccgggactctgccagggcagagtatgagcaatgccatgttcttgctg

SEQ ID NO: 19955 - DNA, 2886 bp, Homo sapiens
  source 1..2886: mol_type = unassigned DNA
agcagaacaaatacaagtatgaagagtgtaaagacctcataaaatttatgctgaggaatgagcgacagttcaaggaggagaagcttgcagagcagctgaagcaagctgaggagctcaggcaatataaagtcctggttcacgctcaggaacgagagctgacccagttaagggagaagttgcgggaagggagagatgcctcccgctcattgaatgagcatctccaggccctcctcactccggatgagccggacaagtcccaggggcaggacctccaagaacagctggctgaggggtgtagactggcacagcaccttgtccaaaagctcagcccagaaaatgacaacgatgacaatgaagatgttcaagttgaggtggctgagaaagtgcagaaatcgtctgcccccagggagatgcagaaggctgaagaaaaggaagtccctgaggactcactggaggaatgtgccatcacttattcaaatagccatggcccttatgactccaaccagccacataggaaaaccaaaatcacatttgaggaagacaaagtcgactcaactctcattggctcatcctctcatgttgaacgggaagatgctgtacacattattccagaaaatgaaagtgatgatgaggaagaggaagaaaaagggccagtgtctcccaggaatctgcaggagtctgaagaggaggaagtcccccaggagtcctgggatgaaggttattcgactccctcaattcctcctgaaatgttggcctcgtacaagtcttacagcagcacatttcactcattagaggaacagcaagtctgcatggctgttgacataggcagacatcggtgggatcaagtgaaaaaggaggaccaagaggcaacaggtcccaggctcagcagggagctgctggatgagaaagggcctgaagtcttgcaggactcactgtatagatgttattcaactccttcaggttgtcttgaactgactgactcatgccagccctacagaagtgccttttacgtattggagcaacagcgtgttggcttggctgttgacatggatgaaattgaaaagtaccaagaagtggaagaagaccaaggcagatgggaagaagatcaaaacccaccatgccccaggctcaacggcgtgctgatggaagtggaagagcctgaagtcttgcaggactcactggatggatgttattctactccgtcaatgtactttgaactacctgactcattccagcactacagaagtgtgttttactcatttgaggaacagcacatcagcttcgccctttacgtggacaataggttttttactttgacggtgacaagtctccacctggtgttccagatggaagtcatattcccacaataagcagcccttactaagccgagagatgtcattcctgcaggcaggacctataggcacgtgaagatttgaatgaaactacagttccatttggaagcccagacataggatgggtcagtgggcatggctctattcctattctcaaaccatgccagtggcaacctgtgctcagtctgaagacaatggacccacgttaggtgtgacacgttcacataactgtgcagcacatgccgggagtgatcagtcagacattttaatttgaaccacgtatctctgggtagctacaaaattcctcagggatttcattttgcagacatgtctctgagcttctatacctgctcaaggtcattgtcatctttgtgtttagctcatccaaaggtgttaccctggtttcaatgaacctaacctcattcttcgtgtcttcagtgttggcttgttttagctgatccatctgtaacacaggagggatccttggctgaggattgtatttcagaaccaccaactgctcttgacaattgttaacccgctaggctcctttggttagagaagccacagtccttcagcctccaattggtgtcagtacttaggaagaccacagctagatggacaaacagcattgggaggccttagccctgctcctctcaattccatcctgtagagaacaggagtcaggagccgctggcaggagacagcatgtcacccaggactctgccggtgcagaatatgaacaatgccatgttcttgcagaaaacgcttagcctgagtttcataggaggtaatcaccagacaactgcagaatgtagaacactgagcaggacaactgacctgtctccttcacatagtccttatcaccacaaatcacacaacaaaaaggagaagagatattttgggttcaaaaaaagtaaaaagataatgtagctgcatttctttagttattttgaaccccaaatatttcctcatctttttgttgttgtcatggatggtggtgacatggacttgtttatagaggacaggtcagctgtctggctcaatgatctacattctgaagttgtctgaaaatgtcttcatgattaaattcagcctaaacgttttgccgggaacactgcagagacaatgctgtgagtttccaacctcagcccatctgcgggcagagaaggtctagtttgtccatcaccattatgatatcaggactggttacttggttaaggaggggtctaggagatctgtcccttttagagacaccttacttataatgaagtacttgggaaagcggttttcaagagtataaatatcctgtattctaatgatcatcctctaaacattttatcatttattaatcctccctgcctgtgtctattattatattcatatctctacgctgcaaattttgggtctcaatttttactgtgcctttgtttttactagtgtctgctgttgcaaaaagaagaaaacattctctgcctgagttttaatttttgtccaaagttaattttaatctatacaattaaaaccttttgcctat

SEQ ID NO: 19956 - DNA, 3347 bp, Homo sapiens
  source 1..3347: mol_type = unassigned DNA
ccagtccctggccccacctcttctgccacaaacgtcagcatggtggtatcagccggccctttgtccagcgagaaggcagagatgaacattctggaaatcaatgagaaattgcgcccccagctggcagagaagaaacagcagttcagaaacctcaaagagaaatgttttctaactcaactgtccggcttcctggccaaccagcagaacaaatacaagtatgaagagtgtaaagacctcataaaatttatgctgaggaatgagcgacagttcaaggaggagaagcttgcagagcagctgaagcaagctgaggagctcaggcaatataaagtcctggttcacgctcaggaacgagagctgacccagttaagggagaagttgcgggaagggagagatgcctcccgctcattgaatgagcatctccaggccctcctcactccggatgagccggacaagtcccaggggcaggacctccaagaacagctggctgaggggtgtagactggcacagcaccttgtccaaaagctcagcccagaaaatgacaacgatgacaatgaagatgttcaagttgaggtggctgagaaagtgcagaaatcgtctgcccccagggagatgcagaaggctgaagaaaaggaagtccctgaggactcactggaggaatgtgccatcacttattcaaatagccatggcccttatgactccaaccagccacataggaaaaccaaaatcacatttgaggaagacaaagtcgactcaactctcattggctcatcctctcatgttgaacgggaagatgctgtacacattattccagaaaatgaaagtgatgatgaggaagaggaagaaaaagggccagtgtctcccaggaatctgcaggagtctgaagaggaggaagtcccccaggagtcctgggatgaaggttattcgactccctcaattcctcctgaaatgttggcctcgtacaagtcttacagcagcacatttcactcattagaggaacagcaagtctgcatggctgttgacataggcagacatcggtgggatcaagtgaaaaaggaggaccaagaggcaacaggtcccaggctcagcagggagctgctggatgagaaagggcctgaagtcttgcaggactcactgtatagatgttattcaactccttcaggttatcttgaactgcctgacttaggccagccctacagcagtgctgtttactcattggaggaacagtaccttggcttggctcttgacttggacagaattaaaaaggaccaagaagaggaagaagaccaaggcccaccatgccccaggctcagcagggagctgctggaggtagtagagcctgaagtcttgcaggactcactggatagatgttattcaactccttccagttgtcttgaacagcctgactcctgccagccctatggaagttccttttatgcattggaggaaaaacatgttggcttttctcttgacgtgggagaaattgaaaagaaggggaaggggaagaaaagaaggggaagaagatcaaagaaggaaagaagaaggggaagaaaagaaggggaagaagatcaaaacccaccatgccccaggctcaacggcgtgctgatggaagtggaagagcctgaagtcttgcaggactcactggatggatgttattctactccgtcaatgtactttgaactacctgactcattccagcactacagaagtgtgttttactcatttgaggaacagcacatcagcttcgccctttacgtggacaataggttttttactttgacggtgacaagtctccacctggtgttccagatggaagtcatattcccacaataagcagcccttactaagccgagagatgtcattcctgcaggcaggacctataggcacgtgaagatttgaatgaaactacagttccatttggaagcccagacataggatgggtcagtgggcatggctctattcctattctcaaaccatgccagtggcaacctgtgctcagtctgaagacaatggacccacgttaggtgtgacacgttcacataactgtgcagcacatgccgggagtgatcagtcagacattttaatttgaaccacgtatctctgggtagctacaaaattcctcagggatttcattttgcagacatgtctctgagcttctatacctgctcaaggtcattgtcatctttgtgtttagctcatccaaaggtgttaccctggtttcaatgaacctaacctcattcttcgtgtcttcagtgttggcttgttttagctgatccatctgtaacacaggagggatccttggctgaggattgtatttcagaaccaccaactgctcttgacaattgttaacccgctaggctcctttggttagagaagccacagtccttcagcctccaattggtgtcagtacttaggaagaccacagctagatggacaaacagcattgggaggccttagccctgctcctctcaattccatcctgtagagaacaggagtcaggagccgctggcaggagacagcatgtcacccaggactctgccggtgcagaatatgaacaatgccatgttcttgcagaaaacgcttagcctgagtttcataggaggtaatcaccagacaactgcagaatgtagaacactgagcaggacaactgacctgtctccttcacatagtccttatcaccacaaatcacacaacaaaaaggagaagagatattttgggttcaaaaaaagtaaaaagataatgtagctgcatttctttagttattttgaaccccaaatatttcctcatctttttgttgttgtcatggatggtggtgacatggacttgtttatagaggacaggtcagctgtctggctcaatgatctacattctgaagttgtctgaaaatgtcttcatgattaaattcagcctaaacgttttgccgggaacactgcagagacaatgctgtgagtttccaacctcagcccatctgcgggcagagaaggtctagtttgtccatcaccattatgatatcaggactggttacttggttaaggaggggtctaggagatctgtcccttttagagacaccttacttataatgaagtacttgggaaagcggttttcaagagtataaatatcctgtattctaatgatcatcctctaaacattttatcatttattaatcctccctgcctgtgtctattattatattcatatctctacgctgcaaattttgggtctcaatttttactgtgcctttgtttttactagtgtctgctgttgcaaaaagaagaaaacattctctgcctgagttttaatttttgtccaaagttaattttaatctatacaattaaaaccttttgcctatc

SEQ ID NO: 19957 - DNA, 3569 bp, Homo sapiens
  source 1..3569: mol_type = unassigned DNA
tccctggccccacctcttctgccacaaacgtcagcatggtggtatcagccggccctttgtccagcgagaaggcagagatgaacattctggaaatcaatgagaaattgcgcccccagctggcagagaagaaacagcagttcagaaacctcaaagagaaatgttttctaactcaactgtccggcttcctggccaaccagcagaacaaatacaagtatgaagagtgtaaagacctcataaaatttatgctgaggaatgagcgacagttcaaggaggagaagcttgcagagcagctgaagcaagctgaggagctcaggcaatataaagtcctggttcacgctcaggaacgagagctgacccagttaagggagaagttgcgggaagggagagatgcctcccgctcattgaatgagcatctccaggccctcctcactccggatgagccggacaagtcccaggggcaggacctccaagaacagctggctgaggggtgtagactggcacagcaccttgtccaaaagctcagcccagaaaatgacaacgatgacaatgaagatgttcaagttgaggtggctgagaaagtgcagaaatcgtctgcccccagggagatgcagaaggctgaagaaaaggaagtccctgaggactcactggaggaatgtgccatcacttattcaaatagccatggcccttatgactccaaccagccacataggaaaaccaaaatcacatttgaggaagacaaagtcgactcaactctcattggctcatcctctcatgttgaacgggaagatgctgtacacattattccagaaaatgaaagtgatgatgaggaagaggaagaaaaagggccagtgtctcccaggaatctgcaggagtctgaagaggaggaagtcccccaggagtcctgggatgaaggttattcgactccctcaattcctcctgaaatgttggcctcgtacaagtcttacagcagcacatttcactcattagaggaacagcaagtctgcatggctgttgacataggcagacatcggtgggatcaagtgaaaaaggaggaccaagaggcaacaggtcccaggctcagcagggagctgctggatgagaaagggcctgaagtcttgcaggactcactgtatagatgttattcaactccttcaggttgtcttgaactgactgactcatgccagccctacagaagtgccttttacgtattggagcaacagcgtgttggcttggctgttgacatggatgaaattgaaaagtaccaagaagtggaagaagaccaagacccatcatgccccaggctcagcagggagctgctggatgagaaagagcctgaagtcttgcaggactcactgggtagatggtattcgactccttcaggttatcttgaactgcctgacttaggccagccctacagcagtgctgtttactcattggaggaacagtaccttggcttggctcttgacttggacagaattaaaaaggaccaagaagaggaagaagaccaaggcccaccatgccccaggctcagcagggagctgctggaggtagtagagcctgaagtcttgcaggactcactggatagatgttattcaactccttccagttgtcttgaacagcctgactcctgccagccctatggaagttccttttatgcattggaggaaaaacatgttggcttttctcttgacgtgggagaaattgaaaagaaggggaaggggaagaaaagaaggggaagaagatcaaagaaggaaagaagaaggggaagaaaagaaggggaagaagatcaaaacccaccatgccccaggctcaacggcgtgctgatggaagtggaagagcctgaagtcttgcaggactcactggatggatgttattctactccgtcaatgtactttgaactacctgactcattccagcactacagaagtgtgttttactcatttgaggaacagcacatcagcttcgccctttacgtggacaataggttttttactttgacggtgacaagtctccacctggtgttccagatggaagtcatattcccacaataagcagcccttactaagccgagagatgtcattcctgcaggcaggacctataggcacgtgaagatttgaatgaaactacagttccatttggaagcccagacataggatgggtcagtgggcatggctctattcctattctcaaaccatgccagtggcaacctgtgctcagtctgaagacaatggacccacgttaggtgtgacacgttcacataactgtgcagcacatgccgggagtgatcagtcagacattttaatttgaaccacgtatctctgggtagctacaaaattcctcagggatttcattttgcagacatgtctctgagcttctatacctgctcaaggtcattgtcatctttgtgtttagctcatccaaaggtgttaccctggtttcaatgaacctaacctcattcttcgtgtcttcagtgttggcttgttttagctgatccatctgtaacacaggagggatccttggctgaggattgtatttcagaaccaccaactgctcttgacaattgttaacccgctaggctcctttggttagagaagccacagtccttcagcctccaattggtgtcagtacttaggaagaccacagctagatggacaaacagcattgggaggccttagccctgctcctctcaattccatcctgtagagaacaggagtcaggagccgctggcaggagacagcatgtcacccaggactctgccggtgcagaatatgaacaatgccatgttcttgcagaaaacgcttagcctgagtttcataggaggtaatcaccagacaactgcagaatgtagaacactgagcaggacaactgacctgtctccttcacatagtccttatcaccacaaatcacacaacaaaaaggagaagagatattttgggttcaaaaaaagtaaaaagataatgtagctgcatttctttagttattttgaaccccaaatatttcctcatctttttgttgttgtcatggatggtggtgacatggacttgtttatagaggacaggtcagctgtctggctcaatgatctacattctgaagttgtctgaaaatgtcttcatgattaaattcagcctaaacgttttgccgggaacactgcagagacaatgctgtgagtttccaacctcagcccatctgcgggcagagaaggtctagtttgtccatcaccattatgatatcaggactggttacttggttaaggaggggtctaggagatctgtcccttttagagacaccttacttataatgaagtacttgggaaagcggttttcaagagtataaatatcctgtattctaatgatcatcctctaaacattttatcatttattaatcctccctgcctgtgtctattattatattcatatctctacgctgcaaattttgggtctcaatttttactgtgcctttgtttttactagtgtctgctgttgcaaaaagaagaaaacattctctgcctgagttttaatttttgtccaaagttaattttaatctatacaattaaaaccttttgcctatca

SEQ ID NO: 19958 - DNA, 3568 bp, Homo sapiens
  source 1..3568: mol_type = unassigned DNA
ccagtccctggccccacctcttctgccacaaacgtcagcatggtggtatcagccggccctttgtccagcgagaaggcagagatgaacattctggaaatcaatgagaaattgcgcccccagctggcagagaagaaacagcagttcagaaacctcaaagagaaatgttttctaactcaactgtccggcttcctggccaaccagcagaacaaatacaagtatgaagagtgtaaagacctcataaaatttatgctgaggaatgagcgacagttcaaggaggagaagcttgcagagcagctgaagcaagctgaggagctcaggcaatataaagtcctggttcacgctcaggaacgagagctgacccagttaagggagaagttgcgggaagggagagatgcctcccgctcattgaatgagcatctccaggccctcctcactccggatgagccggacaagtcccaggggcaggacctccaagaacagctggctgaggggtgtagactggcacagcaccttgtccaaaagctcagcccagaaaatgacaacgatgacaatgaagatgttcaagttgaggtggctgagaaagtgcagaaatcgtctgcccccagggagatgcagaaggctgaagaaaaggaagtccctgaggactcactggaggaatgtgccatcacttattcaaatagccatggcccttatgactccaaccagccacataggaaaaccaaaatcacatttgaggaagacaaagtcgactcaactctcattggctcatcctctcatgttgaacgggaagatgctgtacacattattccagaaaatgaaagtgatgatgaggaagaggaagaaaaagggccagtgtctcccaggaatctgcaggagtctgaagaggaggaagtcccccaggagtcctgggatgaaggttattcgactccctcaattcctcctgaaatgttggcctcgtacaagtcttacagcagcacatttcactcattagaggaacagcaagtctgcatggctgttgacataggcagacatcggtgggatcaagtgaaaaaggaggaccaagaggcaacaggtcccaggctcagcagggagctgctggatgagaaagggcctgaagtcttgcaggactcactgtatagatgttattcaactccttcaggttgtcttgaactgactgactcatgccagccctacagaagtgccttttacgtattggagcaacagcgtgttggcttggctgttgacatggatgaaattgaaaagtaccaagaagtggaagaagaccaagacccatcatgccccaggctcagcagggagctgctggatgagaaagagcctgaagtcttgcaggactcactgggtagatggtattcgactccttcaggttatcttgaactgcctgacttaggccagccctacagcagtgctgtttactcattggaggaacagtaccttggcttggctcttgacttggacagaattaaaaaggaccaagaagaggaagaagaccaaggcccaccatgccccaggctcagcagggagctgctggaggtagtagagcctgaagtcttgcaggactcactggatgttattcaactccttccagttgtcttgaacagcctgactcctgccagccctatggaagttccttttatgcattggaggaaaaacatgttggcttttctcttgacgtgggagaaattgaaaagaaggggaaggggaagaaaagaaggggaagaagatcaaagaaggaaagaagaaggggaagaaaagaaggggaagaagatcaaaacccaccatgccccaggctcaacggcgtgctgatggaagtggaagagcctgaagtcttgcaggactcactggatggatgttattctactccgtcaatgtactttgaactacctgactcattccagcactacagaagtgtgttttactcatttgaggaacagcacatcagcttcgccctttacgtggacaataggttttttactttgacggtgacaagtctccacctggtgttccagatggaagtcatattcccacaataagcagcccttactaagccgagagatgtcattcctgcaggcaggacctataggcacgtgaagatttgaatgaaactacagttccatttggaagcccagacataggatgggtcagtgggcatggctctattcctattctcaaaccatgccagtggcaacctgtgctcagtctgaagacaatggacccacgttaggtgtgacacgttcacataactgtgcagcacatgccgggagtgatcagtcagacattttaatttgaaccacgtatctctgggtagctacaaaattcctcagggatttcattttgcagacatgtctctgagcttctatacctgctcaaggtcattgtcatctttgtgtttagctcatccaaaggtgttaccctggtttcaatgaacctaacctcattcttcgtgtcttcagtgttggcttgttttagctgatccatctgtaacacaggagggatccttggctgaggattgtatttcagaaccaccaactgctcttgacaattgttaacccgctaggctcctttggttagagaagccacagtccttcagcctccaattggtgtcagtacttaggaagaccacagctagatggacaaacagcattgggaggccttagccctgctcctctcaattccatcctgtagagaacaggagtcaggagccgctggcaggagacagcatgtcacccaggactctgccggtgcagaatatgaacaatgccatgttcttgcagaaaacgcttagcctgagtttcataggaggtaatcaccagacaactgcagaatgtagaacactgagcaggacaactgacctgtctccttcacatagtccttatcaccacaaatcacacaacaaaaaggagaagagatattttgggttcaaaaaaagtaaaaagataatgtagctgcatttctttagttattttgaaccccaaatatttcctcatctttttgttgttgtcatggatggtggtgacatggacttgtttatagaggacaggtcagctgtctggctcaatgatctacattctgaagttgtctgaaaatgtcttcatgattaaattcagcctaaacgttttgccgggaacactgcagagacaatgctgtgagtttccaacctcagcccatctgcgggcagagaaggtctagtttgtccatcaccattatgatatcaggactggttacttggttaaggaggggtctaggagatctgtcccttttagagacaccttacttataatgaagtacttgggaaagcggttttcaagagtataaatatcctgtattctaatgatcatcctctaaacattttatcatttattaatcctccctgcctgtgtctattattatattcatatctctacgctgcaaattttgggtctcaatttttactgtgcctttgtttttactagtgtctgctgttgcaaaaagaagaaaacattctctgcctgagttttaatttttgtccaaagttaattttaatctatacaattaaaaccttttgcctatc

SEQ ID NO: 19959 - DNA, 3283 bp, Homo sapiens
  source 1..3283: mol_type = unassigned DNA
gtgagaatctggtggatgctggaccttgctgctgctgctactgctgtttccaggggctgcagagcatggactgttaaatcttgcacttcttctgagtgagctgaattcttgccgccaggatggggaaacagaacagcaagctgcgcccggaggtcatgcaggacttgctggaaagcacagactttacagagcatgagatccaggaatggtataaaggcttcttgagagactgccccagtggacatttgtcaatggaagagtttaagaaaatatatgggaactttttcccttatggggatgcttccaaatttgcagagcatgtcttccgcaccttcgatgcaaatggagatgggacaatagactttagagaattcatcatcgccttgagtgtaacttcgagggggaagctggagcagaagctgaaatgggccttcagcatgtacgacctggacggaaatggctatatcagcaaggcagagatgctagagatcgtgcaggcaatctataagatggtttcctctgtaatgaaaatgcctgaagatgagtcaaccccagagaaaagaacagaaaagatcttccgccagatggacaccaatagagacggaaaactctccctggaagagttcatccgaggagccaaaagcgacccgtccattgtgcgcctcctgcagtgcgacccgagcagtgccggccagttctgagccctgcgcccaccaatcgaattgtagagctgcttgtgttcccttttgattcttctttttaacaatttttttttttttttgccaaacaatatcaatggtgatgccgtcccctgtgcggtctgatgcgccttcctccgtgacgccttcagcttcttttgtcgtggatgcttcgtgggaatgcccagagccccagtgtgcttgtggagagcatggacagacttcgtggtgttcattgtttgatgatttttaatcgttactattatttttttttattctaatgtctctgttctaaaacgtaagactcgggggttggggcaaaagaagggaaacccatccagtcctgtgattctattgcaagcttcaaggggcttttgtttgaaagacaaaactccccacctgaatctgttgtcacacgtgccgtaggggtgatggatggcaccggatgctggattccccaagaacaagttaccctctggggtgaggctattccagcgagctgggacatttccccatgggggcccactcccctctcttccccagcaggctgtagtttctaagctgtgaacatttcaagataaattaacagaggagaggaaaaagatggctcagctattttttcacaggtttacactagttgagctaatatgcgtgtctttggaaattaaacacaaatggtaacatattccaaaaccagacccatcttgttgcctattgtgataaaataaaaagacggctgtatataacatattgggtaatgcagaccaaattaagtgttttgccttgtttaaatgaaatgcatgtttagtgagcactaatacaatcttattccagaagactgtttttagtagcttattgtgaagtaagacaactataatgaatgtctgtcttgtttggaagtcatatctgtctttgcacaaatgtaccaatcgacaagtatattttatatattccataaaaatacaaagtaaccctgactagggcccaactttaattttgaatgcatttccagagtggccatgcctagagggcagatgcagagcaggtggtagtgggacaggacaattggagcacaggaatgttaacatgtatgacaggggaccagtagggtggtttccctctcaggcccagcagcccattgacagcattagactggcggcatggtgcttttctgagcagatcaatactctgcagactcgaaaaaacatcacatacattcttggaacttcccagtggtttaatctatgtgcatggttagggagccaggtctggaatattcagtttccctgcccctgttaaagaatcagaggttgggcagtcatcaaattcatcataaagacatgggcaagtgtgtctgtggtttccaaggcccccctatggagaatccaaaagtattttccattgccgtgctctttgaatgcagacttctatttccagaagtgacagcacaagtctgagttgctgtttggtctggtgacctcagacacactaatttgaattgaaagctaagagtaaaaatttgctggttacaggcgagtcatactcttgcaagtagttagcaaagggaggcccaaattctcaaggttgttgatggggaacttgccactaagagaaggcagagaggtccctagtgggtatatttgctgccaagccacttgccaaagaagaggaaccacagaaagagagacatcatgaccaggagaaaaatgtgactagacatgctaacctccaggtttttatatatgacttgagtctgctgtaattggcagcagaaatccaaatttgtatggtagaccaaaaagaaccaaatccatagggtgaaattttgagacctagactctgtaaaaataatcctagtcttcctccaggggtcagttcctcacagtggttctgtaccaaaacttgccaaattcctccatggccaagtgttaaaatctgtgtttggaaaatagcgaattaacctaagacacagaaggcagactgggtgaggagacctagcatgccctattggcagtgctcaggagctgcatcccacttttccctgctctgaatcgaagtcctagttccttcctttgattctcctttggtaggtggaatcagttaatgttttgagaaacctgcctgggctctgcccttagtcatgacatctcgctgagccagacccactctgttccttggaacctagagctggagtgaggagtagaggtctccggctattccagaaagaaaagtgagccacatgcaggctgatgaatgccgacacttccagaatgtatagaaatagtccctgtcctggcctgccactgaccctgtctgtattttctcggaggttgtttttctccttctccttcccaggaaggtctttgtatgtcgaatccagtgcactcaagtttggccaagggactccacagcacccagaagactgcatgcctcaaggtttatgtcactcctctgctgggctgttcattgtcattgctgtgttcagggacctttggaaataaaacctgttctgtcccaaataaaaccagcctgtgatgttcaagggactggaataaagtggcttacgacctgaaggattctacaga

SEQ ID NO: 19960 - DNA, 3727 bp, Homo sapiens
  source 1..3727: mol_type = unassigned DNA
gacggtgctgtccagggggaggcgggcggagggaaggcgctgccgctgctgccgccgcctcgcccgaagcgacacagacgctgggagcggccgaggcgagatgtatttagactttttaattattcttcctagttcctgataagctaagacaatacttttatttttgacagagtgatttcttctgacttgagcctgcagtgtgctgtgagagatctaccactagattatctcaactttggtctcctgggaccactcgttgctgacagtcagaaattgcaaggcatctgatctcctggtgttaaaatctgtcgtgataccgaggaaggccccgagatcccaggcactgagtgactgcatactctgaattcttgccgccaggatggggaaacagaacagcaagctgcgcccggaggtcatgcaggacttgctggaaagcacagactttacagagcatgagatccaggaatggtataaaggcttcttgagagactgccccagtggacatttgtcaatggaagagtttaagaaaatatatgggaactttttcccttatggggatgcttccaaatttgcagagcatgtcttccgcaccttcgatgcaaatggagatgggacaatagactttagagaattcatcatcgccttgagtgtaacttcgagggggaagctggagcagaagctgaaatgggccttcagcatgtacgacctggacggaaatggctatatcagcaaggcagagatgctagagatcgtgcaggcaatctataagatggtttcctctgtaatgaaaatgcctgaagatgagtcaaccccagagaaaagaacagaaaagatcttccgccagatggacaccaatagagacggaaaactctccctggaagagttcatccgaggagccaaaagcgacccgtccattgtgcgcctcctgcagtgcgacccgagcagtgccggccagttctgagccctgcgcccaccaatcgaattgtagagctgcttgtgttcccttttgattcttctttttaacaatttttttttttttttgccaaacaatatcaatggtgatgccgtcccctgtgcggtctgatgcgccttcctccgtgacgccttcagcttcttttgtcgtggatgcttcgtgggaatgcccagagccccagtgtgcttgtggagagcatggacagacttcgtggtgttcattgtttgatgatttttaatcgttactattatttttttttattctaatgtctctgttctaaaacgtaagactcgggggttggggcaaaagaagggaaacccatccagtcctgtgattctattgcaagcttcaaggggcttttgtttgaaagacaaaactccccacctgaatctgttgtcacacgtgccgtaggggtgatggatggcaccggatgctggattccccaagaacaagttaccctctggggtgaggctattccagcgagctgggacatttccccatgggggcccactcccctctcttccccagcaggctgtagtttctaagctgtgaacatttcaagataaattaacagaggagaggaaaaagatggctcagctattttttcacaggtttacactagttgagctaatatgcgtgtctttggaaattaaacacaaatggtaacatattccaaaaccagacccatcttgttgcctattgtgataaaataaaaagacggctgtatataacatattgggtaatgcagaccaaattaagtgttttgccttgtttaaatgaaatgcatgtttagtgagcactaatacaatcttattccagaagactgtttttagtagcttattgtgaagtaagacaactataatgaatgtctgtcttgtttggaagtcatatctgtctttgcacaaatgtaccaatcgacaagtatattttatatattccataaaaatacaaagtaaccctgactagggcccaactttaattttgaatgcatttccagagtggccatgcctagagggcagatgcagagcaggtggtagtgggacaggacaattggagcacaggaatgttaacatgtatgacaggggaccagtagggtggtttccctctcaggcccagcagcccattgacagcattagactggcggcatggtgcttttctgagcagatcaatactctgcagactcgaaaaaacatcacatacattcttggaacttcccagtggtttaatctatgtgcatggttagggagccaggtctggaatattcagtttccctgcccctgttaaagaatcagaggttgggcagtcatcaaattcatcataaagacatgggcaagtgtgtctgtggtttccaaggcccccctatggagaatccaaaagtattttccattgccgtgctctttgaatgcagacttctatttccagaagtgacagcacaagtctgagttgctgtttggtctggtgacctcagacacactaatttgaattgaaagctaagagtaaaaatttgctggttacaggcgagtcatactcttgcaagtagttagcaaagggaggcccaaattctcaaggttgttgatggggaacttgccactaagagaaggcagagaggtccctagtgggtatatttgctgccaagccacttgccaaagaagaggaaccacagaaagagagacatcatgaccaggagaaaaatgtgactagacatgctaacctccaggtttttatatatgacttgagtctgctgtaattggcagcagaaatccaaatttgtatggtagaccaaaaagaaccaaatccatagggtgaaattttgagacctagactctgtaaaaataatcctagtcttcctccaggggtcagttcctcacagtggttctgtaccaaaacttgccaaattcctccatggccaagtgttaaaatctgtgtttggaaaatagcgaattaacctaagacacagaaggcagactgggtgaggagacctagcatgccctattggcagtgctcaggagctgcatcccacttttccctgctctgaatcgaagtcctagttccttcctttgattctcctttggtaggtggaatcagttaatgttttgagaaacctgcctgggctctgcccttagtcatgacatctcgctgagccagacccactctgttccttggaacctagagctggagtgaggagtagaggtctccggctattccagaaagaaaagtgagccacatgcaggctgatgaatgccgacacttccagaatgtatagaaatagtccctgtcctggcctgccactgaccctgtctgtattttctcggaggttgtttttctccttctccttcccaggaaggtctttgtatgtcgaatccagtgcactcaagtttggccaagggactccacagcacccagaagactgcatgcctcaaggtttatgtcactcctctgctgggctgttcattgtcattgctgtgttcagggacctttggaaataaaacctgttctgtcccaaataaaaccagcctgtgatgttcaagggactggaataaagtggcttacgacctgaaggattctacagagtgctcaactgttcatacatcattcagagtgggagggagctgggggtgctgtcccatcccatctgtatgcccacggtggatttaataatatataatttataaatcatagcctatggagtggcccgtaaatcagttgactgtgtagctcttgcctggcattaaagcatgtttttggtttaacatg

SEQ ID NO: 19961 - DNA, 3808 bp, Homo sapiens
  source 1..3808: mol_type = unassigned DNA
aggggccccttagatgtcttcctccggattttttgttaagcttttcctagacagtttacagaaggctttgggtagagaaagcactagttagacaaaagcagcccccctcccaccttgtgggcatgaagagtccagaggacaccacctgagaagcttttcaactgccttccaaggctcccttgaacttcactgcggtagagcagggaccccagaccccccctcaaatcgaagcttggaaggaggtgctctaggctgaatctgacctcccaggacccgaggaggcaagcagatggcaccccttggaaagtagcagtgcaggctggctagaggcctgggcgagtgatttcttctgacttgagcctgcagtgtgctgtgagagatctaccactagattatctcaactttggtctcctgggaccactcgttgctgacagtcagaaactgaattcttgccgccaggatggggaaacagaacagcaagctgcgcccggaggtcatgcaggacttgctggaaagcacagactttacagagcatgagatccaggaatggtataaaggcttcttgagagactgccccagtggacatttgtcaatggaagagtttaagaaaatatatgggaactttttcccttatggggatgcttccaaatttgcagagcatgtcttccgcaccttcgatgcaaatggagatgggacaatagactttagagaattcatcatcgccttgagtgtaacttcgagggggaagctggagcagaagctgaaatgggccttcagcatgtacgacctggacggaaatggctatatcagcaaggcagagatgctagagatcgtgcaggcaatctataagatggtttcctctgtaatgaaaatgcctgaagatgagtcaaccccagagaaaagaacagaaaagatcttccgccagatggacaccaatagagacggaaaactctccctggaagagttcatccgaggagccaaaagcgacccgtccattgtgcgcctcctgcagtgcgacccgagcagtgccggccagttctgagccctgcgcccaccaatcgaattgtagagctgcttgtgttcccttttgattcttctttttaacaatttttttttttttttgccaaacaatatcaatggtgatgccgtcccctgtgcggtctgatgcgccttcctccgtgacgccttcagcttcttttgtcgtggatgcttcgtgggaatgcccagagccccagtgtgcttgtggagagcatggacagacttcgtggtgttcattgtttgatgatttttaatcgttactattatttttttttattctaatgtctctgttctaaaacgtaagactcgggggttggggcaaaagaagggaaacccatccagtcctgtgattctattgcaagcttcaaggggcttttgtttgaaagacaaaactccccacctgaatctgttgtcacacgtgccgtaggggtgatggatggcaccggatgctggattccccaagaacaagttaccctctggggtgaggctattccagcgagctgggacatttccccatgggggcccactcccctctcttccccagcaggctgtagtttctaagctgtgaacatttcaagataaattaacagaggagaggaaaaagatggctcagctattttttcacaggtttacactagttgagctaatatgcgtgtctttggaaattaaacacaaatggtaacatattccaaaaccagacccatcttgttgcctattgtgataaaataaaaagacggctgtatataacatattgggtaatgcagaccaaattaagtgttttgccttgtttaaatgaaatgcatgtttagtgagcactaatacaatcttattccagaagactgtttttagtagcttattgtgaagtaagacaactataatgaatgtctgtcttgtttggaagtcatatctgtctttgcacaaatgtaccaatcgacaagtatattttatatattccataaaaatacaaagtaaccctgactagggcccaactttaattttgaatgcatttccagagtggccatgcctagagggcagatgcagagcaggtggtagtgggacaggacaattggagcacaggaatgttaacatgtatgacaggggaccagtagggtggtttccctctcaggcccagcagcccattgacagcattagactggcggcatggtgcttttctgagcagatcaatactctgcagactcgaaaaaacatcacatacattcttggaacttcccagtggtttaatctatgtgcatggttagggagccaggtctggaatattcagtttccctgcccctgttaaagaatcagaggttgggcagtcatcaaattcatcataaagacatgggcaagtgtgtctgtggtttccaaggcccccctatggagaatccaaaagtattttccattgccgtgctctttgaatgcagacttctatttccagaagtgacagcacaagtctgagttgctgtttggtctggtgacctcagacacactaatttgaattgaaagctaagagtaaaaatttgctggttacaggcgagtcatactcttgcaagtagttagcaaagggaggcccaaattctcaaggttgttgatggggaacttgccactaagagaaggcagagaggtccctagtgggtatatttgctgccaagccacttgccaaagaagaggaaccacagaaagagagacatcatgaccaggagaaaaatgtgactagacatgctaacctccaggtttttatatatgacttgagtctgctgtaattggcagcagaaatccaaatttgtatggtagaccaaaaagaaccaaatccatagggtgaaattttgagacctagactctgtaaaaataatcctagtcttcctccaggggtcagttcctcacagtggttctgtaccaaaacttgccaaattcctccatggccaagtgttaaaatctgtgtttggaaaatagcgaattaacctaagacacagaaggcagactgggtgaggagacctagcatgccctattggcagtgctcaggagctgcatcccacttttccctgctctgaatcgaagtcctagttccttcctttgattctcctttggtaggtggaatcagttaatgttttgagaaacctgcctgggctctgcccttagtcatgacatctcgctgagccagacccactctgttccttggaacctagagctggagtgaggagtagaggtctccggctattccagaaagaaaagtgagccacatgcaggctgatgaatgccgacacttccagaatgtatagaaatagtccctgtcctggcctgccactgaccctgtctgtattttctcggaggttgtttttctccttctccttcccaggaaggtctttgtatgtcgaatccagtgcactcaagtttggccaagggactccacagcacccagaagactgcatgcctcaaggtttatgtcactcctctgctgggctgttcattgtcattgctgtgttcagggacctttggaaataaaacctgttctgtcccaaataaaaccagcctgtgatgttcaagggactggaataaagtggcttacgacctgaaggattctacagagtgctcaactgttcatacatcattcagagtgggagggagctgggggtgctgtcccatcccatctgtatgcccacggtggatttaataatatataatttataaatcatagcctatggagtggcccgtaaatcagttgactgtgtagctcttgcctggcattaaagcatgtttttggtttaacatg

SEQ ID NO: 19962 - DNA, 1832 bp, Homo sapiens
  source 1..1832: mol_type = unassigned DNA
aaaaaaaaaaaaaaaaaaaaaaaaaaactgaattcttgccgccaggatggggaaacagaacagcaagctgcgcccggaggtcatgcaggacttgctggaaagcacagactttacagagcatgagatccaggaatggtataaaggcttcttgagagactgccccagtggacatttgtcaatggaagagtttaagaaaatatatgggaactttttcccttatggggatgcttccaaatttgcagagcatgtcttccgcaccttcgatgcaaatggagatgggacaatagactttagagaattcatcatcgccttgagtgtaacttcgagggggaagctggagcagaagctgaaatgggccttcagcatgtacgacctggacggaaatggctatatcagcaaggcagagatgctagagatcgtgcaggcaatctataagatggtttcctctgtaatgaaaatgcctgaagatgagtcaaccccagagaaaagaacagaaaagatcttccgccagatggacaccaatagagacggaaaactctccctggaagagttcatccgaggagccaaaagcgacccgtccattgtgcgcctcctgcagtgcgacccgagcagtgccggccagttctgagccctgcgcccaccaatcgaattgtagagctgcttgtgttcccttttgattcttctttttaacaatttttttttttttttgccaaacaatatcaatggtgatgccgtcccctgtgcggtctgatgcgccttcctccgtgacgccttcagcttcttttgtcgtggatgcttcgtgggaatgcccagagccccagtgtgcttgtggagagcatggacagacttcgtggtgttcattgtttgatgatttttaatcgttactattatttttttttattctaatgtctctgttctaaaacgtaagactcgggggttggggcaaaagaagggaaacccatccagtcctgtgattctattgcaagcttcaaggggcttttgtttgaaagacaaaactccccacctgaatctgttgtcacacgtgccgtaggggtgatggatggcaccggatgctggattccccaagaacaagttaccctctggggtgaggctattccagcgagctgggacatttccccatgggggcccactcccctctcttccccagcaggctgtagtttctaagctgtgaacatttcaagataaattaacagaggagaggaaaaagatggctcagctattttttcacaggtttacactagttgagctaatatgcgtgtctttggaaattaaacacaaatggtaacatattccaaaaccagacccatcttgttgcctattgtgataaaataaaaagacggctgtatataacatattgggtaatgcagaccaaattaagtgttttgccttgtttaaatgaaatgcatgtttagtgagcactaatacaatcttattccagaagactgtttttagtagcttattgtgaagtaagacaactataatgaatgtctgtcttgtttggaagtcatatctgtctttgcacaaatgtaccaatcgacaagtatattttatatattccataaaaatacaaagtaaccctgactagggcccaactttaattttgaatgcatttccagagtggccatgcctagagggcagatgcagagcaggtggtagtgggacaggacaattggagcacaggaatgttaacatgtatgacaggggaccagtagggtggtttccctctcaggcccagcagcccattgacagcattagactggcggcatggtgcttttctgagcagatcaatactctgcagactcgaaaaaaca

SEQ ID NO: 19963 - DNA, 2289 bp, Homo sapiens
  source 1..2289: mol_type = unassigned DNA
gggggaggcgggcggagggaaggcgctgccgctgctgccgccgcctcgcccgaagcgacacagacgctgggagcggccgaggcgagatcctatcattattttaaaattcctcctcctccacgaagtccttcctgattccttcaaagaaatatcactcctccgaattcccagagtgatttcttctgacttgagcctgcagtgtgctgtgagagatctaccactagattatctcaactttggtctcctgggaccactcgttgctgacagtcagaaactgaattcttgccgccaggatggggaaacagaacagcaagctgcgcccggaggtcatgcaggacttgctggaaagcacagactttacagagcatgagatccaggaatggtataaaggcttcttgagagactgccccagtggacatttgtcaatggaagagtttaagaaaatatatgggaactttttcccttatggggatgcttccaaatttgcagagcatgtcttccgcaccttcgatgcaaatggagatgggacaatagactttagagaattcatcatcgccttgagtgtaacttcgagggggaagctggagcagaagctgaaatgggccttcagcatgtacgacctggacggaaatggctatatcagcaaggcagagatgctagagatcgtgcaggcaatctataagatggtttcctctgtaatgaaaatgcctgaagatgagtcaaccccagagaaaagaacagaaaagatcttccgccagatggacaccaatagagacggaaaactctccctggaagagttcatccgaggagccaaaagcgacccgtccattgtgcgcctcctgcagtgcgacccgagcagtgccggccagttctgagccctgcgcccaccaatcgaattgtagagctgcttgtgttcccttttgattcttctttttaacaatttttttttttttttgccaaacaatatcaatggtgatgccgtcccctgtgcggtctgatgcgccttcctccgtgacgccttcagcttcttttgtcgtggatgcttcgtgggaatgcccagagccccagtgtgcttgtggagagcatggacagacttcgtggtgttcattgtttgatgatttttaatcgttactattatttttttttattctaatgtctctgttctaaaacgtaagactcgggggttggggcaaaagaagggaaacccatccagtcctgtgattctattgcaagcttcaaggggcttttgtttgaaagacaaaactccccacctgaatctgttgtcacacgtgccgtaggggtgatggatggcaccggatgctggattccccaagaacaagttaccctctggggtgaggctattccagcgagctgggacatttccccatgggggcccactcccctctcttccccagcaggctgtagtttctaagctgtgaacatttcaagataaattaacagaggagaggaaaaagatggctcagctattttttcacaggtttacactagttgagctaatatgcgtgtctttggaaattaaacacaaatggtaacatattccaaaaccagacccatcttgttgcctattgtgataaaataaaaagacggctgtatataacatattgggtaatgcagaccaaattaagtgttttgccttgtttaaatgaaatgcatgtttagtgagcactaatacaatcttattccagaagactgtttttagtagcttattgtgaagtaagacaactataatgaatgtctgtcttgtttggaagtcatatctgtctttgcacaaatgtaccaatcgacaagtatattttatatattccataaaaatacaaagtaaccctgactagggcccaactttaattttgaatgcatttccagagtggccatgcctagagggcagatgcagagcaggtggtagtgggacaggacaattggagcacaggaatgttaacatgtatgacaggggaccagtagggtggtttccctctcaggcccagcagcccattgacagcattagactggcggcatggtgcttttctgagcagatcaatactctgcagactcgaaaaaacatcacatacattcttggaacttcccagtggtttaatctatgtgcatggttagggagccaggtctggaatattcagtttccctgcccctgttaaagaatcagaggttgggcagtcatcaaattcatcataaagacatgggcaagtgtgtctgtggtttccaaggcccccctatggagaatccaaaagtattttccattgccgtgctctttga

SEQ ID NO: 19964 - DNA, 6406 bp, Homo sapiens
  source 1..6406: mol_type = unassigned DNA
ggggctggacccggcgcggagctggctgagtcggagcgcagcgtcctttgtgcccggcggccgccccgggatgcgtccgagctaggagccagatccaggatgggggccccgtttgtctgggccttgggccttttgatgctgcagatgctgctctttgtggctggggaacagggcacacaggatatcaccgatgccagcgaaagggggctccacatgcagaagctggggtctgggtcagtgcaggctgcgctggcggagctggtggccctgccctgtctctttaccctgcagccacggccaagcgcagcccgagatgcccctcggataaagtggaccaaggtgcggactgcgtcgggccagcgacaggacttgcccatcctggtggccaaggacaatgtcgtgagggtggccaaaagctggcagggacgagtgtcactgccttcctacccccggcgccgagccaacgccacgctacttctggggccactgagggccagtgactctgggctgtaccgctgccaggtggtgaggggcatcgaggatgagcaggacctggtgcccttggaggtgacaggtgttgtgttccactaccgatcagcccgggaccgctatgcactgaccttcgctgaggcccaggaggcctgccgtctcagctcagccatcattgcagcccctcggcatctacaggctgcctttgaggatggctttgacaactgtgatgctggctggctctctgaccgcactgttcggtatcctatcacccagtcccgtcctggttgctatggcgaccgtagcagccttccaggggttcggagctatgggaggcgcaacccacaggaactctacgatgtgtattgctttgcccgggagctggggggcgaggtcttctacgtgggcccggcccgccgcctgacactggccggcgcgcgtgcacagtgccgccgccagggtgccgcgctggcctcggtgggacagctgcacctggcctggcatgagggcctggaccagtgcgacccgggctggctggccgacggcagcgtgcgctacccgatccagacgccgcgccggcgctgcgggggcccagccccgggcgtgcgcaccgtctaccgcttcgctaaccggaccggcttcccctcacccgccgagcgcttcgacgcctactgcttccgagctcatcaccccacgtcacaacatggagacctagagaccccatcctctggggatgagggggagattctgtcagcagaggggcccccagttagagaactggagcccaccctggaggaggaagaggtggtcacccctgacttccaggagcctctggtgtccagtggggaagaagaaaccctgattttggaggagaagcaggagtctcaacagaccctcagccctacccctggggaccccatgctggcctcatggcccactggggaagtgtggctaagcacggtggcccccagccctagcgacatgggggcaggcactgcagcaagttcacacacggaggtggccccaactgaccctatgcctaggagaagggggcgcttcaaagggttgaatgggcgctacttccagcagcaggaaccggagccggggctgcaaggggggatggaggccagcgcccagccccccacctcagaggctgcagtgaaccaaatggagcctccgttggccatggcagtcacagagatgttgggcagtggccagagccggagcccctgggctgatctgaccaatgaggtggatatgcctggagctggttctgctggtggcaagagctccccagagccctggctgtggccccctaccatggtcccacccagcatctcaggccacagcagggcccctgtcctggagctagagaaagccgagggccccagtgccaggccagccaccccagacctgttttggtcccccttggaggccactgtctcagctcccagccctgccccctgggaggcattccctgtggccacctccccagatctccctatgatggccatgctgcgtggtcccaaagagtggatgctaccacaccccacccccatctccaccgaggccaatagagttgaggcacatggtgaggccaccgccacggctccaccctcccctgctgcagagaccaaggtgtattccctgcctctctctttgaccccaacaggacagggtggagaggccatgcccacaacacctgagtcccccagggcagacttcagagaaactggggagaccagccctgctcaggtcaacaaagctgagcactccagctccagcccatggccttctgtaaacaggaatgtggctgtaggttttgtccccactgagactgccactgagccaacgggcctcaggggtatcccggggtctgagtctggggtcttcgacacagcagaaagccccacttctggcttgcaggccactgtagatgaggtgcaggacccctggccctcagtgtacagcaaagggctggatgcaagttccccatctgcccccctggggagccctggagtcttcttggtacccaaagtcaccccaaatttggagccttgggttgctacagatgaaggacccactgtgaatcccatggattccacagtcacgccggcccccagtgatgctagtggaatttgggaacctggatcccaggtgtttgaagaagccgaaagcaccaccttgagccctcaggtggccctggatacaagcattgtgacgcccctcacgaccctggagcagggggacaaggttggagttccagccatgtctacactgggctcctcaagctcccaaccccacccagagccagaggatcaggtggagacccagggaacatcaggagcttcagtgcctccgcatcagagcagtcccctagggaaaccggctgttcctcctgggacaccgactgcagccagtgtgggcgagtctgcctcagtttcctcaggggagcctacggtaccgtgggacccctccagcaccctgctgcctgtcaccctgggcatagaggacttcgaactggaggtcctggcagggagcccgggtgtagagagcttctgggaggaggtggcaagtggagaggagccagccctgccagggacccctatgaatgcaggtgcggaggaggtgcactcagatccctgtgagaacaacccttgtcttcatggagggacatgtaatgccaatggcaccatgtatggctgtagctgtgatcagggcttcgccggggagaactgtgagattgacattgatgactgcctctgcagcccctgtgagaatggaggcacctgtattgatgaggtcaatggctttgtctgcctttgcctccccagctatgggggcagcttttgtgagaaagacaccgagggctgtgaccgcggctggcataagttccagggccactgttaccgctattttgcccaccggagggcatgggaagatgccgagaaggactgccgccgccgctccggccacctgaccagcgtccactcaccggaggaacacagcttcattaatagctttgggcatgaaaacacgtggatcggcctgaacgacaggatcgtggagagagatttccagtggacggacaacaccgggctgcaatttgagaactggcgagagaaccagccggacaatttcttcgcgggtggcgaggactgtgtggtgatggtggcgcatgaaagcgggcgctggaacgatgtcccctgcaactacaacctaccctatgtctgcaagaagggcacagtgctctgtggtccccctccggcagtggagaatgcctcactcatcggtgcccgcaaggccaagtacaatgtccatgccactgtaaggtaccagtgcaatgaaggatttgcccagcaccatgtggccaccattcgatgccggagcaatggcaagtgggacaggccccaaattgtctgcaccaaacccagacgttcacatcggatgcggcgacaccaccaccaccaccaacaccaccaccagcatcaccaccacaaatcccgcaaggagcgcagaaaacacaagaaacacccaacggaggactgggagaaggacgaagggaatttctgctgaagaaccagaaaaaagaaagcacaacacctttcccatgcctcctctggagccttcgcctggggagacagaacccagagagaaacaagagagtccagaagtccctgaaccccaaaccacatcccccacacacataatcctttgtacaaagctcctcttttccctttttttacatacacaagatcctcttggcaggtggagccaggtgtctgaaaagttcattctcgtctggctgaactctgggagtgtgtcccagctgagggaagcacaagtagcaaagctcattggtctggtctcttgtttgccaggctgattgaagcaggccttgatgagggtgcatgagtgtatgtttgcattcacatgaaggaattgcttttcacaccagaaattcagacttagtcaatgttggctgaattcctaaatccaggaagaagcctggacgtagggtcattagctttgggaatagaaggctacacagaagcacactgtttttgaacttgacaacagctctccctttaccctggacttcagcccaagttccgtctttggtcttggtggataaacacacagtgtggagatcccacgtactgcattttagggatgtttttaggacaacctccctccatgccttcagagttaggagtgagaatgatcaaagcaatatgtaggtgatggagggagagtgtattgctaacccttccaggtctagtccagcgctgagatttggtggttctgcatgtgtgatgaatctctttcacacaaatagacgagaggatatttagggctagatgagcccagatttcttccccctccatctctcagggagacaaagaacctccttcctggaccaaggaggtgctgccaagttttctagcccagtgcacatacccagtccttaagcagacattggtagtgcccctgccctgggtcccactcctgccccaccccacccttgtccctggccattgcctggtggtctagaaacacttaaaacttgaagtagtgacacctacctgcggtcatattgtagagagatgctcagtgttaaaactgaaacacacaaacacacacacacacacatttttctcttgtagattttaattttttaagtgggaaagaactcaccttgccttcctcccccaaatgtgcaacctgtaaaaggtctctccacaccaggggccaggatccagttccctcatctctggcaggaaagatccacagcttttcctccatgtctgttactcactttcagcagtccgggtaaaatctgtggatcagggttaaaaaagcaccgtggagaatggccctcttcaggaaagaaaaataagcaaatgaatggtccacctaggggttcagtaaagaaagaaatgtgttaactgagcctgaatcccttctgggaagtaataatgaccattgacaactaagaagtagacaccatgctaaagacttacatacaatctccttgaatcttctcaatagcccattgacttagaaactgttactttcccattttacacacagtgaaactgaggctcagatataaaggaaaggtactggcttgaagtcacaaccacgacaggagtaaggatttggaataaggatttggtcctgttttctggaccaaatccttactctggctctgcttacactttctctccatcaccaaatccttactccaaatccagaagtcagagccaactcccatcttggttctgacccaaatcctgctctggactctggagaggagattgaaatataattgcaccctcatacacatttaggaaatggttaagaagtgtaaactgaacccttatccttgtcttcaatcttcctccctgtagacatctatcttattatggttattattcagaaaacccagggatacaggtttgtcttcttactttgataactcttcttagtttaaaataataataataacacatctttggtcatctatgtcacacaaaaattttcctttgtttgcggggggctggggatgcagtgttttttggggggtcttggtttatgctccctgcccttgagcccctcagccgtttgccctgcccccacctcggctccatggtgggagggggctctggtcttttctaaagtgggcggtttgtcttttgatctttcccttttggatgtgcgtgtgtgtctgcgtgtgccatgtgcgtggcacgcatatgagtgtgtgtgcgtgtgaacggctttgggtcctgctggttttgctgtgagctgcagtgttctgtgggtctgtggtatctgacactgtggacattaatgtacttcttggacattttaataaattttttaacagttcaacctgcccgtcaccacctga

SEQ ID NO: 19965 - DNA, 2580 bp, Homo sapiens
  source 1..2580: mol_type = unassigned DNA
gggcagtggccagagccggagcccctgggctgatctgaccaatgaggtggatatgcctggagctggttctgctggtggcaagagctccccagagccctggctgtggccccctaccatggtcccacccagcatctcaggccacagcagggcccctgtcctggagctagagaaagccgagggccccagtgccaggccagccaccccagacctgttttggtcccccttggaggccactgtctcagctcccagccctgccccctgggaggcattccctgtggccacctccccagatctccctatgatggccatgctgcgtggtcccaaagagtggatgctaccacaccccacccccatctccaccgaggccaatagagttgaggcacatggtgaggccaccgccacggctccaccctcccctgctgcagagaccaaggtgtattccctgcctctctctttgaccccaacaggacagggtggagaggccatgcccacaacacctgagtcccccagggcagacttcagagaaactggggagaccagccctgctcaggtcaacaaagctgagcactccagctccagcccatggccttctgtaaacaggaatgtggctgtaggttttgtccccactgagactgccactgagccaacgggcctcaggggtatcccggggtctgagtctggggtcttcgacacagcagaaagccccacttctggcttgcaggccactgtagatgaggtgcaggacccctggccctcagtgtacagcaaagggctggatgcaagttccccatctgcccccctggggagccctggagtcttcttggtacccaaagtcaccccaaatttggagccttgggttgctacagatgaaggacccactgtgaatcccatggattccacagtcacgccggcccccagtgatgctagtggaatttgggaacctggatcccaggtgtttgaagaagccgaaagcaccaccttgagccctcaggtggccctggatacaagcattgtgacgcccctcacgaccctggagcagggggacaaggttggagttccagccatgtctacactgggctcctcaagctcccaaccccacccagagccagaggatcaggtggagacccagggaacatcaggagcttcagtgcctccgcatcagagcagtcccctagggaaaccggctgttcctcctgggacaccgactgcagccagtgtgggcgagtctgcctcagtttcctcaggggagcctacggtaccgtgggacccctccagcaccctgctgcctgtcaccctgggcatagaggacttcgaactggaggtcctggcagggagcccgggtgtagagagcttctgggaggaggtggcaagtggagaggagccagccctgccagggacccctatgaatgcaggtgcggaggaggtgcactcagatccctgtgagaacaacccttgtcttcatggagggacatgtaatgccaatggcaccatgtatggctgtagctgtgatcagggcttcgccggggagaactgtgagattgacattgatgactgcctctgcagcccctgtgagaatggaggcacctgtattgatgaggtcaatggctttgtctgcctttgcctccccagctatgggggcagcttttgtgagaaagacaccgagggctgtgaccgcggctggcataagttccagggccactgttaccgctattttgcccaccggagggcatgggaagatgccgagaaggactgccgccgccgctccggccacctgaccagcgtccactcaccggaggaacacagcttcattaatagctttgggcatgaaaacacgtggatcggcctgaacgacaggatcgtggagagagatttccagtggacggacaacaccgggctgcaatttgagaactggcgagagaaccagccggacaatttcttcgcgggtggcgaggactgtgtggtgatggtggcgcatgaaagcgggcgctggaacgatgtcccctgcaactacaacctaccctatgtctgcaagaagggcacagtgctctgtggtccccctccggcagtggagaatgcctcactcatcggtgcccgcaaggccaagtacaatgtccatgccactgtaaggtaccagtgcaatgaaggatttgcccagcaccatgtggccaccattcgatgccggagcaatggcaagtgggacaggccccaaattgtctgcaccaaacccagacgttcacatcggatgcggcgacaccaccaccaccaccaacaccaccaccagcatcaccaccacaaatcccgcaaggagcgcagaaaacacaagaaacacccaacggaggactgggagaaggacgaagggaatttctgctgaagaaccagaaaaaagaaagcacaacacctttcccatgcctcctctggagccttcgcctggggagacagaacccagagagaaacaagagagtccagaagtccctgaaccccaaaccacatcccccacacacaaaaattttcctttgtttgcggggggctggggatgcagtgttttttggggggtcttggtttatgctccctgcccttgag

SEQ ID NO: 19966 - DNA, 6406 bp, Homo sapiens; identical to SEQ ID NO: 19964
  source 1..6406: mol_type = unassigned DNA

SEQ ID NO: 19967 - DNA, 3433 bp, Homo sapiens
  source 1..3433: mol_type = unassigned DNA
agccaggagtgggcaacgcggcgtgagcagcggcccgaggctcccggagcatcgcgctgggagaagacttcgccgctcggggccgcagcctgtgtgatctcatcgccgccctgtcgtgacttcatcaatgtcgtgttgtgacctggctgcggcgggacagttgggcaaggcgagcatcatggcctcggattgcgagccagctctgaaccaggcagagggccgaaaccccaccctggagcgctacctgggagccctccgtgaggccaagaatgacagcgagcagtttgcagccctgctgctagtgaccaaggcagtcaaagcaggtgacatagatgccaaaactcggcggcggatcttcgatgctgtcggcttcaccttccccaatcgtctcctgaccaccaaggaggcgccggatggctgccctgaccatgttctgcgggctttgggtgtggccctgctggcctgcttctgcagtgaccctgaactggccgcccatccccaagtcctgaacaagattcccattcttagcaccttcctcacagcccggggggacccggacgatgctgcccgccgctccatgattgatgacacctaccagtgcctgacggctgtagcaggcacacccagagggcctcggcacctcattgctggtggcaccgtgtctgccctatgccaggcatacctggggcacggctatggctttgaccaggccctggcactcctggtggggctgctggctgctgccgagacacagtgctggaaggaggcggagcccgacctgctggccgtgttgcggggcctcagtgaggatttccagaaagctgaggatgccagcaagtttgagctctgccagctgctgcccctctttttgcccccgacaaccgtgccccctgaatgctaccgggatctgcaggccgggctggcacgcatcctgggaagcaagctgagctcctggcagcgcaaccctgcactgaagctggcagcccgcctggcacacgcctgcggctccgactggatcccggcgggcagctccgggagcaagttcctggccctgctggtgaatctggcgtgcgtggaagtgcggctggcactggaggagacgggcacggaggtgaaagaggatgtggtgaccgcctgctatgccctcatggagttggggatccaggaatgcactcgctgtgagcagtcactgcttaaggagccacagaaggtgcagctcgtgagcgtcatgaaggaggccataggggctgttatccactacctgctgcaggtggggtcagagaagcagaaggagccctttgtgtttgcctcggtgcggatcctgggtgcctggctggccgaggagacctcatccttgcgtaaggaggtgtgccagctgctgcccttcctcgtccgctatgccaagaccctctacgaggaggccgaggaggccaatgacctttcccagcaggtggccaacctggccatctcccccaccaccccagggcccacctggccaggagacgctctccggctcctcctgcctggctggtgccacctgaccgttgaagatgggccccgggagatcctgatcaaggaaggggccccctcgcttctgtgcaagtatttcctgcagcagtgggaactcacatcccctggccacgacacctcggtgctgcctgacagcgtggagattggcctgcagacctgctgccacatcttcctcaacctcgtggtcaccgcaccggggctgatcaagcgtgacgcctgcttcacatctctaatgaacaccctcatgacgtcgctaccagcactagtgcagcaacagggaaggctgcttctggctgctaatgtggccaccctggggctcctcatggcccggctccttagcacctctccagctcttcagggaacaccagcatcccgagggttcttcgcagctgccatcctcttcctatcacagtcccacgtggcgcgggccaccccgggctcagaccaggcagtgctagccctgtcccctgagtatgagggcatctgggccgacctgcaggagctctggttcctgggcatgcaggccttcaccggctgtgtgcctctgctgccctggctggcccccgctgccctgcgctcccgctggccgcaggagctgctccagctgctaggcagtgtcagccccaactctgtcaagcccgagatggtggccgcctatcagggtgtcctggtggagctggcgcgggccaaccggctgtgccgggaggccatgaggctgcaggcgggcgaggagacggccagccactaccgcatggctgccttggagcagtgcctgtcagagccctgaggggtgtccaccggggacagacccaggggcgggcagagagggaaggagggaggaggcatcttccctgaagcccccaatctggcccccccctccccagacttcctccccaaaacaccccagctttctggcttttctgagggcaagggcatggtgcccacccctcaagtgtaaggaactgcgttccgcccctcaggcccccatgggggcagggatcggcttggaaatcaacgtggttgtccccgccaggccggggaaggttggagcagcccccagggaggggggcactaggtgtcattgtgcccgatgtctggctcccctgcaggagggaggctccagggtaagacagggctggcaggagcagactgcctcagcccatgtgccctgccggccagggcgtgggctcccctcggctgtggtgcctcctctggccccccaggtccacgtcctttaaattggccctttggctcttgcccttggctcccttgggcagacagcaggcttaggccattgatatcgcagttcttcctatcagcttcagtgacccagggtctgaactgcctccatcctagggcaacctggggcagacaggcctggtggggggtggggaaacctccttccacctgagcttgcttgaagggacccagagtctttgggcccagatctttaaacctttgtgtcgtgttgcagcagagtgacgatgggggttggggggttatttattttgcctgtccttatccctgcttggacacctgagcatctgattcctgtccccctggtgccatctggcctggctggagccaggaacaggagggacacttccccagaatccgcatgtttccccagtgattacactccactgccaccgtggtgcctggctttaactcccacccctgctatgactcctctctgcagagacgcgactggcggctccagcagggactacctttcttataaacccagggggaccacacacacacacacacacacacacacacacacacacacacacacacacactcttgatcccttgcttccctcccccagtgcgttctgtgatcgccaagttcaaagctgtgcacatgtggacactcaataaatgttcattggtgacgagaa

SEQ ID NO: 19968 - DNA, 3683 bp, Homo sapiens
  source 1..3683: mol_type = unassigned DNA
cgcggcgtgagcagcggcccgaggctcccggagcatcgcgctgggagaagacttcgccgctcggggccgcagcctggtgagctcagcccccttcgggccctcccctgcatcccagccggggcctctccgagccggcgctgatcgatgccgacacaccccggggaccctatcgcgactccatcgcgccatatcgcgacaccatcgtgccctgtcgagactccattttgtcacagcccttttcaatatatatcttttttttttttaatttgccctgtcatctttgggggctgtctcccatgtcgtgattttgacgtgatctctccgtgacatcaccgcgccatcgtgaagtgtgatctcatcgccgccctgtcgtgacttcatcaatgtcgtgttgtgacctggctgcggcgggacagttgggcaaggcgagcatcatggcctcggattgcgagccagctctgaaccaggcagagggccgaaaccccaccctggagcgctacctgggagccctccgtgaggccaagaatgacagcgagcagtttgcagccctgctgctagtgaccaaggcagtcaaagcaggtgacatagatgccaaaactcggcggcggatcttcgatgctgtcggcttcaccttccccaatcgtctcctgaccaccaaggaggcgccggatggctgccctgaccatgttctgcgggctttgggtgtggccctgctggcctgcttctgcagtgaccctgaactggccgcccatccccaagtcctgaacaagattcccattcttagcaccttcctcacagcccggggggacccggacgatgctgcccgccgctccatgattgatgacacctaccagtgcctgacggctgtagcaggcacacccagagggcctcggcacctcattgctggtggcaccgtgtctgccctatgccaggcatacctggggcacggctatggctttgaccaggccctggcactcctggtggggctgctggctgctgccgagacacagtgctggaaggaggcggagcccgacctgctggccgtgttgcggggcctcagtgaggatttccagaaagctgaggatgccagcaagtttgagctctgccagctgctgcccctctttttgcccccgacaaccgtgccccctgaatgctaccgggatctgcaggccgggctggcacgcatcctgggaagcaagctgagctcctggcagcgcaaccctgcactgaagctggcagcccgcctggcacacgcctgcggctccgactggatcccggcgggcagctccgggagcaagttcctggccctgctggtgaatctggcgtgcgtggaagtgcggctggcactggaggagacgggcacggaggtgaaagaggatgtggtgaccgcctgctatgccctcatggagttggggatccaggaatgcactcgctgtgagcagtcactgcttaaggagccacagaaggtgcagctcgtgagcgtcatgaaggaggccataggggctgttatccactacctgctgcaggtggggtcagagaagcagaaggagccctttgtgtttgcctcggtgcggatcctgggtgcctggctggccgaggagacctcatccttgcgtaaggaggtgtgccagctgctgcccttcctcgtccgctatgccaagaccctctacgaggaggccgaggaggccaatgacctttcccagcaggtggccaacctggccatctcccccaccaccccagggcccacctggccaggagacgctctccggctcctcctgcctggctggtgccacctgaccgttgaagatgggccccgggagatcctgatcaaggaaggggccccctcgcttctgtgcaagtatttcctgcagcagtgggaactcacatcccctggccacgacacctcggtgctgcctgacagcgtggagattggcctgcagacctgctgccacatcttcctcaacctcgtggtcaccgcaccggggctgatcaagcgtgacgcctgcttcacatctctaatgaacaccctcatgacgtcgctaccagcactagtgcagcaacagggaaggctgcttctggctgctaatgtggccaccctggggctcctcatggcccggctccttagcacctctccagctcttcagggaacaccagcatcccgagggttcttcgcagctgccatcctcttcctatcacagtcccacgtggcgcgggccaccccgggctcagaccaggcagtgctagccctgtcccctgagtatgagggcatctgggccgacctgcaggagctctggttcctgggcatgcaggccttcaccggctgtgtgcctctgctgccctggctggcccccgctgccctgcgctcccgctggccgcaggagctgctccagctgctaggcagtgtcagccccaactctgtcaagcccgagatggtggccgcctatcagggtgtcctggtggagctggcgcgggccaaccggctgtgccgggaggccatgaggctgcaggcgggcgaggagacggccagccactaccgcatggctgccttggagcagtgcctgtcagagccctgaggggtgtccaccggggacagacccaggggcgggcagagagggaaggagggaggaggcatcttccctgaagcccccaatctggcccccccctccccagacttcctccccaaaacaccccagctttctggcttttctgagggcaagggcatggtgcccacccctcaagtgtaaggaactgcgttccgcccctcaggcccccatgggggcagggatcggcttggaaatcaacgtggttgtccccgccaggccggggaaggttggagcagcccccagggaggggggcactaggtgtcattgtgcccgatgtctggctcccctgcaggagggaggctccagggtaagacagggctggcaggagcagactgcctcagcccatgtgccctgccggccagggcgtgggctcccctcggctgtggtgcctcctctggccccccaggtccacgtcctttaaattggccctttggctcttgcccttggctcccttgggcagacagcaggcttaggccattgatatcgcagttcttcctatcagcttcagtgacccagggtctgaactgcctccatcctagggcaacctggggcagacaggcctggtggggggtggggaaacctccttccacctgagcttgcttgaagggacccagagtctttgggcccagatctttaaacctttgtgtcgtgttgcagcagagtgacgatgggggttggggggttatttattttgcctgtccttatccctgcttggacacctgagcatctgattcctgtccccctggtgccatctggcctggctggagccaggaacaggagggacacttccccagaatccgcatgtttccccagtgattacactccactgccaccgtggtgcctggctttaactcccacccctgctatgactcctctctgcagagacgcgactggcggctccagcagggactacctttcttataaacccagggggaccacacacacacacacacacacacacacacacacacacacacacacacacactcttgatcccttgcttccctcccccagtgcgttctgtgatcgccaagttcaaagctgtgcacatgtggacactcaataaatgttcattggtga

SEQ ID NO: 19969 - DNA, 3677 bp, Homo sapiens
  source 1..3677: mol_type = unassigned DNA
cctcccccgggaagggcaatgccggccgcgagaccaagggggaggaggggcagtgctgggcgggtaaaactacgcacaagcgaaggaatctgggcccccagcctctcgccgcccgctctccagaggcagtctgcaccttgcctccttcgctcgagccccagcccccagactcgggcaatacccacaagcaagatggcggcaacggcggcaccccctactgcttagcaccctgacttgccattggccagagcccggagtgaagcagccgcggattcgtcaagagcggtgcgggggtgggggtggagctgcagcagcctggagccaggagtgggcaacgcggcgtgagcagcggcccgaggctcccggagcatcgcgctgggagaagacttcgccgctcggggccgcagcctgttgggcaaggcgagcatcatggcctcggattgcgagccagctctgaaccaggcagagggccgaaaccccaccctggagcgctacctgggagccctccgtgaggccaagaatgacagcgagcagtttgcagccctgctgctagtgaccaaggcagtcaaagcaggtgacatagatgccaaaactcggcggcggatcttcgatgctgtcggcttcaccttccccaatcgtctcctgaccaccaaggaggcgccggatggctgccctgaccatgttctgcgggctttgggtgtggccctgctggcctgcttctgcagtgaccctgaactggccgcccatccccaagtcctgaacaagattcccattcttagcaccttcctcacagcccggggggacccggacgatgctgcccgccgctccatgattgatgacacctaccagtgcctgacggctgtagcaggcacacccagagggcctcggcacctcattgctggtggcaccgtgtctgccctatgccaggcatacctggggcacggctatggctttgaccaggccctggcactcctggtggggctgctggctgctgccgagacacagtgctggaaggaggcggagcccgacctgctggccgtgttgcggggcctcagtgaggatttccagaaagctgaggatgccagcaagtttgagctctgccagctgctgcccctctttttgcccccgacaaccgtgccccctgaatgctaccgggatctgcaggccgggctggcacgcatcctgggaagcaagctgagctcctggcagcgcaaccctgcactgaagctggcagcccgcctggcacacgcctgcggctccgactggatcccggcgggcagctccgggagcaagttcctggccctgctggtgaatctggcgtgcgtggaagtgcggctggcactggaggagacgggcacggaggtgaaagaggatgtggtgaccgcctgctatgccctcatggagttggggatccaggaatgcactcgctgtgagcagtcactgcttaaggagccacagaaggtgcagctcgtgagcgtcatgaaggaggccataggggctgttatccactacctgctgcaggtggggtcagagaagcagaaggagccctttgtgtttgcctcggtgcggatcctgggtgcctggctggccgaggagacctcatccttgcgtaaggaggtgtgccagctgctgcccttcctcgtccgctatgccaagaccctctacgaggaggccgaggaggccaatgacctttcccagcaggtggccaacctggccatctcccccaccaccccagggcccacctggccaggagacgctctccggctcctcctgcctggctggtgccacctgaccgttgaagatgggccccgggagatcctgatcaaggaaggggccccctcgcttctgtgcaagtatttcctgcagcagtgggaactcacatcccctggccacgacacctcggtgctgcctgacagcgtggagattggcctgcagacctgctgccacatcttcctcaacctcgtggtcaccgcaccggggctgatcaagcgtgacgcctgcttcacatctctaatgaacaccctcatgacgtcgctaccagcactagtgcagcaacagggaaggctgcttctggctgctaatgtggccaccctggggctcctcatggcccggctccttagcacctctccagctcttcagggaacaccagcatcccgagggttcttcgcagctgccatcctcttcctatcacagtcccacgtggcgcgggccaccccgggctcagaccaggcagtgctagccctgtcccctgagtatgagggcatctgggccgacctgcaggagctctggttcctgggcatgcaggccttcaccggctgtgtgcctctgctgccctggctggcccccgctgccctgcgctcccgctggccgcaggagctgctccagctgctaggcagtgtcagccccaactctgtcaagcccgagatggtggccgcctatcagggtgtcctggtggagctggcgcgggccaaccggctgtgccgggaggccatgaggctgcaggcgggcgaggagacggccagccactaccgcatggctgccttggagcagtgcctgtcagagccctgaggggtgtccaccggggacagacccaggggcgggcagagagggaaggagggaggaggcatcttccctgaagcccccaatctggcccccccctccccagacttcctccccaaaacaccccagctttctggcttttctgagggcaagggcatggtgcccacccctcaagtgtaaggaactgcgttccgcccctcaggcccccatgggggcagggatcggcttggaaatcaacgtggttgtccccgccaggccggggaaggttggagcagcccccagggaggggggcactaggtgtcattgtgcccgatgtctggctcccctgcaggagggaggctccagggtaagacagggctggcaggagcagactgcctcagcccatgtgccctgccggccagggcgtgggctcccctcggctgtggtgcctcctctggccccccaggtccacgtcctttaaattggccctttggctcttgcccttggctcccttgggcagacagcaggcttaggccattgatatcgcagttcttcctatcagcttcagtgacccagggtctgaactgcctccatcctagggcaacctggggcagacaggcctggtggggggtggggaaacctccttccacctgagcttgcttgaagggacccagagtctttgggcccagatctttaaacctttgtgtcgtgttgcagcagagtgacgatgggggttggggggttatttattttgcctgtccttatccctgcttggacacctgagcatctgattcctgtccccctggtgccatctggcctggctggagccaggaacaggagggacacttccccagaatccgcatgtttccccagtgattacactccactgccaccgtggtgcctggctttaactcccacccctgctatgactcctctctgcagagacgcgactggcggctccagcagggactacctttcttataaacccagggggaccacacacacacacacacacacacacacacacacacacacacacacacacactcttgatcccttgcttccctcccccagtgcgttctgtgatcgccaagttcaaagctgtgcacatgtggacactcaataaatgttcattggtg

SEQ ID NO: 19970 - DNA, 1390 bp, Homo sapiens
  source 1..1390: mol_type = unassigned DNA
tattggcccattttacaagtaaagaaacagacccagaaaagttaattacccaaggtcacacagtgagcatctaaggcagggtttcaacgcaggcagtctgattccaggctgtgccctggctcctgcatgtgtctacacagaggactagggaagggtctgacacagcagctggcctgtccgattcatgccccactccttccgttaccttgcagctcttcagggaacaccagcatcccgagggttcttcgcagctgccatcctcttcctatcacagtcccacgtggcgcgggccaccccgggctcagaccaggcagtgctagccctgtcccctgagtatgagggcatctgggccgacctgcaggagctctggttcctgggcatgcaggccttcaccggctgtgtgcctctgctgccctggctggcccccgctgccctgcgctcccgctggccgcaggagctgctccagctgctaggcagtcagccccaactctgtcaagcccgagatggtggccgcctatcagggtgtcctggtggagctggcgcgggccaaccggctgtgccgggaggccatgaggctgcaggcgggcgaggagacggccagccactaccgcatggctgccttggagcagtgcctgtcagagccctgaggggtgtccaccggggacagacccaggggcgggcagagagggaaggagggaggaggcatcttccctgaagcccccaatctggcccccccctccccagacttcctccccaaaacaccccagctttctggcttttctgagggcaagggcatggtgcccacccctcaagtgtaaggaactgcgttccgcccctcaggcccccatgggggcagggatcggcttggaaatcaacgtggttgtccccgccaggccggggaaggttggagcagcccccagggaggggggcactaggtgtcattgtgcccgatgtctggctcccctgcaggagggaggctccagggtaagacagggctggcaggagcagactgcctcagcccatgtgccctgccggccagggcgtgggctcccctcggctgtggtgcctcctctggccccccaggtccacgtcctttaaattggccctttggctcttgcccttggctcccttgggcagacagcaggcttaggccattgatatcgcagttcttcctatcagcttcagtgacccagggtctgaactgcctccatcctagggcaacctggggcagacaggcctggtggggggtggggaaacctccttccacctgagcttgcttgaagggacccagagtctttgggcccagatctttaaacctttgtgtcgtgttgcagcagagtgacgatgggggttggggggttatttattttgcctgtccttatccctgctt

SEQ ID NO: 19971 - DNA, 986 bp, Homo sapiens
  source 1..986: mol_type = unassigned DNA
cctcatccttgcgtaaggaggtgtgccagctgctgcccttcctcgtccgctatgccaagaccctctacgaggaggccgaggaggccaatgacctttcccagcaggtggccaacctggccatctcccccaccaccccagggcccacctggccaggagacgctctccggctcctcctgcctggctggtgccacctgaccgttgaagatgggccccgggagatcctgatcaaggaaggggccccctcgcttctgtgcaagtatttcctgcagcagtgggaactcacatcccctggccacgacacctcggtgctgcctgacagcgtggagattggcctgcagacctgctgccacatcttcctcaacctcgtggtcaccgcaccggggctgatcaagcgtgacgcctgcttcacatctctaatgaacaccctcatgacgtcgctaccagcactagtgcagcaacagggaaggctgcttctggctgctaatgtggccaccctggggctcctcatggcccggctccttagcacctctccaggctccatcagttcacagctaccaggtgctgaacacatgccctgctaaacacatcatgagacctcattcagcccttccaagaatcctctgaagggttctgattttacagacaaagcaactttggcatggataagtgattggctcaaggtgttgccgctagtcagtgccagagccaggactccacacaggccatccgactccccagcccacatctttcacttgtacagcagattgccaaactcatgttgatgtggccaggccttgtgggggctctggtgctctcaagtacagatgaaacactgcacccccgcccccatgtcactgggttgctgccaagtggccctgccatatcctcccatttttaaagaagtcaggaatcctaatttgtatgtgaaacccaacttttgaatgtcagtaactatctttaattaaataactactgatccaacaaaa

SEQ ID NO: 19972 - DNA, 930 bp, Homo sapiens
  source 1..930: mol_type = unassigned DNA
ctgagagccctggctggaggggtggggtccccaaaggggcctccaagccttccctgttgagcgtcttgtattctcacttctgaagcgtatctctgcctctgaagaagggaggggaaaggaagcctggggtgtccttttctcccatgtcagcctgagtccggataatcgaacttcacccatttgggcaaggcgagcatcatggcctcggattgcgagccagctctgaaccaggcagagggccgaaaccccaccctggagcgctacctgggagccctccgtgaggccaagaatgacagcgagcagtttgcagccctgctgctagtgaccaaggcagtcaaagcaggtgacatagatgccaaaactcggcggcggatcttcgatgctgtcggcttcaccttccccaatcgtctcctgaccaccaaggaggcgccggatggctgccctgaccatgttctgcgggctttgggtgtggccctgctggcctgcttctgcagtgaccctgaactggccgcccatccccaagtcctgaacaagattcccattcttagcaccttcctcacagcccggggggacccggacgatgctgcccgccgctccatgattgatgacacctaccagtgcctgacggctgtagcaggcacacccagagggcctcggcacctcattgctggtggcaccgtgtctgccctatgccaggcatacctggggcacggctatggctttgaccaggccctggcactcctggtggggctgctggctgctgccgagacacagtgctggaaggaggcggagcccgacctgctggccgtgttgcggggcctcagtgaggatttccagaaagctgaggatgccagcaagtttgagctctgccagctgctgcccctctttttgcccccgacaaccgtgccccctgaatgctaccgggatctg

SEQ ID NO: 19973 - DNA, 3402 bp, Homo sapiens
  source 1..3402: mol_type = unassigned DNA
attttcaaatccccggatgacggcggtggcggctgcagtccgctgacaggcgctttctgcctggcagaggctggcgggcatcgtgcccgtccctgccggtctcccgggcacccggccaccgccccaccccctcctccgtgccatggagcccgagctggcggctcagaagcagcctcgaccgcggaggcgaagccgccgggcctctgggctcagcacggagggagcgacggggccttcggccgacacctccgggtcggagctggacgggagatgttcccttcggagaggcagctccttcacattcttaacacctggccccaactgggacttcactttgaaaagaaaacgcagagagaaagatgatgatgttgtaagccttagcagccttgatctgaaggagccaagcaataaaagagttcgacctctggctcgtgtcacgtccttggcaaatttaatctctcctgtaagaaatggagctgtcagacgttttggtcaaacaatacagtcatttacccttcgtggtgaccacagatccccagcctctgcccagaagttttctagcaggtcaacagtcccaacacccgccaagagaaggagcagtgcactgtggtcagagatgctggacatcaccatgaaggagtctctcaccaccagggagatcagacggcaggaggcaatatatgaaatgtcccgaggtgaacaggatttaattgaggatctcaaacttgcaagaaaggcctatcatgaccccatgttaaagttgtccatcatgtcagaagaggaactcacacatatatttggtgatctggactcttacatacctctgcatgaagatttgttgacaagaataggagaagcaaccaagcctgatggaacagtggagcagattggtcacattctcgtgagctggttaccgcgcttgaatgcctacagaggttactgtagtaaccagctggcagccaaagctcttcttgatcaaaagaaacaggatccaagagtccaagacttcctccagcgatgtctcgagtctcccttcagtcgaaaactagatctttggagtttcctagatatccctcgaagtcgcctagtcaaataccctttactgttaaaagaaattcttaaacacactccaaaagagcaccctgatgttcagcttctggaggatgctatattgataatacagggagtcctctctgatatcaacttgaagaaaggtgaatccgagtgccagtattacatcgacaagctggagtacctggatgaaaagcagagggaccccagaatcgaagcgagcaaagtgctgctgtgccatggggagctgcggagcaagagtggacataaactttacattttcctgtttcaagacatcttggttctgactcggcccgtcacacggaacgaacggcactcttaccaggtttaccggcagccaatcccagtccaagagctagtcctagaagacctgcaggatggagatgtgagaatgggaggctcctttcgaggagctttcagtaactcagagaaagctaaaaatatctttagaattcgcttccatgacccctctccagcccagtctcacactctgcaagccaatgacgtgttccacaagcagcagtggttcaactgtattcgagcggccattgcccccttccagtcggcaggcagtccacctgagctgcagggcctgccggagctgcacgaagagtgtgaggggaaccacccctctgcgaggaaactcacagcccagaggagggcatccacagtttccagtgttactcaggtagaagttgatgaaaacgcttacagatgtggctctggcatgcagatggcagaggacagcaagagcttaaagacacaccagacacagcccggcatccgaagagcgagggacaaagccctttctggtggcaaacggaaagagactttggtgtagagaaggctctgtgtgttaactgatgggagagactgtttgtttataaatgtgtacagttttgttttctcgtaaggggagcatcatagggttactttataccagttgtaacattttcattgtttttggttgttcttttttctttttttaatggcagctaaagatatacagattactgttaaattgcagtccttttttttttaaagatattttcttgaattatttagaacatggtaagcctggtattttttaatcaaacaaaatatttatgaaatgggttttctcttaattctggattcatcatggctttctaataccaattgtaatatttacaatattcaccaaaacttagaattttgcaaatgctggaattctgccagtgtttctttgctaagccttgcatgcaaaatttgaaattttaacattggcacccaaaacctacatggaatgtatgtctggagtatttcaaactttacattgaaacataatttccttggaaaacaaaccataagcctgaggaggtttttatcaactggaatgctttatattagtttgtttttcactgtacattcctcattttacattcatttaacctgccgattatttaatttttttattgtaaagtagtttttagcatttgcttttatttttttactttgatgccttttcaaattggcatgtctttaaagtatttttcttcctgattaaaaatgtgtgtgtatgtgtgtgtgtgtgtgtatatatatatatatttttaaatcacattaattttaccaagtgaaaccaagccatactgtttttgagccaattaagaaaattgccatttttaaagtgtagcatttcagggtaaagacccatgaaatggcttgatgtattctagactactgaaagaaaaccacttcaaagattttgttgaaagttttagtgttgtctgaaatgcaagagggaaggtgattggtagtgagttaaaagaaaaagagaggaaaagagagtagttttgtcttcaagtaaaatgtctggttgtgccagacatttcacaagtgtgaaaggagataggagaagctcaacttgagggcgtgtagtaagttgtagaaggctcgaggggacgtggacttatttgccttggtttgcaatacctgcaaataatgagtttgaaaagaaacaatgaaatgtgttaaaaatttgaccatattagataaattttcgtggatttagtcataagatggaaaaagactggtgaatcttttattacaaaatgtttctgttaaaatgggatcatcatctttgaaaggggggaggaggagtaaaagcccgattataatggtgatcaattcaagtcagtgttgactattctgtgaaatatatttggccagtggaaatgataatcagaaaagactgtaaatagatccatccaaatgatttctctgtacaaatgaatgatactattaaaaaaaaaaaaagcacacacataa

SEQ ID NO: 19974 - DNA, 2689 bp, Homo sapiens
  source 1..2689: mol_type = unassigned DNA
atggtggcacatgatgagactggaggtctcctacctattaaaaggaccatacgagtcctagatgtcaataaccagtccttcagagaacaagaggaactcacacatatatttggtgatctggactcttacatacctctgcatgaagatttgttgacaagaataggagaagcaaccaagcctgatggaacagtggagcagattggtcacattctcgtgagctggttaccgcgcttgaatgcctacagaggttactgtagtaaccagctggcagccaaagctcttcttgatcaaaagaaacaggatccaagagtccaagacttcctccagcgatgtctcgagtctcccttcagtcgaaaactagatctttggagtttcctagatatccctcgaagtcgcctagtcaaataccctttactgttaaaagaaattcttaaacacactccaaaagagcaccctgatgttcagcttctggaggatgctatattgataatacagggagtcctctctgatatcaacttgaagaaaggtgaatccgagtgccagtattacatcgacaagctggagtacctggatgaaaagcagagggaccccagaatcgaagcgagcaaagtgctgctgtgccatggggagctgcggagcaagagtggacataaactttacattttcctgtttcaagacatcttggttctgactcggcccgtcacacggaacgaacggcactcttaccaggtttaccggcagccaatcccagtccaagagctagtcctagaagacctgcaggatggagatgtgagaatgggaggctcctttcgaggagctttcagtaactcagagaaagctaaaaatatctttagaattcgcttccatgacccctctccagcccagtctcacactctgcaagccaatgacgtgttccacaagcagcagtggttcaactgtattcgagcggccattgcccccttccagtcggcaggcagtccacctgagctgcagggcctgccggagctgcacgaagagtgtgaggggaaccacccctctgcgaggaaactcacagcccagaggagggcatccacagtttccagtgttactcaggtagaagttgatgaaaacgcttacagatgtggctctggcatgcagatggcagaggacagcaagagcttaaagacacaccagacacagcccggcatccgaagagcgagggacaaagccctttctggtggcaaacggaaagagactttggtgtagagaaggctctgtgtgttaactgatgggagagactgtttgtttataaatgtgtacagttttgttttctcgtaaggggagcatcatagggttactttataccagttgtaacattttcattgtttttggttgttcttttttctttttttaatggcagctaaagatatacagattactgttaaattgcagtccttttttttttaaagatattttcttgaattatttagaacatggtaagcctggtattttttaatcaaacaaaatatttatgaaatgggttttctcttaattctggattcatcatggctttctaataccaattgtaatatttacaatattcaccaaaacttagaattttgcaaatgctggaattctgccagtgtttctttgctaagccttgcatgcaaaatttgaaattttaacattggcacccaaaacctacatggaatgtatgtctggagtatttcaaactttacattgaaacataatttccttggaaaacaaaccataagcctgaggaggtttttatcaactggaatgctttatattagtttgtttttcactgtacattcctcattttacattcatttaacctgccgattatttaatttttttattgtaaagtagtttttagcatttgcttttatttttttactttgatgccttttcaaattggcatgtctttaaagtatttttcttcctgattaaaaatgtgtgtgtatgtgtgtgtgtgtgtgtatatatatatatatttttaaatcacattaattttaccaagtgaaaccaagccatactgtttttgagccaattaagaaaattgccatttttaaagtgtagcatttcagggtaaagacccatgaaatggcttgatgtattctagactactgaaagaaaaccacttcaaagattttgttgaaagttttagtgttgtctgaaatgcaagagggaaggtgattggtagtgagttaaaagaaaaagagaggaaaagagagtagttttgtcttcaagtaaaatgtctggttgtgccagacatttcacaagtgtgaaaggagataggagaagctcaacttgagggcgtgtagtaagttgtagaaggctcgaggggacgtggacttatttgccttggtttgcaatacctgcaaataatgagtttgaaaagaaacaatgaaatgtgttaaaaatttgaccatattagataaattttcgtggatttagtcataagatggaaaaagactggtgaatcttttattacaaaatgtttctgttaaaatgggatcatcatctttgaaaggggggaggaggagtaaaagcccgattataatggtgatcaattcaagtcagtgttgactattctgtgaaatatatttggccagtggaaatgataatcagaaaagactgtaaatagatccatccaaatgatttctctgtacaaatgaatgatactatt

SEQ ID NO: 19975 - DNA, 3253 bp, Homo sapiens
  source 1..3253: mol_type = unassigned DNA
aagcctctgctccaccgcggcgagaggcatgggcacgtggctgccgagggtggccgagctctgggaagaaaagcccgtgtgcctctgcatagcgtcgctacagcgctgactcggtgtggattgattggaaaggtttgagggagtacttgggaagcatggtggcacatgatgagactggaggtctcctacctattaaaaggaccatacgagtcctagatgtcaataaccagtccttcagagaacaagaggagccaagcaataaaagagttcgacctctggctcgtgtcacgtccttggcaaatttaatctctcctgtaagaaatggagctgtcagacgttttggtcaaacaatacagtcatttacccttcgtggtgaccacagatccccagcctctgcccagaagttttctagcaggtcaacagtcccaacacccgccaagagaaggagcagtgcactgtggtcagagatgctggacatcaccatgaaggagtctctcaccaccagggagatcagacggcaggaggcaatatatgaaatgtcccgaggtgaacaggatttaattgaggatctcaaacttgcaagaaaggcctatcatgaccccatgttaaagttgtccatcatgtcagaagaggaactcacacatatatttggtgatctggactcttacatacctctgcatgaagatttgttgacaagaataggagaagcaaccaagcctgatggaacagtggagcagattggtcacattctcgtgagctggttaccgcgcttgaatgcctacagaggttactgtagtaaccagctggcagccaaagctcttcttgatcaaaagaaacaggatccaagagtccaagacttcctccagcgatgtctcgagtctcccttcagtcgaaaactagatctttggagtttcctagatatccctcgaagtcgcctagtcaaataccctttactgttaaaagaaattcttaaacacactccaaaagagcaccctgatgttcagcttctggaggatgctatattgataatacagggagtcctctctgatatcaacttgaagaaaggtgaatccgagtgccagtattacatcgacaagctggagtacctggatgaaaagcagagggaccccagaatcgaagcgagcaaagtgctgctgtgccatggggagctgcggagcaagagtggacataaactttacattttcctgtttcaagacatcttggttctgactcggcccgtcacacggaacgaacggcactcttaccaggtttaccggcagccaatcccagtccaagagctagtcctagaagacctgcaggatggagatgtgagaatgggaggctcctttcgaggagctttcagtaactcagagaaagctaaaaatatctttagaattcgcttccatgacccctctccagcccagtctcacactctgcaagccaatgacgtgttccacaagcagcagtggttcaactgtattcgagcggccattgcccccttccagtcggcaggcagtccacctgagctgcagggcctgccggagctgcacgaagagtgtgaggggaaccacccctctgcgaggaaactcacagcccagaggagggcatccacagtttccagtgttactcaggtagaagttgatgaaaacgcttacagatgtggctctggcatgcagatggcagaggacagcaagagcttaaagacacaccagacacagcccggcatccgaagagcgagggacaaagccctttctggtggcaaacggaaagagactttggtgtagagaaggctctgtgtgttaactgatgggagagactgtttgtttataaatgtgtacagttttgttttctcgtaaggggagcatcatagggttactttataccagttgtaacattttcattgtttttggttgttcttttttctttttttaatggcagctaaagatatacagattactgttaaattgcagtccttttttttttaaagatattttcttgaattatttagaacatggtaagcctggtattttttaatcaaacaaaatatttatgaaatgggttttctcttaattctggattcatcatggctttctaataccaattgtaatatttacaatattcaccaaaacttagaattttgcaaatgctggaattctgccagtgtttctttgctaagccttgcatgcaaaatttgaaattttaacattggcacccaaaacctacatggaatgtatgtctggagtatttcaaactttacattgaaacataatttccttggaaaacaaaccataagcctgaggaggtttttatcaactggaatgctttatattagtttgtttttcactgtacattcctcattttacattcatttaacctgccgattatttaatttttttattgtaaagtagtttttagcatttgcttttatttttttactttgatgccttttcaaattggcatgtctttaaagtatttttcttcctgattaaaaatgtgtgtgtatgtgtgtgtgtgtgtgtatatatatatatatttttaaatcacattaattttaccaagtgaaaccaagccatactgtttttgagccaattaagaaaattgccatttttaaagtgtagcatttcagggtaaagacccatgaaatggcttgatgtattctagactactgaaagaaaaccacttcaaagattttgttgaaagttttagtgttgtctgaaatgcaagagggaaggtgattggtagtgagttaaaagaaaaagagaggaaaagagagtagttttgtcttcaagtaaaatgtctggttgtgccagacatttcacaagtgtgaaaggagataggagaagctcaacttgagggcgtgtagtaagttgtagaaggctcgaggggacgtggacttatttgccttggtttgcaatacctgcaaataatgagtttgaaaagaaacaatgaaatgtgttaaaaatttgaccatattagataaattttcgtggatttagtcataagatggaaaaagactggtgaatcttttattacaaaatgtttctgttaaaatgggatcatcatctttgaaaggggggaggaggagtaaaagcccgattataatggtgatcaattcaagtcagtgttgactattctgtgaaatatatttggccagtggaaatgataatcagaaaagactgtaaatagatccatccaaatgatttctctgtacaaatgaatgatactattaaaaaaaaaaaaagcacacacataa
